United States Patent Application Publication US 2012/0017292 A1 - sequence listing, part 6

SEQ ID NO: 20786 - DNA, 693 bp, Zea mays
  Peptide Sequence Number=SeqID_64161
atggcgagctcgtcggcgctcgccgtcccctccatccctctccctctcccgggcgcctataaaaggagccgcccgagccccgttctctccacaccagctccggccatctccttcgcttctccccgagccaatcgagctaacgccgccgcacttccccgtcgctccgcggaagagggattcgatcctccagaagttgtagctccggaagaagggcaagaacccgacccctccgagataaacctcttgtgccaggaaagcttcgacgaaggcaagtccatccttcccttgatgcattatttacctatttctctctaccactacctaagcctggaatgtgggatggaatcaaattgcatgatggaaagctcttgggtcattaggacatcatactgctcagaggaggaaggctttcctcaccttctacggagttgtggactgcgcatggggatccgcaagaagcccgaatatgtctggaaggaatacaacgaaaatggaatagagaaatgctctatggcagtctacctgggagaaagccgaagctacccaaaccaccccccttccaagtcaccttcatcgggcaccgcttcccagacacttgccaaagtgttgcccgaaaggcccttaaacagctatgccaaaactacaacagagagatctttgaaacccccttcgttatttcccacccagcaataa

SEQ ID NO: 20787 - DNA, 432 bp, Zea mays
  Peptide Sequence Number=SeqID_64162
atggagaacggcacccgaccccaccgcatgggcaggtctaagggcaccacgtggcaaggaaagataatacgtcctaggatgcatcattgggtctggacctccacagagggacaccggacccctgccttagcaaggtcccgggacggggaggaccccggtgtgagtaagggtccggtgctgacactgcgcccatgccgtgtggcgcactgtgctcgtcatcccttctacaagaagctttccctgcacgccgaggatatgcagatctcggatgtcaagcataagaagattgccccagcagcgaacagttgtggctccaaggcgggtgcactccgccacccggccggagatttcctctccgacaccagccgaagccaaaagcatagggtgatgttagcgaagcctgatgagccaaagcttactctgacgatctga

SEQ ID NO: 20788 - DNA, 870 bp, Zea mays
  Peptide Sequence Number=SeqID_64163
atgcctcgttcctcttgcattcatcgcgcccttccgcctttcgggcctcgagatggggtgcgccggtgttctctggagggatccgcgtcagagccaccccctccggcgatctcaccgccggagagctcgtgctcgtggtggtgctgtcaatcttatattcttcttggtgctgctagaggagcacaaccctgtgggggttggcgcttttacgccatcgctcagcttcaaggattttcatcatgcagcccggctgcaatctcctgccagtggtcatctaaagggatgaccaccagccttgtggcggagagaagcgagccggactgcggcctcccccctgccctcagcttcaaggatgttcatcatccacgctggggaggagggcgagccgagttggggtctcgccttccgcatgggctggcggcctgcttcttcctccagcattcaggggagaagggcgttcaccagccttgcgaaggaggcgaacttcaggttcgccacatccacaacttctcccgtgccgccggccgcaccggggggccgtacaaggcgtcgtgcgccgcgggggcagcggccgcgttcttggatggtcttgtcctcactcccttagtgaggacaggagcgaggacctcttcgcgcgtgctgaggcagccaccgcccactgatgcagaggtgacagctgtcgtcggtgctgaggtggtcgccgccgctggtgaggctgcccgttgcagaggtggttgcctccgttggcgagaccatcagcgccacctgtcgccgagcctccaactctttggctttaatggcctcgttgtcgccccccgtaggaagacggggggtgaggaccttttcgcaatggcgcacgtgctagggtga

SEQ ID NO: 20789 - DNA, 459 bp, Zea mays
  Peptide Sequence Number=SeqID_64164
atgtcttcgctggaggctcctactccggtggagacaactagacagaccctagagggacctcgtgctccccggtctacggggttgaagcctgccttcccccagaaacccttctggactccccacggacccaggcttccgacagatggggacccagggtcgggacctagccctatggcaagtaccaaaccaagaagggctccgcaactctcccccagctgggaaggacccttcaaggtaacgggaatgcaccgacccaagggcaaccatctagctacgactgaaggagtgccttaccccgatgccggaacatctctatccagatcccggcgaggttgcctcccgagagttgttgacaaccttttcagatacgctggtatccaacctcaacacatgaagcctgcatcccaggcagggggaccaggtatgaactacctccacacctatagggccgcgggatag

SEQ ID NO: 20790 - DNA, 348 bp, Zea mays
  Peptide Sequence Number=SeqID_64165
atggcaggaatgtactgcaacgcccgcgactgcctcaacaagagaatgcagccgccggcccgcaccgctgcacggatcctcctctcccccgtcgacaaggcgaaaggctcggcgaggaagaaggaccgggaaagggggataccccgaaagggatccttctccgcgaaggaaccgggctccgagccccccattactgatcaggggttcgaaggctggccccccgagggttcaacagtcgcctcagatcgcgtgggcccgacacccactactggtcaggggttcaaaggccagccccccgaagggctccatggccgcctcaggctactcgggctccgcgcccattactga

SEQ ID NO: 20791 - DNA, 477 bp, Zea mays
  Peptide Sequence Number=SeqID_64166
atggaggtggcgacagcatctcgagccatgacaccgacttttctgctgaccagaagccagaaggatgggttgctcgacccattactcgcgacgctgctcgcggtcttccagcacagtcgtggggtctacccggaccgctgggaggcgacctgcttggtgcgccgtccggagaacagtctctggggtgctgagcccagatgggtcgagcgcgtgggcgagcgcgaaggggggagaggcgaggcggccggagccgagcgtgagagaggtggaagtcccgcggccttcgtgttcgtcccgcgcccaggtcagggcgacgtggggtttcctccgaagccgaggttgagtctgccttctgttgccgtggccgagcccgagccaaggggtcgggcgaggcggaagtcgttcggccgaggccagggcggagtccgagccctggggtcgggcgaggcggagttttcgtcgtcttccgggtcttag

SEQ ID NO: 20792 - DNA, 141 bp, Zea mays
  Peptide Sequence Number=SeqID_64167
atggtgctgtcagtggcgcaccggacactgtccggtgcccaggccgagcaccttctcgaactggccactctcgggtttctcaggaagccactctgctataattcaccggactgtccgggtcttagtgacccaagtgattaa

SEQ ID NO: 20793 - DNA, 456 bp, Zea mays
  Peptide Sequence Number=SeqID_64168
atgcaggcggcatgcaactgcaccaaggggatgcacctttttgacttcgacgcgtccagcatggaggctcaggcccacacgtcatgtaaccggcacgccggttactacgtgcgagaaactgcaccgctgcttgcgccaataccgtgccttcttgactacggaaccggtgccgcgactcgaggcgaccctgcgcatggctcaacagtgccaaccgaacacatcggtcacggggaccgggaaaggggatactccgaaagggatccttctccgcaaaggaagcgggccccgagccctcctactgatcagaggttcgaaggctggcccctcggaagggttcgacagccgcctcagagcactcgagctccgcgcccactactggtcagaggttcgaaggttggcccctcgaaagggttcgacagccgcctcaggccactcgggctccgcgtccactactga

SEQ ID NO: 20794 - DNA, 999 bp, Zea mays
  Peptide Sequence Number=SeqID_64169
atgtcttctcgctcccttatgcgtcgcgtctttccaccttccaagcccccggatgggggcccggccgcacccctccaccggcggtcacccaagatggtgacctccagcttgatggtgggggaaagcgagccaagctgtagcctctccccctccctcagcctcaaggattttcatcaccaaggctggggaggggactgcagcgtgcccggctttcggacgcgagtggcttcggagccgctcgcagcgccggcgtctgccacggcagctggaagaggttcttccgccggtgtgatagccaaggctggccacggactgacctccaactctacggccttctgcccgtccttgccttacgagttttggcatgggcgggggcctcctagcagcagcacccgccctgaggtcagtgctgccgctgttcggccccccggagcagaagtcgtcgtcgtcgctgctgctggagcaggtgacggcgcgccgttcgtcggtcttccgttgctccgcaggccttcccccatggagtggggttgttcgtacctgcggagggggaaccggagttccatttgtaatggcactttgaatgccgactcgcctgttgattatctgaaccgcttcaccaagcatgagtcgccccgtgtcaaggtgacgagtgagcacgaacagaggcggagttggctcgaaaatgaaaacctggttggctggagcctagccgggttgtccgtcagtgggaccgatgccggagttgatcagccgaggcctcggaccgggctggcgccctcggaggatggttggccgaggcccctgggggatgtttgtgcgagcgagagttgcttctcgcagaaggtgatgagtgagaaggtgatgagtgagaaagcacggaaggcattctggcagaagagatcttttttcgaggaaaattttaacgcagagggggtttccccccttttagcccctgagggagggtcgggctttgccgaggcgaggccgacccttccttga

SEQ ID NO: 20795 - DNA, 207 bp, Zea mays
  Peptide Sequence Number=SeqID_64170
atgccgcgctgcctcccagcctgtgtcgtggcctccccgacagcccacgcccagccccgctctgccgctaccccacgccgcctcccagcccacgccgccgcctcaccgcctcgactcgtcgtcccgtgtcatcgctgctcagcctccggtcccgcgtcgtcgtcgccgctcccacgctcctccgcaccaccgcgacatagattttag

SEQ ID NO: 20796 - DNA, 672 bp, Zea mays
  Peptide Sequence Number=SeqID_64171
atggaggttcgctgccaaaccagcttttgccagaatgaagatggtttccccaagttgctaagagcatgcacaattcgcctcggaataacgagccagccagagtatgatggtcgtgaattcatcaagcatggcacagagaagtgtgtcgtgactgtatacattggatccagtctgcaccatgtggaatggagtgtcactgctgctgggcacagattcaaagacacctgccaagtcgtcgctcgcaaggcattgagggccctatgtcagatctatgaagaagaaaaagatgcagagaagagcaattgtcagctccatgtggatatcacctcaactcaagcccatgcaactgccttggaaagtcgtgaagtcatttttgttcaagccctgaagcaagccaaggatgagcacgtccagaagttgatggaggcctacttggtaacccataaccaacatagagccatttggatccaagagcccacttcatccaatccagttcaacccatgagtgctgaagatccccagattcttgaaggtcacctggtctctgtcagaggagagaagaagacttgggaactcccggatggagccatagtcttggaaggatttccagtcttccctaaggatatggataagcaagagcaccccgagtcctcccaagatcccccgccatag

SEQ ID NO: 20797 - DNA, 677 bp, Zea mays
  Peptide Sequence Number=SeqID_64172
gtctggtgagggcacggggagtctctggtggtgtctggttcggggctgaggcacgagggggcggttcacggcggaactggctcggcgcgggattactctactccggcgaggaattatcgcagcagagagcaaagcaaaggtcgatagggccgggagaggttccatacctcaaggcgggctccgggactcctcggcggcggcaatggtgcgacggtggcccggggcgacagtggcggacctccgcggctgcacggggaacgacgggtgagcgcgggcagagagaaatagggagggggagagggaattggggcgcgtcccgggttgcggacaccggggcgaagctcaccgtggcaacggacacggcggagctccgacggcggccgagaaacgagctcgggacggcggggtttacggcggcggcgctctgcgtgcgcgcagcgaggggggaagagggtctactggagcgcaaatgggggagggggagagggcgagtggggctcggggctcaagtggccaggggcgggtcagttgcgagctccacgcgcgacgtgggcgcggagaaggcgggcgcacgcagctcggcggcggttacgcggggacgacgggctgacagcccgggcccgcgagcagagagagaggggagagcggaggcgggcgcgcgagaggcgctgcgctga

SEQ ID NO: 20798 - DNA, 975 bp, Zea mays
  Peptide Sequence Number=SeqID_64173
atggctcgtcttagacacactgcacgtaagtcggtgattcctttcctgccgtctcgacttgcggagcgtcctcttcaccgcaccgtgtccggtcagtcgagtcacctggagaggctgcaccaccgcctgcgtgaggagcaggaacgccggcgccagcacagagagcagcagggctcttcctccccaccccagcaagaggtggagtccgtgaggccccgttcctctgttgcccagctggaggcgccccctgtaccacagcgggacgtcccggctgttggaggagctactggaggaggttctggaggagaccccgacgacgacgactcagaccacagcacggagtcttctgagccgcaggaggcagaaggatgggtcgcccgacccatcacccgtgacgccgctcgcggttgtcacttccacgacgcactcgacaccttgctgcgccaggcttttcgaccggcacacctggtcgatcgagtatcgttgtgtagtctaccagcacagtcgcgggaggatgacctccggggtgcggaggccgtttcggagcactattccatctccgagagggacactgcagaggcggctatgcaggatgcagcatggcgtgcactctctcagtactgttctttgttcggtggcgtggccgatggtcttaaccttcggtactacccccgccgccctactggcagcacagagagtgtggttgtctcacctgttggtgaggctaaccctaggttgagcagcacagtcaacctagtcgcagtgcttaacactgagctggaccactctctggacgagctaagcagggctcgaacggagattgcggagttgcgtgctgagttggcagagcgccatcaccaggagggtggttctcccgcacctgttgggactcagcacccataccgctcgccgccacgtggtcaccacacttatggttcccctgtctgtaagaccaggatagatctggatccttag

SEQ ID NO: 20799 - DNA, 777 bp, Zea mays
  Peptide Sequence Number=SeqID_64174
atggctcgccttagacacaccgcacggaagtccgtcatccccttcttaccctcccgtcttgctgagcgtccgcttcgccgtcccgtggccggtcagtccagtcacttggagaggctgcaccaccgcctgcatgaggagcaggagcgtcgacgacaggagcagcagggctcttctttctcgctccagcaggagatagagtctgtgaggagctgctcccccgtgcttcccctggaggcgccccctgcaccaccactgggcgccccagcctctggagtagctgctggaggagacccagacgacggaggtggcgacgacagctcgagccacgacaccgacttctctgctgaccaggagccggaaggatgggttgctcgacccatcactcgcgacgctgctcgcggtcgcggggtctacccggaccgctgggaggcgacctgcttggtgcgccgtccggagaacagtctccagggtgcggaggcctgcttagagcactattctatctctgagcgggactcgactgaggcggccatgcaagatgtcgcacggcgaggcgtgattgtctcacctgttggtgaggacaatcctaggttgagcagcacagtcaacctagccgccgtgctaaacacggagttggaccatgcgctagacgagctgagtgcgcggagcatcgtcacctggatgatggttcccccgctcccgtcgggactcagcacccataccgctcacctcggcgtggacaccagtcttatggcaatcccgactgcaagactaagataa

SEQ ID NO: 20800 - DNA, 471 bp, Zea mays
  Peptide Sequence Number=SeqID_64175
atgggcaagggcaagagaggtcggggctcgcctcatcgtgccggcgacaagaggaagcacgatccaagtcctccctcggaggacttcggcgactctgagtattcagaggaggaggtttcctctgagtccgaagggtcgctagcccttgcctctcccccaacgtcgttcgatgattcggacgactcccaggtgctggccgctgaggtgtggacgtacatctgctccgtcaagcgtgtcgggctcaaagggtcggatgagtcggaggtctcctcggatgaggaggactccttcggctcgtccgaggagagaagtggcgacgacaacaacgacgagggcggtgacggtggcgacgacagcaacggcggcgaaggcaacgacgacggcggcaatggcggcaaaggcgacgacggcggcaacggcggtagtggcagtggcggcggcaaggccagttgcaaggcgccactggtttaa

SEQ ID NO: 20801 - DNA, 560 bp, Zea mays
  Peptide Sequence Number=SeqID_64176
aagccttaagtgacccgttggtgtatcatcaccaggcccgattaatggaaagcattcctattgggcaggattccgttgaatcggcatctgctcgagttttgatggccgtgctagaattgcaacttactcgggggcacagtcgtcaaaagtggcagcagttgtacactgggagctatgcagcatttaagatgatggaaaaggccaagaatagtgcttgtactcaagcacaagaacgacttgaggaaacgaaggttcaagcggaacaggttattggactagagcatcaggtgacagaacttcagatgcaacaccaagctgatcagaatcgcattaaggagcttgagcatcagctaactaatgctcattctaaatcaaaaattctgagtcagcaactagaagaaattcacgtgtatgctgttgctgttagagaagaccttaaggaaaccctaagattcataaaccatcaggatcaggcggtcaaagaatttgaatcgtgctcatcccatggagtttcaaggttccttggaagaatggcaacaaacatctggcagatggtgtag

SEQ ID NO: 20802 - DNA, 180 bp, Zea mays
  Peptide Sequence Number=SeqID_64177
atggcggctctcagcttcttacggaagcagggggatgtcagcagggactcgaccggtggttatgagaatgatggttttggttatgactatggtgctggtaagtgggaattctttctcgtttggaaagggtacatcggggttataacttgggttaatgctaaaactttgcctttctactag

SEQ ID NO: 20803 - DNA, 711 bp, Zea mays
  Peptide Sequence Number=SeqID_64178
atggatcgtttcgaccagatggactggtgccagcttattttcaatgatttatgccaagctgccaagaagtggcatactatgagcgttacgaacgtttctacaaccatttacggatgttccatcgtcattcttctgtattatttggatcgtcttcatgactcagcggcacctcagaataaacgtggaacaccacacatcaaatattttgataggaatattattcaagcactgacaagagctgacaagggcaagatacgcaaaggagaagaaccatttggacattgttcgcataagaccaggacaaacacttttgatgtacctcgtcctaacccatctggacagcacacaattcacatcgaactcccgctcattagggatttgatatcaagcaagctgaatcagcttccatcccgccactgcctgggtttcatagagaagttgtcacattttgatacggaggttggtaaggcgtgttcagttattaaacagactcttcagcagattgttgagaaacaatacaatctatctgacgtttttggcgagttaattgatgaggtcctccgcgctgagtcgggggacaatgaagatggttatgatgtgcagaaaacaactacaaaatcagatgatattcttccccatacggtagttcacaggatgcgaagagaattggaccaaggcaatgaggatgcaacacctcaaaagaagacataa

SEQ ID NO: 20804 - DNA, 1200 bp, Zea mays
  Peptide Sequence Number=SeqID_64179
atgttgttactggttgccttctttacgcatttcctggtttcatcgctgagcagtgcggaggcggggcccccgtcgtcgtcggcaacggccaccaggtggcgcgagctgcagggcaacaactcgtggaacggcctcctggacccgctggacatggacctccgcaggtccatcatctcctacggcgagctggtgcaggccacctacgacggcttcaaccgagagcggcggtcgccgcacgccggcgcgtgcctgtacggccgcgccgacctgctgcccggcgtgggcgtggccgccgcgggccgctacgccgtcaccaggttcgtctacgccacgtcggcgctgcccgtgccggggtcggacttcccgctcctgccgctgccggagaccagggaggcgtggagcagggagtccaactggatcgggtacgtcgcggtggccaccgacgagggcgcggccgagctcgggaggcgcgacgtcgtcgtggcgtggcgcggcaccgtgaaaggacctggagtgggccaacgacttcaccttcacgcccggaagttttttttattgattttcaagatcattacatcgatcgagttagttctcgaggaggtgaggaggctgatggagttgtacaagggcgaagcgacgagcatcaccgtcgtcggccacagcctcggcgctgcgctcgccacgctgaacgccgttgacatcgccgccaacggcctgaacgaaggctccggctcctcccagcagctgccgtgcccggtgacggcgatcctgttcgcctgcccgcacgtcggggaccgtttcttccgggccgccttcgtcgggtcctttcgggacctgagggccctccacgtgaggaacgccggcgacgtcgtgcctttggtcccgccgctcgcgtacgtggacgtggccgtggcggtgctgccgatcgacacgagccggtcgccgtacctgcggtcgccgggcccggcggggacgctccacaacctcgagtgctacctgcacggcgtggccggcaagcagagcagcgccgccggagggttcaggctggaggtggaccgcgacgtggcgctggtgaacaagggcgccgacgcgctcagggacgagtacccggtgccggcgaactggtgggtgccagagaacaggtggatggtcaggggctccgagggccactggatgctcaaggacttcgaggaaatctaa

SEQ ID NO: 20805 - DNA, 345 bp, Zea mays
  Peptide Sequence Number=SeqID_64180
atggggcgggttgctaggagtagcagttcgggcatcgggaagagcgtcaggaccgcctgcgtgatcacccgtatcaagaccctcttccacgcctacccagacctaatcctcagcattagagccttcctgcccaagaggcatgccatcaggcctcaggacctccgcaaggacaaggagcccgtcgattatcccagggctatcagccttgtcaacagaattaaggtcaccttactattccatggccatccgcccatacctcctccgcaagcaggcacgacctcaaaagttaggcatgatgacaagaatgttataatgcattcggccatgagagatgagacagttcag

SEQ ID NO: 20806 - DNA, 405 bp, Zea mays
  Peptide Sequence Number=SeqID_64181
atgcaagcacgtgccatctttgaagctgctatagggatgaccaaccagggcgttcaagaattaggacatcaggtggcccttatccgtcaagtcgctaacaaagttttcaccggtatgggtaaaactattgggtacaagatcggaacgatgattgagattcccagggtagctctagtggctgacgagatcgacgccatcagaggctggctggatggagggaacgacacctcccctgtgaccggccagccgcttgcgcaccgggagctggcaccgaatctcgcgcttggtgccgtgatccaagattacacggtgatgaggcggtggcagtgccgattctgcgattcgcacgacgacgttgctcctgcgcttcaaattttcccctcccctgtgggctgcgagcggtga

SEQ ID NO: 20807 - DNA, 957 bp, Zea mays
  Peptide Sequence Number=SeqID_64182
agatactctggtacaggtggttatgagattgatggttttggttatgactatggtgctggtaagtggtattctttccgtttggaaaggatggctcgacttagacacactgcacgaaagtcagtcatccccttcttaccctcccgccttgctgagcgtccgcttcgccgtcccgtggccggacagtccagccacttggagagactacaccgccgcctgcgtgaggagcaggagcgtcgacgacaggagcagcagagctcttccttctcgctccagcaggagatagagtctgtgaggagctgctcccctgtgcttcctctggagccgccccctgcaccaccactgggcgtcccagcttctggagtagctgctggaggagacccagacgacggagatggcgacgacagctcgagccacgacaccgacttctctgctaaccctgagccggaaggatgggttgctcgacccatcactcgcgacgctgctcgcgggtgtcacttccatgatgcgctcgacaccctgctacgtcgggcatttgaccggcatacttggtccgtcgagtatcgctgtgtggtctaccagcccagtcgcggggtctacccggaccgctgggaggcgacttgcttggtgcgctgcccggaggacagtctccagggtgcggaggcctgttcagagcactattctatctctgaacgggactcagctgaggcagccatgcaagatgctgcacggctcaacctagccgccgtgctaaacacggagctggaccatgcattagacgagctgagtagggctcgtgctgagatcgccctgttgcgggctgagcgcgcggaacgtcgttatttggatggtggttcccccgctcccgttgggactcagcacccgtaccgctcacctcagcgtggacaccagccttatggcaatcccgactgcaagaccaagataactctagaaccatag

SEQ ID NO: 20808 - DNA, 282 bp, Zea mays
  Peptide Sequence Number=SeqID_64183
atggcccattcaaatcctaaccctaggtgggtgcagtgcaggtcgtcgcagcgccgctacgagggggaggggatcgaactcgaaggagaatttccattcgaccccatccacttctcacctcaatctcgcgagaagcgaagccggaggaggaggtggaagcgcaattggcccttcctcacggggttcgccatcaccggcttcatcatcactaagatgacggccaacttcaccgaggaggacctcaagaactccaagttcgtccaggagcacaagaagcgctga

SEQ ID NO: 20809 - DNA, 408 bp, Zea mays
  Peptide Sequence Number=SeqID_64184
atgccattacagatgggactctggttccgttcccgtgggtacgaacaacctccacatcgaagggcctacgggacgacgacttccaggtggctcgccgccgcccactcctgcagcagcgacaacgacctccgctccgggcggccaaacagcagcagcgatgacctcagggcaaacgctgctgcgacgaggccctcgcccacgtccccactcgaggggcgaggacaagctatcaaagccaaagagccggaggcccggagcgcagatggcgccgacgatctcgtcgacgacgaggacttctccagctgccaccacctcagcaccgacgacggcagccacctgcctaccggtagatccccactcaagtcctcccagacgggcgagcaccgaccttcgcgcagggcgtcgtga

SEQ ID NO: 20810 - DNA, 1188 bp, Zea mays
  Peptide Sequence Number=SeqID_64185
atgcaggcagcatgcaaccgcgccatggggatgcaccctttcgacttcaacgcgtccagcatggagtcccaggcccacacgtcatccgcgggagaaggcgcgacggtcgatatggccagaagtgggccgacagtaatggcggcagcaggcgagtggaagcggcggtcaaatcgtctgcaggctcacgtcccctcctggagcagcaggagagccctctcccacggcgtgaagacgacgcgcccgtgttccgttcctcgaacggctcgtgcatgcacaacggctgccccacgaaccactcgtcccgtcgcattaactccacggcagggcatgcgacacctttggcaggcgaagcgggcgacgcttcacctccgccataatgaccgcgtcaaaaaagggaccgggaaagggaatactccaaaagggatccttctccgcgaaggaagcaggctccaagacctcctaccgatcagaggttcgaaggctagcccctccgaagggttcgacaaccgcctcagagcattcgggctccacgcccactactggtccgaggttcgaaggctggcccctcggaagggttcaacagctgcctcaggtcactcgggctccgcgcccactactgatcaggggttcgtaggctggccccccgaagggttcgacagccgcctcagaacatgcagagtgagggatgactctggttacgttcgatacataaccaaggctcgggctacgctcccgagaaaggcgacgaaggggcatatgaaaaaagccgagttagtccctgaccgtcctctcgccctgtgtagaggctcgggagctgctctcgcaaacccggctccggccaaaccgttgacagcgtcaacataccagcccgagaactcagaacctgactatgcacccgggcaacgaccagggctactgtcggggaccataattaggggtacccccaagactcctaaaactcggctggaaaacagcgccgcctgcactgctccgactgctgtgccacccgctagggtgaggctgacagcagccaagtccagcctcgggcgccataggaagctccgcctcgcccgaccccagggctcggactcaacctcgaccccggaagacggtctccgcctcgcccgaccccagggctcggactcaacctcgacctcggacgacggtctccgcctcgcccgaccctag

SEQ ID NO: 20811 - DNA, 1611 bp, Zea mays
  Peptide Sequence Number=SeqID_64186
atgatagtgcaaagtttgttaaaagagacactttctacacgaagcaagctttctattggtgttgtgtgtccatacaatgctcaagttagagcaatacaggaaaaggttgggaaggcctgcaggaggaatgattatttctcagtgaaagtaaaatctgtggatggtttccaaggcgcggaggaagatataattatcatatcaacagtcaggagtaatggagctggtacagttgggtttctatcaaacttacagaggactaacgtggctctaacaagggccaaattggggaagacttacattcgacaactttactatatacccttctttgtcaaaggatttgatgataagccaatggttaaaagggctgtcattgtaacccccacaagcttagttagcaactgggaatctgagataattaagtggttgaaaggcagagtgcaggtgctggccctctgtgaaagcacacatgctgatgttctttccagaattgaaagtttcttaaaacccttgagccgtctccagttggttgtgaactataagctttgcgtcccgcggcgtgtctacctgtacttccgatttggatttatcagtgaaggggttctcgacactgaggaattagccattgtaaacaacacctttcgtaaggcccaaggttccaggctacctggaatcattgaggaaacgaggagatcaggggagtcaacaacctcaactctggaaagtgaaacctgggcgatggaaagccttgagactgaactatttgataatgttcgtgcttcgatccagagatctcttggcaaacctgataaactttcaggtcggcccgttgctgcctcaacccccccaaaggccacatcaaatgcacctcgtgttgcagtatggtcccatttctcttttgtcctatttcatattcttcatacgtttaagaacattctggtcaggggcagagctgctgttgagtctgaaatggaagttctgttgaagttgaggagtgaggtagaggaacagctgcagaacgtactgagcaagaaggtggaggtgtcgttcaagaagagtaggattgagaatctccaaaaggaatttgagagtgataactcggctgttgtgcaacttcaggcttgggcagaggaggaagccaaaaaggcccgggagcatgcacgcgcccttgaggaggcccggaaccaatgggagcgtcaaggaatcagagttgttgtcgaaggagaactgaaggatgacgcctcagctggggtgacatgggctaacgctggcaaagaacacgcagtcgacgagtctatcaaccgggcggaagctctgctggagaagctcaagacaatgtctggtgagatggaggtgcggtctcagggtgcggtggagagagtgatgcagcatgtgaggtccttcatcgcaatcctaaagcagcaagctgcagatgcaaggcagtggtgtaccgagtttggggcttgtgctgcttccagggcaaacgaggtatcagcacaagtgaagggaagcgtatctgcgtttggtgcaacccttggagacaagtcgaagagggcaatggaagagtgtaaggacggcctggagaggatttcacacagattcaagacagactag

SEQ ID NO: 20812 - DNA, 432 bp, Zea mays
  Peptide Sequence Number=SeqID_64187
atgggcaagggcaccaagcgcaagcgcgagccgactcctccgtcggacgagttcggtgactcggaatactcagaggaggagttctcctctgagtccgagggatccccagcccccgtctctcccccggcgtcgtccgatgactcggacgactcccaggggatagccgcggaggtctggacgtacatccgggccgtcgagcgctccgggctcgaaggctcggatgagtcggagtactcctcggatgaggaggactcggacggcggcgacgagggtgaaggcgacgacgacgatgacgacgacgacgacgacgacggtgacggcagcggcagtggcaggggcgacggcgacggcagcagggacagcaccaagggtggcagcagcaagggcaacaccaagggcggcggcggcggcaggggcagggccagtggctag

SEQ ID NO: 20813 - DNA, 752 bp, Zea mays
  Peptide Sequence Number=SeqID_64188
gaaataaaggactgaccagcaagcgatctcgtcggggcctggccatcgtgctgggcatgcgcaaggctgccgtgctgcctgccgcggacgcgctcacgccgggagagggcatgcgaggggaggaacgcaggtgccgcgcctgctggtggcttggcctatccgcgcaggggattgggtgcggtgccgcgccgccgcacgcaaggaagcagacgataggacgagggaaccgcggccatggcccctcggcgcgcacggcgggaatggagaggcacgtcaaattggctaccccaacgaggaagaaggcaaaatcgaaggttagggagagaagaagaagggagctcacctcggcggacgagcagtggcgacgcgggcccaccatccaggggtggcgtggagacggggcaggtgcgcgagcccgcacatggcggcggctgaagccgctgggcaactgcccagcgcccgcgaggcggatgagcgcgtccacgctctgcgcactggtggttgggccgtcgtgggcgctgcgcgctgggctacagacgctgccaggggattgggtgcggtgccgcgccgccgcacgcaacgaagcagacgataggacgagggaaccgcagccatggcccctcggcgcgcacggcgggaatggagaggcacgtcaaattggctaccccaacgaggaagaaggcaaaatcgaagggacgaacggtttcgagtttatggggagatctagaacgtgcgtcgtggaaggaggttag

SEQ ID NO: 20814 - DNA, 2082 bp, Zea mays
  Peptide Sequence Number=SeqID_64189
atgtcgtcaccctcctccgccgcccacgcggccgcgggccccgtcctacgcaccttcacagcgctcctcaagctctgcgcggcgcgcgccgatctcgccacgggccgcgccgtccacgcgcagctcgaggcgcgggggctcgcctccgagtccatcgcttccacggcgctcgccaacatgtacttcaagtgccgccgccccgccgacgcgcgcagggtgttcgaccggatgccttccagggaccgcgtcgcctggaacgcggtcgtcgctgggtacgcgcgaaacgggcttccatcgtccgcgatggaggcggtcgtgcggatgcagggggaggagggcggggagcggcccgactccgtcacgcttgtgtccgtgctgccggcctgcgccgacgcccgggcgctccacgcgtgcagggaggtacacgccttcgcgctccgcgccgggctcgatgagctcgtcaatgtctccacggcggtacttgacgcctactgcaagtgcggcgcggtggaggcggcaagggctgtcttcgattgtatgcctgtcaggaactccgtgtcttggaacgccatgattgacgggtatgctgacaatggtaacgccacggaggctatggctttgttctggaggatggtccaggagggcgtggatgtgacggatgcgtctgtgttggcagcactacaagcgtgcggggagcttggatatctcgatgaggtgaggcgtgtccatgagctacttgtgagagttggcttgagctccaatgtgtcggtgacgaacgcgcttatcaccacatacgccaagtgcaagagggcagacctcgctgcccaggtgttcaacgagctgggcaacaaaaagacacggatctcatggaatgccatgatcctcggcttcacgcagaacgaatgccccgaggatgcagagaggctcttcgctaggatgcagttggaaaatgtgagaccagattcgttcaccctggtcagcgtgattcctgcagtcgcggacatttctgatccgctgcaagcaagatggatccatggatattctatcaggcaccaactagaccaggatgtctatgtcctgacagcccttattgacatgtactccaaatgtgggcgtgtcagcatagctagaaggctcttcgattccgcaagggacagacatgttatcacctggaatgcgatgatccatggttatggttcacatggttttggccaggctgcagttgagctatttgaagagatgaagggcactggcagtttgcccaacgagacaacattcctctcggttcttgcagcttgcagtcatgctggtttggttgatgaagggcagaaatattttgctagcatgaagaaggactatgggcttgaacctggaatggagcactacggtaccatggtggatctacttggacgagctgggaagctagacgaagcttggtctttcatcaaaaacatgcctatagaacctggcattagtgtttatggtgcaatgttaggtgcttgcaagttgcacaagaatgttgaattggctgaagaatcagcacagataatctttgagctgggcccagaggagggggtgtatcatgtccttttggcaaacatttatgcaaacgcttcaatgtggaaagacgtcgcgagggtgaggactgctatggagaagaaaggactccagaagactcctggatggagtattatccagctcaaaaatgaggtccataccttctactctggaagcacaaatcaccagcacgcgaaggacatatacgcaagactggctaagctcatcgaagagatcaaagatatgggctatgtgccagacactgattcaatacatgatgtggaggatgatgtcaaggcacagctgcttaacacccacagtgagaagcttgctattgcatatgggctcattcgaacagcccctggcacgacaattcagataaagaagaaccttcgagtttgtaacgactgtcataatgcaaccaagttaatatctctactgacaggacgggaaataatcatgagagacattcaacgctttcaccattttaaggatggtaaatgttcatgtggagactactggtag

SEQ ID NO: 20815 - DNA, 132 bp, Zea mays
  Peptide Sequence Number=SeqID_64190
atggggctgggtggctacgaacgacggcattcccagcgaatcgacaacgcgtggaaacgtaactgtaaatgctccatgaagaagaacaggcattgggtccaccttcaaattgttacaaaatctaccccctaa

SEQ ID NO: 20816 - DNA, 304 bp, Zea mays
  Peptide Sequence Number=SeqID_64191
atgaactgttcattgtccggtgcatcggtatgggcgcgcctgccgactgcgcgcgcagagcgcgcattaaatgcgcttgcaggggtcgtcgccgctatccatcgccgaagggtgctccctttggaagagcggcggttgcggctctcagagatgaagtcggaggtcgatttggagggctcgcggatgtcctcgacctccctctccgccgacgaactcctcaagcgggtagcgggtacggtagggaggctggatgttggcgcccttagccagcccgtgatgcgtcccgttctgttgattgtccctg

SEQ ID NO: 20817 - DNA, 1988 bp, Zea mays
  Peptide Sequence Number=SeqID_64192
atggcggcgggccggggcgactgggaggacatggtgcgccggatgttcccgccggggaccaccatcccggagccgctgcccgacatggactactccttcgcgctgacgtacaacgggccggacgtgtcgtacgagctcccgcggatccagcccgtctgcgtccccgccatacccaccgccgagccggcctcggggcccctggggctcggcagcggcgtcgtgcccgtcgcgcccgtcgtcggccctgctgcggcccgtgcccgtgccaacccgccggcagcgtcccgggctggtgctgctgatcgccgtgccgcgaggatgacgccgtcggattcctccgatgacgaggaggacgacgccggcagctccggctcccgctccacgaaggcctcgaggcctgcagtgccggaggggaggcgacctcaggtggtcacgttcggggtgccggaggaggacagcggcggcaggtacgagagcagcgagatggacggcggacacgacgcggcgtccgccgagcagcacgtcgcggtgacgaggccggccgagaggaaagggcggacctgctgccgccgctgcgggaagagcaagtgggagagcaaggagtcgtgcatcgtctgcgacgcgcgctactgcggccactgcctgctccgcgccatgggctccatgcccgagggccgcaagtgtgtcacctgcattggccagcccatcgacgaggccaagcgctccaggctcgggaagggctctaggatactgtctcgcctgctcggccccctggaggtcaggcagatcctcaaggtcgagaaggagtgccaggcgaaccagctccggcctgagcagctcctggtcaatggtttccctcttgacgacgaggagatgaccgatttgcttagctgccaacgacctcctgggaacctcaagcctggaagatattggtatgataaggagtcaggattgtggggaaaggaaggtgaaaagccagacagcatcattagcactaacctcaactttaacggaaagcttcagcctgatgctagtaacggcaccgctcaggttttcattaacgggcgggaaattacaaagattgaactgagaattctaaagattgcaaaagtccaatgcccccgtgatactcacttctgggtttaccatgatggtggctacgaggaagaaggacaaaacaatatcaaagggaaaatatgggagtcacctttgacacgttttgcgtgcgccttggtttcactaccggtgcctcctacaaactttgatgcgacaaaagatgaagccccttattcatcaaaaactgtacctgactacttagatcataaaagaatacaaaagcttcttattcttggatctcctggagctggaacaagcaccatatttaagcaggctaagttgttatacggcaatagatttactgatgaggaacttgagaatatcaaactaatgatccaaagcaacatgtttaagtacctggggattctgcttgagggccgggagcgctttgaggaagaggctttggctgtaccaaatcacccaagctcagtgggcgatgatcctcagcaagatgaaagtaaatcttcaagttccaattcttgcatctactcgataaatgcaaaactgaagaagttttccgattggctcctggacatcatagcgacaggagacctagatacattcttccctgcagctacccgtgaatatgctccagttgttgatgagttgtggaaagatcctgccattcaagcaacatacaaaagaaaggatgaattgcattttctccctgatgctgctgagtacttcttgagcagggctgttgaagtatcaagtaacgaatacgaaccgtcagagaaagacgtgatatacgctgagggagtaacacaagggaacggattggccttcattgacttcaccttggatgaccggagccctatgtcagaatcctttggcgacaaccacgatgcgtaccctcaacaaccagtaaacaa

SEQ ID NO: 20818 - DNA, 468 bp, Zea mays
  Peptide Sequence Number=SeqID_64193
atggagaatctcatcagggatcctcaagttgctggactagcgacgcgcgacgtcgacattgcagagctcaacgccatcagtgcagaagagtcgagcacattcgccgaagctaaaagatgctataggaggatagtcaaaagctcatgctgtcctctagatactaaaggagatgctgttgtccttcatactaaacctgctatccttaaagcagtcaaaactgcagtaaggattcctgttgtacttaaagcagtcaaaactatagtaaggattcctgctggccttaaagcagtcaaaactgcagtaaggaatcctaatgtcctcaacccacaaaccacgagacttattccaacacttctccccctaagtcttgtgcgtcatcttgttggacagttggccatcccagacctggagcaaagctcaaaaaacttgatcctcccaaggggcttggtgagcaggtctgcaagctga

SEQ ID NO: 20819 - DNA, 1668 bp, Zea mays
  Peptide Sequence Number=SeqID_64194
atggcggcgccggcgccgaagcaggaggagctgcagccgcacgccgtcagggaccagctgccctccgtctcctactgcctcaccagcccgcccccatggccggaggccgtcctcctcggcttccagcactacctcgtcatgctcggcaccaccgtcatcatccccaccgcgctcgtcccccagatgggcggcggcaatgaggagaaggcgcgggtggtgcagacgctgctgttcgtggccgggatcaacacgctgatccagagcttcctcggcacgcgcctccccgccgtcatgggtggctcctacaccttcgtcgcgcccaccatctccatcatcctcgccggccgctacagcggcattgccgatccccacgaggcgcgccttgctaaattcgtgcgcatcatgcggggcacgcaaggcgcgctcattgtggcctccaccctccaaatcatcattggcttcagtggcctttggcgcattgtcgtcaggctgctgagcccgctgtctgctgctcccttggtcgccctcgtcggattcggcctctatgaactggggtttccaagtgttgccaaatgtgtagagatcggtcttccacagattttactgctggttgcactttctcagtacgtaccacatttggtccccttgctgagtactgcctttgagcggtttgctgtcataatgtccgtcgtcctcatctggctttacgccttcttcctgacggtcggcggtgcctataagaatgctgctcccaagacccaattccactgccgcactgatcgatctgggcttgttgggggcgctccatggataagtgtaccctatccgtttcagtggggagctccaacctttgatgctggtgaagcctttgctatgatggcagcttcttttgttgctcttgtggagctttgttatcctagtcctaaatgggactgcatgagcatctttattgaagctaatactcctgtgcagtccaccggtgcatttatcgctgtttcacggtatgccagcgcaacaccatgccctccttccgtcatgagccgtggcatcgggtggcagggagttggcattttgctgggtggattatttggaactgccaatggaaccactgtatctgtcgaaaatgctgggctgctcgctttgacacgcgttggtagtagacgtgttgtgcagatttctgctggatttatgatattcttctcaatccttggtaaattcggggctgttttcgcatcaattcccggcccagttatcgcagctgtatactgtcttctcttcgcatatgttggtatggcaggtgttgggttcctacagttctgcaacctgaacagcttccgaacaaagttcatcctgggattctccttgtttatgggtctgtcggtgccacagtatttcaacgaatacacttccgtcgcgggctttggtccagtgcacacgcgtgcaagatggttcaacgatatgatcaacgtggtgttttcctcgaaggcgcttgttggcggggcggtggcgtattttctggacaacaccctgcacaggcgcgatggcgtcgcgaggaaggaccggggccaccatttctgggacaggttcaggtccttcaagaccgacccgcgcagcgaggagttctactccctcccgttcaacctcaacaaattcttcccgtccttctga

SEQ ID NO: 20820 - DNA, 228 bp, Zea mays
  Peptide Sequence Number=SeqID_64195
atggcgcggcagcctgcccgccgtggtggctcgcggccaaccgcgattcgtttccaagctttggggaatcgacgatcaagcgctggcgaccaagtgatctggctcttcgagttctacgagattgaagactttgtgcctctgtttggtgaaggcaagtgtcctttgagcgacttcctattcattcttaattcacctcccgcattatacatttatggacgaatctcttag

SEQ ID NO: 20821 - DNA, 237 bp, Zea mays
  Peptide Sequence Number=SeqID_64196
atggtggagctcttccatggtatgcttgaaactggggtagagcctgatatggcgacccgcgaaaatctcatggctgtctgtggtcgcagtggcttccacggtgatgcaacagaaccatatttccagggctcccaattggatgatgcagtgaaggcctacatggacatgcgtaaatccaggtttgatccagatgagctgggttgttcgacggaggctatccgtgagtgggccgtttaa

SEQ ID NO: 20822 - DNA, 747 bp, Zea mays
  Peptide Sequence Number=SeqID_64197
atggcgcctcctattgacgtggctggtctgcgccctaggttgggcgatgtggaagctcctccgaagctgaggtcgagtctgtcttccgtggccgaggtcgagtccgagcccctgggtcgggcgaggcggaggccgtcggctggggcggagtctgagccctggggtcgggcggagcggagttcgtcgtcttctggggctgagcccaagtccgagccctgggtcgggcggagcggagttcatcgtcttccgggacttagcccgagtccaagccctgggtcgggcggagcggagttcgccgtcttctgggactttgcccgagtccgagccctgggtcgggcggagcggagttcgccgtcttccgggactttgcccgagtccgagccctgggtcgggcggagcggagttcgccgtcttccgggacttagctcgagtccgagccctgggtcgggcgaagcggagcttcctatggtgccttcggcagggcctgactgcctgtcagtctcactctgtcaagtggcaccgcagtcggagtggcgcaggcggcgctgtccttctgtcaggccgctttatgctgatgggggttaccagctgagaattaggagccttgagggtacccctaattatggtccccgacaatactgcaatgatgaagatttacttgcagtgatttctacgagtcagaaacctaatttctactgggatgtgcacgaagcacttcctagaaaactgattcgtcggcacccgtga

SEQ ID NO: 20823 - DNA, 899 bp, Zea mays
  Peptide Sequence Number=SeqID_64198
atggcgcaccgtatggacaacgagtacgactacctcttcaagatcgtgctcatcggcgactccggcgtcggcaagtccaacatcctctcccgattcacccgcaacgagttctgcctcgagtccaagtccaccatcggcgtcgagttcgccacccgcaccctgcagacttatgggtacgacaaactgatgttcgccggtcagctggtgaagtgcaaccttattgcatcgttcattgtcatgagggagggtgcttggctgctcgcgccgctcgtcggcagcatcaccaagcagcacaacaacttcgcctgcaggatgtgcgagcacggagcacctcggaggaagctcttctgtggttcttggctggagctaagggggtttccttcctccaagctcaaagccgtgtgggatagtttctttgtcgttagtgttggggttgaagggaaaaccatcaaagcccaaatatgggatactgctgggcaagagaggtaccgtgcaatcacaagtgcgtactacagaggagctgtgggtgcacttctagtctacgacatcacgaagaagcagacattcgaaaacatacagaggtggcttcgtgagctccgcgaccacgccgactccaacattgtgatcatgatggttggtaacaagtccgacctgaaccacctgaggtcggttgcagaggaagacgggcaggcattggcagagaaggaaggcctatccttcctcgagacatccgccctcgaagcgctcaatgtcgagaaggcgttccagaccgtcctctctgatattcaccaaatcataagcaagaaggcacttgcagcccaagaggcagcaggcagtgggcctccaggtcaaggaaccaccatcaacatcgcagacccatctgccaacacgaagagagg

SEQ ID NO: 20824 - DNA, 195 bp, Zea mays
  Peptide Sequence Number=SeqID_64199
atggcgagctccgaatgggcgagagggaggagtggggaggagggaatcgggcctgagcggcagcagctgcggcgcggagctgtgggaaatggcgcggcggatgcgcacctgcgcgcagtgcaacgcggttcttggggaaaaagaaaagaaaagcaaggaaaggagagggtaacacctgaatttggtggatattaa

SEQ ID NO: 20825 - DNA, 216 bp, Zea mays
  Peptide Sequence Number=SeqID_64200
atgagattgttgaggatttcaggagacttaacctggggacagttgctcacactgaaggagttactattgatgtggaacctaccttggagcaagaaatccgcagaaggacaaattggtgaggctaggatacaagagatcaaggatcttattactaaaggtatcttcggactcgaatcggtatcacagagggagaagctcaaagcatacgaaggttga

SEQ ID NO: 20826 - DNA, 579 bp, Zea mays
  Peptide Sequence Number=SeqID_64201
atgacgtggtcggtccgagccggaggtcgggtgagcggaggctcctccgaggtcgaggctgagcccgagcccgagccctgcggtcgggcgaggcggagaccgtcgtccgaggtcgaggtagagtccgagccctggggtcgggcgaggcggagtccgtcttccgaggtcgaggtagagtccgagccctggggtcgggcgaggcggagtccgtcgtccggcgtcgaggttgagtccgagccctggggtcgggcgaggcggagcttcctatggagcccgaggccagacttagctgctgtcagcctcactctgtcgagtggcacagcagccggagcaggccaggcgacgctgttttcctgtcagctttgtgctgatgggggttaccagctgagattaggagtcttgggggtacccctaattatggtccccgacataattaaaactggaaattgtaacgcacatgcatcacgcagcaaccatgaaagaataagcacacctcttgcggtactgctccggagtgagctcgtccttccgcccttggcgttgggtttctgcgccgccgcccgctcagactcgcggtga

SEQ ID NO: 20827 - DNA, 1512 bp, Zea mays
  Peptide Sequence Number=SeqID_64202
atgggggcgggggttgttgagcggggggagcggagggagagggaggacgacggtcgcaacgggggcaggggcgcagcaacactctttccaccggggttggggggaggttacggccgaggagcaggggcgttgggggcggggatcacgacggcgggggagtgggggttggggggaggcgagcgcgagaggaaacacgcggaggttacgacggggggcgtcgagggcggagggagaacgaggagccatgcatgggggcacggcgggggcgagatccgcgatgactgctcaggagtcggcgagatccttgctcgggcgtggagcaggatttggcaggagccgcaactaactgctcgagcgtggggcgagggacactatcagaatgtatcaggccagcaaggcgctcatgctgtccgtcgttctccccgtgttgaaaacaaaagaaagcaattagataaaaatgaattaaaggaaaggaagaagagattaaggttgaaagtccctcctatacaagatgccgaaagtgatgatgaaaaagacacagagtttgttcctggtggcgatgggtctggtgatgacaatgttggtattgttggtggagatgaaaataagggtataactaagacacgagctattcgatactcacctggaaagtttataaagcttgtgaattctctatctgatgaattgaaaagtgaagtggttgctaaggggtttggcggcctgcttaggttcaagccacatttattgtcgagaaagttgcttagctggctgatgcggaagctcaacccagaaacaatgaaattagagattggtggtgggaaagagattcaaatcacccgaacacagtgtttggtgtgtttttggagtttaccaaacgttggcagtgatccgcccaccatgtccgatgcagatgctcgtgccctgcgggacgagctgggggtgcaatttgtgggaaatcttatagacgcatatctggcatcaatatatctgttatcactgatagattgcagaagaggactctcaatgatgctttatgtcgacaacctgcaacatggattagacacaagtcctttttcaatccctcgatgtgctttcttggactccaagatgattgatgctatagcaaatatggatctcaggggagatgttcctcctgggaccactgagtttggacacctcaggttgagaagtatcactgacacgtgctacggcgtccccattggtgctctagcaatattacatgctccagtaccagcacctgccccagtagcagtccctaatccaacagcagcacctaacccagtagcagcagcatctgtcccagtaacaacagtgaaagttccctttgatccgggaacaggatctggatgtcgcctagaggggggacttagtacgcagtggaatgtgaagactcttcgagtaggtcgcagcggaatggaagatcctgtctcaaaatgtcctgcacttcaaatcaagcttataccacagataagtattgaagtgcagatataa

SEQ ID NO: 20828 - DNA, 513 bp, Zea mays
  Peptide Sequence Number=SeqID_64203
atggagcaattaggacttgggtacctctgtaagtcaagaaattggtatctcaagttgtggcaacaagaaaaagttaggagaaagaatctggcacaagtgtggagaagctctcaagagattaactactttcaagatgggaagtacactacatcatgtgtaatagatagtcatgtggttaatgatgctttaagattatcaattggcttctatagtgtaatagatagtcatgtggtggttaatgatgctttaagattatcaattggcttctatagtgtaatagatagtcatgtggtgcttaaggcaaagactacagggttcaacacaggagaacaatgtgatggtccaagaactgaattatggataaatgatggacatcacaactcggagacaactgatcaagccaaggacggaggcaagaaaagcttcgaggtaccaagtgcacgggagaaggtcaaggaggctgaggaacccaaagccaagggtgaagaagaaggcttgcaaagtcaagggtga

SEQ ID NO: 20829 - DNA, 1461 bp, Zea mays
  Peptide Sequence Number=SeqID_64204
atggggaagaagttgaagaaacccgggcaagccggggggagatactgggctcaagctccagatcatggtgctgctaccagaggcaatcctagaccgccatcacaaacatcgcgccatgttctgactccacctctggcaaatggttggcagtggcaatccaggcctcgcccatctggatctgaagtcaagaaggatgatgctcctccatctagttctgtccctgaggtggagaattttgatggcaacaatacatcagatgatgatgatgatgatttgagtgatgatatcagtgatgactatgattctgatgcaagtgagaaaagttttgagactcgaaaaacaaacaagtggttcaaagagttctttgaagtattgaatacattgagtttggaacaaattaatgaacaaactcggcaatggcattgcccggcatgcaaaaatggacctagggcgattgactggtacaaagggttgcagcctttagtgactcatgctagaacaaagggttctacaagggttaaacttcacagggaattggctgcattgctggaagaggagctttctcgcaggggaacttcagtgttaccagcgggtgaacaatttgggaaatggaagggactgcaagaaagcactgatcgtgagatagtgtggccaccaatggttattgttatgaataccttcttggaaaaagatgaagatgataagtttttcatcaatccagctacaagtcagcctaacgtcgtggggctgattcttgccgattctgctaattttaagactgagctgagccaatctgacatgtttgatcaacggctcgaagccaagatacttaatgcggttgatagcagccagtatactgggaaatatgtctttggtgttgatgacactctgaaggctcttgaaatgggtgttgttgagaccctggtagtgtgggaaattttggatatcaacagatatatcctcaagaacagttatactagggaaattactataaaacatatgaacaaagagcaggaagctgagaggagccagagccctgagtacatgccgacgtggcagttggagaggtgttgctgccctattcatgtgatgtcgtggccgtcggaggagcgcctgagccctgaaggagcacagctgtcgaagctgtcggagtccaagccctatggtcgagcgaggcagagtccatcttccgaggtcgaggtagagtccgagccctggggtcgggcgaggcggagtccgtcgtccggcgtcgaggttgagtccgagccctggggtcgggtgaggcggagcttcctatggcgcccgaggctggacttagctgctgtcagcctcactctgtcgagtggcacaacagccggagcagggcaggcgacactgttttcctgtcaggtcggtcagtggagcggcgaagtgactgcggtcacttcggtcatgtcgactgaggagcgcgcgtcaggataa

SEQ ID NO: 20830 - DNA, 582 bp, Zea mays
  Peptide Sequence Number=SeqID_64205
atggcggcggcaggtgggcggaagcagcagtcaagtcgtctgcaggctcacgtcccctcctgggacagcgagagagccctctccaacggcgtgaagacgacacacccgtgttccgttcctcaaacggttcgcgcacgcacaacggccgccccgccaaccactcgtctcatcgcattaactctgcagcaggacatggaccgagaaaggggatgctccgaaagggatccttctccgcgaaggaagcaggccccgagcccccctactgatcagaggctggcccccgaagggttcgacagccgcctcagagcactcgggctccgcgcccactactggctggcccccgaagggttcgacagccgcctcagagcacgcagagcgagggatgactctgggtacgtccgatacatggtcgaggctcgggctacgctcctgagggctgttcttgcaaacccggctccggccaaaccattgacagcgtcaacataccagcccgagaacttggaacctgactatgcacccgggctacgactagttcgcatgagggaacaaccagaccagctgaagcatcacgaaacacactaa

SEQ ID NO: 20831 - DNA, 783 bp, Zea mays
  Peptide Sequence Number=SeqID_64206
atggaggacccaatatatacccctgaggttgtatgtcctacaacatatggaattgaaccatatggatcctcagttaccacttgcgactgggttatccctgaattcgtcatgacacctttcctaccaacttcaacacagactaagaacatccttagtccgactaaacgtgtgagtgcaggcatggttaaacaaggagtagaccatacacatacgaagccaaagttcatttccaatgatgatgagaccgacgaggacatcgagatcgatggtacccaagatgaatctactgccactgatttgcctgacttgtacgacaaagtgtacagtaacgtgcctgaagaaacacatatgctgaagtctgtccccaaatgcggttattgcactgcgaagaagtttgagtatgagccacctgggttttgttgtcgtggtgggaaggttgagctagccccactggagacccctccccagcttcggaggttgtgggatagtacagactctgatgctagacactttcatgatagcattaggttttttaatggccatttctctttcacttcattgtattgttgcctcgatagtatgacaactaatgtgagggattctggtatatacacgtttcgggcacaaggcatgatgtaccacaatatcaagtcatttggtagggaaggtggggcggagcataaacatcttgagctttacttttacgatgatgatcccaatctcgagcatcgatatcgtaagtgccgagaaagaatgtcaacaaaaagacaaatatgttattaa

SEQ ID NO: 20832 - DNA, 474 bp, Zea mays
  Peptide Sequence Number=SeqID_64207
atggtttcccagccactatctgtatgcagggtaccattatgcaggggcactcttcttgttatggatcagataggatacaatgctggtcgcacaccattcacagacatctcaaacaccatcattacaggtaatcaaaatgaatcgaactcgcttggaccaattgtcgatgctaaggaacgtaagaggcaaaaggatagggaacgatatgctgcgatgactgttgaagaaaagaatgagaaaaataggaagcgtcatgaagcacatcaacgaaataaaggactattgatagagccactctcatccagagaagacgttaatacagaccagacatgtgaggtggttagctttccagatgactgtagcaccattgatttcacaaatttctcaacacaagacattgcagatggagacagacaagtaaatctggatcaagatgatgacaacgattggttgcataggaatgagacattctag

SEQ ID NO: 20833 - DNA, 1068 bp, Zea mays
  Peptide Sequence Number=SeqID_64208
atgcatcgcgcccttccacctttcgagcccccggatggggagcgctcgcgttgctttcgtcttgtcgtcgttggaggaacgcaacttcgcggaagttggtacctttcagccatcgttcggcttcaaggattttcatcaggcagcctggctgcatcacctcgccggtggtcacccaagacggtgaccaccagtttgatggtggggagaagcaagtcgggctgcggcctctgccccgccctcagcttcaaggatcttcatcatcctggttggggcggaggccgggctgagccagagctctacctcccgcacgggttcgtgggtcaccttctccctcagcactctagggagagggcgctcaccggcctagcggaaggggcggatttcgacaacgcggggccgagcggtcgcaagcgtcgtcagctcccgcgtgcccggttcactggctcagctggctctggcgcagcttccggtgccaccttccaccactgggcggggtacggctatctgcccgtcgtacaggcggctgtcgcgccgcgcgcaccaggggaccgcccaagacgttgcgcgctgctagggcggcgttcgtgttcttgggctgtcctgcctttgctccggtacgacgcccctgcgcggaggtcggtgttcgcccgtccgggaggacccgagtggggatctgccgatgggcagacggctgccgtcgtcggtgccgaggtggtggcggctgaagaagtcctcgtcgccgacgagatcgccgccaccatccgcgctccaggcctctggctctttggctttgatagcttgtcctcgcccctcgagtggggacgtgggcgaggaccttatcgcagtagcgtctgccctgaggtcatcactgctgctgtttggccgcctggagcggaggtcgttgtcgctgctgccggagcgggcgtcggcgagccacctggggttttgtcgccccgcaggccctccaatgtggggggttgttcgtacctacgggggtggaaccggagttccgtttgtaatggcaccttgagtgccggtgtcttgttcattgcggctgtcggggcctga

SEQ ID NO: 20834 - DNA, 750 bp, Zea mays
  Peptide Sequence Number=SeqID_64209
atggagctcatgccactcacttatccgtcgagcatgaagctcctcatcgacaggaaggcgcggcggctgctgttcgcggaggcgagcaaggacgtggtggacttcctcttctcgctcctcgtcctgcccgtcggcgcggccgtcaagctgctgggcaaggacggcgtggccggcagcgtcggcagcctctacggcagcgtggagggcctcgactacgcctacgtccagcccggcgccgccaaggacgcgctgctccgccccgccgtgctctgctcgctgctggacggctcctccctccttcgcctgctaccaccgccgccggggcatcatcccaccaccaccagcagcaggagcctgctgctgtaccgctgcaccagcatcttcaacagcagctgccgcacctacatcaccgacgcctacggcaaggcgtgcccgacctgcggcaacctcatgaccgccgccgcgcagtacctcccgcccgccgcccagatgcccgccgccgccgccgggttcgtccagggcgtcgtcacgtacacggtcatggacaacctcaccgtcatgcccatgtccgccatctccagcttcacgctgctccacgccttcgcggtcaccgacctcgccgcgctgcaggagaagaccgtgcagctcggctacaatgagggttttagagatttctccagggcctcgctgcagtccaaaaccgttctgagcgatgtgttcctcggcaggaaagatcgcggtgatgcttga

SEQ ID NO: 20835 - DNA, 1246 bp, Zea mays
  Peptide Sequence Number=SeqID_64210
ctgcttaccttttgttattacgggcatatatgattcatggaatgcttggcttatggtgacagtgttgccagagtacccagaggtttacaacatagtaaacaagctgagggtggagtcagtggttgctgttgaaggcgtgatccggccacgcccggtggatgccatcaatgcagatatgaggactgggactatagaggttgtggcacatcatgttctagtgctgaactcagtaactcggtcactgccgtttccagttacaacttctgatactgtaaaagagaagtttccagaagaaattagattgaggtttagagtgttggacttgcgtcgtccacaaatgcagtcaaacttgcggttgcgccataatgttgttaaactcatacgccgctacttggaggatgaacatgaatttgttgagattgagactcctgttttgtccaagtctacacctgaaggtgctcgggactatcttgtaccatcgagagttcagccaggaacattctacgctctccctcaaagccctcagctgttcaagcaaatgttgatggtttctggttttgaaaaatattatcagattgcaaggtgcttccgagatgaagatctgcgtgcggacaggcaaccagagtttacacaacttgatatggaggttgcttttacatctatggaggatatgttgaagttgaatgaagatttaatgagacatgtttttcaagcggtaggagatatcaaagctgccaaacccttttccaaggttagtgatgtatttttggggagtagcttcaaggtttttgctgatacattggaaagtggaggcgtaataaaggcactgtgtgttcctggtggtgccactgttttttcaaacactgacctgaagaaaggaactgtttacactgaagcttccaaagctggagccaagggcttgcctttcctcaaagttatggagaatggggagcttgaaggaatcggtccactgttatcgagtctgaaacctgaaaagaaagaccagctcatggaacttctggacacaaagacgggtgaccttatcctgtttgcactgggtgaacaatcatcagctaatcagattcttggacggttaagattatttattgctcataagctagaggtgatagacacgtctgcacattcagttctttgggtgacagattttccaatgtttcaatggaacagtgatgagcaaagatacgaggttcaagaaaacacgattaggcgtgcgattaagcgctga

SEQ ID NO: 20836 - DNA, 711 bp, Zea mays
  Peptide Sequence Number=SeqID_64211
atgttgttcttccgccacgtggggaagacgtcgtcgattccgccgccggcgggcgggttgtcggccgccattgtcgctgtcacgcgacggggaaaggagtatcatgtcgtagctgccgtcgagggacatgaactcgagactcccgaaacggagcaccgtcccgggctggaaaggttgctggagactgcccctctggagcttgacgggaagctgttcgtcaacacgcagcagtcccctacctggcgcgccaactgtcggcgtttcgaccccggggggtccctagaccgacgagtaaattgtcgccgcgtgccccagcccagatgggtcggcgcgagacggagcgcgaaggggggagacaggcggaaaaaggggaaacccacgaccttcgtgtttgtcctacgcccaggtcggaagcagcaaaagtctgctacttcctcacctaaaaacaacgaagggataaaccctgagtatggaatactcagcaagtcttacccgactaaagaaaagactctcaagggtatgctggttatatgggagtcaagcaaagctaagcatcaaaaagcttttgtaaaacaggtgatcaaggaaggtaatcaaattcaaggaaggttcggatccacagatatcgaagtagaaactattcccggcctaggattccgaaggtggtggtgtcctgtcttcggggacttctacctcttcttcacgttctaa

SEQ ID NO: 20837 - DNA, 804 bp, Zea mays
  Peptide Sequence Number=SeqID_64212
atggggagaagcgagccgggctgcgatcttggtcccaccctcagcttcaaggatcttcatcatccttgctggggtggaggtcgggctgagccggagctctacctcccgcgcgggttcgtgggtcaccttctccctcagcattcgagggagagggcgctcaccggcctagcgggagggtcggacttcgacaacgcggggctgatcggcggcgagcgtcgtcagcttcagcgcgttgggctcgctggctcagctggctctggttcggctctcggtgccccctcctaccgcaagagcggttgtcgcgccgaccgcaccggaggaccgcccaagacatcgtgcgctgctagggcgacgttcgtgttctggggctgtcctgcctttgccccagtacggcgcctctacatggaggtcggtgcgccgctcgtccgggaggatccgagtggggatctgccggtgggcagacgacttccgtcgtcggtgctgaggtggtggcggctgaagaagtcctcgtcgccgacgggatcaccgccaccatccgcgctccgggcctccggctctttggctttgatagcttgtcctcgcccctcgggcggagatgtgggcgagggcattgttgcagcggcgtccgccctgaggccatcgctgctgcagttcggccacctggagcggaggttgttgtcgctgctgctggagcgggcggcggtgggccacctggagccttatcgccccgcgggccctccgatgtggggggttgttcgtacccacggaggtggaaccagagttccgtttgtaatggcaccttga

SEQ ID NO: 20838 - DNA, 393 bp, Zea mays
  Peptide Sequence Number=SeqID_64213
atgcaggcggcatgcaaccgcaccaaggaggcgcaccctttcgacttcgacgcatccagcatggaggcccaggcccacacgtcatgtaaccggcgcgccggttactacgtgcgagaaactgcaccgccactcgcgccactaccgtgcctcctcgactgcggaaccgggaccgggaaaggggataccccgaaagggatccttctccgcgaaggaaatgggccccaagccccccttactgatcagaggttcgaaggctggcccctcggaggggttcaacagccgcctcagagcgctcgggctccgcgcccactactggtcagaggttcgaaggccgtcccctcggaagggttcaacagccgcctcaggccactcgggctccgcgcccactactga

SEQ ID NO: 20839 - DNA, 2055 bp, Zea mays
  Peptide Sequence Number=SeqID_64214
atggatagcaatgggtccctgatccgaaggtatcttcatgcaaagataggcaggatgaaggattgcttcgaaggcattaagagctttagcaaatatgatgtcagctgcactgcctgtatcgaccaagacattgtgaaccagaaatcctttgataacacaagagataaccatggcatcgttgtgtgggtaatctttgagctgaaggtcctcttgagagaagctggctctgaggacgagccacctgtgatcgggagcaccagcttcgggtccgaagtaactccagcttggttgttgaatgaagccatcagttcaaaaagtggaagtgagttcaccggaggattaggaactacttcaaatgtaccggaagaccaacctggaggaggtgatagtgaagaaatacagttggattgcagtggtggagatcttgatgacagcttagattttacgagaaccccatcgtgtggtgatgacattgatctggaagagggaaatttgaatagaacacctcctgatttacgtgggtcaacccgaagtattgatgatatattggaaatgatctattccccagagcactttgcaagcattgatggcgagtcccctcccaatagccagccgactcgtgcaccacgaattgctgttcgcaagaggaaggcttcctcaaacccccctggcaatgatcaaccgcctgtgcatcctactgcccaggatcatataacttactcaaggaggagcgataggtccattcaagttgccaacacacagaaggcagaggctgagaagaaaaaggctgagattgagatgaagaatgctgaagctgaggaggctgagaagagaaaggctgaagccgaacaagctgataagaagaaggcagaagaagctgagaataagagaaaggctgaggccgaagtagctgagatcaagagaaaggctgctgctgaagaagctgagaagaagaaggaagtagaagctgagaataagagaaaggctgaggccgaagtagctgagatgaagagaaaggctgcagctgaagaagctgagaagaagaaggaagaagaagctgaggataagagaaaggctgaggctgaaaaagctgagattaagagaaaggctgaggccgaagaagctgagattaagagaaaggctgaggctgaagaagctgagattaagagaatggctgcagctgaagaagttgttgcaatccagaaacagctaaaggacaacatcaaagctttgaaaaagccggtgcccgctgccaagttaaagaagatgttccagttacaaatgtcaaaagaatatgctgagcagcgccaacagtacgaggacaggttgaacatgcttcgtcaggaggccaaagctgagattgatagtttggagaagagcattgatggccaggcaggacccagctcatcatttgatgatatacagttcccggcggagtctgatgatgatatcaacaatttgacccaaccaatccgactttctcaagacgaagtctcagtaggccaggctgatttcagtgagtttcaaaggatgatattcaagcgcctaggtgatagagtgctgaagaagcctagggagtacatatccccgttcaagatccctcgtaatcgacctgagatacccctggccaaggctgttgcacttaggcggaagatcgcatctgatcctgagctgaaaaggagaattttgttggagtttggccttcttgttggactaactggcgaggaaattttaacatctttttctaatgacacccttggcgagtcaggaatcatagactttttcgtgcactgcatgcgacatgatgatattgtgcacaaggaagaacggcacaaagctgtctttgccaaaatcccaatcatcgatgcagccttccagaaagtttccaacctcaagttacccagattcaagggcccgatatacagatgtgagctgttgcattacgagatcttccaccctttgaaccaagctgaaattcctggttcgcttgataagtttagaattggtggtcgtccgttgccaattgaatgggatagtagtcagtcgaacaattag

SEQ ID NO: 20840 - DNA, 678 bp, Zea mays
  Peptide Sequence Number=SeqID_64215
atgaaggggactactgttgcctccgctacgcgctcttgtcgccgaagccaacgtccgcgccagacggcggaaagttccaggtcgacttctcttcctctagacggctcttggcaacgggggcgagaaggggcgacgcgacggcggatctggcggcgcaaggccgattccgagccggtggaggtcggcgccgacgacgaccacgtcctgttgctgacgagtgaagtccgttcgcctcggaagcgcaagcgcccacaaatcccactccgttttgccgcacatttgatcatggcatcctcgaaagaagataacatgaaggctttgctgaaagtccttgtggactgtgccgaggatgccacaaaaacattgggtggtttagttgatcatgctttagatcacatgcatgatgaagagatattagctagaaccttgtatgccatcaaagataagctagaattgctgcaacaagatgccttagaggcaaaagtgcaagcatttccagaaattgttaagtacgatggcgatgacataagtgttgagcctacatctccatcgacccctccaacagttactgaaccatctgttgatgaagaggagttctactgccctgatgtgtctgatgaatggtacttcagcgactcagataggtcgactcgtaacagctactggaatatatattag

SEQ ID NO: 20841 - DNA, 375 bp, Zea mays
  Peptide Sequence Number=SeqID_64216
atgtcccgattgaggtctggaacgtcgttttacttgtatcagatggtaggcgatagtgaagttcaaataggagaaccacgaggacccgacaacctcctcaatgactggcacaaggtcgacgtctcttcctctctgaactatagtccactccaaaaccctagacggcgctcgcggcccctagatcccgtgtcccagcgcctccgcttgtgcctagatcccgtcattgccacacagcttctccaactcggggaccacctccccaccatcttcacctccctcatatttgagtacgatgacaaggtgctcccctccatcggcaacgaggtgctcaaggtcgtcgtcgctcagttcctctctgagctcccacttggctag

SEQ ID NO: 20842 - DNA, 168 bp, Zea mays
  Peptide Sequence Number=SeqID_64217
atggcgcagtggcttacccggtctatgctcgccggcggtcggagggagtccggcgaccgtggactggcctctccggcgaagcaaacttcgattcctcgctcggggagcttcaccgagaacttaagtggttttggtgccatcttcaaggtgaacacggtggatctttag

SEQ ID NO: 20843 - DNA, 189 bp, Zea mays
  Peptide Sequence Number=SeqID_64218
atggcggtgagcccctttctgttgccagggaatcgatggggacggttgatgtgtgtggggacagagtgcccccctacatgtcgttctttggaggacatggttgctggagtgacttggccgtccatcttgccaccgggttggactgtcgagtgggaccctacctcggtcgaggaggagcatgaggagtga

SEQ ID NO: 20844 - DNA, 362 bp, Zea mays
  Peptide Sequence Number=SeqID_64219
atggttaaaaattttggcagcaaaacagtgcaaatagcagtaaatgctgtggtaacttcacacctactcgtctgtttatatagtgctgcagtggaccgcaaagaccaaacagtgactctgcaaggtgggaccgacacgatctcgggaaatggatcgtttctcggcaacgagctcagggaagagacaaccgatcaagccaaggatggaggcaagaagagcttcgaggtatcgagtgcacgggagaaggtcaaggagaccaggaacccaaagccaggggtgaagaagaagacttgcaaagtcaaggttgattgtaacacccgggttttaggggtccaaagcccgggcgtaaacataatcaccag

SEQ ID NO: 20845 - DNA, 423 bp, Zea mays
  Peptide Sequence Number=SeqID_64220
atgacttcacccacccccgccagtggaggagacacccgtttcagctctgacttcctttctcacgatggctttccttccatcttgtgggaagtgcttaactccgccggttaccctatgccccctttgtacacggtgcagttgtacgaggagcatcagccgggttggcgttatcttgaccccgagacgattggattcaggacggacgacaccactgaagcagcagccatgaagactctcacgactttctgtggctaccatcccctggagatggtgatgcaccacttgggactcttccctgcggagaagaaggatgaccccatgtggtgcaaccgagtgagccatgtgaagggcgtatgggagatgtatcctaacttggtcgggagagtcactattcagtgcatgagtgcgttgtaccgcctttag

SEQ ID NO: 20846 - DNA, 288 bp, Zea mays
  Peptide Sequence Number=SeqID_64221
atggcttcacaaggtgaccaagttatggcaccttcgtctatgaagctggtgctcccaatcacaggaggctcaagttctgaaccagccaataagaagcagaagaaggaatcacagagaaggtccccaacattggcgcccacctccggtgaactcacttccactattgagctgatggcttcgttcaacaaccaagtcgtggcaccttcggctacgaagctggtgctcccaatcacgagtggttcaagttcagagccagctaacaagaagcagaagaaggaagcacaatga

SEQ ID NO: 20847 - DNA, 2670 bp, Zea mays
  Peptide Sequence Number=SeqID_64222
atggccgcatcaacgtggatccggccgggaaggccgcggcagcgacggaaccaacgaaggagggagggcggcggggtggggcctgccggacaggggcctgcgccggacctggcaaggggtgttgacgacaccggtgacggaagaagctcgaagggtcgaggttgcactaggcccggcgatggcagcactgcggtggctgcacaacacgagcgaggagaagaagacctgcgcgtgggggcacagacgccgggaagggcgctgcgctgggggcgcgcctggcgcgggtcggtccttcgcggcgatgacccacgccgggtcctagcgtgcggcagcatcgagcgtggaccagtgcgcctggaagtgagcctcgacagccgcgacggcggaggagagcgggtcgtcccaggagccggacgaggaggaggtggagagcacgcggtggagcagcgggaggagcggtccctcttcacagcctctgtccacgtcaaggttgagaaggccttcagggaaggtacggcacagcaaaatgcacatagtatttttgtgtcccttgctttaaaacttttggaacagcgagttcatgtcgcatgcaaagaaattattacgttggaaaaacagaacaaacttcttgaggaagaggagaaagaaaagcgtgaagaacaagagcgcaggttgaagaggagaacaagagagagagaaaagaagaacaggagaaaagaaaggctgaaagaaaaggaaaataataaagggaaaaaactagttgaatcaaagtcacgaaatgatattctatcttcagctccaagcaactccacaacatctatcaatgattattcgacaaatactctggactcaagagattcagttaaggaagatgaagatagtgctgaagttgtgaatctgtgctctcctgacagctgtatgaatcaatcttcatgtacaaaaattaatggagaaaacagtgtccacttcaatgcagtaacagaattttctccaatggacagtagtgacctttgtacatcagatcaatccaagtcttcgagacggggtccaaggtcaagggaggattttcctcaagatcagtcctgttggtatgatgactgcggagatgagtctggaagaattggtgaattacaatggaagtcaagggaaaggacaagaagtattaatagaagtcgcaacgcagcatccacctcaaacaacaggacaagagagaggcaatcatacaattcttgcagctgcggccatctggaagactatggagtcatggacagctgtttcttgccaacagctagatctggcaaagagacgaagatagcaagaaaatcaggagttgagaaacctagggtgcagtaccacagatgctatacattggatagctttatagtgtcaaaaggaaaccgtgctggttctacacagaaaaatgctatcccaaagcaaatatgggagcctatggatgctcgaaggaagactaaattacacaatacagttcatgattcaggttcagttaacgatgttgattcactgaaacatgtggtttttgataacagtggatctcaaaattttggagtaggatgtgaatcacagcctcaggcttctgaaagttccagggatgaatgtaattcagatcaaccatgtgcaaatggtgggagaaatcaaactatttcatgtgctagtagtactcttatggtgaaccaacaaaactgttgcgcaggaaatgatgaaggctccaggcatgatgaagagctgatgatgaactctgctggctctgatagctcctcgtcatgcatgagcgagggagatagggaaagcagctccagcagtacaacctcttcaagcgctcaaaatccggaatcatcttctgagtctgaggaatcacccgagagaataaatagcacagtaggtacacaatcatcaagagctgctgcttcacggtctttgcttgaagcatgtgcaggtaatggtttcagagaataccaacccaaggcaaccggcctagctcacaatgacatgtttgggtacaatgtatcccctgtccaggaccagctgctgcattaccaaagcatgtatccacctcaacatcggccaataacaatggggtttcatgacggttcttgggctgcaccaacgaatggaaactttcagtatgctcgaccatcccacttatattctagtccactcgtattcggaatacctgggaaccattttattgattatccttacatggctcccgccttcagccatatacctccagagcctattcacaaggccgcatccagctttagagccatgcctctgtcactgccttttcaaaacggacatcggcaggctgctagtcttactcagagagacatgaatctagaaaggcgccctgcaaagttgactaagccgacaggcaaggatcccccagaaaacaagaacaagtcgggcctaaaggatctcccagaagacaagagcaaatcatgggatgcggatgcatccttctcgttgttccaattcaacttgccaatagcttcgcctgtaacaccatcatcaaaagataagagcggagagctggccgcaaggacgccactggctcaggtgcaagctcagctttgctcgagggaacaagcagatgtcaaggagtatagcctgttctcctcgaaagataatggcatattttcgtttatgtag

SEQ ID NO: 20848 - DNA, 300 bp, Zea mays
  Peptide Sequence Number=SeqID_64223
atgaaggccaagacacaccatcaaccaatcaaggagtacaatggatcaagcagtctcattagctgcgagaagcagacgattcgaatcgagttttatccttgcaagtacgttcaaaagcttgacacaggtatccgcacgttaatccttattccaattttgtctcatagagaacgcatccccatggatccgtgtccacagaccatcatcattctgttatcaaaatggatacaaccaattcctgacctcgcgcgagtgctagaaaaatcactcgacttctaccgagatcctgatttagcatag

SEQ ID NO: 20849 - DNA, 600 bp, Zea mays
  Peptide Sequence Number=SeqID_64224
atggaagtcctggacgcgacgcggccaaatcacagagtgtccggcgcagctggaaaaagcgatctgtggggaggccggacctgtggcaggagtgctgagcgccacagaagtagaggggaggaaggggaaaaattgcaggggaaggcgccacggagagttcactgctcgagctcggaccagaggaggtccgcgccatggctggagcagaggggtctgctcagcctacagccaccatggctgggcgttagtcaagcctcgccacgctccggcgcgagctgggcacttccagagcccacggggagtttttctgcaggaaaaaaaatgccaggggagctcagattcggtgcagcatggtggggaagaagattgatcgagctcgacggtggctacatgaacctggctgcggacaagtgcacgggaactatggcctgcggcctggcgtccagggctggtgcttggagggaaggagctcgccgcggcaagagcagggaagggggcgcacacgtctgggtgcccagggagaagagcgccatggaggccgatgtggaggtcgaggcagggacctcaggatcgggcatgggagagagggcaccaagctga

SEQ ID NO: 20850 - DNA, 627 bp, Zea mays
  Peptide Sequence Number=SeqID_64225
atgggaaaaaagagcgcttgctgcagccggacctgtggcaggagtgctgagcgccacagaagtagaggggaggaaggggaaaattgcaggggaaggcgccacggagagttcactgctcgagctcggaccagaggaggtccgcgccatggctggagcagaggggtctgctcagcctacagccaccatggctgggtgttagtcaagcctcgccacgctccggtgcgagctgggcacttccagagcccacgaggagtttttctgcaggaaaaaaatgccaggggagctcagattcggtgcagcatggtggggaagaagattgatcgagctcgacggtggctacacgaacctggctgcggacaagtgcacgggaactatggcctgcggcctggcgtccaaggctggtgcttggagggaaggagctcgtcgcggcaagagcagggaagggggcgcacacgtctaggtgcccagggagaagagtgccatggaggccgatgtggaggtcgaggcagggacctcaggatcgggcatgagagagagggcaccaagctgacatgtcgaaccagagaaggagagcatcggcgcctaagcttcacccatggagagagcccactcgacttgagggtgtag

SEQ ID NO: 20851 - DNA, 1047 bp, Zea mays
  Peptide Sequence Number=SeqID_64226
atgtcttcttcctcccttatgcgtcgcgtctttccaccttccaagcccccggatggggggtatccgccgtcttttcgcctcatcattggtggaacgcaactccgtgggagttggtacctttcagccatcgttcggcttcaaggattttcatcacacagcccggttgctccccttcgctggtggtcacccaagacggtgacctccagctcctggatggggagaggcaaaccgggctgtgatcccgccctcagcatcgggggtgttcgtcatcctcgctggggcggggagcgaggcgagccggggctctacctcctgcgcgggtcggcggaccacctcctcttccagcttctggtggtggcaatcgtcctcccgcgctgcgacggagacgtcctccagtcatgccggggaaggcgaactgttgctgcccagctaggatgcaacattccgtcctttccctcgcattcgcggcgaggacggcagcgaggatctgcaggtgcgcttgggagcggcccgctctttggctttgatggttggttcgcgtcccttgagcgggaccacgaacgaagccctccggtggccgcgtccacccgggaccatggttgctgctgcagaggtcgctggcgagcctcccgatgttcgttgtcccgcaggctcgaggtcgctcatacccgcggggacggaaccggagttccgtttgatccgtttttcgaagtagtcaaaaagcacgaaagatattctggtaaaagggatcttttttcgaggaaaatttcgacgcagagggggtcccccccccttttagcccccgagggagggtcgggctttgccgagaactttggcgatgacgaatggcccctcccgggggggcgtgagcttgtgcctcccttgggcgtcttgcccgcagccgaagcaccaggtcgcccacctggaggtctcgggaccggacccctcgggcgtggtagcgtcgcagggactgctggtaccgcgccgagtgtagtaaggccctgtcccgagcttcttccagctggtccagcgattcttctcggctag

SEQ ID NO: 20852 - DNA, 369 bp, Zea mays
  Peptide Sequence Number=SeqID_64227
atgagggatgcggcacggtgtgcactctcgcaatattgctcattgttcagtggggtggctaacggtattaacctcagatattacccatgtcgttcgactagtagtactaggagtgtgattgtctcacctgttggcgaaggaaatcctaggttgaatagcacagtcaacctagtcgatgtgctcaacactgagctggactacgctcttgatgagctgaatagggctcgtgctgagcgtgcggagcgccgtcaccaagaggatggttctctcgcccccactaggactcgacacccgtaccgctcaccgccacgtggacaccatgcttatggcactcgccactatagaaccaagataaacctggatccttag

SEQ ID NO: 20853 - DNA, 495 bp, Zea mays
  Peptide Sequence Number=SeqID_64228
atggccgatcccccctcgtccatgtgcattgttctagctgccagggtgtgcttgtgtgaatggaagataaagaaactgctcccagtgcatgaggttgaagatgggaatcgacgatcaggcttcgatgaccaagtgatcaagctcttcgagttctacgaggttgaagaccttgagcatctgtttggtgaaggaaaggatctaggtacgggcgtcgtcccacgactttttcctgagagcagagggtataggtttgggtacgtcagatggtctctatgcagtggtcatttccaacatcctcatagtgaggaccctagggaaaagccacatagcgatgacctaccagaccacctaggaagtgatcaatggggagtagcactcctcgggaagaaagggaatcacggctcagtaaaatgtgcaacctctgcaaagtgttatgaaactgatatatcattcgtgctcacggttatgagcgaccttgggatcctctttgattag

SEQ ID NO: 20854 - DNA, 420 bp, Zea mays
  Peptide Sequence Number=SeqID_64229
atgggcaagagtaacaaacgcaagcgcgagccgactcctccgtctgaggacttcggcgactcggaatactcggaggaggagttctcctccgagtcccgaggggtctccggctcccacgactcccaggggattgccgcggaagtctggacgtacatccgggccgtcgagcgctccgggctcgagggctcggatgagtcggagtactcctcggatgaggaggactcggacggcggcgaggacgaggatgacgacgacgacgacagcgacgacgacgacggtggcgacggcgatggtgacggcagcggcagcggcgggggcagcagcggcggcgacgggagcaagggcagcaccagaggcggcagcagcaagggcagcaccaggggcggcggcggtggcagcagcagcaaggccagtggctaa

SEQ ID NO: 20855 - DNA, 465 bp, Zea mays
  Peptide Sequence Number=SeqID_64230
atggcgccaagcagcaactccacttccccagccgcagccatctccccctccattgtttcagcgcctgaaacaaacccctggccgccatccgcacttgtgctcgaccctccctgtgcggcgtccaccgatctgcgcagcagtgccggttcgcagcagggagcccccctcctcgttgtcctccgtggtgcccgccggctgttcgtcaaaatgcgtagcaagccgcgcgctgccggctcgctgtttcgtgaagcccagtggacagcacgccgccgacgctcaccgtggtttgctgtttttgcgcagcccctttgtcgtcgtcgttcacccccggagaggaaccctgcgttttgcgagaagaaggccaatcattcaacgctcgtcggatgtttggagcgatgcacaaatcggaatcaccgtcattcttgcaaacaccgtttgggtttgtttatggttagagtgggttga

SEQ ID NO: 20856 - DNA, 531 bp, Zea mays
  Peptide Sequence Number=SeqID_64231
atggctggggagcaccgggaggataaggagggggaatgttttgtccggtttgggcatggtgggatgactccttctaatataaccattaagggctggaaaaaaatctcgaggctcgcgagccggctcgggctcgatcaggctcggctcggctcgatggaaggctcctttgtcattaggacatcctactactcggaagtggaaggattccctcaccttctacggagttgcgcgcttcgcattgggatccgcaagaagccggagtacatctggaaagattaccgcgagagcgaaattgagagatgctctatggcagtccacctgggagaaagcagaaactacccaaatcaccctcccttccaagtcaccgccactgggcaccgctttccagatacttgccaaaatgctgcccaaagagccctccgccagctatgccaaaactacagtagggaagtctccgagtgtaacacccgggctttaagggacaaagtcaggtgcatctcatacatacgccaaagaagacaacatatataa

SEQ ID NO: 20857 - DNA, 741 bp, Zea mays
  Peptide Sequence Number=SeqID_64232
atggggaaggaggacctgactagccgggaccacccgccagtggcccgaggtgagaagggccaggggccgacgcgagggacccacctatcatcatttatcaaggaacacccacgcgaacaggccgtatgtttaatttttgtgggtacgggtgacccgatgggtgacccatacccatatgggtatgggtatggggacactccttcgctacttccacccagcaacaaaaatactcctacctggaggaaaagacttcaggccttgtcagggagagatcctaatgaggatgaccccaccatagtctacatggtcggatatctccacacccttgacaatcattatgacaaccttttcttccactacacccacctaaattcccaggtggaaagcctagagcaacaaatcaaggaattaaaagaagaaaaggtgtccctccaagaaagtctcgaaatagcggaaggcgaagaggccaacactcgcgaggcctaccgaactctaaagatggactacgcgaagaagttaaagaagctcgcccccgccaagaaaatccggaagcggacaaagagccgaggatgccagactgaccgaaaagaggaagccccgccaacactgcctccctccaggatagagaacttgtcagatgttgaggagatgtccctagctagccttgacgatcttctcagggaatttggggacaccttagaaagggagtttggaagcaccttagaaaatgctcgctcgtag

SEQ ID NO: 20858 - DNA, 162 bp, Zea mays
  Peptide Sequence Number=SeqID_64233
atggcgcccaagaggaaaactgcgaactcgtctgctgcagtgatccccgcaatcgaccccaacagtcagttacccttcgcagaacattcagccactgaaagacagagcctacccggcatatctgtatcgagggctggccgactcaactcgggttaccaatag

SEQ ID NO: 20859 - DNA, 201 bp, Zea mays
  Peptide Sequence Number=SeqID_64234
atgtggggtctcgacatcagtcacccttcactcttctcgttcgagcacttctgctcagccctctgcgccgacgtgtgggccgttggtgtcatccgagcgtggctccacaggggagcgctgtcatccgggcctagtaaccagtcgcaccgtgctattgcgcggagatctctctcatgcagcgctgagtccagatggtcgtga

SEQ ID NO: 20860 - DNA, 393 bp, Zea mays
  Peptide Sequence Number=SeqID_64235
atggaagggaaggaggagggggaaggggagggggccgaccgtaggggggccaagcggccgtgcgagacgccagggctgcgctggggaggggaaagagtggggaggggcgccgctgccaggaagagagagggaggagagaagagagggaggggctgcgctgggggaactaaaattgaagaactccatgggcaacaatggtgggagagttcatcggagaataagacctcgccggagccaagagaaaaaatgtcgttttgcgacgaaccgacaatcagatcgacgaatcaaaggcaccgggacaaagctcttgatgagatggacgcagtggtacccttggattccaccgatgacacactgattgaaagtaattgctcgccggagttgtcgctatag

SEQ ID NO: 20861 - DNA, 373 bp, Zea mays
  Peptide Sequence Number=SeqID_64236
atggatgagcttggatttttcttaagacatcttggcggagaagagctaagtgaagagaaagccttagagttggaggataatgccaaagctgtgggctacagtcctagggctatgctatttggtgggggagataaaatgttaatgtgcgtgcccaatgatgatgagtcaaagattatgaagaatattactggaagcatcggggataccgtaggagcacttacttggattgagaagtatttaggagaggttgaagccataatcaacgcccaaagcgactattgtgcaatgattgggtcgtgtgcaaatataaagacatcttcgaaggacgtgttgaatgatgcgaagagattcttctttaaggtcaagaacaagg

SEQ ID NO: 20862 - DNA, 453 bp, Zea mays
  Peptide Sequence Number=SeqID_64237
atggcatcgattgcatactcacaaacttccataaaaaatacagacacggccgctcgattagtacaccatggatacgttgttcacggaatcgaccacgagggccacgacaaatcttcaggctcgaaaggctacctgtcgagcttcggcgacgtcgtcagagactgctcggaccatttcaagagtgtatgtgagaaacaggagaacaggctgaagaagaggttcctctacggcttctccatgggaggaaccgtggtgcttcagctccacaggaaagatcctctctactgggacggtgccgtgctgcttgccccaatgtgcaagccaacagtagtgtcgaaggagcacaagatgaggtgtgagcacaaagtggccagcaagaatggagtcatggaacatgggcaggaaggggtgcggcagtggcaaccgatgtatcccttggacaatctggtttga

SEQ ID NO: 20863 - DNA, 1221 bp, Zea mays
  Peptide Sequence Number=SeqID_64238
atggaggtccgctgccaaaccagtttttgccagaatgaagatggtttccccaagttgctgagagcatgcacagttcgcctcggaatcaggagccagccagagtatgatggtcgtgaattcgttgagcatgacacagagaagtgtgttgtgactgtatacattggatccagtccgcaccatgtggaatggagtgtcactgctgctgggcacagattcaaagacacctgccaagtcgtcgcccgcaaggcattgagggccctgtgtcagatctatgaagaagaaatgattgcccgagctgaagaagcagagaagcgcaaccgtaagctccatgtggatctcaccatagctcaagcccgtgcaactgccttggaaagttgtgaagtcattgctgttgaagccctgaagcaagccaaggatgagcacatccagaagttgatggaggcctacttggtcacccataaccaacatagagccctgtggatccaagagcccgcttcatccagcccagttcaacccataagagctgaagatccccaaattcttgaaggtcacgcggtctctatcaaaggagagaagaaggcttgggaacttccggaaggagccatagtcttggaaggaattctagtctcccctaaggctatggacaagcaagagcaccccgagtcctcccaagatcccccgccagagttgtttgagcccctcaccatgaagaagattccagcaccgtcccgtgagatcaaagaagaagctgcaggcaccccgccagcaccgccgccctctgaggagctgcaagagtcagtcttgcttgaagaggagttcgaccctgtgctgccatctcagtcgccgccagaagaaaatcctctagtgggaagagcaaagagaaagaaagaggaagtgaaaagtgagaagagaaaagaagatagtgaagagaagataagaagaaggttctcccaaaatcaaccctgtgtcagtcatctctctgcagcctgctcaagcagcaacagcagaagaaggccccgtaacacccttgttatgaggtacttcaaggagttcaaatccccaagattcaagagttctaccctcattctttttaagtggggtagtgttccagtaaggttcctgccatggaaaaagaagaagtcctgtagcaagcttgtggaggaccagatcatcgaagattataagtttctggatgagaggtggtcacccaagtttcgttga

SEQ ID NO: 20864 - DNA, 420 bp, Zea mays
  Peptide Sequence Number=SeqID_64239
atgggcaccgagcaggaacacggtagggaggagcgcgcgcggcgagcagagcaggcagctgaggggcgcggctggaagaagtgggaagaagaagccgagagaagggcgagctcggggagcaggagcagggcgcagggggggtgctccacggaggggaagcaggagctcggcagggaggaagaaagtcgagcagaggagggagatgggcgccgagctggaggaggaagccacggtccgaacgccggcgagctcgaagccggctatggacgagctcgggcaaaggggccaggggcacggtgcagaaaggagcgcgcggcagggagagggcaaagggagcaaaggcgctcgccagggagcttcgcgagagagagagatgggcgcggtgtgcaggggaagaagaagcccggctgctggagataa

SEQ ID NO: 20865 - DNA, 3792 bp, Zea mays
  Peptide Sequence Number=SeqID_64240
atgggcggggtcagggcagcatcgccatcaggcgcaggatccggagccgtcgcgggggcgggatccgatcacggggcgccgcgactggctatggcgtgtgtgctagcgtcagaggccgccacggtgctcgctgtcatgcgccgcaacgtccgctgggctggcgtccgctacggcggcggcgacggtggcgcgggcgacgacgagcaccttgaccacccgctcgttgcggggctcaaggttctccgccgccgcgctgccgcttggggccagggtagttgggcgggcgttgagccgctcctctacctccgacccttcctcgatatcgtctgctccgacgagactggggcgcccatcacgggtgctgcgctctcgtcgttgcacaagatcctcacccttgatgtcgtcgggcccggcgcaccaggcgccgccggggccatggccgccgtcgtcgacgccgtcacggcttgccgctttgaagtcaccgacccggcgtccgaggaggccgtcctggcaagggtcctgcaagtgctgctagcctgcgtgcgcagccgtgcagcaccggcgcttgccaaccgccacgtctgcacgatcgtcaacacatgtttccgcgtcgtgcagcaggctggaaccaagggggagctactgcagcgtgtctcccgccagacaatgcaggaggttatacgaactgtctttgcccgcctgccggacatcaatgtcaccttgttgtccgacgagcaggttgctggttgcaagaacccatgtttgggtgctgaggagactgagaacgggaagagtgactacgtatgtttgaacagctctggcgatgaagtgggagacggttctggtgttatgcaagacaaagacttgatggagccctttggggttccttgtatggtagagatattgcaattcttgtgctccctcttgaacatagcagaagacattgagttgaacccaaggatgagtccaattgactttgatgaggatgtgccgctctttgctctggggttgattaattcggctattgagttttcggcttcgtctatacacagacatcaaaaacttttagcatttgtacaggatgaattgttccgcaatctaatgcattttggcttgtcaatgagccctctgatcctgtcgactgtgtgcagcattgtttttactctcttttaccatctgcgccatgaacttaagctgcaaatagaggctttcttctcatgtgttatcctaagattagcacagagtagatatggagcaagttatcagcagcaagaagttgccctagaggctctaattgatttttgctggcagaaagagtttatggctgagatgtatgcaaatatggactgtgatctacagtgctcaaatatttttgaagagttagctaaccttctgtctaagagcgcatttcctgtgaatagtcctttgtcagctttaaatgtgcttgctttggatggtttggttgctgtcattcaggcaatggcacagcggactgataatgcacctcaacatcatgatcaaacagttccagaaataagtgaatattttcctttctggcagttgaaatgtgagagcagtaatgatcctgaccagtgggttaaatttgttcaccagcaaaaaagcatcaagacaaagctaatgattggcgttgaacattttaatagggacaaaaagaagggttttgagtacctacaagctgttcatcttttgcctgaaaaacttgatccacacaatgttgctctgttcttcaggtacacacctggattggacaagaatcttcttggggactacctgggtaatcatgatgagttctctatccaggtccttcatgaatttgctagaacctttgacttcaaggatatgaatttggatgctgccttaaggctcttcttggaaactttccggttacctggtgagtcacagaagatacagagaattcttgaggccttttctgagcgatattatgaacagtcaccacaaatgtttgttaatagagatgcagctctggtgttatcatattctgtaatcatgctcaatactgatcagcacaatgtaagggttaagaagaagatgactgaggaagactttattaggaacaatcgccgtataaatggaggaaatgatctgccaagagaatttttgtcagagctttattattctatttgccggaatgagatcagaactattcctgagcaaggagctgggtgttctgagatgtctttcagtcgctgggttgatctaatgtggaggtcaaagagaacatcattgtacattgcttgtgactcctacccttttcttgatcatgacatgttttcccttatggccggaccaacagttgctgccgtgtctgtggtttttgacaatgttgagcatgaagaggttcttacaggatgcattgatggttttctatcggtggcgaaactggctgcattctatcatcttgatgatgttctgaatgatcttgttgtggcactatctaaattcactactttgttgaacacttcctacattgatgatcctgtaatagctttcggggaggataccaaagctaggatggcaacagaagctgttttcactatagcaactgcttatggtgatcacatacgcagtggatggaggaacataatagattgtattttaagattgcataagataggacttcttcctggtcgcctcactggcgatacaactgatgatcaggaatcctcttcagattcattacctggcaaacatacttcatcagctcctcaagttttgccaattagcactcctcggaaaacttatggactgatggggaggttcagccaactactgtacttagatgctgacgaaccaaggtcccgaccaactgaggagcaacttgctgctcagaggaatgcttcagagactgtaaagaagtgccaaataggtatcatcttcactgagagcaaattcttgcaagctgattcactctcaaatctggcaagagctctcattcaggcagcaggcagacctcagaaaatcaccagctcacttgatgatgaaggcgtagctgccttgtgcttagagcttctaattactgtcacattaaacaacagagacaggattgttcttttgtggcaggatgtttttgagcacataacccatattgtccagtgcacggtgatgccctgcaacctagtggagaaggctgtttttgggctcctgcacatatgtcagaggttgcttccctataaagcgaacttggtagatgatttgctgaggtcattgcagctgattctaaaacttgatgcccgtgtagctgatgcttactgtgagaacattaccttggaggtcacacgtcttgtcaaggccaatgcgacccatatcaaatcccagatgggctggcggactatcatttccttgctctgcatcaccgcacgccatcctgatgcttctgatgcaggatttgaagccttggtttttatcatgtcagaaggtgtgcacctctcacctgccaacttcatcctttcattggaggcatcaaggcagtttgcagaatctcggcttgggtgtgcagaaagatctatccatgctttgaacctaatggcagactcagttaattgtgttgtgcgatggtcacaagaggttagagaagctggtggagaggcagatagaatattggaaggaattgcagagatgtggatgcggttggtgcaggctatacgcaaggtgtgcatggatcaaagagaagaagtgaggaaccatgcattgttatcattgaatagatgcttggtagttgatggaatatcagtttttcttctccatggttga

SEQ ID NO: 20866 - DNA, 288 bp, Zea mays
  Peptide Sequence Number=SeqID_64241
atggagagtcatgatctccgggcagaaagggaatcacgacttgtgggtggtgatgagaatgatggttttggtattgactttggtaatggtaagtggtattctttccgtttagaaaggatggctcgtcttagacacactgcacggaagtcagtcattcctttcttgccttctcgtctcgcggagcgcccgcttcgtcgtccagtgacaggtcagtctagccacttagagaggctgcaccaccgcctgcacgaggagcaagagtgtcaacgacaggagccggagcagtag

SEQ ID NO: 20867 - DNA, 687 bp, Zea mays
  Peptide Sequence Number=SeqID_64242
atgcctccgtctcccagcagtgatgcagttccatcgctgccgccgccaccgccgtggggcgggaagagcgctggctcttcttctgctagggttccatgctccattgggctggactgggagagttatgaactaggtcattctaagattacatcacggaggggttcaaattcaccaactgacgtcaaatgcccaagcatcgaggtcttcgccaagaactattgcttgcactggcagaagaggtcttcaggtggtggagttgatcagtttggaagctatacttttaccttgaagactgggaagacgaaggaaaaagttgttcagttagccccttgtgcgaagaataagtggagggatggacaaaattggttttatgttcggtgcattaagggcaaagggtggcctcgggcgagtaccctgagtccatttcagtttgaggctttcccacactttgcggttgaggagagggaccaaaatgactattcctttgattttgctgttgttgcctgcattggccaagatctggttgatgagtatttggcgtgtggggtcttgtcgcttggtcagggctgggttgtgggtccggttgcccggaaacacttcactagttttgataggcagattttgagtcctatcttcacaattgagcttagggaccattctcgggacatattttttgcggagacataa

SEQ ID NO: 20868 - DNA, 240 bp, Zea mays
  Peptide Sequence Number=SeqID_64243
atggagaagttgaacctaggtacgatacaacaaggaactttgacaaatgtgaagcttgagtcagttcttctacaaagaattattgatgcccaaagaacagataaggccgaagatcctaaaaagaacaccttcgaagggtcttctcagaagcaagcgccgaagctattgtctataaagcttcggcacaaagacaaatctcaagatgaagggtcgaaccgacttaaagatgaattgacttga

SEQ ID NO: 20869 - DNA, 576 bp, Zea mays
  Peptide Sequence Number=SeqID_64244
atggctgacgaaatgcttgagcgtatgtggagcccctacgccgtggaggttgctcgcaaacgctctgtagcggagttggagcgggcgaggacagcgtatgaagagcaagcttataagggtgtgtctggtgctgccgctgtgagggctatctttgagactgctacgtcggtggcgccaccgccgcttcttctagggtcggctaccccgacggccgagattcgcaccactaattttatgttccatgctgctgcgattgagtcttcggttgatgacgatgacttaggtattttcacaaaaatggacgagtcatctaacaaagacttaaacttttttatcgcgatggacatcatgatatcgtacgctttcggggcagctaggggcccttccatttttgaagcggacaagattttgggccccgtcaggttttggtggggtccattcggggtgttttgtgcttgggattgtgttaatgagtctgtccttggcctctttagcaagggcagggagcttgagatcatgttgcataattgcagggaggttggtcttataccaaaggaggagcccccgagtccttaa

SEQ ID NO: 20870 - DNA, 1152 bp, Zea mays
  Peptide Sequence Number=SeqID_64245
atggagagtcatgatctccgggcagaaagggaatcacggcttgtgggtggcaatgagattgatggttctggttatgactatggtactggtaagtggtattctttccgtttggaaagggttgtcagcattgcaaccactgctcaggagaagatgaagccgtggaaggagacttccaggagttccaagactatgacgagttctaggtgtggatggctcgtcttagacacactgcacgaaagtccatcatccccttcttaccctcctgccttgctgagcgtccgcttcgccgtcccgtggccagagatagagtctgtgaggagctgctcccctgtgcttcccctggaggcgccccctgcatcaccactgggcgccctagcctctgaagtagctgctggaggagacccaaacgacggaggtggcaacgatagctcgagccacgacaccgacttttctgctgaccacgagccggaaggatgggttgctcgacccatcactcgcgacgctgctcgcgggtgtcacttccacgatgcgctcgacaccctgctacgtcaggcacttaaccggcgtacttggtctatcgagtatcgctgtgtggtctaccagcatagtcgcggggtctacccggaccgctgggaggcgacctgcttggtgcgccgtccggagaacagtctctggggtgctgaggtctgctcagagcactattctatctctgagcgggactcagctgaggcagccatgcaagatgtcgcatggcgtgcgctttcgcactactgctcggttctcggtggggtagctaacggtctcgaactgaagtattacccccgccgtccatctggcagcacaggaggcgtgattgtctcacttgttggtgaggacaatcctaggttgagcagcacagtcaacctagccgccgtgctaaacacagagctagaccatgcattggacgagctgagtagggctcgtgctgagatcgccctgctgcgggctgagcgtgcggagcgtcgtcacctggacgatggttcccccgctcccgtcgggactcagcactcgtaccgctcacctcggcgtggacgccagtcttatggcaaccccgactgcaagaccaagataaatttagaaccatatgtcgttagagtcggatcttgtaattaa

SEQ ID NO: 20871 - DNA, 351 bp, Zea mays
  Peptide Sequence Number=SeqID_64246
atggggcgatttgggtgggagagaagcgagccggggctgcggcctcccgccccgccctcagcttcaaggatcttcgtcatccttgctggggcggagggggagagggcgctcactgtcctagcggaaggggcgggcttcgacaacgcggggtcgagcggccgcaagcgtcgtcagctcctgcgtgcccggttcgctggctcagctggctctggcgcagcttccggtgccacctaccgccgctgggcggagtgcggctatctacccgtcgtgcgggcggctgtcgcgccgcatgcaccaggggaccgcccaagacgtcgcgcgctgctagggcggcgttctgtaacgccctga

SEQ ID NO: 20872 - DNA, 1134 bp, Zea mays
  Peptide Sequence Number=SeqID_64247
atgatgctcaggttcctcgaggccaggaagttcaaagccgataaggcgatgctgatgtggtcgaagatgctgaaatggaggaaggagtttggaactgacaccatcctcgaggtggattttgttttcgaggagctggatgatgtgatacgctactaccctcagggctaccatgctgtggaccgcgaaggccggcccgtgtacattgagaggctagggaaggtggatcccaacaaactcatgcagatcacctctatggatcgctacatcaagtaccatgtccaggagtttgagagagccttcagggagaggttccctgcctgcacattggctgccaagaggcacattgactccaccactaccatcttggacgtccagggtgtgaatttctccaagactgcaagagaacttgtgcaccggatgcagaagattgatagcgactattatcctgagacactccaccaaatgtttgttgtgaacgctggcagtggatttaagtggatctggaacagcgtgaagggcttccttgacccaaaaacttcatccaagattcattggcagggcttgttaagtgatacatcaaatgctgaatcaggatctgatgttgatgattctggtgcatcatttgttcataaagtaaagggcacagatcgtgtgacatacttaagctatgatgatcaaagccacccagatatggctcctgaatcttaccatagagtgcgacgagctactggaatggagcaccacaaaccaatggctggtttcagccaatattctgccaatagaaggcctgttttggcatttcagtttaagcaacaagtagcaatttcaatttgcttcctatttcagtttggcttagtttctgttattgggagtctaggatttttttgggtggatgatatggacaggcacaaactgcatcgtagagaagaggccaagagccaaacctgccccctgagttcaactgatggcaaccaggtagctacagccccttcaaagttcagcgcagcaaaatcttggcttcagagtatcgctgatggcatacacttcaaagtagatctcgcagtggccattccacaagcgaggatcgtcaccactgaaattggggaaatgcaatttgagcatcagaaaatgtga

SEQ ID NO: 20873 - DNA, 585 bp, Zea mays
  Peptide Sequence Number=SeqID_64248
atggagggggcggctgctgctcgagcaaagggttgccagagcacaacagggcagcaggagaggagggtaacgacgatggagaaggggtggcggcgctgccgaagggcgcatgcgcaacagtgtgtaccgtattggtacagccttcttgttgcacaggaatcaaacggcaggcaggaggcagcttatgacgtccaagcaccagctagcctagccggccactcatccttgcgaggcaggaaaggattacagtcccaagacactgaacaatacagcttcgcaagggatcgagaagcagacaagaagaagagaacgggcaacgtcgatacggctaaaaggacggtaactggtaccaaggtcagccctcgcaagaaatgcctcgacgggaaccggacacccgggaagacgtcaggcgcgagccgtgcccgcccgtcccgacccaggcgtgcccaaacaacgatgcacgccgtctcggcgcgacgcgcgcacccgtcggcatcaaactgtgcgctggacgggaccggtcggctgagcccgggaggatcggtggacggccttggagccttctccctggcgacgaatctctag

SEQ ID NO: 20874 - DNA, 947 bp, Zea mays
  Peptide Sequence Number=SeqID_64249
atgcaggcggcatgcaaccgcgccaagtggacacgcttctccgactcccagcgcgccagcacggaggcccaggcccacgcgtcgcgcaaccggcgcgccggatgctgcatgcaagcaactgcaccgccacttgcgccaccgccgcgcctcttcggttgcggaaccaatgccgcgactcgaggcgacccagcggcgccagcctggcgcgacggtcaatacggccgaaaggaccggggaagggggataccccagaaaggatccttccctgtgaaggaaccgggctccgagccccctactgatcagaggttcgaaggctggccctccgaagggttcaacaaccacctcagatcgcgtgggcccgacacccactactggctggcccccgaagggttcacagtcgcctcagacgccgagcgagggatgaccaggggggaccgggtccggcagatcacccgcaggtacttttgggcgtgcctctgggcccctagccgacccccaacgaacggggcacggacgtccactcggattacccgcttgcagctcaccggagacaccatgttcggtgcccatcgaggggctcggactcgggctaagacccggaagacggcgaactccgcttcgcccgacccagggctcggactcgggctaagacccggaagacggcgaactccgctccgcccgacccagggctcggactcgggcacagccccagaagacgacgaactccgcttcgcccgaccacagggctcggactcccgccctggcctctgcccgaacgatctcccccctgctccgcaccccaggaggctcggggctcggcccccgaagacagactcgacctcctcgagagcccagctcgctggtccgggcatcccgggcccgctcgccccgcgccgccgccctcgggcggaccggggggcttaccccgggggccgccccgggctggg

SEQ ID NO: 20875 - DNA, 705 bp, Zea mays
  Peptide Sequence Number=SeqID_64250
atggcagcaaaatcaacccaaggacctccctacactgaccactcccctactgcccttgcctctttcgggggtaccccaaggctcctaatctcagctggtaacccccatcagcacaaagctgcaaaggaatctccgcctcgcccgaccccagggctcggactcgacctcgcctcggacgacaatctccgcctcgcccgaccccagggctcggactcgacctcgcctcggacgacgatctccgcctcgcccgaccccagggctcggactcgacctcgcctcggacgacgatctccgcctcgcccgaccccagggctcggactcgacctcgcctcggacgacgatctccgcctcgcccgaccccagggctcggactcgacctcgactccggaagatggtctccgcctcgcccgacccccggggctcggactcagcctcaacctcggaggagtcaccacctcgctcgggccgaccacgccacaaggggaggccatcattaccctacccctagctagcccaggctacggggaacaagaccggtgtcccatctggctcgcctcggtaaaacaagtaatgatggcaccccgcgtgctccatgacaacggtggttctcagccccttacggaagcaaggatacgtcagcaaggatccgacagctgtgcttctaaagggctcaagcgctcctccgacggccacgacgccacatga

SEQ ID NO: 20876 - DNA, 222 bp, Zea mays
  Peptide Sequence Number=SeqID_64251
atggcgaggtggctgcggctgaacaggacctcaggtctcggtgaggctgcctcccgaaggccgttgacagctcttttatacacgctggtgtccagcctcgacacatcgagcctgcaccccaggcaggggctaggtaccaaggggaaggcctgggggccggttctaaggaacggatgcccgttccatagggtggtccggagcctgtgtggccagttagcctag

SEQ ID NO: 20877 - DNA, 1017 bp, Zea mays
  Peptide Sequence Number=SeqID_64252
atgacgctcatgcaagtggtgtggtgccaaccacaagatgccgtggtggatgacctgaagaatgatggacatgacccgtggatgctcgccaagcgacctggctgcagtccccaccggtggtcatccagaaggatgactaccagccttgtggtggggagaagcaaaccgggctgcggcctccctcctgcccttagcttcaaggatgttcatcatccgtgctggggaggaggtgaggacgggagtgaagacctcttcgtgcacgctggcgcggccaccgtttgctggtacggtactggtgcgcaggtggccgctgtcgtcagtgttgaggtggtcgtcgccgctggtgaggctccccactgcagaggtggttgcctccgtcggcgagaccgtcagtgccacctgctgccggacctccggctctttggctttaatggcttgttgtcgccccccgtagagagacggggacgaggtccttcctgcagcggcacacatgttgggatgattgccgttgctggcgagtcgtcggtgcagaggcggccgtcgccgttggtgttgatgcggttgcctctgctggtgagccgattggagtttgttatcctgcgacccttctggctcacgatacgggaccaggctgagcggctacatggcttccggacccccccaggagaccagtgcctgttcttcaaaactggacctccagttcgttggacgcacaggactatagttttaaatactaggacacctgtcatggagtggtggagtgtgcagggttttgggctcgatgtgtcgaggctggacaccagcgtgtataaaagagctgtcaacggccttcgggaggcagcctcaccgagacctggatctgggaagcaagctgtgtgtccggaccccctggatggtggttctaaatactacgacgcctatcaaagagtggtggaacatgcaggcccacgatacgggaccaggctgagcggctacatggttccggaccaccccaggagacaagtgtctcttctctag

SEQ ID NO: 20878 - DNA, 1356 bp, Zea mays
  Peptide Sequence Number=SeqID_64253
atggctgatttggagtcaattgtcagaaatctagggctatctctacaactagaatacacattctggtatcgtgatgcttctctgattgagcaattgccactgatggtggctcttcaacggcctcctcaatatgcttgcggatgccttttcattctgtcagaagtccttaaggcaaagccaccattatgggggattgtgctccagaatgaatctgttgatgatggtgatgaacactttgaagacattttagagattcccgaggactcttctgttgcctcagcagtgctacataaacataatgaaaaagtagctgcacatgagaaacacaaccttgatgctgctgatggaattgatagtgtaaaacaagtaaatttggtagatgagaacaatgcatcaactgactcgtccagacaacatgcattctatgatccacgacacagagagccttcttactgcaatgcagatcgtgtcagttggtgggagttaacagtattggcttcacatgtgcacccttcagtttctactatggctagaacattgctatctggcaacaatattgtttacagtggtgatccgctgacagacctatcacttcctgctttccttgacaaattcatggaaaagaaaccaaaagggaaccgcatagctgaaggaagatggcatggtggatcacaaattgctccggctaaaaagcttaatctgaatcatcatctcatcggagaggagcttctagaattggcagaaaatgaagtgcctcctgaagatattgttttccaccgtttctatttgaacaagaccggcactgttaagcgtaagacaaagcagaaggactcagttcttgatgaagatgcgggggaactcttagctgataatgacgctgatgaggctagtgacgagagtggagatgagatactggatctgggagatgggttggcagatgatggagaatatgactatgacgaccttgactcaaatgcatttgaagaggaaaaagatttacttagagatgacagtgatgtggaatttgatgacgtttcagatgatactgcatctggggatgaagggtcagaaaatgacgatgacattcctattctcgcgggcgattcagatggcaacttaagtgatgacgagatggttgatgctggtaagggcggtgtctcttacacaaagaaaaggagggcagggaagaagagtgggttgtctccatttgcaagcctggatgattatgagcacctaatggttggggatgctgatgcaacaacagcaaagcggaagcacatggcaacagggagagctggtggtgagaagaaaccaaagttgagaccacgaaagaaaaggtcgcggagttcagaatga

SEQ ID NO: 20879 - DNA, 807 bp, Zea mays
  Peptide Sequence Number=SeqID_64254
atgggcatgatcctcgatggaggggaacacactggtaaaaagcgtcactcaggtgtggtactaatgagctctggtgataccaaaggagatacatatagcaaggacagcaagaaaaaggtaggaaaaatagagggaggaaataacaagatggactccagatccaagggaaacaatgaagtgggttcaacagcaggatcagatttggagctggactccagaatcctttctgcgcttttaactggtgtaaatagggcattaccatatgttgcaagctcagaagttgacgatattgtggaagtgcagacacctattcttttcagattggttcacgctgaaaatttcaatgttggtgttcaggcattgatgcttttgttccaaatatctataaagaataatatagcaagtgatcgtttgtaccgtgcattatactcaaaactcttgagtccttctgctgttacttcctcaaagccagagttatttcttgggctgttggtgaaagcgatgaagaatgatgtaatgttgaagagagttgctgctttctcaaagcggctgctgcaggccaccctcattctcatcatttggagcaccatcatgcggagtagggctgtggttggccataatcatcatcaacatctagtcatcctaggcaacaacaatgccctgatcatgggtttcctcttctcccgatccttgctcttcatcattgaggtagaaattaaaccatgtcgacaagtatatgccctagtcatcctaggcaaattgtggcctttaagtgaccgtgatgcaccgatagcttcatcaacttga

SEQ ID NO: 20880 - DNA, 732 bp, Zea mays
  Peptide Sequence Number=SeqID_64255
atggtgagctcggatccggacgggaacggaggcgcgccggacgtctccgagcttttctgccactacaactccctctacttccgcgattccctcggttcgtgcgctgtctcatggaccgaggacccactacctgattgtgatgtaagcacatgtgactattatccgggaggtggtggctgtataatactgctttccaaatcattatgcgggtctcataatggatctgatctgaagaatgctttgcttcatgagatgattcatgcctatatttgcatcaaagacaataacagtaaccatagtgatcatggtgcaaaatttcagaaactgatgaatacaatcaatttgagttctgtagctgatccccatcgaccagttgatggctacagcataactctgctccatgagatccataagaaatattatcactacaaatgtcaaagctgtgcagattttatcaagtcaaccaatatgagaggaccttctggtgatgactgcattgagagaaaaggtgtagatgacccatgtcataattctaactgtcactggcataggtatggttatgcacttcatttgattgattgcaatatttggtctttcttgtctactctgtcaaaagtggaacaattgaggtacaataatgagacaaatgtgaaacagtggctctcaaatatcttgtcaactgtcctctcaccccgttccggcgaggatatttatagggtaaccaagggataa

SEQ ID NO: 20881 - DNA, 351 bp, Zea mays
  Peptide Sequence Number=SeqID_64256
atggaaggagatcgcgcattggacaagctacaggacctgtccggtggtgcaccggactgtccgataatggtccgttggcagagtccgaaggagttgcaggcgaagactctgagcagcagctggttggtgaaggaaaacggtacagccatgagggtggtatgggatgcccttagccaaataattagaggaactgaggtgttgtttgctttgccgtcgtaccatcaatggggcttggtgtatgcggctcgctctgccgagggtggttttccccttggggaggagtgcagtacatttaggaaacctaacgggtggatacagcctcagggaatctttgtaaaggctacacagtga

SEQ ID NO: 20882 - DNA, 478 bp, Zea mays
  Peptide Sequence Number=SeqID_64257
atgttgctcaaaagaaagccaacttttgaacgagcatcaagctacaggatcaaaggaaaagtgctcatcaataaagaaaggaacaagaaaacaaagcaactaaggagaagacgcattgctcaaccttctcaagatatccacgggtgcgtggtgaagaagcttgagacgggagaaactgcagcaagtgttaagctccataagaaggatgttcctaaagcaaaaaatgaagaaatcaacatgaacaaggaaaaagatgacaacccatttaaaggactaacaagtgtgctaagtgttgaacaggtgctgaatgcaaagcgaacagggttcaacacaaagacaaccgatcaagccaaggatggaagcaagaagagcttcgaggtaccgagtgcacgggggaaagtcaaggagaccaggaacccaaagccaggggtgaagaagaagacttgcaaagtcaaggttgatcttgttaagagttatg

SEQ ID NO: 20883 - DNA, 450 bp, Zea mays
  Peptide Sequence Number=SeqID_64258
atgaacaaacacaccggcattcgagatgccattacgaacggaactccggttccccctccgcaggtacgaacaaccccactccgagggggaaggcctacggagcaacggaaggccgacgaacggcacgccgtcacctgctccagcagcggcgacgacgacgacttctgctccggggggtcgaacagcggcagcactgaccctagggcggatgctgctgccaggaggcccccgcccacgacaaaactcgtgaggcaaggacggacagaaggccgtagagttggaggtcagtccgtggccggccctggctaccgcaccggcagaagaacctcttccagctgccgtggcggacgccggcgccgcgagcggctccgaagccactcgcgtctgaagaccggacatgctgcagctgccagcgccacggacaacaaccgctcctccccccatcactga

SEQ ID NO: 20884 - DNA, 306 bp, Zea mays
  Peptide Sequence Number=SeqID_64259
atgcaggtggcgtgcaaccacaccgcgagggcgcaccccctcggcttcgtcgcatccagcatggatgcccaggcccacacgtcatgtaaccggcgcgccggttactacgtgcaagcaactgcaccgccacttgcgccaatgcctcgcctcctcgactgtggaaccggtgtcgcgactcgaggcaaccctgcgcatggcccaacggtgccaatcgagcacaacgatcatgggtcgggactgggaaaggggatatttcaaaagggatccttctccacgaaggaagcgggcctcgagccctcctactga

SEQ ID NO: 20885 - DNA, 2019 bp, Zea mays
  Peptide Sequence Number=SeqID_64260
atgcccgcttcgcctgccaaaggcgtcgcttgccctgccgaggagttaatgcgacgggacgagcgattcgcgaggcggccgttgcgcgtgcgcgagtcgttcgaggaacggaacacgggcgcgttgtctttactctgcgagagagggctcccctgccgcttcaggaggggacgcgagcctgcaggcgatttgaccgctgcttccgctcggctgcctcgagtcgcggcactggttccgcagtcgaggagacgcgacattggtgagagtggcgcccgcctgacgtgcgggacccagcccccgcgtcataggaggagggccctgaagcacatcggtggagactttgcccgtggcgcttggggatacgagtggggagagccgccttttaaaaaaggggtcggtctcccgggcagtagccatgccttcgcactctcctcatgcatcgcgcctttccaccttccgagcccccagatggggcgcatccgtgttgcctttgtcttgctgttgttggaggagcacgacctcgcgggggttggcgcccttcagccatcgctcggcttcaaggattttcatcatgcagcccgactgcattccctcaccaatggctggggaggagggcggggcgagttggggcctaccttcgcgtgggccggcgacccgcttcttcctccggcgttcgggggagaggggcatcctccagctgtgcggaggaggcgtcctccagccatgcgggggaaggcgaactgctgctgcttggacagggtgcagctgtccgtcctccaccccgggcggcggtcgtgccgtgcgcgggtggctgctgtcaccggcctcgcggagggggcgaacttcgacaacatgggcctggtcggccgcgagcgtcgtcagttgcagcgtgcctggcacgctggctcagctggctctggcgccgcctccgatgttgcctcctgccgcttggtccgggcgtggctgtccgtccaccgcacgggcgactgtcgcgccgcgcgcaggtcgggcatctcgacgcctccacacggaggccggtgccggcccgtccgcgaggagttgagtgggcatctgtcggtgcaggctggggtggtcgccattcgtcggcatggcgctgtcgcgcaggtggccgctgtcatcggcgctgaggtggtggcagccagagaaggtttctccgccggcgagaccgtcggcgccacctgcggtcagacccccggctctttggctgtgatggcttgtcctcgctcctcgtgtgggggcgtgggcgagggcctttccacagcagcgtctgccctgaggtcatcgctgctgctgtttagccgcccaaagcggaggtcgttgtcgctgatggtgcagtggtcgccggcaagccacctggagtttgttttcccgcaggccctccggtgtggagattgttcatacccgcgggagtggaaccggagtcccaaccttcgatcgctttgcgatgagctgaagctggaggcagcggtgtcggcgcggacggaggcggtgtcggctcgaaaagaggctttgtcggtccgggagcaggtggcttcccaggccgaggaggtgcagcaacggcggctagagcttggccaggtcatccgcgagcgggaccaatcccgaagtcacgccgccgaggccgtgagccgggctgaggtcctcgggggacaatcggctgaggcgacggagcggctagccggggtgtctgctcgggccagaacccttgcggagagcctggccgtgagggtccgagcgcggtgctggcgtcctcctttggtgtggagatctgagcctggccgtctgaggctgggccggattccgccgggggtggaaacgacgccaagggtgctgctgctccctctgccgacgtctgaacctgcagaaacagtttgtctgaaaatcacttatccgagcgagagttacttttcgcggaaggtgatgagtgagtcgaaagctgttttggtagaaaacttttccgaggaaaattttgacgcagagggggttccccccttctag

SEQ ID NO: 20886 - DNA, 594 bp, Zea mays
  Peptide Sequence Number=SeqID_64261
gactattccctctcgcctcagcagacggtggagtctaggaggcagccctcctctgtgcctcagctagatgtgccccctgcaccaccacagggcaccctagctactggaggagaccctgatggagacgacaacgacggtggtagtttgagccacaacatagagctttcagaggagcaggagccggaaggatggatcgcccgatccatcactcatgacgccgcttcgtggttgtcatttccacgatgctctcgacaccttactgtgttgagccttcgaccgacacacctggtctatcgagtaccgctatgtagtctaccagcacagtcgtgggttatacccggaccaatgggggctacttgctcggtgtgccatccggacgatcatctccagggtgcagaggcctactcagagcacgagttgggcaaggctcgtgcggagattacggaactgcgtgctgagcgcgctgagcgccgccataaggaggatggtttccccgcccctgttgggactcaacacccttaccgctcgctgccacgtgatcatcatgcttatggaacccctgactgcagggccaaaatagacttggagccctag

SEQ ID NO: 20887 - DNA, 444 bp, Zea mays
  Peptide Sequence Number=SeqID_64262
atgtgcgggttgccgtcggggatggtcggagtcggccggtccacgtgcacaggcggggatgctcgtcggcggcgaggagttcggcctgctcacggcgcgatagttcaattgaacgggtcagagagcttcaccagggaacaagaaaggggcgggcgaccgaagtccggtgaagtcgatctcgggcttccggtgaagtcctgccgggtccgagggcttgaaaagcttcacgggccactggcggagctagccgaagcactggctcgacttgggggcggctggagtgggctggccacggttgccgaagctcaggcggtggtggcgggcggaaaagagctcgccggagctaaggaggggttgctggccggtgaggagatatggagcccggaaatctggtctgtctccctgctcaaaaccgaggcaaatccagggttttgtcatgtctag

SEQ ID NO: 20888 - DNA, 546 bp, Zea mays
  Peptide Sequence Number=SeqID_64263
atgacggtcgccaaggagaaggcgaagatgaatgacaaggaggaggttgaagcggtggtgggcaagaggaaaccggtggcgcggggcctaaggatgaacaagacccatggcagccctactgtccggaaggaggtggtgccggcggtggcagacaatgtctctggcagcgacacgctgcccaaggatgccaagaggcagcctgccgctgacaagaaaggcgacgatgggggagtcgcaaagaagcgcaacgccgtcaacttcctgaagcggataaagcaaggccgctcagcgtcgtcaacggagcgtgtgtcactgctggagacgctcaagctatcggtcgcggcggagcagaagaaggtcgggaaaggcgaggacgagaaggagcccgcgagtggatctaggtctaggtccaggtccaaggcccagccggggaggaggaacgttggcaggccactgaaacgcccggctgcgaccgcgaccccgatcccgccgtcgtccaagagggcaaggggcggcggcgaggggaagcgtgggggaaggaagtga

SEQ ID NO: 20889 - DNA, 1104 bp, Zea mays
  Peptide Sequence Number=SeqID_64264
atggagcaccgcgccttcgactgcagcgggagtgatgatgatctccctccaacatatcaaattagagtaccgagaatgcatttcagtgggaacagaaggcaattagcaggcccattttctcagccaagaccacacaacaagttggatagcgatatacatcagattgagcaacaggcatatactggtgttcttagagcattcaaaatgcaatcggatgccctgacatgggaaaaagaaagtctaattactgaactaagaagagagttgaaagtctctgatgtggaacacaggatgctattaaacatggtcaatgaagaggaggctatccatagaataaggcagtcaaggcagggatgtggaatgcaatctagcttgccttataatagcgtagttgatcacaaccttggacctatcaagcggcagaagaaatcacatcccatctattcactccctgtggatccccattcacccagcatgcctttgaaagcattggtggacaacaagatatatacattaaaaagttccccaccccccaccgcaccccgacagctggcacctgaaaacataagacggggatctgcctatcaaacccttccacatcagggtggttggctggcatctgatggtgctacgaaaggtatggatgggagaagcggaaggtatcacacgaacgagtattatgcttcacataatgacatggggcttttgaacttcaatcgtactgacatacctgatactgaaactcttgtgaaaaaggtggagagggtattatcccggccagatgtgtatgcaattgaaagggcaaaggaactgcttataggccaagagcagtcattgcttgatgcaattgccaaacttgatgaagcatctgaccatgaaagcgctttcacaacgccattgaaatgccgtagcgaattggcaacttgtggcgtgtgcagaaggcttggcattcataggttcgctgagctgtactgcttgtcaatgagtgggtggggaactgaatttgggaaattttctgccgagcatattacatctcataacgttttgtatggtgatcccatcagaccttgcacgttaattgtgatattggtagaagttcagtaa

SEQ ID NO: 20890 - DNA, 408 bp, Zea mays
  Peptide Sequence Number=SeqID_64265
atgacgttcggctccctcgacttcctcgccaccgccactggtgaactgcgcctcaccgaccccgacatacttgtggccacaagcgcaggacccacgcgcttcactaggagcaaggcaaagaagcgcctcaagaggcacgtcgccgccctacagcaacaccttaaccggctcgccaccaccataaagcatcgggcggaaggaacctcgccttcaacactcgtggccgtcattggccaccaaccaacatccgttctcaacctgatcgaggaagactcgagccacagctcaactgagtccaactttgatgccaacgaggtggctgaaagggcatgttttgtggcaacacgaccacggaacaacaatggtggaggggatgaggagtcccctaaccaggaagaagagtactag

SEQ ID NO: 20891 - DNA, 102 bp, Zea mays
  Peptide Sequence Number=SeqID_64266
atggaggagggagtaccggagtgcgccgcgccggccgtgctcgggccagcccaacgggctcaagttcctgtcgagcccggcatgctctacgggccgggctaa

SEQ ID NO: 20892 - DNA, 321 bp, Zea mays
  Peptide Sequence Number=SeqID_64267
atggctggaggacgcctcctccacagagctggggggtggcttccacccccagaagctggaagaagaggtggccagccgactcatgcgggaggtcctccccctacgacacgggggctgggtcccacgcgtcatgcaagctggcccagggtggaagaagccaaactgccgcgcgcggtgcgcgtaactgcccagcggttacaagcgctcctccactttcgcccaaatcagcgggtgaaagggcggaacgccatgcaggcggcatgcaaccacactaagagggcgcaccctttcgacttcgacgcgtccagcatggaggcctag

SEQ ID NO: 20893 - DNA, 987 bp, Zea mays
  Peptide Sequence Number=SeqID_64268
atgccggggaaggcgaactattgctgcccagctaggatgcaacattccgtcctctgtcctcgctttcgtggcgaggacgagagtgaggacctgccggtgcgctttggggcggccgacgctcgctggtgcggcgctggtggacaggtggacgcctccgtcggtgctgacgtggtggcagctggagaaagcttctccaccgacaatcccgtcagcgctacccgcggaccgacctccggctctttggctttaatgtctgattcgcgtcccttgagtggggacgcgaacgagagccttccagctgcagcgtccatcctgggaccctcgctgctgctgcagaggtcgctggcgagtcgcccggagcttgtcgccccgcaggctctccggtgtggaggttgttcatacccgcgggggcggaaccggagttccgtttgtaatggcaccttgaatgccagtgactgttcattgtggctgtcggggcctaaacatgagtccctcggctcggtcggccttgccgcccgaggcttcccttgcttagttaaaggaaccctcggccgctctgcgagcggagatcctccgaccgtgttgccgtccgaggcttggtcggacttcgccgaaggtggagttgactccgagggtgctgctgctccccttccatcgacgtctgagcctgcaggatcgtatctggacttatttgtcggtaacagaattgtttgtccgagcgagagttacttttcacagaaggtgatgagtgaggattctgctatcgatgtagtcgagaaggcccaaaaaatcgtttcggcagaaaggttcccgagcattaagacttgttcggccagcggaatcgcttatccgagcgtgagttacttatcgcagaaggcgatgagtgaggatcccacttttgaagtagtcaaaaagcacgaaagacgttctggcagaaagactttttccgaggaaaattttgacgcagagggggtgccccccttctag

SEQ ID NO: 20894 - DNA, 1695 bp, Zea mays
  Peptide Sequence Number=SeqID_64269
atggctgaaaggtaccaactcccacggagttgcgttcccccaacgacaaggcggaaagactgcgggtatcccccatccgtgggcttggaaggtggaaaggcacgatgcataagggagcgcgaagacatggtcgcctttcaagggggtcaccctccttttaaaggcgactctccctacttgcgtccccaaccgtcgggggctgagtcttctccggcacgctccaaggtcctccccctacggcacgggggctgggtcccacacgtcatgcaagccggcccagggcagaagaagccaaaccgccgcgcgcggtgcgtgcaaccgcccagcggttacaagcggctctccacttctgtccagaccagcgggcgaaagggcgggcagccttgcaggcggcatgcaaccgcgccaagtgggcgcacttctccgacttccaacacgcccagcatggaggcccaggcccacgcgtcatgcaaccggcgcgccggatgcttcgtgcaagcaactgcaccgccacttgcgccactaccgcgcctcctcaactgtggaaccaataccgcgactcgaggcgacccagcgcacgacccagcagcgccagcctggcgcgacgacgacgcgcccgtgttccgttcctcggacggcccgcgcacgcgcaacggccgccccgcgaaccactcgccccgtcgcattaactccgcggcgggacaggcgacgcctctggcaggagaagcgagcgacgcttcccttcgccataatgaccgcgtcaaaaaagccgcctcagagcacgtgggctccacacccactactggtcagaggttcgaaggtcggcccctcggaagggttcaacggccgcctcaggctactcgggctccgcgcccactactgatcaggggttcgaaggctggcccccgaagggttcatagccgcctcagacatagagcaagggatgaccatgggtacgttcgatacataaccaaggctcgggctgcgctcccgaggctccggggctgctctcgtgaacccggctccggccaaaccgttgacagcgtcaacataccagcccaagaacttgggacccgaccgtacacccgggctacggccagctcgcatgagggaacgaccagaccagccgaagcattacgcgaggcattaagacctcagaggagtcaaaccactcctccgaggcctcgggggctacacccggtgggtgcgctctcgcgcacccaccggaacaaaacgcaaccgagaaaggctggtccccttgcaaaaaagtgcgacgaaagcctccaagcgagtgctaacactcccttcgaggcttgggggctactgtcggggaccataattaggggtaccctcaaggctcctaattctcagctggtaacccccatcagcataaagctgcaaaggcctgatggggctcggactcgggctaagccccggaagacggcgaactccgctccgcccgacccagggctcggactcgggctaagtcccagaagacggcgaactccgctccgcccgacccagggctcggactcgggctcagccccagaagacgacgaactccgctccgcccaacccagggctcggacttgggctcagccccagaagacgacgacttccggctccgcccgacccaaggctcggacttggtcctcagccccagagacgatgactccgctcgcccgacccaggctg

SEQ ID NO: 20895 - DNA, 525 bp, Zea mays
  Peptide Sequence Number=SeqID_64270
atggtgacctccagttcgatggcgggggaaagcaaaccgggccgcggcctctgcccctccctcagcctcaaggattttcatcaccagggctggggaggggactgccgcgtgcctggctctcggacccgagtggcttcggagccactctcggcgccggcttccgccacggcagctggaagaggttcttccaccgacgagatagccagggccgcccacggaccgacctccaactctacgaccttctgcccgtccttgcctcacgagtttgggcgactcacgcttggcctcgacagccacaatgaacaaaaacactggcattcgaacggcgacgacgacgacttctgcttcggggggccgaacagcggcagcgatgacctcagggtggatgctgctgccaggaggccccgtgtaaaggtgacgggtgagagtggagatcctcggaccacgtcgccgttcgagtctaggtcggacctcgccgaaggtgttgcagacgccgagggtgctgcggttccctcaactgtccgg

SEQ ID NO: 20896 - DNA, 695 bp, Zea mays
  Peptide Sequence Number=SeqID_64271
atctggaggcgctggttgaagctggcctgcctcgaccccagcccaagtggatcacgtcgcacgacgagcaggtgtcgaatccgcccaagggctacattgtcagcttcacctcgttccacgaatggggctttgtggtttcggtgaaccgcttcatgcggccatcttctccaccgtctacaaggggttcctggggattgagttccactgggattgagcccttttccctcgcaagcgaggtgaggaagaagctccgagactgcggtctcaccacggctagagttgtcacggccttccacaggcaacgggtgctgccgttggccgaccgccgactccgcctcgacgagatgacccctatcggtaccctgaatcaggggatgtatcagttggaccggacctccgcgaggaagcaccagacccctgtacgcacaacccagacccccgattatggttcgggactcccaagtaagcatgccgagacccttggatggggtccggatccctccgagccttatcctgtgcgcttgcgctccccgctcaggtggagacccgatgctgccacatggcttgttgcccatgacagaagccaatgggtggagcctaacctgaagttcagctcagctaaaaaagctcaactgcagctgaagaagctcaactcagctgaagtaagttcagctgaaatgctcaactgcagctga

SEQ ID NO: 20897 - DNA, 465 bp, Zea mays
  Peptide Sequence Number=SeqID_64272
atggcgaagctaactattcctctggttcctcttattaatcagctaagggcgtcccattccaccctcatggttgcactgttatccccgggacataataggtcagaggacacttgccttcaccaggttgttgctcaaagggatcttcggcaacacactcgggaacctcgagctgctcgttgtctaagtaaagcgagcatacattcaatacatttggaaggatctaacggccagggtggacttgggcgcggtggcgccgctcggtcccgtagtgagaactcgccggagacgagggggctggccatggtggggctcccggggcttggggactggcctgggcgcaatcaaggcgatctggcgggttcagacatgggcctcacgccggtaagggagcacaagagggcgctgcacatggcgaggtgggctaacggcggcgcggggcaactccggcgaacaatcgcgcgctaa

SEQ ID NO: 20898 - DNA, 453 bp, Zea mays
  Peptide Sequence Number=SeqID_64273
atgatgcaggtagactacacaacggtactcgatggaccaagtgtgtcggtcaaaggcccgacacaacagggtatcgagagcgtcgtggaagtgacacccgcgagcagcgtcatgagtgatgggtctagcgatccatccctccagctccggctcctccgagcgctccgtgccgtggctcgaactgccaccggtgtcgtcgttgtctccgtctccgtcaggggggcatctctggctaaagtgcaggggaaggcagcctctcagactccacctcctgctgaagcgagggggaagagttttgctgctcctgctcctgcccctggcgtcggcgctcctgctcctcgtgcaggcgacgatgcagtctctccaagtgactggactgacctgacaccgtgcgacgcaatggacgctccgccaggcgaaaaggcaaaaatgggaccacagacttatgtgtag

SEQ ID NO: 20899 - DNA, 240 bp, Zea mays
  Peptide Sequence Number=SeqID_64274
atggaattaccactagacgcgcagagcagcggaagacgtctcgatgtagacgaacgcgtcgagcagtgtcgtgcagtcgccggcgtccttcacatccttgcacggttcatccaagtgctccagatgcagcacctccgagacatgggcctcacgccggcgcgggagcaccaaagggcgctgcacacgacgaggcgggctaacagcggcgtggggcaactccggcgaacaatcgcgcgctaa

SEQ ID NO: 20900 - DNA, 165 bp, Zea mays
  Peptide Sequence Number=SeqID_64275
atggctgagattaccccgtaccccttcgcgtgccttagtgagttaaatagaattcgggggctcaggctgtttcctgagtacctctctgtgcaagctctacagagtgttagaaactggtatatcagccgtgctcacggttatgagcagccttgggatcctctttga

SEQ ID NO: 20901 - DNA, 139 bp, Zea mays
  Peptide Sequence Number=SeqID_64276
atggcgaagttgggagatcgcgacgcgcaggagcctcactgcgcgcagagagcagagcgcagggaggcgatgcagggcgcgacggagaagacacggctgggctgggcaactccatctccatgggcggacagagagcagg

SEQ ID NO: 20902 - DNA, 243 bp, Zea mays
  Peptide Sequence Number=SeqID_64277
atggcccccaagagagccaattcgaaggctgccccatccattgacgacgcggcgaaggcagcactgctggcggaaaagaaaggcaaggccctcgccgacaccgcccccaagaggctttcgaagatgatgctgtcaacagcaagagacagcgccaggaccaccccacccccaacggcactgtcgagggcacaccacaagcaccaccaccaggcttcaccccgccagagggtgaagacaccatag

SEQ ID NO: 20903 - DNA, 1200 bp, Zea mays
  Peptide Sequence Number=SeqID_64278
atgacgtcggtggttctcagtgccctacggaagcaaggagacgtcagcaggatcccagcagcatcgacaactgtgcttctacagggctcaggcacttatccgacagccacattatcaccacatacttggtttgcattcgatttaccttccaaaaccgggtgtgacaacagagcagaggccaccacccacactggggtcgaccgagcacacgcgttgctcgtggacgcgtaccgtcagcttggtgcgcgtaccgccccctttgacacatccggcgaagaggtgggcctccgcttcctcgggtggctgcagggggacctggagttactcccgtccatcgtgatgggtctcatgtccattgcctcgctcattacctacgagggggctgcgaatgctttgtcccgtgagggatgcaggcatttcgaggtctttgaccaggcaaacatggacttcgaccgtggaatcttcctggtcgaagacgagatggcgaacgatgaagaagtcgacgacttcggtggcctggaaagctcggtgacccggacagaagatgctaggacgggggttgagcaaccggcgacacaaaccgaccctggagaagaccccgcccaatggcggttgcatcggctggcgaaaaccctccatcggcagctgcactggctggcaaaggccctccagtggcagccgcgctggctggcgaagaccctgcagcggcagctgcaccggctggcaaaggccctccagtggcagccacgccggccggcgaagaccctgcagcgtcggctgctccttcgcaggtggcgggtgcctgttagtgcaaatttgtctggttctgaaactgagtcttggtcatcagacgagggtgagtttgggagctcgttttcgtggacagaggagtcttcggatgaggatttagatttttttgctgcgttggatgtggccgcggcggagtccttgtcgcagcctgaagcacacgaagtctctattcccccggctagggcgatgctcgaagagcaccaccgacgaagggtggtgtctaagcacaatgttggcgagatgtcgcgaagtgggaggcgtcgatggatggggatggaacggtcccatcttcggctagatcggggtggccagcgggatttgatgtcatcgacgtccgtgtggtcgacgacccttcgccatgtttatgtacactacgaggacatgttgtga

SEQ ID NO: 20904 - DNA, 714 bp, Zea mays
  Peptide Sequence Number=SeqID_64279
atgactcccccaacttttctcgagagcaacgagttcgtcgagcaagccagcctaggcaccggacagtccggtgcaaccgcgggctggtgcaagtttggctacgtgaagccaaacttctccaatccaatttcatttgatttgacaaggttcctagcacttagagtaatattttttacattaaaaactgctagtgagatttggctaaaattacatgagctccatgacgacacatccaatatccgtgagcaaaaacatcgtctagctttaaataattataattcttttgccatgaaagaaaatgagcttgttagagacatgtactatcgtttaaatctaaccatcaataagctcaattctattggcattaataagctaggtgatgtggacattgtaaggaagattatctcactactaccacaacaaagatatggaagcatcatcaccattcttcacaacatggaggacttgagtacaatgaccccgacaattgtgatccgaaagattgcggcatttgaaatgtcgcgaaaaatgggtcgacaagagaagccaacttcttcaaggccatatgcttttgcatgtaatgaaaagagcaagggaaagaagaaggctcccactccaagtttctcaagtgaagaagagggagaagaagaaagtaataatgatgaagataatcaaccatcaacatcatccttcgtggacgaagaaacaatctga

SEQ ID NO: 20905 - DNA, 819 bp, Zea mays
  Peptide Sequence Number=SeqID_64280
atggccgataaaggcaaaggcaagggcatcgtcattggcgatcctcgcatgtcaattatatcacaaaaggagattgctcgaaaggcttcgggcgagaaggctaaaaggttcgaagacgccggggcaattttggaccctttgctcggcgtcataggctatggcgccgaggtaacacagctcggcgccctagcctatggcgccgaggtcggcctgcccgagcctagacaactccttggatctctcctccccgacggggtccctctcgagagcgagatccaggcgccgccggcgatcttctgccgcccctgcgcacgtgcggaccgtccggccgtcaggcagggaaccctagccctgcgccaggtcgtggaccgaccgacccctggccgcggaccgttcgcgcctgtgcagagagcaccgccgccgccatctccgactccgcgcctccgctgcctcccgaaagcattgccagttcctccgcacaacatgacgcgcatccaccgcctccgccccctcttcctcttcgttctcttggcgtcgctgcaatgcggtaatgccgccaaaaccctagccgggctctccgccgccactgtggcgtccacactcgagtctccactggaccagtcctcgctcttgtttcactcactacacggtctgtcacttgatccgattgcaggtgcggcgacggcggcggctggatacggaggtggcgccgaggggttctgctcggcggagccgtccagcaagtgctccggggatcagccgctctactggaaggtcacccatcccaccctcgcgcccgcgcacctccaaggtgcgtaa

SEQ ID NO: 20906 - DNA, 687 bp, Zea mays
  Peptide Sequence Number=SeqID_64281
atggttgcactattatcccaggttgtcactccccaaacaggtccttacggagaggactctaggagcttggggaaggcctcaggcgcgatcagggcgacctggcgaactcagtcccgggcgcaataccggcgcgggggcaccagagagcgtggaacacggcgaggcggtctaacggcggcgcggatcaactccggcgaggaattgcgcgggcattatggcagtaacggacgaattaagtgcatagggagattgctcacctcgagtgcgaactcaggagcgccagggaaacggcggggatgcggtgaagcctcgggtcgacggtggcggactctggctgcacgggaaaacactctggtgagcgcggaccgggcaaaccaggggaagaaggcgacccaaggggtgtcccgagttgctgacggcgaggtggaactccccgaggcaacagacgcgacggggactcaacgacggtcgtggaacgggcggcaggcttcgatgaacgacggcggagttgcctggttgcgcgcgcagggcgggagagggagcgagagagctcagctgagggcgcaaatgagcagggggaagtgggcgagcggggtgcgggctctaaaggggcgagggagtgaggaggtggccggagaacgtgcggacgtgggcgcgtccacggcgggggcatgggcgagaggttag

SEQ ID NO: 20907 - DNA, 924 bp, Zea mays
  Peptide Sequence Number=SeqID_64282
atgggggggcctgcggagcagcagaagaccgacgaacggcgcgccgtcgcccgctccggcagcggcgacgacgacgacttctgctccggggggccgaacagcgacagcaatgacctcagggcggatgctgctgccaggaggcccccgcccatgcccaaactcgtgaggcaaggacgggcagaaggtcgtagagttggaggttggtccgtgggcggccctggctatctcgtcggcagaagaacctcttccagctgccgtggcagaagccggcgccgagagcggctccgaagccactcgagcccgagagccaggcacgcggcagctgctagcgccatggacgataaccgcccttccccccaatcactgagggaaggagcgggccaccgcccacgcaggggccgaccccaactcggcacactcccctccctagccctggtgatgaaaatccttgaggctgagggaggggcagaggccgcggcccggttttctctcccccaccgtcaaactggagaccagcgggcgaaagggcgggcagccatgcaggcgctgcaccgccacttgcgccaccgccgcgcctcctcgactgcggaatcaataccgcgactcgaggcgacccagcgcacgacccagcagcgtcagcctggcgcgacggtcaatgcggccgaaaatgggccggcagtaatggcggtggcaggcgggcaggagcagcggtcacgtcgtcagccaagctcacgtcccatccgggggcagcgagagaaccctctctcacggcgtgaagacaacgcgcctgtgttccattcctcgaacggctcgcgcacgcgcaacggccgccccgcgaaccactcgccccgtcgcattaactccgcggcgggacaggcggcgcctctggcaggagaagcgagcgacgctttgccttcgccataa

SEQ ID NO: 20908 - DNA, 465 bp, Zea mays
  Peptide Sequence Number=SeqID_64283
atgggaaccaaggcaagaagaagtgatggttcattagcttttaaaggtgcattagacggcaagccctatttagttgatttatcaaaagagaatgttgatctagatgactatactgagtccaaccagcccactctcgagttttcgcaagcgcactccgctataattcaccggactgtccggtgtgccagcagagcaacgattaattcgcgcaacgatcgacggcaaaaagccgctgacagagcaacagtgaagaacagtgcgcacagagtcagagctgcggagccaaaggcgcaccgggacagtgaacatgacctgtccggtgttgcacctgactgtgtagagccgcaaggcgacaaagcttcaacggtcgatttcgctcctaaccctaacaaccggacaatgtggcgccccaccggacaagtcctgtttactgtccggtgcgctgacacatcacccaactgttag

SEQ ID NO: 20909 - DNA, 459 bp, Zea mays
  Peptide Sequence Number=SeqID_64284
atgtgggccaccggccagtccggtggtgcaccagacaggtcctattcactgtctggtgtgctatctggtgcctgctttgacttctgcgcgcgtagttgcactgttcactgtaaacttttgcagacgatcattggcgcagttagccgttgctccgctggcacaccggacagtccgatgaattatagcggagtggcttcccaaattcccgaaggtggcaagtttggagttgatctccctggtgcatcggacactgtccggtggcacaccggacagttcgaaaacgaagaagaagtagaggttgaagaaggaagagctacaccaccacctgaagacccacctgccgggaactgcttttattttgatatttgtggagcagagcctgactctcctataacacaaggcaagccccggtgcatttgccacctccttgctattttaaaatctttctcacttgcttga

SEQ ID NO: 20910 - DNA, 222 bp, Zea mays
  Peptide Sequence Number=SeqID_64285
atgaccctcagacagaaccaatgcaaaaatccaagtctgcactacggaccgtccggaggaaaagaaaggaccgtccgagaccttgcgcggaccgtccggcctcaggcgcggaccgtccggcgactatcaagccgggagcgcctccatggccggtttgatgatgttggtggtggagatcttggtgtgatccttagaaccggccatctatgggccgatttttag

SEQ ID NO: 20911 - DNA, 1320 bp, Zea mays
  Peptide Sequence Number=SeqID_64286
atgccgttcctgtcgacgccgtcgttcgacctatccgccggcgcagagccaaccctgggcccgcgctcagcggccccgccgcctccacccacggcggccgcgcatcatcagccgccggtgtccgaggcggcggcccggcggcttcgggaggcggaggagcggctgcgggaagccatcgaggagctactccggcaccagggcggtggcgttaagggagatggggacgagcagcgggagggtttttctgttttttccgtcacgacggggagtcatgcgcggcgcacgctgtggggaatctgtgccagagcttcctgcttttatacggtgtccgcgtcggcatcggtatcttcttccgcgcccttaagttcgtgcgccgcaggtcctatggctcgctcctcgaccttaagaatattagcaggttcggtggcaggattggccatactagcactggatgattcaagtaggaggcgtactctatctttatatcttctagcaaggctcgctcagtgtgcatataattctgcaaaatctaagaacaaatttcatttttggggaagccattggagacatggagatgcattgcttttttcattagcatgtgcccaggttatgtatgcttttgttatgaggcctgaaagcttacctaagtcgtaccaagaatttatccttaagacaggaccagtagcagaacctgtctacaaggttgtcaaagaatgctgcagaggtggtcctgtggatctaactgccctctcagcccatttatcaaacaagaggaatccggatttgataaatttaacaacaaatccatccattatcccatgttctgtgatccaccctgacagagcatcatgcttggctcaaaatgttaatgttgtttcatcaacattcaagaagacattccctctatatttctcattgacatttgtgccctttgttgtcctacgtcttcaaaaggctgctatatgtttgcaccgaaaagttgcgaacaaagaccacaaacttgtgtattggtttgctggtttgatgtcgggtctttcaattcttttggaaaagaaagctagaagggctgagctagccctctatgtgcttccacgtgctggagattccctatggtatatattgatcaaccgccacctgctcccaaatattaaaaatgctgagtgtaatccaagaggtaaagcgaacaaaattatgttgcttgctattatgaccacaaagaatcgtagtacaaaatcttgtttgaagcagttatgggcagtgtgctcctcagctatgagccaagtagtgtgtcattggctcattgctacagaggatgaataa

SEQ ID NO: 20912 - DNA, 660 bp, Zea mays
  Peptide Sequence Number=SeqID_64287
atggggtcgtcgccgccaaagaagtacgaggttgtggagcagatcgaccccgaacgagcgatggagcgatggacgccgaggtggtggagcagatcgaccgggcgcctacagctccgcctacctcgtcccccacaaggtcgagcgcaagaggtgacgatttccccttttttgtttctcgtctactcctcttgctctgctttctcgatgggtgctccgattcttgatccctcgttgtctgttgcttgccgttgtcgtggcactggtgcgggagaagggattattatagatatcatgactttagaatcaggtctgagagaagacacacaccccatgggagctgaacttcgtgaaagcaagctgatgaacaagtacaatgagctcaaggaggcaggaaagcttgacgccttcatggaaagacggcggaattcagaagacctagacctatcaaaggaggaccttttgaagctgcttcttgagaaagatggatcattgaagtctaaagataaagagtttaaagatatgaaggataaagtcctacaacaaacgtggccttgccacaacaagcgtgagtcagagaacaccaaaaagtatgccatacaggaggcactcatgatgcgggagctcggcaacaccaaaattgttgtcacgggggacgactag

SEQ ID NO: 20913 - DNA, 297 bp, Zea mays
  Peptide Sequence Number=SeqID_64288
atggagtccacggtgaacccgaaggcgtacccgctggctgatgtgcagctaacgatgggtatcctcgatatcatccagcactccactaactacaagcagctcaagaagggagcgaacgaagcgatgaataccttgaatagggggatatcagagtttgttgtgatggcggcggatacagagcctcttgagatcctactccacctccccttgttaggtgaggataaggctgcatccatgtctgcatcagcagactccgtcgcacctgaagacagctaccagagatattgggagacttag

SEQ ID NO: 20914 - DNA, 471 bp, Zea mays
  Peptide Sequence Number=SeqID_64289
atgtcgggtgggtatggtatggcttcttctccagcgtggccaccgccgatgcgaagggctgggcactggcgggtgtgggatgcaaggctgccgcgccctcggatggtcggatacagtcgctgtggcggcgacgaagttggtggccagcgcgggaggcgcggcggccggagcgacggcaagaggcggcgatacccggacggcgcggcgacggaggccaggtctagcggatccgaggcgcgcggcaccggcggctgccccacgagatgcggcgagaggcggtggcgcacggcggggttggcggaggtgcctgggttgcccatcgcggcgctaccctctggaaggcctggagcaggaactgccggaatgccggcggcgagtgcgaggggaagccggactggaggcgggcagaggcggcgtgggagtgagaggctggagggagcggactcaagaaagctcaacgggattcaatga

SEQ ID NO: 20915 - DNA, 195 bp, Zea mays
  Peptide Sequence Number=SeqID_64290
atgagggtggaatgggacgcccttagcttacaattagaggaaccgtggtgtagttcgcttcgccgtcgtgccgttatggggctcggtgtatgcggctcgttatgccaaggttgtccacgttgcaaccactgcttaggagaagatgaagccgtggaggaagacttccaggagttccaagattacgacgagttttag

SEQ ID NO: 20916 - DNA, 477 bp, Zea mays
  Peptide Sequence Number=SeqID_64291
atggaggcggcggcagcagctcgagcttcagcaccgacctttcagccgaccaggagccggaaggatgggtcactcgacccatcactcgcgacgtcgctcgcgggtgtcacttccatgacgcgctcgacaccctgctgcgccaggcactcgacccgcgtacttggtccatcgagtatcgctgtattgtcttccagcacagtcacggggtttacccggaccgctaggaggcgacctgcttgcacaggagacgtgattgtctcacctgttggtgaggagaatcctaggttgagcagcacggtcaacctagccgccgtgctaaacacggagctgtaccatgcattagacgagctgagtagggctcgtgctgagatcgcccagctgcgggctaagcgtgcggagcgtcgtcacctggaggatggctcccccgctcccgtcgggactcagcacccgtaccgctcacctcggcatggacactag

SEQ ID NO: 20917 - DNA, 357 bp, Zea mays
  Peptide Sequence Number=SeqID_64292
atggcgggctccctcaacgacatcgtcgggcgtttcacggatggccgacctgcgtggactcctcgggccataaagcgtggccttaaccttaaccgacccttgtcgtgccccagttcctcgccaccaagcgagggagggtcgtctgcactcggggttgatgttcgtgtccgcaattggaaggagaagccgcggaaccgcggcaatttctcgtcgtcgaacgatttccgtcgtggacaacctcgcaccgcgaccaggtgcttctacggcgtcaaggccggacataggattatcgttgtgtggtcgggcgcgttgttcgtcggcgtttacgccgccgtgcgggcgcggtgccgccgttag

SEQ ID NO: 20918 - DNA, 981 bp, Zea mays
  Peptide Sequence Number=SeqID_64293
atggtggagaaggcgtcgatcgaggacgtgatgaaggtgctgatggcgtcgcggaagcaggacctgcaccagctgtggaccacgtgctcccacctcgtggccaagtccgggctcccccctgaggtgctggacaagcacctccccatcgacgtggtggccaagatcgtggagctccgcctcaagtcctcgatgtcccgccgctcgccgttcctcgcgcaccaccacccgcaccaccacccggcggcgggcggcatggaggcctcgtccgcggccgacatcgacgagcaccacaagatccgccgcatgcgccgcgcgctcgactcctccgacgtggagctggtgaagctgatggtgatgggcgaagggctgaacctggacgaggcgctcgcgctgcactacgccgtggagaactgcagccgggaggtggtgaaggcgctgctggagctcggcgccgccgacgtgaaccacccggccggccccgccgggaagacgccgctgcacgtcgccgccgagatggtgtgcccggacatggtcgccgtgctgctagaccaccacgccgaccccaacgtgcgcaccgtggagggcgtgacgccgctggacatcctccgcacgctcacctccgacttcctgttcaagggcgccgtgccggggctggcgcacgtggagcccaacaagctccggctctgcctcgagctggtgcagtcggcggccatggtcatgtcccgcgaggacgcgcacacggcggtcaaccccgcggccgcgcccatgtacggcgagccttccggaggcggcgccgtgtacagcgcgagcggcaccagctcgagcatggtgaacctcagcctggacaacaggatggtgtatctgaacctagggatggacgcgcagttcggcaagatggacgacggcggcgacggtgatgacggcgggggcagagggcaagggggcccgccttctttgttctccccgcatggctaccattga

SEQ ID NO: 20919 - DNA, 706 bp, Zea mays
  Peptide Sequence Number=SeqID_64294
atggagaagttaaattttcaaatccaatgcggcggtaccgaggcaccccgcgcatggcccagcaaaaccatcaagtgcgaaggcgacgggctcgttccctcccctgaggcgggcctgagggccactgtcggtaccctgaatcaggggtaccccttactacagtatgaagacacggtgcatgtgcagctatctctggccgcgtggatgccatcagtgggtccggacctccacgagagagcaccggacccctatacgctcaacccagacctccgagtacggtccgggactcccaagcggcgtccaggccatccagcaggcggcgtgcctgtccagtccattgtcaaacagtacacccgtgctgcaagggcgggtgcattccgccacccggccggagatttcctctccgacagtgtggacgggcatgtcacttgcgtggcggagtgctacgcatcgcgccgggagcacggcgaaccgcgtgaagacatcgcgtgttgcgccgggccggggaccgcgcaggggtccgcgcgcaatgccccgggcgtgagggagcaagcagccgcgccgggcgctatgccggggcgccgcgcgctggccaagctcaaggccgccgccatgggcacgccggaccgaactcaaggccgcgtcgcgagcacggggtggcgagccggggcgggctgcatcgcggggaggggtctggcacgcccgg

SEQ ID NO: 20920 - DNA, 324 bp, Zea mays
  Peptide Sequence Number=SeqID_64295
atggtcaccagccttgtgaaggttggaggcgaacttcggctacgcggcatcggccagaccgcaaacgacgtctgccacagtgcttccagctccttggcttggatgaggtggtcgccgctgctggcaagccgctcggagctagcttccaacgcgaccctactgggcactcgtcgagtggtggagcatgcaggctcacggtacgggaccaggctgagcggctacacggctctggacctccccaggagacaagcttttgggtatggaaccaagctaagcggccacactgctccggaccgcccgatggaacgagctcctgttctttag

SEQ ID NO: 20921 - DNA, 318 bp, Zea mays
  Peptide Sequence Number=SeqID_64296
atggaggaaggtgtgggttgtcgaggcggcgaggaacccttgcagctctggcgttggcgagcactccaccacaaattttggagatggcgggaggcaaaggagtcggtctgggcgacttcgacgaactgcagcatggtcactatttatcttcattattgcgccctcaactgggagaagtggaggtcgtggagcgtgctgcgtgctagaggaatacgaaatagcaaggcggttgctctgaggaccgagcttgaggaggaacacgaggggggttcactggttcgtttggcggtggaagcagggagtggctcgctgggctga

SEQ ID NO: 20922 - DNA, 438 bp, Zea mays
  Peptide Sequence Number=SeqID_64297
atggaggtgggggccgacggcatagcgctcatcaccatcgccaacctgcctgtgggaaatgagggatccttggaggcagagctagcgtcgcgccgccggtggacgctagtgctggcgaacatggcgtcggtgctggaaaagatagacgagatgttgctgctcgtcgtgtacaagtggtgtcaaggtgtcggtggaattaccttacatgttggtgcaagtgatgatctctcatcaatcgtgtacccaatgattgggttccaggtgacagcgagcaaattcttctggttcttcctataccaggtgatgagcttcatgtactacactctatacgggatgatgacggtggccctgacccccaacatcgagatcgccatggggctctcgttcctcatcttcatcttttggaacgtcttctctggcttcataatcgtgagggag

SEQ ID NO: 20923 - DNA, 849 bp, Zea mays
  Peptide Sequence Number=SeqID_64298
atgttcgtctccgtgctcgacctcgtccacgagtcatcgtgcaagcaacgagagttgtgtgggtctcataatcaggatcacaccaacagggtagggccgtcatcggtcatgactgccatccacgatgagtcgaatctcaaagagacgataatactcaggcccttgggccacacctcacacctccgattgagatctagtaaaaagcagatccaaaatggatcaagcagatttgcaggtcaagggttcgttctggacatccaaaacaaggccctagttctgggacatgtagacctgcaggggagcacaaatgacgcaaagcaggccgacttgtacacgatgctaaacaagcagagctctagagggcaaaatggcaatggtgtcacaggtagttctggatggcaaatcccacgcccccctacttacaaggatggaaaacatgcatatccaaatgagtcatcagaatccccttactttgtctcatctatgcattatggtggccgagaattctacagtaacactttagagtggtcgattactcagcagacggactccaggaagacgatgaccttctgcttccccatcaccggcgtcatcatgcagcctgctggaatgccacaacggggtgggagcatgtggatgaggaccgcatacccatctgccgtcatactctctgtgcataagttcatctacaactattctaagtcgactatccaaaatatcgtatattattctcgacaggagaagctttttagaaaaacacctatgcgcggaccgtctgggcccttgcagcggaccgtccgcgacaactgggtgagcctcgaacaggaacactgcaaaaacatacgttaa

SEQ ID NO: 20924 - DNA, 1842 bp, Zea mays
  Peptide Sequence Number=SeqID_64299
atggacaaggatcgccagggagctgcacaaaagcggcaggcagccatccggcttgttgaagccaggccgaagaggcagcggttgggtgcgaaggctgcggcccccagcggaggcaagtcgccgctgccggcgaagtcgggcgcccctgcatctagcaaggtgccggaggcaacggcaggcgccaggggctccaaatcggcaaaggtggtgccgcctgccggcggagtggcggaggtcgcgaaggcggcccaagcgttgccgttgtcaggcaaacgcgtcgccgacttcgccaccaacattagcgtggacgactatcttgttgggtcggacgaaggccaacttgctatagttgcgcctgccgcggcgaccacgatggccgtcgtggtgccgaaggcgaagggcggggctcttagcgccgggggcgaggcgtcggccttcgcggctgtcaaggacgaggcgggcgctgcgtcccgccggttggcggaggtgacggaggcactgagccaggcgtcccgccggctgaaggaggtggctgacttcgccgaccgtacagcgtcgggggccctcacggcggctgtgtctgccgaagtcgagagacttcggacacaacacgccgacgccgtccgcgaaaaatcggccgccgacagcaagtgtcgtaagctgacggacaaggtggccgtactggagaaggagaagtctgacctccggcgccaactggcgggggagaggagggagaccaacgatgccctcgccaaggagaaggctgcgcaggcggaggccaaattggcgcgggcggagggcaatattgccagggagcgcgccgaacagctgcaggagcggctcactgccctggagagccgcatggagagggccgaggccgtggcgcgtgcggaggcagagcggacgcgcaaacagctcatggatacataccgtgagctgggcgcggggaccggtgaattcgaagtgccggaccgagaggccggactttgctgcctggagtgggtgcaggaggaattgcaagcgctccccactgttgtggaggggtttatgtcgtatgcctccctggtcacctgcgagggggcgatgaacgcgctctcccgcgaagggtgtcggcacttcgaggtcttcgaccaagccgatgaagatttcgagcgagatatctttaaggttgaggaccccgtagtgaaggaatccgccggagccatctacgaccggctgtggggtgcgtacggtcgcgaggtggtcagggagcgggccgagacggcgagggctcaggcggcgcgtggcgagagggtggacgacttcggggcgttgaacgacgtgccgcctgacccggatctgactccggcgaaggccgtgcccggggtcggcctggagccatctccggagaccgcggaagacgcaccggatgcctccgcatccgctgcggccggcgaagtcgtgcctgatgccccccagaggtcgccgaaggcgtgcctgatgcccccacggctgctgcgccgagtgctgaaggttcaagattttgggcctgcgcacgcaaccgctactactaaatttttggcggcttcgaccgcggaaggtggtaatgaatgtggtggatctgcatcggagtcttttgattttgctgactctgggagctcggttgagtggactaaggaatcgtcggaggaggatttggactactttgcggctttggacatggctgcggcggaggcttcgccgcacgccgcggacgcagatgtgccagtccggctgcaccctttggcgacttctgcacggccagtcttcgcggtggacctcggttttttcgcacttgttgtgctagtccggctgcacccttag

SEQ ID NO: 20925 - DNA, 1533 bp, Zea mays
  Peptide Sequence Number=SeqID_64300
atggaggcccaggcccacgcgtcatgcaaccggcgcgccaaatgcttcgtgcatgcaactgcaccgccacttgcgccactaccgcgcctcctcgaccgcggaaccaacaccgcgactcgaggcgacccagcgcgcgacccagcaacgccagcctggcgcgacggtcaatgcggccaaaaggaccgggaaagggggataccccaaaaaggatccttccccgagaaggaaccgggctccgagccccctactgatcagaggttcgaaggctggcccctcggaagggttcgacagccgcctcagatcgcgggttcgaaggctggcccccgaagggttcacagccgcctcagacgccgagcgagggatgaccatgggtacgttcgatacataaccaaggctcgggctgtgctcccgagctcaccggagacaccatgttcggcgcccatcgagggcaacatggcgctttccccccctcctccttgcggaaaggcgacgcaggggccaaccctgaccaaatcgccgcaccgaccgaccaagtcgcaggagcatttaatgcaaaggtggcctgacacctttatcctgacgcgcgccccccagagccgaagtgaccgccgtcacttcgccgctccactgaccggcctgacagaaagacagcgccgcctgcgccgctccgactgcggtgccactcgacagagtgaggctgacaggcagtcaggcccggtcgaaggcaccataggaagctccgcttcgcccgacccagggctcggactcgggctaagtcccagaagacggcgaactccgcccgacccagggctcggactcgggctaagtcccggaagacggcgaactccgcccgacccagggctcggactcgggctaagtcccggaagacggcgaactccgcccgacccagggctcggactcgggctaagtcccggaagacggcaaactccacccgacccagggctcggactcgggctaagtcccagaagacgacgatctccacctcgcccgacccagggctcggacttgggctcagccccagaagacgacgaactccgcttcgcccgaccccagggctcggacttcgccccggcatcagccggcgacctccgcctcgcccgacccaggggctcggactcaacctcggccacggaagacagactcgacctcggcttcggaggagcttccacatcgcccaacctagggcgcagaccagccacatcaacaggagaagcaagaggacgtcagcaaggactcaacagctccgacaactttccctccgccaggctccatcgctcctctgacggccacgacatcacaccagctgggtgccaagatctctccggctgccacaacggcatggccctcttagagagggttggccgcgcggggacgaggacgagtctccggccgcctcgctctccccccttcgcgctcggcctcgcgctcgacccatctgggctggggcacgcggcgacattcactcgtcggcctagggacccccggtctcgaaacgccgacaatgccccctaa

SEQ ID NO: 20926 - DNA, 234 bp, Zea mays
  Peptide Sequence Number=SeqID_64301
atggctggccctgcctcccatcgtgcagccccacctatctcctctctctccctgagcctgccccctgttgcgcgtcccatcccctgcccaggctggccagccagcagcgccgagcctcccacgcccctgcgcagcagtgaaactgcccaggccaaccccttctttctcttccatagacctctcctcttgcagcaggttgaagaaccgaccgtggagaagaaacaacctgagtag

SEQ ID NO: 20927 - DNA, 678 bp, Zea mays
  Peptide Sequence Number=SeqID_64302
atgcagcccggttgcacccctccgccggcggtcacccaagatggtgacctccagtttgatggcggggggaaagcgaaccgggctgcggcctctgcccctccctcagcctcaaggattttcatcaccagggctgaggaggggagtgtgccgagttgggatcggcccctgcgtgggcgctgcatcgtgcctggctctcggacccgagtggcttcgaagccgctctcggcgccggcttccgccacggcagctggaagaggttcttccgccgacgagatagccagggccgcccacgggccgacctccaactctacggccttctgcccgtccttgcctcacgagtttgggcacgggcgagggcctcctggcagcggcatccgccctgaggtcatcgctgccgctgttcggccccccggagcagaagtcgtcgtcgtcgccgctgctagagcgggcgacggcgcgccgttcgtcggtcttctgttgctccgcaggcccccccccatcgagtggggttactcgcctgttggttgtctgaaccgcttcaccaagcgcgagtcgccccgtgtaaaggtgacgagtgagagtggagatcttcggaccgcgtcgccgtccgaggctaggttggacctcgccgaaggtgttgtcgatgccgagggtgctgctgctcccttccagcgttaa

SEQ ID NO: 20928 - DNA, 2208 bp, Zea mays
  Peptide Sequence Number=SeqID_64303
atgggagggagcttgctgtcggagaagaggggcgccaagctgcagtcgtggggaggaagggagagctgctgcgcgagggagaagaagatagggaagtcggctggagaagagagaaggacctgcacaagacaaaaattcttaaagcttctaggtatatcacaccatacaaaaggatacaaatttggatatgatgtcaacagtgacatcggaacccccaacactgtcttcgagcttgttttacttttcactgcaaccagggctcatcccatgttccctcctcttctcatgttttcccctgttcgttttgtttgcacaaaacctttccccttcattttagtggctggtccagcaccatactcgcaggacagtcatggaaatatgcagatgcaattgtttttaacacttgctgtcaatcctagttcgctgtatgcttcggaaagcaatcccacgcgcaaccggcaaccgcctcggagtcggaggatcatctcggtcgctcgtctggagaattcaaaattttccccacttcgtcaccagcaacgcaaccgaaagtccgcaacaccgcactctccctcggcagttggcagtcggcagcggcactcgtctccgcgcttccactcgccaatgaaagcctccgcagccgcggcctctccgccgcctcctcctcctcgtgggtggctctccggcctcgtctccggcgccggccgcctcctcgccgccattctcgacccggaatcctccgcctccgacacaacgtcctcctccccagagtcgtcgcagtcaccaccgcgccgcgatcaggcaactgccggtcatggtattgggaagtgctttccttctgacagccatcagttaaatttgagtggcaaggagattgttttgaaagattccggtgaaggttcacttgcaattgtctcagaggtacatccaaaggatgctgtaaagcagttgcttatgcaggaaacctactcatggtcggagtgtgatgcattaataaagataattcaagagcgagttgtggactcagacgatgaacctgctgctattcttccaattgcttggcatgctaacacacagctacatcctgttgcacactcttcaaacccgaacaccaccgctgtccctgcagtttctaatcctgcttgtcgtctagagtttgacaacattgttgagaaagaatggctgaagaaaagttcagctgttgctgaaaatcgttgcaccaatagccatgaccaaattcagcatgctatgaaaagaagttactctaacacaggggatactattgaagagtctcgaagaatcaggccaaagcgaaacagatcaaattctcttaggaatcagggagcttcgtccaaagaggccgccaccaatgctagtagtgcacgaagggaatttccagaaggtttcaggacactatttaaagataatcctcttcttgggactaataacctgacattttcggacttggtttcaaagggtctgttcgatgatgaaccttctgtagctgctgctgctgaacacttcacttcaacctcttgtcaagctgactgggacaaacgtggatctggcatgtcatatccgtattctagtcagaatcagatggagatgtctcgtgtcaaggcagaacttatcgatgaacctgtcgctcttgagactgacatgacaaatatggtgcaaaagaatgatagtatgttgccataccccaaccacaaaaattcctcgagtttttatttatctgcagaactcatagtgcgcaatggctcttgttctgtcccaaacaaaactgtgtttcaaggtgacattgaggctgcaccgagtagccatgtgcctacgaataacaatcacattcatgtttccccacactcaccaatgggcttgcagacagaaaagagctccagaaattgcacgaggggattcaacttgcagaacattccgacgaagagaaggtcacctgccagcagaaatcttccctcaaacaacgggaatgggaagacggtctcaaaaggcgaacgatacaattgtaatgggcacccgagattacagctaacatcagtcttttctctggcacggtgtgttgttgacaaggccagcgtgcatcactgcgtcagatgcgatcaggaggtgtccggcccgcgggccggagggctccagatggcagctgcgattcaggtccccatgtgccgagccggggcgacctacctctacctgtaa

SEQ ID NO: 20929 - DNA, 471 bp, Zea mays
  Peptide Sequence Number=SeqID_64304
atgggcaagaacaacaagcgcaagcgtgagccaactcctccatcggaggagtttggtgactcggagtactcagaggaggagttctcctctgagtctgaggggtcttcggctcccgtccccctgcgtgagtcgtctgatgactcagacgactcccaggggctcgcggcggaggtctggacgtacatccgggccgtcgagcgctccgggctcgagggctcggatgagtcggagtactcctcggatgaggaggactcggacggaggtagcgaggacgaggacgatgacgacgacgacggagacgacgacgatgatggcaacggtgacggtgacggcagcggcagcggtaggggcagcggcggcgacagcaaggacggtgacggcggcggcagcaggggcagcaaccggggcggcagcagcaggggcagcaccaggggcggcagcggcggcagcagcaatagggccagtggctag

SEQ ID NO: 20930 - DNA, 288 bp, Zea mays
  Peptide Sequence Number=SeqID_64305
atggaggcgctcccggctgatgaccaaaggccctttgaagacctcgtaatgcgcgatgagaaggaggtgatgcggcaatggaacgaacaacgcgacaaggaagaggcggaactgctgcatgttgggggccttcggcttccgaaggtaccttcggacttatgtcaaagagggagaacctcaaaagatacgaaggttggcagtgccaaagctgtgaagcaggaaagcttcggcatgttcgcagaaaagggaaccgacttaaagatgaaaaggccatttagacctcgatag

SEQ ID NO: 20931 - DNA, 582 bp, Zea mays
  Peptide Sequence Number=SeqID_64306
atgccgacccctggcctttgtagcctagggctccgtgcggctcatcatgttatgccctaccagcgatctgcacactcaggcctagtcccgataggtcatgaaccaaaggtgggggctaggcgcgggatccactcgaatggtttccctttggtgcgcccgacccctctgtcaggttctgccacgcctagccctaggctcaatgtcgcggatatcgttcgggagcaggtgcctccaaggtgtcaccagggagttgtgatgcctcccacatggcgcaataggctgctaagcccgaggctaagttgcttcgcatgcagcttgatgaagccgacggtcgtgtcgttgctccctgactatgttggggcccatggcacttccttggtcgagcacctatacaacgccctgtgccgcatccgggatatcaccgatttcagcattcaccagggagccgcggtggcactgttcatggggagatcagctccagttgtcgcctttgggacatcatcggtcctccttcgtccctttcggatgaagggttggaagacatgttcgagggatacatccaggtggccagtcgtgtcatga

SEQ ID NO: 20932 - DNA, 417 bp, Zea mays
  Peptide Sequence Number=SeqID_64307
atgccaaatgctaaagaagtgaaaatcaaagagaagaaacagagaagagaagaaaagaaaagagatgcaaaagacttggctatgtacagccatgactctgctcagtctggcacaccggactgtccggtatttcttaggaataaaatacttggagatatattggtggaatatttgggcaatatttctggaaagaatttgagggggatcactggggaaatatctggacagtatttctggaaagaatttgaggctcgagcccccggatgcctaaacctgcaaaacaatttaggccttgttcttaggtacccaaacagtcttaagtccattgatgttagaaacaagaaccttgggtacccaaacacaagtcttggagcccttgtgtttgcccccaacatatttggcaactactttacctga

SEQ ID NO: 20933 - DNA, 1452 bp, Zea mays
  Peptide Sequence Number=SeqID_64308
atggcgagctctggcaatgaagggcgtgtggtggtggaccttggctccgcggcggagtcggtggctgctgacgaggaggcgcacgccacgcctctccacgagattgagtccctttgcatgcgctgcggcgagaacgtggttctgatggccttcgagtgcccacattgtggtgagaggaacaacgagattcagtttgctggacaactccaacccaagggatgctgctacagcttggaggttccgttggggcagagtgagatgctgaatcgtcaggtcgtgaagtctgattcagcgactatcaagattccagagctcgactttgagatccctccagaagctcaacgtggaacactttctactgtggaagggattattatgcgagctgtggatgagctgcaggctcttcaagatgaacggaagaaagtggatcctcagaaggccgaagctatcgatcaatttttactgaagttgagatctcttgggtcaggagaggctgcattcacttttattcttgatgatcctgcaggaaacagctttattgagaatccgcatgctccgttattagatcctttactatctgtgagattctacgaaagaactcgtgaacaacaagcagcacttggctttcttgctgaaccaccaaaagaacaacctggagaggctgtattgcctgcttcagcagtggaatccaattctgatgggttgcaaagcgtgccccatggctcagttggagctgttgcaggtcgtcgtgctatagctcagggaaaccctgatgaagttgctgcagcattgtgtagatattcagcaccagaagaggttgatactttaccatcaacatgtggagcctgtggaacagaatgcgtcacacgtttctttgctacaaaaatcccatatttccgggaggtgattgttatggcaacaacatgtgacatgtgtggttatcgcaattcagagctgaagcctgggggtgaaattccagctaagggaaagaaaattacactgcgtgttcaaaatgcacaagaccttactcgtgatgtcataaagtcagattcagctagcgtaaaagtacctgaacttgagttggaactttcatgtggaacgttgggtggtatggtcacaactgttgaaggtttaattgtgaaaatatgtgaggctctggagagaatacatggatttcaattaggcgatagtacactggaatggaaaaagaagaaatgggatgacttcaaggagagactatccaagcttctgagtttacaagaagcctggactctaataattgatgatggattggcggcttcatttgtggccccggctactgattcgttagaagatgacagccaactaaccattgaagagtatcagaggagttgggagcagaacgaggaacttggtctgaatgacatggatacgtcctctgcagacgcggcttacaacacgaccaacacataa

SEQ ID NO: 20934 - DNA, 294 bp, Zea mays
  Peptide Sequence Number=SeqID_64309
atggactggtggagccgtggagacatggagccttcaccgtacctgcaggctggcgccgccgcaccagggatggaggaggggccgagggggacgatgccgccgtatccccccgtaagtgatagcgcgccgcggtcgcctgcacagtgctccgctagggttcctcgccagctggttcgcgtcgcgtgtgctgggcagcctgggctttgctgttgcctgttggcttggctatgctcacgtgggatgggaaaaaggaagcctgggctgggccgatgggccggaattccaaagcagtga

SEQ ID NO: 20935 - DNA, 1131 bp, Zea mays
  Peptide Sequence Number=SeqID_64310
atgttgagggcggtggcgaggtgctgcggccactggccgccgggcgcggcggcggcggacgggatgctgtggcagacggagctgcggccgcacgcggcgggggagttctccatggccgcggcgcaggccaacctcaccatggaggaccaggcgcaggtgctggcctccccgtccgccacgctcgtcggcgtctacgacgggcacggcggggtcgacgcctcccggttcctgcggtccgggctcttcccccatgtccaacgcttcgcgagggagcaggggggcatcagcgcggaggcgatccggagcgcgttcggcgcggccgaggaggagttccacaggcaggtgaggcaggagtgggcgaggcgcccacgcctggctgccgtgggctcgtgctgcctgctcggggccatctccggggatacgctatacgtggccaacctcggggactcccgcgccgtgctcggccgtcgagtgggcggcggcggcggcggggcggccgtcgccgagcgtctgtccgccgagcacaacgcggcgtccgaggaggtgcggcgggagctcgcggcgctcaacccggacgacgcgcagatcgtggtacacgccaggggagcgtggagggtgaaggggataattcaggtatcaagatccattggtgatttttatctgaagaaaccggagtacagcttggaccccttgtttcggcaagttgggccccctattgcgttgaagaggccagctcttagtgctgaaccatcggttcaagtacgcaagctgaaaccaaacgacctgtttctgatatttgcttcagacggtctttgggagcacctcagcgatgacgcagcggtgcagattgtcttcaagaatccgagaactgggatcgccaacagactggtgaaggctgccttgaaggaggcagccaggaagagggaggtcaggtaccgtgacttgaggacgatcgacaagggagtgaggcggcatttccatgacgacatcagcgtcgtcgtggtcttccttgatcgccaccgtgagcgccgccacactagggtcgttgactcgagtagcaactgcatcagtgctcccgtcgacatatactcctccaacacacaccagtctgcggagcccttgcacggttaa

SEQ ID NO: 20936 - DNA, 243 bp, Zea mays
  Peptide Sequence Number=SeqID_64311
atggccaccaacggcgatgaggatgaacgcggcgggctgggcgagcgcgtcttggatctgaacgcgaggggcagcctgcagcgggaggaaatggagctcgtgggtggagcacgcgtcccccgcaaggacgttggcggcggtgaggtggacacggttcttgaagctgagcagaaggtcgaggttgtggaggtcggcgtcgacagctgggaggccgaggcgcgcgagggagacgaaggcggctag

SEQ ID NO: 20937 - DNA, 125 bp, Zea mays
  Peptide Sequence Number=SeqID_64312
tgagaccctgcctactcaccttgggagtgttcaagggtccgtacaacccgaggcaaaaagggaatcacggctcatgggtaaagtggcaatgagactgatggttcttggttttgactctggtaatg

SEQ ID NO: 20938 - DNA, 420 bp, Zea mays
  Peptide Sequence Number=SeqID_64313
atgctcaaggcattagtggctccattcacacgagacatctcttcctcgaaacggtcgccgggaagaaaggaatattcggaccaagagctacctcgaatccagggtctcgttcagcaaggagagggtgatgaacgcggagaggaaggcagtggtcatggcgtgggagcggccgctgatggaggcgaacgcgcgggcggtgtgtcaaggcggtggcaaggtgctcaatttggggttcggcatgggggcatggggctcgaggacgaagccatacagaggtacgagcccgaggagcacaccatcgtcgaggcccacccggaggtgtacgagcggatgctcaagctcggatggggcgagaagaagaacgtcagaaatcgtgtttgggcgatggcaggacataatgcggcagctcggatcttatga

SEQ ID NO: 20939 - DNA, 333 bp, Zea mays
  Peptide Sequence Number=SeqID_64314
atggcgtggcgacctccctttcggtttcgggtctcttcgctggggcggcagctttttgttgggccgcgtacagtactcgcgttgcgtcggatcggagtgtcagagaacgtgcccgtgactgacggactctggcgacggagggcaaggccggctgcggctgggcatgcggatacgggcaacgtgtgcagccgcgggaccgcggcggtcagcactcagcagacagcgacagaggcacgcgggcgatggatgggccgcacacgtgctccatcgaaccggtacagcagagccctttggtaccgtggtcgttggtcaaaactaggaatcgatgtttag

SEQ ID NO: 20940 - DNA, 507 bp, Zea mays
  Peptide Sequence Number=SeqID_64315
atggcctcctccggactccggacgacgagggctatcggcggctgttcactcgggcagctaatcaccttctacctctcgctcatccaccgagtgatctacgacacaccatcaacaatcggtgagacgcacggagctccatcaacgcctcgcgcgaacgacgacacgagaacaagatccggcgccgagaagaatatgaccgggatcacgacatccctgcgcggagtcaggccaccagaactgagtcgacaacggcttcgactggtggcacgaccccgggacggtcgaggcaccacgaaaacaactcccctccccgggatagacataatcgccaacgataggaggatacttgtggagtatcagcgctcactccacgcctcagggccattcaatggcccccgaacttcaaagtctccaacgtcgacaagtacgagcctaagcaggatccaggaggctggttggccgtctacaccactgccgcccgagctgttggggcaaccgaagatgtga

SEQ ID NO: 20941 - DNA, 129 bp, Zea mays
  Peptide Sequence Number=SeqID_64316
atggagagggagggctcttccagctctcagccggaggaccgtccgggcgttcccgggggccgcttgccgccgcaccacacgacggtgccaactgccaaggacgagctcggagcggagggcgtggtctag

SEQ ID NO: 20942 - DNA, 462 bp, Zea mays
  Peptide Sequence Number=SeqID_64317
atggccgcgtcgccggagtactctgcgcggcgcggcgcggcggcgaagtccggggacctagcccccgactctgacacctacgacctcctcctagaccacgccctccgctccgagctcgtccttggcagttggcaccgtcgtgtggtgcggcggcaagcggcccccgggaacgcccggacggtcctccggctgagagctgttacaaaccgtacgaagtcggtgcaggaagatgtacgctgtgcagtccctcgaacggtcgccggaaagaaaaacagcagcacgcgtcaacttgggaaggcgacgaacagcaagctgtggacgaagcagctggacaaacagatcacgcgagcagtcgcgaagacgctccccaaaaatctgatcgcccgcacactcgtgcaagcggtcagaaggagggagaagaacaacggacagaaacggtcgcgcattagaactggaaactga

SEQ ID NO: 20943 - DNA, 518 bp, Zea mays
  Peptide Sequence Number=SeqID_64318
atgaagtcgccggaagagacggccttgatgcggatccctccagagaacaccgaagcaccccatctggaggcccggaaggcgaaaggcggtcaaagaggcgaaccgccgcgcaagaagtgtacaaccgtcccacaactgtgtgctccctcagctctaccacaactggcggtccaactcaggggcctaggcccacatgtcatcgactcgaggcagccccgcgcatggcccaacagtaccattaaatacgacggtcacgggtcagtcagctgtgggataggcacggcaattggcatggccataggcgggccgacagtaattgcagcaacagacgtgcggaagcagcggtccaaccaccaatcagactctggtcccacctacaggctcgcatcctcccctgaggcgggaccgggggccactgtcggtaccctaaatcaggggtaccctctcctacagcacgaagacgccgcatccatgcgacgtctcctagccacgcggaggacggcgcgtgaccccaccgg

SEQ ID NO: 20944 - DNA, 195 bp, Zea mays
  Peptide Sequence Number=SeqID_64319
ccgtcgtgccgtcaatggggctcggtgtatgcggctcgctctgccaagtttggttcgccccttggggaggagtacgatatgttcggattacaggtggcaacgaggttgatggttcttggtaatgactctggtaatggagaagacgaagtcgtggaaggagacttccaggagttccaagactacgacgagttctag

SEQ ID NO: 20945 - DNA, 546 bp, Zea mays
  Peptide Sequence Number=SeqID_64320
atgagggtcacgaggaaccccgatcccccgaagccgatgccgagggctgggccgacggatacgaagggcgaaggagacccattcgcgccgctcgtcttagtgatctgcctctcgggctcccggctggccacgggtgcggcgacgacctgggagaggtgcgagcagtcctatggcttcctcccctgcaccgccactgtcttcaagaacctcttcctcatgctggagtacgccttcctcatgtacaaggtgaccacgtacctattggtggggagtgagctgctactcggaatcatgggggccggcctcgtcggcagactcctcctccccatcctcagctccctccccgacgctctcctcatggtagataagtttggtcttgatgctttaaacgagaatgttgaaggcgcttttacaatttctcgcctgcatcaattaatctatgagccttatctttacgtttcaccagaagatggtaaaaaggatgctgggttgacatatggacatagttctgataaggatgccactgttctttcaatgttgatgtaa

SEQ ID NO: 20946 - DNA, 102 bp, Zea mays
  Peptide Sequence Number=SeqID_64321
gtggcaacgaggttgatggttcttggtaatgactctagtaatggagaagacgaagtcgtggaaggagacttccaggagctccaagactacgacgagttctag

SEQ ID NO: 20947 - DNA, 922 bp, Zea mays
  Peptide Sequence Number=SeqID_64322
atgggcgacggctgccccaacacgcgcgaagaggtccttgctcccgtcctcactgcgggagtgaggacaagaccatccaagaacgtcgtcgccgcccccacggcgtacgacgtcttgtacgaccccccgccacgccccgtccaagcggcaggaggcagcgccggaggcggcaccaaagccgcccaggccgaggagccagacacgcgacagctgacggcgcctcaaacggccgaccgcgcgtacccggcgttcgcctccttcgcaaggctggcgaacgcccttcttccccgaatgctggaggaagaagcgggccaccagcccatgcggaaggcaagaacaccggcgcaccccatctggaggcccagaaggcgaaagggcgcgatggttgagcgaggcaagtctactgcccgggagatcgacccctttttaaaggcaaatctccccactcgtgcccccgaagcgtcatgggcgaagtctcccccgacgtgcaccaagcttcgctgcaaccagcggtccaacacgggggcccaggcccacatatcatgcaaccagcgcgccggttaccgggtcacgggccagtcagacgtgggaataggcgtagcagtcggcatgaccataagcgggccagcagtaattacatcaacaggcgcgcaggagcagcaggccaaccgccaatcagactctggccccacctgcagactcgcatcctcctctgaggcgggcctaggggccactgtcggtaccctgaatcaggggtaccctcttctacagtatgaaggcgctgcacccgtacgacacctccaggccacacggagagcggcacccgacccacacggagaggggcaccacgtggcaaggaaagataatacttcccagggtgcttcgatgggtccggacctccgcagagggataccggacccct

SEQ ID NO: 20948 - DNA, 644 bp, Zea mays
  Peptide Sequence Number=SeqID_64323
atggaaggtatggaatttggcaatttgttctatagtacagaacctaaacctaacaagggacatcttgcatgggctgatgcttttgtcataacagcagactcgataagtatgttaagtgaagcatgcagcacaggcttgatactgaagaacgtcgcgtcgctgttcatgaataaggattccctcaaggttgaagctgatactaggcttggggagctcataaagtctgtaagcgaggccgcgcatggagggtgtcaggtcagcagcaaggggcagaagtgccggccatgtggacgagcagcgtgggcgagaggcgaggtacaagtagcagcagtgcgggcatgcaaagagccagggaggcagcagccatgcgagatgttcatgttagatatgttggtcgtacttttgatacggagaagggaaagtactaatgttgaggacatgtttcttgctcatatctttggaatggacactctggcccgtggcctccacaacgttgtcaagctgattgagatgatcttttccgcaaagcggtaccagagttttgatagtgagattggtgccttgatcgaggatgggaaaggagactttgagatgctaaaaaagaaggttctagagtgcagtgcactgttccatccggcaagcag

SEQ ID NO: 20949 - DNA, 342 bp, Zea mays
  Peptide Sequence Number=SeqID_64324
atgaaactctctgtaagtttcttcaaacttctaatgccagcacgcctattggattattgtatcagacaacatattaagtggttgcatcatgcaggtgaccttgttgcacacataaagttcactgtgctgctaatgcccaatggatcggataggattacatcatatccgctacaggagttaaagccaacaaaatccattgaagacaatgctgagataaaggcatggcttgctttggggacgaaatcaaagaagaagggtggtggaaagaagaagaaaggcaagaaaggagatgcagcaggagatcccatggaggcgacaaacgatgctacaagccaagaataa

SEQ ID NO: 20950 - DNA, 432 bp, Zea mays
  Peptide Sequence Number=SeqID_64325
atggcgcccgcgcggcgtgccccgccccgcccgcccgtgctcgcccgcccgtcccggcgtgtccctactcgcgttgtgatggccccggtggcaatgagattgatggttctggttatgactatggtactgggggacactagcggtggcggtgacgcagagggcgatgcggcatcggcggcggaggccctggacctggaccgcgcgggagtggccgaggccatcaaggcggacttcgcgcggtcgtacttcgtcacagggaatctcacgctgagagcttacgaggatgactacgagttcgccgccccggcgggctcgttcagaggcctgcagtggttcaaacggaactgcaccaattttgggtctctgctcgagaaatcgaacttgaagctcaccaaatgggaggacctggaggataagttgatcgggcactag

SEQ ID NO: 20951 - DNA, 129 bp, Zea mays
  Peptide Sequence Number=SeqID_64326
atgatggacaggctacttgagctgctccacatggacctattcggcccgatcgcttacataagcatctgcggaagaaaactctcaaacccaagagaccttaaagagattcttgagacaggctcagaatga

SEQ ID NO: 20952 - DNA, 354 bp, Zea mays
  Peptide Sequence Number=SeqID_64327
atgaaggaatgtccctctcgcctaaggaccagtttgtcatcactccttacctatactcttatcaagtacaaccactcgagactgtatgagcggttgctcaatttgaacttgtatggtccgaaccccagggttatgatggctggagagcaccgggaggataaggagggggaatgttttgtacggtttgggaatggtggtggcctgactccttctggtataatcgttaaggtcaggcggttgagtcgtgagctatggtggacgggaagttcagtagctgtttttgaaaatgaaaaccagtgggaaactactgagatacctggatggtttagtccaggggattatgctctatattga

SEQ ID NO: 20953 - DNA, 630 bp, Zea mays
  Peptide Sequence Number=SeqID_64328
atgggtgctatctcagaagttccagcctcttctccttcgcgtgctactctggcagtagaactcactctagccatttcagtttttatgagacgaagctacactcaactagttggacgtttgtccaaagcttatacagcaagttcgcagaaagtaggaagcttcggcttcagtaaaaaatttcagcaacacaacggcgcagtagcaatgaatgttgtggtaacttctcatcagctcgtctatttatatagcctcgcaggcgtccaccagttgcttcaccacggccccgtcaggcgccccgccagccccgcgctgtcaacgtcgaaaaatccgcctgatccccgcgacgccaacgcctgcacacgcccccgcgagcctgcctggcagacacgcacgccccgcctcgcccgcgatcttcgctatcgcgtctttcccccgccccctgcaaaaccgctccgcaccctccccacacacacctcgcgccgccatctcttaggtcaagacatatctgtgtttggtggccaggccccgtcgacctttccacacccctcatcctcccgctcggagaacgccgtcctcaaggccgcctggtacagctctgagctccttggcatcgccgcgtcgcttctgtaa

SEQ ID NO: 20954 - DNA, 2244 bp, Zea mays
  Peptide Sequence Number=SeqID_64329
atgtcttcttcctcatctgctgcgagtgcgtcgtcggtcgatccgtcatccgaggataccttgagtgatttggtggcaacggagttgcaaccgagccacaccgttgagttcggcacttcgaggatttcctcggttcgcgtgcaggagatgcagcagcttggatactttggtgacggtgtcgggcaggttccgggcgctgaggagatccctgagcctaagggcgaattggttgtgtttgaggcatttttcattgccggccttcgtctctcggcgcatcatttcgttgcggagttgaaccgtctgccatatggcggctacccgagagacgacgatgccgttgttggcgatcgccggggaaagagggcggtggcagcggtcgacaaaggcccttcacggggagcagtgccggctgcggccactaagaagaggaaactaggtacaacagctgaggagttgggggcttccgattgttttgctgtggatttatttggaacttgtgcggctcttggggataggatgtcttcacccgagcttcgggaatctttcgcacgaatgctgaaggttactgggggtcgctggcctaggaatgttccgatcccccgggtggccggcaaggacattcgtacgtctcgattagctcatgagatgaagatttttccttacgggcggaatgttgctgctgttgtatcggcagtgatggaaaaggatcgccaagacatgtcgaggaaacgccgggcgtccgcgagggtcgaggacccgcaccgcgaggtcaagatggcgcgggggatcgcgaagtccaccgctcccggcaccagcaagcctctgccgggcgcgaagtccgccacccccggccccagcaagccgctccctgccgtgcccgcacaggagcgaaggcctgcatccccgctgcgtactgctgagatagaggtgggcggggccgaggtctccattgatatttccgtggatgactatcttgtgggcggcatcgcaatgttcgacgcccatacagggcggggacctgttggatcgaaggctgggcaactggctgttgtcccgacgccggtggctgctggggcaaaggggtcttcgcaggacccatggtccaagttttgcgctagcagcgagatcgctttggccaccaccgctaaggacgtggtgggctcagttgtgcagcagctgaagcatgcggctgccttcaccgaacgaattgcgtcgggggccctgacctcggagttcactgtagaaaggcgacgactcaaggggaggattgagcgcctccggatgcagcacactaaggttgtgcgggacaagtcggccatggagaataaaagccgcaacctgatggataagctgtcggctgcggaggccaaaaaagaggaacttgtccgcctgctggcagcggaaaaggaggatgctgacaaggcctgtcttatgtccttcacttcgctcatcacatgtgagggagccacgaatgccttgtcccgtgagggatgtaggcacttcgaagtcttcgatcggtccgacgaagacttcgaccgcgaaatctttcaggtcgaagacgcggtgctaaagcggtccgctggggcgctttatgattggatgtggggccctcacggtcgtgatactatccgggaaaggtctgatcgggctatggagcagatggcgaatgatgaggaggttgaagacttgggaggcctggaaagcacgatgcctctggtggagggtgcgtgggcggggactgaggagcagccggcaccgccaactggtgctagtgaagacgaccctgtggccgccgccgtgttgcctgaagacactttggtggtggccgcgccagctgccgaagaccctgcagcatcagccggcccttcgcaggttccgacgtctaggcctatgcaagcaacccctactgatggtactaattttgtggcggccacaaatgcagtgcctactaatgatagtttgtctagttctgaatctgggtctttttcatctgatggtgagttcgagagcccgtgttcctggactgaagagtcttcggatgaagacttggattattttgccgcgttagatgtggccgcggcggagtcttcgccgcggctggaggtgggtgaagcgtttgatcccccggctggcgcgaggtccgaacgacgacaacgaaaagtggtggcgaagcatagcgttggcgagatgtcacgaagtggtaggcgccgtcggatgggttggagcgaacccgtcttcgggtag

SEQ ID NO: 20955 - DNA, 228 bp, Zea mays
  Peptide Sequence Number=SeqID_64330
atgacgagggtgatgcttgtcgaagatgttcaaagctcaagaaatggaattgtttcaccactacattacaaccatcagtatcatgccgacttcgatatatgccacgatttccatggtgtcattgttggaacttgctctaccgggcaagtagatctaacgggaaagcggaaagagtatttgcaaagtttgtcatgggatggcaagagctttgttaatctacccctgtga

SEQ ID NO: 20956 - DNA, 1446 bp, Zea mays
  Peptide Sequence Number=SeqID_64331
atggcgaggtgcccaaggcgctttgcaacaaggtcgcgatctcgtcccttttcgcgttcaccaacccgtagcttccgaggacttgtgacctcccatctcgagccccctccctcctccgtcggtccagtagcttgcgccgtggattgggtgcccaactacgacaattggctatccgcacccgtcgcccctacttccctgtgtccctggtcctcaagccacagtaaccttctactaacagggcacgccgtggaactccttgcgctgcccccacaccgtcgctgtcgcatgctcctcttagtcgctaccgctcgagcgctccgcctcggcatgtcgggtgtaccggatgaagaagcagtcacgatcgtgggaaagacatcggactggatgacaaggttgatgtcagcctaccgcctgagtgtgttgacaatagcggagaggaagatggtggagggccggaggagtgaggatggtggtcgccgcgagcgggaggaggatggtgcggccgtagggtgccctatggcagtgctggtcatggctagactggaggcgacgacggagggaggagcatggctgggtgagtggtggatcgatccgattcagttgagttggggaaagggagagaacacagtacacgcgacggtcgctgcttcgtttgtcggctcacccatccatatccagtgttgttctgacctgcctttgcttcccttgctggttgacgcgccatcatcgcatgaagaatgtggtacatccatcagccgagaatcattccaggaggaagtgaagaacctaaacccaaaggttgtgatgtttggtgataatgttcctcaagagagagctgaaagcgctaaggaggctgcaagaacatgcgatgcacttctagccatgcttataacaaaagttttaaatatgcagcatgggaaccatttagagaattgtttcgtagatgcttataacaaaagatattttgaggactcaggcttgaatattacatgtcagggcttactcttccaatcaaacgcactaaacaaagaaaatggcaagcttggccctaccactgctctttttaaggctgaaatgccctggttagcccaaagagaaaatctctcggagaaacaaagagttaagagtcttcaaaacggtgaaaggtgtactgaacaaacttacacaagagaaattactgtaagggcaggcaccggtgctaacgaagttgggatttgggctggtgaccttgtaggtcgcatgtatcagagatactgtgagcacaacaattggaagtttaagtcaatttcttggtcatatatatcgaccttaaaacaacaagatctggtggagaagggcatcttcgacatttatgaggacgtcgagaagctgttgcaggcattgtccaaggaggaggaggtcgtgcgggtgtggcctggtcaccttctgcgccaacgtaatacgtga

SEQ ID NO: 20957 - DNA, 519 bp, Zea mays
  Peptide Sequence Number=SeqID_64332
atggagactggagaggcatgccgggagttgtctgtggatgactacctgactttgcagtaccaggctgctatcttagctgaccaggtagcgtccggggcgctggtgagtgttgcgacctcgcagcttcgttcagaaaggaagaggctggaggacaaaatagagcgcctgcggatgcagcataccgaggtcgtcagagataagtctgtagccaagaacaagagctggaaccttctggataagatcatgtcctacgcgtcgcttgttacctacgaaggggcagcgaatgccttgtcccgcgagggctgtaggcatttcgaagccttcggccgaagctacaaggacttcgacctgggagttttccaggccaaagatgacttgctgaagcgctcggtcgaagcactttacaataggatgtggggctctcatggtcgcgaagtcgttcgagagagggtcgactgggcgctagcacaggaatgcgtctacccttggtgggggtgtgctttttgtttgcttatctaa

SEQ ID NO: 20958 - DNA, 411 bp, Zea mays
  Peptide Sequence Number=SeqID_64333
atgcaggaagatgatgtctgtctggctgtcattgtcaacaagtactttgtgcagatcccaccctgccactctacaatttatcatcagagcatctgcgcgaggcgcactacggaggtcaacatcccttgcatcgaaggcccagtgagggctacatggcttacccttcggtattggtctttcttctatcattttgtttcgaactcagagctggaccctccggggtgggggaggtgtaatccctgtttgggtgtgccgaggctttgccgtggaaaagacaatataatcttcgctgctgctgacctcggcctctgcctctgcctctgcctctggttgcattgccgttgtggccttgctgtggagggtagtcatgacgatgagaggtgttgtctctggtctactgctgatttgtga

SEQ ID NO: 20959 - DNA, 297 bp, Zea mays
  Peptide Sequence Number=SeqID_64334
atggctcccaagaaagcaacttcgaaggccacctcgtccctggacgacacgatgaaggcagccctcgctgaaaagaagggcaaggcaacccttgtcggtgatgtacctcatgaggccctcgacgatggagtagtaaatagcaagcaaccttgctcggaaaacccgcctaccctgagggcaccgttcgcacatgcagctctgaaggactacctcggaccctccatgaggcttcaccccccagaagctaacgatgtcatcgaagacggcaaaatcctaggcatctcgaccgaggactag

SEQ ID NO: 20960 - DNA, 129 bp, Zea mays
  Peptide Sequence Number=SeqID_64335
atggcctgtacaagccgcgtctggggtgatcagcgagcgcgtcgcgaaaacgaggaagaggttgagatagaagaagagaagactgcaccaccaccacctgcggaacatcaggcaggtgataggagttga

SEQ ID NO: 20961 - DNA, 372 bp, Zea mays
  Peptide Sequence Number=SeqID_64336
atggcgagagtagcgtgtaccctccgtggcaagaggctggacggtggatccacttttagtaagcatttctgcaaaacagagtctttgattattgagaagccttaccttgactcccttataaccagcatacccttgagagtcttttctttagtcggggcccgttaccgtgggccgaatcctgcatgggcctcccagggcggtgacgacgtgagactcgtagacttcgacagagccttcgtcttgcaacagagaggacaaagggggactgcgctagtcttcatccaatcgatgcctttggcttgtccgggcgtgttctatggatgtagtcttcatcggagtgaggaggcgatgaaggcattgagcgaagggtag

SEQ ID NO: 20962 - DNA, 372 bp, Zea mays
  Peptide Sequence Number=SeqID_64337
atgggcaccgaacatggtgtctccggtgagctgcaagcgggtgatccgagtggacgtccgtgccccgttcgttgggggtcggctaggggcccagaggcacgcccaaaagtacctgcgggtgatctgccggacccggtcccctggcgacggggtccgagggctcgatgcctccctccgatgggattccgttacaagatcgttcccgctggtctcggaaatgtcctagggtacctcgggagcacagcccgagcctcggttatgtatcgaacgtacccctggtgggaaggtgaatcgccaaatcgtctgcacccgctgaacggtggaccacttggcgcttggaaggtgaactgccaggtcgcctgtattcgctaa

SEQ ID NO: 20963 - DNA, 420 bp, Zea mays
  Peptide Sequence Number=SeqID_64338
atggcctatgcaacaatgttcaccggaggtgagactttcgcgctagggagccacatcatgttcgtctccctcaacttacttgccaccaccaccggcgagctccacatcaccgaccctaacatgtctttcaccacgggcacacgacctgcacgctccaccaggagtaaggcgaagaaacgatgccttaagtggtgcgtcgccgccttaaagcagtacctcaataggcacaccgacgccattaagcagagggcggcaaaagccttgccttcaacactatcggtcatcagccaacatttgtcctcgacttgctcaaggacgggacaacaagatccccaactaggaggaagaatatcagtgctagcacgaggcgcatatccttacccgctaggccaccctttggtaacagcaaaaggagcttga

SEQ ID NO: 20964 - DNA, 156 bp, Zea mays
  Peptide Sequence Number=SeqID_64339
atgaagagctacacccgtccgtcatcatctgtcgaatcagatctatcgggtgtagggagcttcacaagtggtggatctgaagaggaggaggaaaaggcagagaagacccgtcatctaggtcttgtccctgaaagtcgcctagaggtggatgaatag

SEQ ID NO: 20965 - DNA, 216 bp, Zea mays
  Peptide Sequence Number=SeqID_64340
atggtattaacgaagatagggctttggtataaacacatgattggaatgaggcgttctgagctccaaaaggctgaagccaaggttatgatattgagcgacaagatcaccgcacagttaatccttctccgaaagatatatttagctcttgatcattactctcctaccttgctgcatcccgctacagaccaaggtttttatgtgggaagtctcgattga

SEQ ID NO: 20966 - DNA, 135 bp, Zea mays
  Peptide Sequence Number=SeqID_64341
atggtattaacgaagatagggctttggtataaacacatgattggaatgaggcgttctgagctccaaaaggctgaagccaaggttatgatattgagcgacaagatcaccgctgatagtcgcctagagggggggtga

SEQ ID NO: 20967 - DNA, 495 bp, Zea mays
  Peptide Sequence Number=SeqID_64342
atggagaatcaacaattaaaggaagagctaccaaggtctcatgagactggtctccatcaagagctgggcttgctgattgacttggggaatgaccatgatgttttgggggaagctttagaaaacacagaaacttacacatcttctgtacctgcatcagatcttttgagcatagaccaacttcttgaaatgccgtggactacaatgtggatgaatgcagactataccactcttgttgattctgtcgccacctcggagcaaacaggtggtgaaatcgagaccaccttggagaaaacaagtgctaaaattatggccaccttggagcaaacaggtggcgaaactgaagagccagccttcgatcccaagcatcgcctacgcgcaatggtgccgcatagttctccttcgagccgggactctcccgtgccaccaaacctcgatggggatgttgtgcccatggcagcgggacgaccgcttccttcccgagtggtgagtcagtag

SEQ ID NO: 20968 - DNA, 270 bp, Zea mays
  Peptide Sequence Number=SeqID_64343
atggcgtcgcgcgccgcggagttctccttcgagccgggagtctctcgtgccgccaaacctcgatggggatggcgtgcccatggcgacgggatgaccgcttccttcgcgagtgtcaaggattttggatgcgatgagaagatccccatcatagatgatagggttagccacttggtacatgcatacgaggatagaattgtgagggtctatgccaagaagcctgagttggttagtgcacatgaagttgatgtatctccagatgataatgtatag

SEQ ID NO: 20969 - DNA, 207 bp, Zea mays
  Peptide Sequence Number=SeqID_64344
atggcgctgctcctcatcgcggacgagtgcctgtacgccgcagcctcagtaagagtctcctccctcttgattgaacttcgtccctggatcgtgatgcgcctattgaatttgaagccttggggccgtgttggagccgctgggttggggaagagagagttgagggtgatgtgggagaggagcgctggccatacgatcgtgatcctgtga

SEQ ID NO: 20970 - DNA, 783 bp, Zea mays
  Peptide Sequence Number=SeqID_64345
atgtatgttcggaatcggttcatgagcatacaagagcatgatgaacagtactcccgtactgttcacgctgactgggcattcgctttttgcatcacgcttgtacccttgctttccttcaaaccaaaggttgcctttggtgcaatctatgctcaggtaaagaagaaggagaacggtgtcgaggcggatctccaggagttccaggacatcgatgagttcgaggatttggctagcgacctcccccagtcagctgcctgtgccaccggtcttcatcatgctcatcacggtcatcacacaagtgccttatggcaagaggatgtttgcactaagcaaaaggctcaacttaaaaccttgaaaaataagttgattagctctaaaaatgattacaaaggtttgctagaaaaatttgaaacatttgcaaatttgaattgtgagctatcaactaaaattgagcaattagaaactagtgctccatccactgctaccgatgatggccttattaaaaagaataaaaaactcaaggctaagttagctagctcccaagaagctattgaaaatttgctaggaaaaattcttagcatacacaataatgagctaactactaagctagaaaacattgttagcaccctagggacatctttagttgaaattcctgaaattattaagaaagatgcttccacttcttgctttgatttaattgatgactctaacccctgcaatcaagttcttgttcagaatgttgttatagaaacatgttcggacgagattgcattggagaatgaataa

SEQ ID NO: 20971 - DNA, 201 bp, Zea mays
  Peptide Sequence Number=SeqID_64346
atgtcgacaaccgctgatgatgatgaggtgaatgatgttctcggtatgctggcgggtgaattgtctaactctacccgtactgagtcagtgactgttgcaactggacatggccttggcgaggatgaaggagttcagagtcctgaaagtgttcgtcgcaaacgatcacgtcggacgagccatccagccgcgcctactgagtga

SEQ ID NO: 20972 - DNA, 196 bp, Zea mays
  Peptide Sequence Number=SeqID_64347
tgatgccctgctgggtcaccttggtagtgatcaatggggagtagctctctccgggcagaaagggaatcacggcttgtggagacattatggtacaggtggttatgagatcgatggtttcggttatgactatggtgctggcgaagatgaagctgcggaaggagacttccaggagttccaagactacgacgagttctag

SEQ ID NO: 20973 - DNA, 531 bp, Zea mays
  Peptide Sequence Number=SeqID_64348
atggcccgtctcaggtgcactgcacgtaagtctgtgatcccctttttgccttctcgactggcggagcgtcccctgcatcacatagtgtcaggtcagtccagccagctggagagactgcatcgtcgcctacacgaggagcaggagcgccgacgccaggagcaggagcaggagcagcaggactcttccccctcgcctcagcgggaggtggagtctgagaggcctccttcccttgcacctcagccagagatgccccctgcaccacctcagggcatcccggctgctggaggagaccctgacggagacatagacgacgacgatgctggtggcagttcgagccatggcacagagctctcggaggagccggagccggatggatggatcgctagacccatcactcgtgacaccgctcgcgggtgtcacttccacgacgctctcgataccctgctgcgttgggccttcgaccaacacacatggtctatcgagtaccattgtgtagtctaccagtatcgtcgcgggctatacccggactag

SEQ ID NO: 20974 - DNA, 174 bp, Zea mays
  Peptide Sequence Number=SeqID_64349
atggccatactcctgtgcttcaacccctcgatggtcaataccaggaagggaggaggaattgatctacctgccaatccatataaccgaagggtgcttagacaacaacaacaacaagcagagatgaatcccccaaatcctccaccagtcggtgctgatccagttatttcagcctag

SEQ ID NO: 20975 - DNA, 801 bp, Zea mays
  Peptide Sequence Number=SeqID_64350
atgacatcgcaagcgggtctgcgccaaaaacagcaaacgcccggcgagcgtcacggcgtgctgtctaccgggcttcacgaaacagcgagccggcagcatgcggcttgctgcacatttttacgaacagccggcgggcaccacagagaacagcgaggagggggctcgctgtttgcagaggagggcacatgggaaaatggagcagggaggggagaaagtttcctgctgctgggcaggaagatgaacagggagggcactggaaaaaaaaattctgggcgtccatgggagtggctgccgctgctttgtgtagtagctcgaccaggaacagagaggggcgagctgcagaggggcatccatgggaaggagtcctctgctgggcgtgcagtcaatagggaaaaagaaaaaaaaacgccatggggaactagcagcaaggggcgtccatggagaaagagttgttgcggcatcggcctctcgccctggatggagctcggatgggggaggaagaagctggctggagatgcggtgcaggtactggcggccatgggagaaactcgagctcgctgccatgggggaagcttcagcgcgttgaggaagaaggagcagggggcgccatggttggctgaggggaggagctcgccatttggagcagtggcagggggcgcctgtgactgccttgctgtggaggccgtcagccatggaaggcagagagcagagggcatgcacgccaaggaggaagagggctggcgtggggagaagaagacagggaggctatggcggctgggaagaagtgaggggtgggagtga

SEQ ID NO: 20976 - DNA, 96 bp, Zea mays
  Peptide Sequence Number=SeqID_64351
atggcgctcgtcttcaagagcttccgccaaatcctcaagcaaaggaggggaaagattacaagctccgctccaagaaaagtgttgctacaagttgtg

SEQ ID NO: 20977 - DNA, 249 bp, Zea mays
  Peptide Sequence Number=SeqID_64352
atgggcccatgcgacagtgtaacagagatacgcgcaagcgtgtgggaggctgacgggcagggcccacttgtcggcaccgtccatccgccccgggccgcacggatgcaaggccaaatgggccggaattggtgcagcgagcccagtttttttcctttattctctactattttgaatccaaatttagaattcaaaattaagagccaatttaaactcatattaaccctgcaatttggtcatatcctcatgtga

SEQ ID NO: 20978 - DNA, 894 bp, Zea mays
  Peptide Sequence Number=SeqID_64353
atgatgagcttcaggagcagcagccacgagggcttcggcttcggccacgccgccgccgcggccagcggagcgccgctgccgtggtgggcagggccggccccgatgctgagcggcgagccgctggccctgtcgccggaggcccactgccgggacggccgcatccaggccccccagggacctcccgtgccgtcggtcaaggctcctgtactggcaccccagcagccgcctccgctgccggagagggggatccctgagctcctcaacctctccgtggatcctcaaggtcaggaactcaggatacgcttctgcctgtgtctgcttgcaaggaggctaggacaagcaagagggggacatggtatggtagcatccatcatgccaaacacagttttcatggttccatctatttatgggaccgagtacatgggtggatactccctggacatgttgaatccacagaccaagacatcatgtagctatactttgacaacccccacccccacacaaaagaatggtaaagggaagaaaggatctgatcactctgccactattgctttgcaatcaccatttgcaatatacaatgctcattttgagctgggccttggtcaatcaatgatttccgctgataattcttatgctgatcaacactatggcctgctttctccttatccagtgggtgcaacgcctggaggtcgtctgcttataccactgaataggccaacagaagcaccaatttatgtgaacgctaagcaatatgacgccatcatgcgtcggcgctgtgcccgtgccaaagcagagagggaaaataggctggtcaaaggcaggaagccatatctccatgaatcactctcactcatctcaaactatgaactgaaaccctcaattgtcaccttttga

SEQ ID NO: 20979 - DNA, 468 bp, Zea mays
  Peptide Sequence Number=SeqID_64354
atggccggggtgttaaatccggcgagccacgggcctaatcctcgaatcaaaggggtgttctacgcgaaggaggatgaaacgaactactatgatgcggaactcaccgaagatgatgacacatttgggctgtccacggcgcgatgcggagccgcggcggcacccaactccggtgacgaattgagcaaatcgacaacgacggcgcagtgcacttctcctcctcacgtcgcgaaagctggtatggcctcgggacgtggatgcatcgcgccagaggctagggcgctacttatgtgtcgcaacattggcgcacgagaggggctcggggtccgttgtaccggccagctgagccggtcaaagcgcggcggtggttgcgctcgcgaagaaacaggaggaagaagggacttcgtgtgcgcggtggccgaccagtgggtccagcgaagtcagcgagacaaaactgagtccgcgcggtaa

SEQ ID NO: 20980 - DNA, 321 bp, Zea mays
  Peptide Sequence Number=SeqID_64355
atgaggatgaggctcaagttgatgaaggacaagatcaagaagatgagccacctcaagatgacgacaatgatcaagggggagatacaaatgatcaagataaggaggatgaggaaccaaggccgccacacccaagagtccaccaagcaatccaacgagatcaccccgtcgacaccatcctcggggacattcataaggggggtagaggaagcacttcaagattcggattgggtggtggcaatgcaagaggagctcaacaacttcactaggaatgaggaaccaaatgggttttccgcaacaagcaagatgagcatggtgtggtga

SEQ ID NO: 20981 - DNA, 180 bp, Zea mays
  Peptide Sequence Number=SeqID_64356
atgacatggggaggggggcttgttgctggtgatgatggcggtggtgggtgcgctgcaaaggggaagtggggcggtggtggtgcgcatggaggcgggcacgcgtgcggggggcacggggctctagccaaagtgaagaaaaacttcactacccaatgcatgcagaggactgggcataactaa

SEQ ID NO: 20982 - DNA, 366 bp, Zea mays
  Peptide Sequence Number=SeqID_64357
atgggctgggaggctcgcctgggcgtcggcgagcgcgtcgcgcctgccctgagcaccgggccgctgcgcagcgcccgtgctggccgcgccgggctgtcatggccgagccacaccgggttgccgccctactgcgggcaagctgcgcagggatgcgggacaaggcgaggggaggaggaaccccctgggggtggccgagggtcttatctcaacgacttggttgagatcgtggtgacggttccgtcttccatgcgtggacgtgagcagggacgggttgggcatgcgcgcgcgacgtggcagggagcgcgagggccacgggcgaggcgtttgcacgcacgcggcggctgggcgagcgcggtggagcgctag

SEQ ID NO: 20983 - DNA, 150 bp, Zea mays
  Peptide Sequence Number=SeqID_64358
atgcctaaaaatctgcataagctgatgatgttcgttttttggaacacatatgaggccctttgtttaagttgttttatgttcatgcgtgagactttctctgaaggcccttacctccttgtgcacacaaggtctgagatgatggaaaagtga

SEQ ID NO: 20984 - DNA, 282 bp, Zea mays
  Peptide Sequence Number=SeqID_64359
atgggtacatataagtatcaaggtaaacatcaagggaagacaggggttgaggtgataacggacaaacacacaacaaagggtgtatttaggcaaaacttgcaaggtgtcaaagaaggggaagcagtcaatgatgaaatagatgaggcattatccccgaacagggatggaaaagaggaggcttcaaagggtaggttcaaggatggagttaagacaggacctgcaaatggaaaaggagagggtacgcccaagggccagataggtaaattgacactctcaaattga

SEQ ID NO: 20985 - DNA, 594 bp, Zea mays
  Peptide Sequence Number=SeqID_64360
atggcgcttcctgttgacgtggcgggcctgtgccctaggtcgggtgacgtggaggctcctccgaagccgagaggccagggcggagtccgagccctggggtcgggcgaagcggagtttcgtcgtcttctggggctgagcccgagtccgagccctgggtcgggcggagtggagttcgccgtcttccggggccttagcccgtgtccaagccctgggtcggggcggagcggagttcgcccgtcttccggggccttagccccgagtccgagccctgggtcgggcggagcggagttcgccgtcttccggggccttagcccgagtccgagccctgggtcgggcggagcggagttcgccgtcttccggggctttagcccgagtccgagccctgggtcgggcggagcggagttcgccgtcttccgaggctttagcccgagtccgagccctgggtcgggcggagcggagttcgccgtcttccggggctttagcccgagtccgagccctgggtcgggcggagcggagttcgccgtcttccggggctttagcccgagtccgagccctgggtcgggcggagcggagttcgccgtcttccggggctga

SEQ ID NO: 20986 - DNA, 1437 bp, Zea mays
  Peptide Sequence Number=SeqID_64361
atgtcaggcctcgacagccacaatgaacagacaccggcactcaaggtgccattacaaacggagctccggttccgcccccgcgggtatgaacaacctccacactggagagcctgcggggcgacaagctccgggcgactcgccaacgacctctgcagtagcagcgatggtcccaggacggacgctgcagctggaaggctctcgttcgcgtccccactcaagggacgcgaaccaaacattaaagccaaagagccggaggtcggtccgcgagtggcgctgacgggcttatcggcggagaagctttctccagctgccaccacgtcagcaccgacagcggcgtccacctgtccaccagcgccgcaccagcgagcgccggccgccccaaagcgcaccggcagcaacagttcgccttccccggcatggctggaggatgcctcctccgtagagcttggggatggtttccacccccagaagctagaagaagaggtgggccgccgacccgcgcgggaggtagagctccggctcgcctcaccctccgccccatccaggatcatgaacatccttgaagctgagggcggggcagacgtcgtagcccggcttgcttctccccaccatcaaactggtggtcaccgtcttggggagtgcgaagacatggttgccatccaagggggtcaccctccttttaaaggcaactctccccacttgcatcctcagccggcgcggaccgagtcttcttcaacacgctccaaggtcctccccctacgacacgggggctgggtcccacgcgtcatgcaagctggcccaggacagaaggagccaaaaccgccgcgtgcggagcgcacaatgacccagcggttacaagctttcctccactatcgcccggaccagcgggtgaaaggacggaccaccatgcaagcggcatgcaaccgcaccaagggggcgcgccctttcaacttcgacgcgtccagcatggaggcccaggcccacacgtcatgtaaccggcgcgccggttactacgtgcgagaaactgcaccgccactcgcgccactaccgcgcctcctcgactgcggaaccagtgccgcgactcgaggcgaccctgcgcatgacccaacagtgccaaccgagcacatcggtcacgggtcggtcagccgcgggagaaagcgtgacggtcgatacgaccagaaatgggccggcagtgatggcggtggcaagcgggcggaagcagcaatcaaatcatctgcaagctcatgtcccctcatggggcagcaggagaaccctctcccatggcgtgaagacgacgcgcccgtgttccgttcctcgaacggctcgcgcacacacaacggctgccccgcgaaccactcgacccgtcgcattaactctgcggcaggacaggcggcacctttggcaggcgaagcaggcgacgcttcacctccgccataa

SEQ ID NO: 20987 - DNA, 855 bp, Zea mays
  Peptide Sequence Number=SeqID_64362
atggcggtggcaggcgggcggaagcagcagtcaagtcgtcagcaagctcacgccccctcttgggacagcgagagaaccctctcccacggcgtgaaagacgacgacaggcggcacctttggcagacgaagcaggcgacgcttcacctccgccataatgaccgcgtcaaaaaagggaccgggaaaggggatactccgaaagggatccttctccgcgaaggaagggccccgagccccctactgatcagaggttcgaaggctggcccctcagaagggttcaacagctgcctcagagaactcgggctccgcgcccactactggtcagaggttcgaaggctggcccctcggaagggttcaacggtcgcctcaggccactcgggctccgcgcccactactgatcaggggttcgtaggctggcccccgaagggttcgacagccgcctcagagcacgcagagcgagggatgaccctggccttgggcgccataggaagctccgcctcgcccaaccccagggctcgggctcaacctcgacactggacgacggacttcgcctcgcccgaccctagggctcggacacagcctcggcctcagaagacggtctccgcctcgcccgacctagggctcggactcaacctcgacctcggaagacggactctgcctcgcccaaccccagggctcggacacagcctcggcctcggaagacggtcttcgcctcgcccgaccctagggctcggacacaacatcggcctcggaagacggtctccgcctcgcccgacccccagggctcggactcagcctcgaccttggaagacggactcgacctcgacctcggaggagcatccgcctcgcccgacctag

SEQ ID NO: 20988 - DNA, 165 bp, Zea mays
  Peptide Sequence Number=SeqID_64363
atggccggggaagggaaggaagggggaaggagaggggagggaggggcttaccgcgcgagatacttgatcaaagatgtttggattacgggtggtgacgatgatgatgtttatgactatggtaatggtaaagaagaaggcgtcggggcggatctccaggagttctag

SEQ ID NO: 20989 - DNA, 1341 bp, Zea mays
  Peptide Sequence Number=SeqID_64364
atgtccgtggcccgctcggccttccagcctcgtcgcgtgcacgggagcatgggtagcgtccatccagttcgtgggcccacccgtcagcaggccgccaggttgttcctcttcacgcacgtccacgacttcttcaaccccaagcatccgttcactgctctccttggcaaccagcagcaggggcaaccagcggccccggcgcgggcgcgcgaccctggctcggcgtgcgggcgctcggcacagcacggcggctcgacaaccggcgcggccggcgtggcagctcgcagcggccagcccgcccgcgaccatggcacggcagccggcgcggtggcccgcggcttgccctgcgcggcagcctgcgtggccagcctgctcggtctctgcccggtgcggtggctcgcggccagccagtgcgacgcacgcagcctagctcccagcccgctgtcgagccctctcctacgcgcctgtcccacgtgcccaggcgtccggccctggctccctagcccgccgcggggcctgtgcgcgatactaagggacgacaagttgattgctacaaaattcaagggcttctttagcaaaacggccgcacaaaggggtatcaggtctcctcagacgtcagatctacgatcaacggctgagattagatccgagcgcgagcgcgcgcacggacgggtgaatgcggctgataggtggggcaggggtggctgcgacctagggtcagcggggctgataggctgggcccagctgcagagcgcgagcgaggcggccaaccctggttgcctttccccgctgccagcggcggtgccgcccgactccgcggtgaaacgtcgccggaggcgcgagcgcgaccgcgtcgaggggtcccgaggcgctgggaagggcaccggcggcgccgcccgactccgcggcgaaacgtcgccggaggcgcaagcgggatcacgccgatgggtctcagggcgctgggaagggcacgtgaaggttcaggatggcacggcggacacgatcgtagtgcggccgcaccgaggggtcccggggcgctgggaagggcacctgaaggttcgggatggcacgacggacacgatcgtgggcacaacaccgacacaggggcaccaaagactgtcgatctgtgacaagggaggccttgggtccacggtggcggagcttcggctctacggggagaaggcatgtgagcgcagatcgggtgaaacagaggggttgggggcaaaccagagggtttcccacattgctggcgaagatgcagagctcaccgaggcaacaggcacgccagacgctcaacggcggccacggaacaggcggcgaatcacaacagagctccacgggcgc

SEQ ID NO: 20990 - DNA, 708 bp, Zea mays
  Peptide Sequence Number=SeqID_64365
atgtcccgaatttcttggtccaactcctcttcttggagtgttggactggtggccttcctattctggctccaagcttctcggagagaaagagtttcctggtttgggtccagtggttgcagcgcagcagcccctgtcgctgaagctttcttcggcggcatgacgaagaagatctggtttgcctcccttcttgccttgtcgacgttgatgtctttcttcttgaggcttggtgtttctgtccgtgttagtgacatatggttaagatatatgtggggcgcgctccgctttaattcaccggactgtccggtgcaccagtggagcaacaactactttgcgcaacggtcgcctgcaaaagctgaagattcagaggaacagtgcgcaacactgcgcggcagagtagagctgcccgtcagaggcgcaccggacactgaacagtgcctgtccggtgcggcaccggactatctggtgccactagaggacaaagcctccaacggtcagaagctcctgaaccctaacgattgggtgacgtggctggcgcactggacagtgtccggtagcgcaccggactgtccggtgcgcccatcgacagcagtcatccccaacggctatgtggtggttgagggctataaatacccccaaccaccaccactccaagcatccaagatttctgagtatcacattcattacaagagctctagcattcactcctag

SEQ ID NO: 20991 - DNA, 231 bp, Zea mays
  Peptide Sequence Number=SeqID_64366
atggttagtggcggcggcgctctggcgtgtgcgcggcgagggggagggtgttacagggacttcgtccccggacaaagaaacgtgcactgcctcacgacccagcgcgaggtcccagcgtccgtcagcccaaccgacaaagagcacgacaaggcacagctgcagagcaacgatgggaccaagactgttcccctcgaccaggccacgcccaagcagacagtcactatcgcatga

SEQ ID NO: 20992 - DNA, 492 bp, Zea mays
  Peptide Sequence Number=SeqID_64367
atggcgagcgactgtgcagcagcctcaggcagggagcagcaagcagggtgcgacgctgtgcaaataaacaggagcaaggggctggcgagctcggaagaagggggagaggaagaggcggtcgggacttcaatcgaccatcaatggcgtttatggagcttcaatgagagagtaaatgggggagagaagggagaagaaagaaacgtcacagtgaagttccttaacgcagaagaaacggacggcgcactcgggcttcgcgcggggtcggtcggtgcgggaggcagggcgtcgcgcgcgtgctcggggtcggctctgctggcgctcggctcgcgcaggggtccggacgccggtcagggtcgcctgcttggtctcctgggcgcgggtggctgctcgtctgggtcttggcgcgtcggtgtcgattgcgcaggggcagggcgcggctgtcgcggcttcagggtcgggcctggcagctcgggtcacggcgcctgttcctag

SEQ ID NO: 20993 - DNA, 222 bp, Zea mays
  Peptide Sequence Number=SeqID_64368
atgccgctaccgaaattccttgctgttgtgctgccgcaactgcttctttgcttgccaccgtctgacaccaccgtctgtcaccgcgctcgccgtcactccgatatgatactaatgttccaaatgtttgaccatttccagcatttgcgtaatgaggactctagggagaagcctcgtagtgagaccctggccattcacctcggaagtgaatacgggtctagctaa

SEQ ID NO: 20994 - DNA, 135 bp, Zea mays
  Peptide Sequence Number=SeqID_64369
atggcgacagcagctttcaccaaacggctagttttggtgacttctaacagagacaccactccccaattgctcatgttcactatgttcatcttctcgttcaagctctgtcccggcgacgtccccgacctccactag

SEQ ID NO: 20995 - DNA, 372 bp, Zea mays
  Peptide Sequence Number=SeqID_64370
atgagacgacctcgtcacaggtcttcgtccggcgacgtgtgggacgaagggacaaaggagcagcagcagcagcagaagctgaaagctgaccacctctctagagaccttgcagagcggctcacatatcatcagaaggaacatggcttgcaagggcattttgaagatgatagggcagtgttgcccattgctgacaacggcagggcagttgataaccgcatagttgcactggatacgttgcacaagagattggatcatgaacaaagatctcggcacgaggaaactcttggatatgattccagcagtatgtcgaaggcatgggagttactggctcgcgtggaccatgctgagaaagtgaccgcgtcgtgccggtaa

SEQ ID NO: 20996 - DNA, 483 bp, Zea mays
  Peptide Sequence Number=SeqID_64371
atgagggcggagcgaggggcccgccggacgggtgcccgggtccgcgtggcgtgggtgtttgtgtttcctagcctttggtctttggacacgccgcacggcgcttgggctcgtgccctgtggtcgcgtgcgccgcgccgtggccgcctaggcgcctaccgtgcggggcggaatccggtggggccgtgggggcgtcagccgtcaggtcggactctggtggatgcagggacgcagtccggtggctggcaggcggagctcggcgcgtcgcgcgggatagcgggttggcaggcggagctcgacgcgtgctaccggctgccggcgcgtgttgctggctgccgccgcggctggaacctggaagcggagctcggcgcgtgctgccggctgacgccacggcccacagcgtgtgctgccggctgccgccgcgactggaactggaagcggaaggcctcggcgggcggaagaggaaggcagcggctgagcgagtga

SEQ ID NO: 20997 - DNA, 1038 bp, Zea mays
  Peptide Sequence Number=SeqID_64372
atggggggagcgcagctggtggggagatgggtggagtcgtacacggggatgtcgacggacaacatcaagggcctgctgctcgcgctctcctccagcctcttcatcggtgccagcttcatcgtgaagaagaaggggctcaagaaggccggcgcgtccggcgtccgagcagcattcctgtgctatgcagctgttgtgcttgcagcagcttttgtgctcatattccattttgtccctgagtatggtcagacacatatcatggtcatgagtgtcaaagctcttgggatagccttgaagctgacattttctgggatgaaccagctagtctatccacaaacatgggtgttctcatccgttgtaaccttatgcattgtaacacagatgaactatctgaacaaggccctcgacacattcaacactgcagttgtttcacccatatattacacaatgtttacatccttgaccatcttggctagtgtaataatgttcaaggattgggatcgtcaaaatccaacacaaattgtaacggagatgtgcggcttcgtcacaatcctttctggaacttttcttcttcacaagacaaaggatatggtggatggtctcccaccaaatttaccgattcggcttcctaaacatgcggatgaggacggctacgctgctgaaggaattcctctcagatccgctgctgacgctggtcgcctgacccactcagtggtcgaccggtgggtggcggcggcgatgcccaagtcatgcgcgtcgctgcggttccttgcaacggccaattttacccaccatgtggcgtccaagtatatgtcgctcgctgctggtcgtcaaggcgagatccagagggccatccagagaacggcagcggcacatgttggaggtgcacgtgcaaggaacagccagctagcgcagccgcgcgcgcgtacgtacgaacgaacgttctccgactggcggacggacaggatgtttctgctgccgtcaatgaccgggcggcgacggcgacggcaagcacagcggcctgggcccggcaagcaataa

SEQ ID NO: 20998 - DNA, 306 bp, Zea mays
  Peptide Sequence Number=SeqID_64373
atgaagctgtggaaggagacttccaggagttccaagattacgacgagttctaggtgtgggttagcggcaacccccagtcggctgcctgtgaaggccgcgtttatctacgtttcttttccgcactttgatttattggcatgggcaggattttgttgggctgtgaaggcccaaatgatcgctccgcgcgttaccaaggcaaatagtgttatcgacacgtcatgcgctgacagaccacatagtaatctacgtgttaccaaggcaggtcgttgtgtctcaacgcctcatgcatgggcggtgccatcatga

SEQ ID NO: 20999 - DNA, 264 bp, Zea mays
  Peptide Sequence Number=SeqID_64374
atggcgcctcctgttgacgtggccggtccgcgccctaggttgggcgatgtggaggctccttcgaggtcgaggtcgagtccgtcttccgtggctggggccgagtccgagcccctgggtcgggcgaggcggagttcatcgtcttctggggctgagcccaagtccgagccctgggtcgggtggagcagagttcgccgtcttccggggcttagcccgagtccgagccctgggtcgggcggagcggagttcgtcgtcttctggggctga

SEQ ID NO: 21000 - DNA, 264 bp, Zea mays
  Peptide Sequence Number=SeqID_64375
atggcgcctcctgttgacgtggccggtccgcgccctaggttgggcgatgtggaggctcctccgaggtcgaggtcgagtccgtcttccgtggccggggccgagtccgagcccctgggtcgggcgaggcggagttcgtcgtcttctggggctgagcccaagtccgagccctgggtcgggcggagcggagttcgtcgtcttccggggcttagcccgagtccgagccctgggtcgggcggagcggagttcatcgtcttctggggctaa

SEQ ID NO: 21001 - DNA, 366 bp, Zea mays
  Peptide Sequence Number=SeqID_64376
atgcaggcggcatgcaaccgcaccaagggggcgcaccctttcgacttcaacgcgtccagcatggaggcccacacgtcatgtaaccggcgcgccggttactgcgtgcgagaaactgcaccaccacttgcgccagtaccacgccttctcgactgcggaaccggtgccgtgactcgaggcaactctgcgcatggcccaacagtgccaaccgagcacatcggtcacggggcgggcgatacctttggcaggcgaagcaggcaacacttcacctccgccatgatgaccgcgtcaaaaaaggggccgggaaaggggatactccgaaagggatccttctccgcgaaggaagcgggccccgagccctcctactga

SEQ ID NO: 21002 - DNA, 870 bp, Zea mays
  Peptide Sequence Number=SeqID_64377
atggcgaccaccagcccctggatggggagaagcaagtcgggctgcgatcttggtcccgccctcagcttcaaggatgttcatcatccttgctggggcggagagcgaggcgagccggggctctatctcctgcgtgggccagctggtcggcttctccttcggcgttcgagggagagggcgctcactggccctgcaggcgggttggacttcgacaacgcggggctggtcgacggcgggcgtcgtcagcctcagcgcgtcgggctcgccagcttggctcccggtgccccctcctgccggaagggcgattgtcgcgccgtgcgcacgggaggaccacccaagacgtcgcgcgctgccagggcggcgttcgtgttctggggcggtcctgcctttgcaccggagtccctcggctcggtcgaccttgctgtccgaggcttctcttgcttagttaaaggaacccctcgaccgctcttcgatgagccgaggccaggggtagcggtgtcagcatgggcagaggcagagtcgtctcaaaaagaagacttggtcggccggagcctggccgggtcgtccgttagcgggaccgacgccggagttgatctgccgaggcctcgggccgggctgatgtcttcgggggacagctggccgaggcctcggggtgaccagccgagccgcctgctcgagccagattctcggagaagactctggcggcgatggcccggacatgatgatgacgtcgtccttcagagtggagatcctcggaccgtgtcgccgtccgaggctaggtcggacctcgccgaaggtgcagttgacgccgagggtgctgctgctcccttcaaccgtcaagatccggccctgcaggatcggattatcttgtag

SEQ ID NO: 21003 - DNA, 1038 bp, Zea mays
  Peptide Sequence Number=SeqID_64378
atggctgaaaggtaccaactcccgcggagttgcgttcctccaacgacaaggcggaagcactgcgggcatcccccatccgggggctcggaaggtggaaagacacgatgcataagggagcacgaagacatggtcacctttcaagggggtcaccctccttttaaaggcgactctccctacttgcgtccccagccgtcgtgggctgagtcttctccaacacgctccaaggccctccccctacggcgcgggggctgggtcccacgcgtcatgcaagctagcccagggcagaagaagacaaaccgccgcgtgcggtgcatgcaaccgtccagcggttacaaacgtccctccactttcgcccagaccagcgggcccacgcgtcatgcaaccggcgcaccggatgctacgtgcgagcaactacaccgccactcgcgccactgccacgcctccttgactgcggaaccggtaccacgactcgaggcaaccctacgcatgacccagcagcgccagcctggcgcgacggtcaacacgaccaaaaatgggccggcagtaatggcggtggcagcgggcaggagcagcggtcacgtcgtcagcaaagcttacgtcccatccggtggcagcgagagaaccctctctcacggcatgaagacggcgcgcccgtgttccgttcctcgaacggctcgcgcacgcacaacggccacctcgcgaaccgcccgctccgtcgcattaactccgcggcgcgacaggcggcgcccctggcaggagaagcaagcgacgcttcgccttcaccgtaatgaccgcgtcaaaaaaggaaccaggctccgagcctccctactgatcagaggttcaaaggctggcccctcggaggggttcaacagccgcctcagagcgtgtgggctccacacccactacttgtcagaggttcgaaggccggcccctcggaagggttcaacggccgcctcaggccactcgggctccacacccactactgatcaggggttcgtaggctggccctcgaagggttcacagccgcctcagacatag

SEQ ID NO: 21004 - DNA, 228 bp, Zea mays
  Peptide Sequence Number=SeqID_64379
atggcggcgaggtggcttcctccacgggattgggcttgggatttgacaaggggagcgcgagatcgacggaatcctgttggcggagccggtggttatgcgaggcagttacaggattacgagcagaaagatttagctggcaggctgggaccaccccgggagcaagagttggagctaaaacctgagaaagacgatgcgcacgacgtttggccatgcaatgcagctaagtaa

SEQ ID NO: 21005 - DNA, 288 bp, Zea mays
  Peptide Sequence Number=SeqID_64380
atgaaatttgaagcaaatcacgctacaaaacgctctgtcataacaactaaagcagtccctgatggtacaatagcaaaaagatctgctggttcagtgaacctcgtcaccggcgaccccgcgcccggattcgcgccaggcgccacgattcgtgctcaacggagtatagataactgctcggggctcgccggagccaaagctccgccgtccatggttggggacctcaccttgcaaaaaaatagaaaggggaggggccttaatggagatatcagtgagacagagaaacagtag

SEQ ID NO: 21006 - DNA, 471 bp, Zea mays
  Peptide Sequence Number=SeqID_64381
atgggcgcgattaaggtcaaggctcagtccactcaagggacacgatctcgcctcgcccgagcccagcctcgggcaaaggcagccgaccccggaggattcacgtctcgcccgagggccccctcaagcaacggacacacctttggctcgcccgaggcccagtcttcgcagagaagcaaccttggccagatcgccatgctaaccgaccggctcaggctcaatctcgacgctagacgacggactccgcctcgcccgacccccagggctcagacacagccttggcctcggaagacggtctctgcctcgcccgacccagggctcggactcagcctcggctccggaagacgatggactccgcctcgcccgaccccagggctcggactcaacctcgacctcggaggaatcgccacctcgcccaaactcgggtccggaccggccacgtcgccaggggggccatcattaccctgcccctag

SEQ ID NO: 21007 - DNA, 444 bp, Zea mays
  Peptide Sequence Number=SeqID_64382
atggacactggaaatttcattcacttgattgggaaggccccatctaagtacaaggaagccccctatggcaagacattttttagacatgcaactggccgcatttctgatggtcgtgtcctcattgatttctatgctgccaagaagcaatttctaagtgattctcttgtcattatgggtggaattggtcaaaatgactactactcatatttcatcaaaggtaaacctcccaaggatggaaatatcatttcagatgtcatcgcagacataagccatttcatcgaggagcttattgtcgttaatggggcgaaagcattcgtggtcgccaataactttcccgttgggtgtttggcatcatacctaagtaggttccacagtgacgaccatgaggactacgatgagcatgggtgccttaagtcgttcaatgagttctcccaaaaagcataa

SEQ ID NO: 21008 - DNA, 726 bp, Zea mays
  Peptide Sequence Number=SeqID_64383
atggccggctgggcaagaataacacgcacgcgtgggggctccagtgctccacgcggtctgcgttgcagggagcagggaggaacgagacgaggcgtggccgctggggtgctcgccggtgctgggcgaatcgtcggccagcgcagtggcgcgctcaggcttgcagggagagaagatgaaaaggctacaacgacaacacaactcggcaagggaggccaggacacggccggggctgccgcgctgcgcgctgaggaggagcgcggggatggggctgcaggggcatgcttgcccagccaaggcagccacgaggatgcagcgcggcacgacgaggagcagcgcggcacggctccctgcatgggtgttacagatctaacccccttaataggaatcttgcccccgagattcaagaagaagctaggaagaaaacaagatgcttgggatcgattgatgcaattcttgaggatctcttggacctatgggttaggacccacacacgcttccgttgtgccatgcgcagcgcgggcggccggagctgggcgaggcgcggttgtgggtggttctggcggagctggacgcgagggacgaggcaacgggagtgccaattcctgttttggggcgacgtgggcaagggaactcggacggttggagtctggagaagaagacttgccctgggcgtggccctggcgcgcgggcgctctcggcggctggacacggctgcggctgctgtag

SEQ ID NO: 21009 - DNA, 294 bp, Zea mays
  Peptide Sequence Number=SeqID_64384
atggcgaagctaggggagaaggtctcaccgggagcgaaggtggggacgaggtcggacacggtgttgggcgaatcgctggcgttgaagtccctccggcaaggccatgacagacatcctggtggccttatttatccgcacggcccatccccgagggatctacatcgacgagccagagtcttccccatggcgaacatcattctcacacttccacccatggcggtcgggtatgggatgactcgaattcgggtgccagctcgatggaaggaggggagggggtacagagacggcttttaa

SEQ ID NO: 21010 - DNA, 447 bp, Zea mays
  Peptide Sequence Number=SeqID_64385
atgggcgcgagtaatcgaactatggcttaccggttagtcgtggccacgcgcgctggcgaaagaaacaactccggcgagggtggaacggtgtctccggtgaggttgcgtttggtttcttgcttcggagagctctacagggctctagggaagctagccgaggcactcgatcggttggaggtgaccggaaaaaggcttcaaatcttcacgaatttgggcaagatcgtattgttagatatgttcctcggggtatgctttgtcgtttttgtgtgggcgccgaggggttttcgtccgtgtacaggcgtgcctaaggtttcagggcaccaagacccgggcgcgaacataatcaccagggggtgtgagacagcaagagtgagctcacatacgttcatagctcaacaagttgtggggaataatgtgcatgaactcgccaaaggtgggagctcatga

SEQ ID NO: 21011 - DNA, 207 bp, Zea mays
  Peptide Sequence Number=SeqID_64386
atgggtggaagtgtgagaatgatgttcgccatggggaagactctggctcgtcgatgctacacagtttctcaccggagggacttcaacgccagcgattcgcccaacaccgtgtccgacctcgtccccaccttcgctcccggtgagaccttctcccctagcttcgccatgttcctctcgacggctagtatcgtgcttcggatggaatag

SEQ ID NO: 21012 - DNA, 558 bp, Zea mays
  Peptide Sequence Number=SeqID_64387
atggcgccatcagtttcaatgggaaagaacgtggggggaagagaaacggctgcattgaagcttctttacgccgagggagaacggtcgcgggcggggtcgcttgggcgcgacactcgggcgtcgggctggctcggcggtcctggcgcggtcggacggccaagcgcggtgctgggcgcgcgggtggcgcgaggtgtcgggatcggcgcctgggctgctttgcttggccacgggggcgcggttcctggcgtcgggctcctgggcgcggcccaacaatggcttggcgcgagctggtgcagcacgtcgggcggtcagctacgtcctggcgactgcgcgtggaagggaagcaaggggagaggggaggagatagagggctgggtggggcccgcttgcaagagagagaaaaggggagggggaaagttccttgcggcggtggcggcttcagctgggagggggacgcgcgtggctgggagttcggttcttgcaaacctactccccgttgaggtggtcacaaagaccgggtctctttcaacacttttcctctctcaaacggtcacttag

SEQ ID NO: 21013 - DNA, 1404 bp, Zea mays
  Peptide Sequence Number=SeqID_64388
atgaatggcggcaaccacccccgcggcggtgagccctctttcttgcagctcctccaaggccttcaaaaggggctggagattcttctgtctctcgcgcggggtcctgtagcgccagttatcggcggtggcggtcaccactcgttgagaaaacgacgggagcctcgcgtcgtcatttcggagataaaatcaccggcgctgccaccctttgttcgaagacgcgaggatggcagggatgtactgcagcgaccgcgcctgcctcaactagaggatgcagccaccggccctcaccaccatgcgaactcttctttcccccgtcgacgaggcaaaaagctctgcgaagaagagatgggtccacaggtcccaatggggggcaatccccaaatatccttcgcaaaccgccgcgaagatggctgcttgctagatggagttgggactgagattgtgcaggtccaccccgtagacgtgcagaatcgcccgcataaaacggctcgccggcactccgaacccccgctcgtgaaaggagacgaagctcagcacataccccggcggcggggacggggcggctccgctcggaggggccatccactccggctacgagtcaccggagagagggcgaagcaaatcatcagcaacaagggcctccagatcattcgccatgacggtggagaaaggccacgagtcgcgcggcgaaacaatggtcacccggtcggccatcaccaagcagaagaggtggcggcggagaggactaggacaggcggcacctttggcaggcgaagcaggcgacgcttcacctccgccatgatgaccgcgtcaaaaaagggaccgggaaaggggatacttcgaaagggatccttctccgcgaaggaagcgggccccgagccccctactgatcagaggttcgaaggctggccccttggaagggttcaacagccgcctcagagcactcgggctccgcgcccactactggtcagaggttcgaaggctggcccctctaagggttcaacggctgcctcaggccactcgggctccgcgcccactactgatcaggggctcgggctacgctcccgaggtaccctaggacatttccgagaccgacgggaacgattttgtaacggaatcccaccagagggaggcatcgagccctcggaccccgtcaaaaggggatcgggtcccgcgaatcacccgcagggtcaaggctcagtccactcaagggacacgatctcgccccagcctcgggcaaaggcagccgaccctggaggattcacgtctcgcccgagggccccctcaagcaacggacacaccttcggctcgcccgaggcccagtcttcgcagagaagcaaccttggccagatcgccacgccaaccgacggtattgcaggagcatttaatgcaaggatcgcctga

SEQ ID NO: 21014 - DNA, 228 bp, Zea mays
  Peptide Sequence Number=SeqID_64389
atggccggaggtgaccgtatcggtggactattccctaaactccaattgaacaagcctcggatggacacgctggagccagaatcgcactattgctgggtatccgcgacgacggtgatatacctcctcgcggaacgtggcggcgcagtggatggcgtggagaagcggcggcgagaaaatgggagcacaagcaggctaggtcgtggggtattcccatgtgataatgagtag

SEQ ID NO: 21015 - DNA, 252 bp, Zea mays
  Peptide Sequence Number=SeqID_64390
atgaggagagcatacaaccaacgtggagcagagcgtgcggccaccgcaagaagcaggagcacacgcggccaccggcgagaaggagacagcacagtcgtcgacatggagaagagtgcagcgaaggaggcgtacgggaccgcgctgcgggggaggagggcgccggggcccatcgccaaatccagggtcgaactcgacgccatggctgccgtgctgctgcccggtctgttgccgggccccgccgagaggccgtag

SEQ ID NO: 21016 - DNA, 105 bp, Zea mays
  Peptide Sequence Number=SeqID_64391
atggagcccggcacctatggttggaggtggaaatcatggagtctaaaccagagggagacgaattcctcgatctgcaccgtggagctcgaagaggtgtggtgctag

SEQ ID NO: 21017 - DNA, 342 bp, Zea mays
  Peptide Sequence Number=SeqID_64392
atggcgcaccggacagtccggtgcacaccggacagtccggtgccccctgccacgtcacactgccgttggattctgaccgttggagcttctgacgtgtgggcccgcctgggtgtccggtgcacaccggacatctactgttccttgtccgcggagtcgcctctggaaattcccgaaggtggcgagttggagctggagtcctctggtgcaccggacactgtccggtgtacaccggacagtccgatgctctcagaccagagggccttcggttcccactatgctcctttgttgaatccaaaacttggtcttttattggctgagtgtgaaccttttacacctgtgtaa

SEQ ID NO: 21018 - DNA, 2649 bp, Zea mays
  Peptide Sequence Number=SeqID_64393
atgaagcagcttggatattttggcagcggagtggggcgtgtcctaggcgcggaggaggttcccgagcccgagggcgagttggtcatgtttgaggcgtttttcactgctagccttcgtatgcttgcacatcgctttgtggcggagaaaaggaaaattggacatacgattgcacagtttggatcgtgcacgtttacgccgaggaccggaaagacttcgatggaagtcgtggagttagttccctgtgcccgcaataagtggggcaactggtgggatttctggttttatgtttccgaacgtgaagtcgaagaccacctagggctccccgtggccgtgatgtgctcccattattatgtggcgtacccgcaatttgaggtggcagaggatgatgaagatgaaggagcccttcggtgcgtttcccgtatgagtagcgggcgcgatttggttgaggaatttatcgggtatggggtatggcccttagcacatggctgggcgttgggcgaagtatgccctcgcgagatgccctccctgggcgggcggcgggtgcgaagtccagccttcacgttggatctgcatggccgggatcctgccgcattcgtgcgtgaagcagaagacggtgctgcgaggattgtggggcactatgtgccgaggacagagggtctgcggagctgggatatctgtgggtccaatgttagattgaatcgggtcttcgaattgaactgcttgccatacggtggttatcccggggatgacgctgtcgaccgccgcgggaagaaatcgttggacgtgaccgaggaagggccttcgctggaggctgccccggccactaagaagagaaaattaggtattgcagtgggggtgggggtctctgaaagttttgctgtggatttgatggtgacgtgcgcagccctcgggggaaggatgtcttcgcccgagctccgggagtcttcgacgcgaatgttggaggttaccgggggtcgatggcccaagaatgttctgatcccccgcgcggctggcgaagacttctttacgtctcgcatggcccgtgacttgaaggtttttccttacgggcggaatattgttgctgttgtgtcgacagtgatggagaaggaccatcaagacgctgcgcagaaacgccgggcagttgtcaggatcgtggatcctatgcgcgaggtgaaaaaggtgcgggggagcgcgaaggctgctgcctctggcggtagcaaaccggtgctagctacgaaaccggccgcccccgggcacagcaaggcggcggcgagtccgaaggctgccgcccctggcgggagcaagccacccccgggcgagctcaggaaaggacaaaggccgctttcatcggcgcgacgtattgccgacttcggcgcagacatcaatgtcgaggattatcttgtcggttcgggtgaggggcaactggttgttgtcccgcctctggtggtgaccacttcgccaacggcgatggcggccgacttcgccgacctcgtcgcgtcgggtgccttgactgcggacgttgctgccgaggtcgagcgtctccgggcacagcatgcggattctgtgtgggagaagtcggctgcggaaagcaaaaaccgcaggctgtcggagaaggtggccgccatggaggccgagaagacggatctctggcgccagctggcggaggagaggagggaggcgaataaggccatcgctgatgtgcaggctgcgcaggccgaagccaaagtggcgcgggtggagcgcagtctcgcccgccaacgcgccgaggagctggaggcgaggttcaacgccctacgcagccgcgtggacaaggccgagtcctcgacgcgcgcggaggttgagtggacgcacgcgcaattcgtggacgcgtaccgcgagctaggcattacgaggttttcgaacaggcggacgacaattttgaacgtgaaatctttcaaggtcgaggaccctgtggtgaagcagtcggcgggggcactctttgataggatgtggagtccgcacggtcgagaggcggtcagggagcggttcgaccgggcaatagagcagatggcgcatgccgaagacgtcgaggaccttgttggtctggacggcgcgttgtctgaggccgcggaggtcgatccggttcttgggtttgggcctgcgcacgcaacctctactgacaatgttatttttgtggcggcttcgaccgtggctgctgatgacgattcgtttggctctgtgtctaagtgttttgagtctaatgattctgggagttcgattgtgtggacggaggagtctttagatgatgacttagattattttgcggcattggacgtggctgcggcggagacttcgccgcgtgtggtgggtgctgaggatcttccgggtgcgagtactgggtgtaggcggcgaagggcggtggcgaaacggagagtgagtgaattgtcgcgaagtaacaggcgtcattgtggtgagatggagagtggccgtcttcgcgtggacgggactggtaagcgggaattgttgtcctcgccggctggggctagtgtgggtgaaggggagctgcaaaatctttttgagggtgaggaattaaggataatgttgttcaactacagggagatgggcatcaccccgaaggttgagccaatgtttttgatgccctcgctgtgt

SEQ ID NO: 21019 - DNA, 1344 bp, Zea mays
  Peptide Sequence Number=SeqID_64394
atgttgctcaaggtatccttggacgatgcgtcggccggcggcgtatttgcagtagacgaggaagaagacgacatggctacgtaccgtcggcagcggcgagcggtctgcttgatgcgggccagatctccgacgagcaggagcaaggagggcaggcgagcgggcaaacggacgcgaccctttgggaaacccgcagtccaacagtaccacgtccgtcaacggtcacatcaaaaaaccccgtggaaccacttcgagcgagggcaacgtctccaccatctagcgacgtcttcgacaccagatgacttagtcgaactggtccctcggagggcaaatgttggggcaaaggcgaagacgctacccttcgctccagccttcgtcaatctcgctgcaccaacggaggcaaaacgaacggcgaggtccacccttcgtcttcgacactacaagacgaaggcctacgacgacgtcgccccgtcccacgtcctcacccgacctggaggcccacgtgggattcggcccattgtaacaggccccgcacggagaactggcgggcatggagatatggactctaatgagcctaccttggatggaggggatggcgcgaccagtgagggtgaggaggcccaatgtccggtgcatgagcgcttgggtcgtcgagcttctccttcccatcacatggaggctctcgacgtatcatgcatgggtggcagcacagaggaggcctctgcccctattttctctagcgaagacgatctccaactgacttgtaagccgccttctccagatagggcgggtccatgtttgggggtggcagtcacgacccctattgtcctctcgtatgatgtcctgaagtcgccagtcaagattgtttactctagaagacctgcgacacagtgcacctccgctgcactcacccttgagacgcaggagggtgcaattgattttggggttgttgatgcccatgtcctaccagtagctttggtggatgatgcgacgcagctgagaggtttgtcctcctcctccctaggacccacttccatggagttggtcgatctccccgttgccataggtaaggataggttcattcaatctattgcttgctggtccaacaagttgttatctatgccgctcctatccaagcgcaaacaaaaccacaggaagttgatcaagtatcctccatgtcgaaaccgctggattatgggtgctggtgttgaattcagttcggatgtgctctctacaaggtctaagaggaaggctctaagatcccttgagcttattggggagaatgaggggttacatgatcaagccctacaggagtatgcaaggcttttcgctaaaccccctatttga

SEQ ID NO: 21020 - DNA, 1341 bp, Zea mays
  Peptide Sequence Number=SeqID_64395
atggcgcacatcatcacggcggtgatcgggtccggcgtgctgtccctggcgtggagcgtggcgcagctggggtgggtgggcgggcctgcggcgatggtgttcttcgccggcgtcaccgcggtgcagtccaccctcatcgccgactgctacatctgccaccacccggagcgaggaggcgtcgtcaggaaccgctcctacgtcgacgccgtgcgcatctacctgggcagtcgtcgctggttgccacgtgtgccaggcgacaagagccatttgttttgcggcttcttcctcaacctgagcttgtttggcaccggtgtggtgtacacgctcacttccgccactagcatgagggcgatccggaaggccaattgctaccacagggaaggccacgacgcgccgtgctcggtgggaggagacggctactacatgctgctcttcggcctcgcgcaggtgctgctgtcgcagatacccaacttccacgagatggcggggctctccatcttcgccgccgtcatgtcctgcttctacgccttcgtcggcgtcggcctcggcgtcgccaaagtcatcgacatttccctttttgagattattgaccgagcccttgcgcgattgccttcagcaaacggggtgatcatgggcggcatcggaggcatcccgctggtgtccacgacgcagaaggtgtggcgagtctcgcaggccctcggggacatcttgttcgcctaccctttctcgttggtgctgctggaaatagaggacacgctgaggtcgccgccgccggagagcgagacgatgaaaaaggcgacgagagcgagcatcgctatcaccaccctcttctacctctgctgcgggtgctttggctacgcgtcgttcggcgacggcaccccgggcaacctcctcaccggcttcggcttctacgagccctactggctcatcgacctcgccaacctcgccatcgtgtacacgcagccggtgttcgcgttcgcggaccgcaagttcggcggcggggccacggtcgtcgaggcgccgctgctgccggtgccgggcgcgcgccgcgtgaacgcgaacgtgttcaggctgtgcttccgcacggcgtacgtggcggcgaccacggcgctggccgtctggttcccctacttcaaccagatcatcgggctgctcggctccttcaccttctggccgctcgccgtctacttccccgtcgagatgtacctcacgaggaacaaggtggcgccgtggaccaaccagtggctcgccatccatgcgttcagcctcgtctgcctgctcatcagcgcgttcgcctccgtcggctctgcggttggcgtgttcgggtcggagacgagctga

SEQ ID NO: 21021 - DNA, 514 bp, Zea mays
  Peptide Sequence Number=SeqID_64396
atggactactctgcaccagcagggtcgcgttggaagctagctccgggtagcctcaccagcggcggcgaccacctctactccaagcggctcgccagcggaggcggccacctctgcaccaacggctcgccaacgacggtgaccacctttgcaccggtggcttgccggcgacggtggccacctcaacgcgtgcgaagaggtcctcgcctccgtcctcctatgggggtgaggacaagaccatccaagaacgcggttgccacctccatggcatacgccgtcttgtacgaccccccagcagcatcggagcagtgtggccggcgacgcaagggatgccatggatgcggtggacctgcgcacgacgcgaccgtcgcccgtgcgatggacggacagccacgccccgcttggcggcgggaggcagcgttggaggcggcaccaaaaccatcaaagccaaagagatggatccgcaacatagctcgtgtcacacccggttttagaaggcaaaccgaatgcgaaccat

SEQ ID NO: 21022 - DNA, 621 bp, Zea mays
  Peptide Sequence Number=SeqID_64397
atgcagagttcaccagcttatagctggcttggaggatcccagggcagctcctctggacttattgtcaagaaaacaatgaaggtcgatatcccagtagacaaatatccaacattcaatttcgttggccgcatccttggtccaagaggaaattccttgaagcgggtggaggcaaatacggactgccgtgtgctaataagaggtcgtggcagcatcaaagatccagcacggtctacaataacatatccactggatacccgatacccggtggatacccgatgggcatgggtacgggtacagtttctcgtccgattggcttggtgggaggaaatgatgcgagggaagccaggatatgaacacctgaatgaacccctccatatattggttgaggcagagctacctgttgaaatcattgatgcgcgcctgatgcaagcccgcgagatccttgaagatctgctaaagcctgtggatgaatcccaggactacttcaagaagcagcagctacgggagctcgcaatgcttaatggcacccttcgtgaggaagggatgcagagatccggttcagcgtcccctttccacaacagccttgggatgaagagagccaagacaagggggataatttaa

SEQ ID NO: 21023 - DNA, 1695 bp, Zea mays
  Peptide Sequence Number=SeqID_64398
atggtgcgaagtcctgccttcgcgctgaatctgcaaaaccacgatccggccgcctttgtgcgtgaggcggaggatggagcggtgcggctcgttggccggtacgtgccgaggacagagggccagcgtagctgggatatccgcgggtcaaatgaccgcttgaacagggtttttgaattgaatcaactgtcgtatgacggctaccccggccaagacgatgtggaccgccgtgggaagaagccggtggtggagactggagacgaccctgcgccggtggccgccccatcctctaaaaagaggaaattaggtactgctatgggagggcttggggtttccgatggttttgctagagagttgatgaggacttgcgcggccccggggggaaggatgtcttcgcccgagctccgggagtcttcggcgcggatgctgagggttaccggggtgatggacaaggatcgccaaggagctgcacaaaagcgccaggcggttgtcaggcttcatgaagccaggccgaagaggcagcggggggctgcgaaggctgcggcccccggcggaggcaagccgccgctggcggtgaagttgggcgtccctgcatctagcaaggcgccggaggcagcggcaggcgccggaggctccaaatcgacgaaggctgtgccgccgtccagcagagtggcggaggtcacgaaggcggcccgagtgttgccgtcgtcaggcaagcgcgtcgccgacttcgccaccgatattagtgtggacgactatcttggtgggtcggatgaaggccaacttgctatagttgcgcctgccgcggcgaccacggcggctgccatagtgccgaaggcgaagggcggggctcttagcgccggaggcgagatgtcggcactcgcggctgtcagggatgaggcgggcgctgcgtcccgccggctgaaggaggtgacggaggcactaagtcaggtggttgacttcgccaaccgcacgacgtcgggggccctcacggcggttttgtctgccgaagtcgagagacttcggacgcaacatgctgacgccgtccgtgaaaaatcggccgccgacagcaagtgccgcaagctggcggacaaggtggccgcgctggagggggaaaaggctgacctctggcgccaattggcgggggagaggagggagaccaacgaggcccttgccaaggcgcaggctgcgcaggcggaggctaatttggcacgggcggagggcaatcttgccagggagcgcgccgagcagctgcaggagcggctcatcgccctggagagccgcgtggagagggccgaggccgcgacgcgcgcggaggccgagcggacgcgcaaacagcttatggattcgtaccatgagctgggcgcgcggaccggtgactttgaagtgccggagcgagagcccggacttcgctgcctggagtgggtacaggaggagttgcaggcactccccactatcgtggaggggtttatgtcgtatgcctccctggtcaccagcgagggggcgatgaacgcactctctcgcgaagggtgccgacacttcgaggtcttcgaccaggctgacgaagactttgagcgagatatctacaaggttgaggaccccatagtgaaggaatccaccggagccatctatgaccggatgtggggtccgcacggtcgcgaggtggttagggagcgggccgagacggcgagggctcag

SEQ ID NO: 21024 - DNA, 429 bp, Zea mays
  Peptide Sequence Number=SeqID_64399
atggctcaccggagtaacttcggcccgctcgaggctttctcaccgccgttctctcttctctgcccgtggattcatggcctcttccccgccattaagttcgtcgtggcgccctctccctctctgcccaactccggcgaccccggagccaccctagctcgcgccagcctcaactccggcgacctcaccgccacggagaggagcggcgccgcctgcagccgtctgttttccccctgggccgttaatggggggccggggcatattgctcgctctgccaaggttggggtgcagaggttctttcgatttggttttgttagtcacccaccttggggaggaggtgatgctggcaacatggatgacttcgaggagttccaggaatatggcgagttccagttctttcttagtggcaaacccccagtcagctgcctgtga

SEQ ID NO: 21025 - DNA, 291 bp, Zea mays
  Peptide Sequence Number=SeqID_64400
atgcagtacaatggatcaagcagtctcattacctgcgagaagcagatgattcgaatcgagtttttaaaccttgcaagtgaccgcacttgtacccaccataaccggaatgggagactacgtctcaggtcgcgtgaggagatcaatccgtgggcaggttcactcagctgtggcaggcagatcctcgatggcaggttctggtgctggctcctggactacctcctgagcaattccttgctccgtaatgaggacatactcttcgtcagcgagattacaatctatcgaatgcaatga

SEQ ID NO: 21026 - DNA, 540 bp, Zea mays
  Peptide Sequence Number=SeqID_64401
atgacttctcacgaatccacggaaggagggaacgcacactcccacacagacgggcttgcacaagagggttttcctcgtattttgtgggaggtactgcagggagccggttatgctacgcctccccagtacgcggtgcagttgtttgaggagcaccgggtaccccgctgtaggctatcaacccaccccattggcttgttccctgctgagaaggaggacaacccaatgtggaaggatcgggttaagcactccaaggatgtgtgggctctataccctggacataccgctcacctgacagtccgatgcatgaatgccctttatcatctacaagcattgcgaggtgaggcaatgtcccagctaatgggactagtggagtctaccaagatcaccctggataacagggaggaccttgttgtcgacttgtccactgagctggtggaaaaggatctccaggtggagcagatggccacccaaatccaagagcttgaggatcaggtggaggccaaggagaacaccatcgaggttctggaagatcagctctag

SEQ ID NO: 21027 - DNA, 378 bp, Zea mays
  Peptide Sequence Number=SeqID_64402
atggagcatggccgcggcggcgccgtgcactccgacggcaattggccggactcaggccatggagttggtccctcgccgcgcagtccccatccgcataagccaaggaaccgtgaccctctccatgcggcgtccaccgttctctccctgcaatggtggcttgacaatggtgctaccggctcggatggattgagggggatggtggcgcggggcactgcactttatggctcacagtatgagccgcataccaaggcaacgactattgaaacggccgcccgagaactccggctgcgcgaccccagtttcttggttcggcccgacgcgatggttccgaaaagaatgggaatgaagaagcccccgacacacgggccccacgcgtag

SEQ ID NO: 21028 - DNA, 375 bp, Zea mays
  Peptide Sequence Number=SeqID_64403
atgtcctccctgcctgaggcaacctccggcaagctaaagtcgcgtttctacgggccataccttatcaccgagctgatcaacgacatagcagtccgcctcgctctacccccaggttcaaatctcaacttcacaaacttcaagccaatacaaacaaaaatccactattttatggaaagagcacttgcaagaatccctcgtctaagcgccatcgcagcaaaattaacccgagaacctccttgcatgcaactcccctactgcccttgtccctttcgggataactacccaagtgaagtaggggtaaacaaggttttctcactgtctggactgggcgccaatttaacagaaacacaggggctatggcgcaagtattcctaa

SEQ ID NO: 21029 - DNA, 303 bp, Zea mays
  Peptide Sequence Number=SeqID_64404
atgattagattcaagcgtgagcttgcgcgcacggacgggcgagcgcgactgataggtggggtagggaaggcagcgacctggggccaggccatcagatcccagatggacaccttagatctgatggcgggctcgggctgggttgctggcctgctcgcggcagcgccgcccgactccacggcgaagtttcgccagaggcgagggaatggccacggcgggggcctaggtgctggggaagcgctcaggcaagctcggggtgacatggcggactcagccatgggcacgacaccggcgcagaggcactag

SEQ ID NO: 21030 - DNA, 390 bp, Zea mays
  Peptide Sequence Number=SeqID_64405
atggctgtgatgggttcaacatctgaaaagatgtacctctgtcaggaaattttggaatgcgatacgaccattgaatggaccgtaaactcacgctcgttcgcctgggattgcgaagccaaagctctagctcgagtagcagaacttagcgcatccctggaaaacctacaagcgtattgcaacaccctgcatgaagaggtgcacgtattgtatgaccggctgcacctaaacatgccaccagaagttgcagcaatgggcactagaccatctggaacagctgatggaggacctaatggggagctggacctttttgcggcccctccttccatgaaccttgcagatgaacggtctcctgaagcgggcagtggagcagctaaggacgaagaggattag

SEQ ID NO: 21031 - DNA, 363 bp, Zea mays
  Peptide Sequence Number=SeqID_64406
atgatcaagggtctttggctaggacctatggctcaatactttgctagaaagccccccaaactctggagaagctgcttcagaaaatggatgagtacatccgggctgacaacgacttccgccaaagaagggaggaagcttacagctccagtcagaatgatgacaaaggaagccagcttcagaggccacagtacacttcatagtcctcggggcagcaacaaagctccttcaagccgccagctccgaggggcagaggcgccaggggcttcagaggatgatatggggatcaacctaggaaaatctattgcttattctgtggtgaggacaagggacatactacaagaatgtgccaaatcactattttga

SEQ ID NO: 21032 - DNA, 627 bp, Zea mays
  Peptide Sequence Number=SeqID_64407
atggcggtcacttcagctctgccgggggcgcgtgtcaggatgaaggtgtcaggccacctttgcgttaaatgcccctgcaatttggtcagtcggtgtggcgatttagtcaaggttgcttctgagcgaagccaaggcctcgggcgagccggtgatgtgtccgccataaaaagggggcctcgggcgagacggaagtctctcgagctttatgctgatgggggttaccagctgagaattaggcgtcttgagggtacccctaattatggtccccgacagtatcccccgagcctcgaagggagtgttagcactcgcttggaggctttcgtcgcacttttttgcaaggggaccagcctttctcggttgcatttcgttccggctggcgctgatgggtcgcctcgagtcgcggcattggctccgcaaccgaagaggcgcgatggtggcacaagtggcggtgcggttgcttgcatgcagcaactggcgcgtcggttgctcgacgcgtgggcctgggttcccaagctggcgtgtcagaagctggagaagcgcgtccatctggcgcggttgcatgccacctgcatggctgcccgccccttctgcccgttggtctgggcgaaaatggggggtcgcttgtaa

SEQ ID NO: 21033 - DNA, 252 bp, Zea mays
  Peptide Sequence Number=SeqID_64408
atggagtgtcgtgagatcatcgacctcgtgaaacgcgtcagcgagcgacgcgagcagtctcctagggatggctccccacctcgtcgccgacctggcaaggaaagggtcgacgacggcgaggtggccgcggctgaacgggacctcggaaatggctactttgtaaggacgaggactctaccatcaaacacagatgggaactctgggtcgggacctagcccaatggcaagtactgaaccaaggagggttccgtaa

SEQ ID NO: 21034 - DNA, 327 bp, Zea mays
  Peptide Sequence Number=SeqID_64409
atggagctaggactccgcttgaaggcggatgtaataacttttgctttttgtaaggttttagttcggggagccaagttgtgtgtccggaccccctggacggtggttctagatactagggcacccgtcgcagagtggtggagcgtgcaggctcacggccaacaggccgggtttatgagggcggacctcaccgagctagcgtacacggttcctcctagctgggggagcgtttacggaaccctccttggttcagtacttgccattgggctaggtcccgacccagagttcccatctgtgtttgatggtagagtcctcgtccttacaaagtag

SEQ ID NO: 21035 - DNA, 324 bp, Zea mays
  Peptide Sequence Number=SeqID_64410
atgggtagaagcgcgctgcgcctgcgcccgcggtgggaacttagcaggaaggcccttggagttttatctaactggaagtgggttcaatcactgtttctcagggttactgacagcttacgaaaagtgagcttcgacggtggcgtgcaatttggccgagcaacgcaggcggccggagataaggaagaataccggcgcagtgaatacgtgttcaacgccgtggcagctattccggtgagcaacggggagctaaactcatcggcggcaaagatcctttaccccgcgacgttatccttctaccccacacgtgaatcctggcgccggtga

SEQ ID NO: 21036 - DNA, 795 bp, Zea mays
  Peptide Sequence Number=SeqID_64411
ggttcaagtgttcccttggttgtcaaatgggctgacactgaaaaggaaaggcaagctcgaaaagcgcaaaaatctccattccagtcttctaacatgttgaatgcaaatgctatgcggcagaattcagtgtttggagctctacagatgggatatgtgccgcagtacaatggatttggctaccagccacaaggaacctacgggcttatgcaatacccacctctatctcctgtgcaaaatcaagctgccttccagaatatggtccagcctattaatcaagcaagctcgacccgtggagctaattctgaacttccccctgatttagttcctagatcatttaattccacacagttgggaagcccctattcgcctctgcctggcttgcagtatcctggagtgtatcctggtggccctattaatcatcgccccttttcaaattctcacagttcaaccaaagttcaaaatttaaatgctaatttaccgtcttcaagtcccagcagcaatcctgccccccagatagagggccctcctggagccaatttgttcatatatcacattccacaagaatttggtgaccatgatcttgcaaatgcatttcatagttttggtagagtactgagtgctaaagtttttgtagacaaggcaactggtgttagtaaatgctttggtttcgtaagctacgattctccagcttctgcacaagcagccattagtgtgatgaatggataccaattaggtggtaaaaagttgaaagttcaactcaagagagacaacagcaagcacagtaaacctttctga

SEQ ID NO: 21037 - DNA, 996 bp, Zea mays
  Peptide Sequence Number=SeqID_64412
ggcaagcttcttgtagaagggataacacagtgcgctgtttggcacaggcacactgttctccagcagacccagcaggcgcgccgcctgctagatgaccttgatgccgtctgccagcggatgggacgggacacattaaatgctgagagggcacatcacccgtcaacgcagtggcaggcggcgcgtcctctcctcaataaatgcaggggctacacgactttacgtcaggctcgacccgatggcttatgtcatgggccacaagcggcgggccttcgcctgcgcggggagcggagaacaaggcctgcacacgtgtcagcaccggacccctgcataccccaaggtccttctcgttccggacccctgccggggttcggacctcccccggggctccggacctgcatgaccagtgtatttatagggctagctggggttggtggacctaaataccgttatgccttcggctaccaactatattctcgacatgcactatacaacgagaatgccgtcgcctgcgaccacatggtgcgatgtcacacccgggtttcgagggcacaaagacccgtgcgcgagataatcaccagggtggatgcgattgaagtagggggttacaagcgtccgcgagggagagagagagagagcctgttcgtcagcccgtcctcccgcgcgaccacctcctcgtacgagggccttggaccttccttttatagatgtcgagccctggggtcgggcgaggcggagaccgtcttccaaggtcgaggcgggggccgagccccggggtcgggcgaggcggaggccgtcttccgaggtcgaggcggaggccgagccccggggtcgggcaaggcggagcttcctatggcgcctgaggctggactcggctgctgtcagcctcaccttggcgggtggcacaacagtcggagcagggcaggcgacactgttttcctgtcaggccaatcagtggaggggcgaagtgactgcggtcgcttcggccctgccgactga

SEQ ID NO: 21038 - DNA, 96 bp, Zea mays
  Peptide Sequence Number=SeqID_64413
atgtcgccgaaaccatgcccaattaatcactggatcctactcaaattcaatctcaaagttcctctggcttcactggtggtcataattcagtcttag

SEQ ID NO: 21039 - DNA, 432 bp, Zea mays
  Peptide Sequence Number=SeqID_64414
atgcaggccaaggtcaggcaaatgatactagatgaggagcagaaagctagagaactggaacaacaagttgcagatatgcaaggcgaaggccgtcaccaaatgcagcagaattctccctacataccagccatggctccaaccactttccaagggataaattaccttaatgagcgaagccctcttgcaacacaactccaggcttcaccttggcctagcaacttcagagcagaaacaacaaaacttagcagttttatcacctacaacaacataggtttgaaaaccctgagtacggagtgtactttcgcaagtcttatccgacaaaaggaaaaagcctctcaagggcatgctggcctttgggaatcaaggtcagtgaccaagacttcatatccgagaagttacggtgatccgaatcgattaatacccagctggtag

SEQ ID NO: 21040 - DNA, 570 bp, Zea mays
  Peptide Sequence Number=SeqID_64415
atggctcgtcttaggtgcactgcacgaaagtctgtgatcccctttttgccttctcgcctggcggagcgtccactgcgtcgcacgctgccaggtcagtccagtcacctggagagactgtcgaggaagccatgcaagatgcagcactattctattactaagagagatactaacgaggcagcaatgcaagatgcagcacgacggacactttctcagtattgctcgttgttcagcggggtagctgatggccttgacctgaagtactacccttgccgttcgaccggcactgctggaggtgtgattgcttcgccagttggtgagggcaatcccaggctgaacagcatggtcaacttggctgtcgtgctcaacacagagttggaccacgcccttgacgagttgggcaagattcgggcggaggttgcggaattgcgtgctgagtgcgcagcacgccactatctggatggtggttctcccacccctgtcgggattcagcacccttaccgttcaccgccccgtggtcgcttcgactatggtaccccagactgcaggacctggatagatttggatccctag

SEQ ID NO: 21041 - DNA, 528 bp, Zea mays
  Peptide Sequence Number=SeqID_64416
atgtccaattatgtaatcgctgtgtacgtgcactgcacgaaagtctgtgatcccctttttgccttctcgcctggcggagcgtccactacgtcgcacagtgccagtggggtagctgatggccttgacctgaagtactaccctcgccgttcgaccggcagtgctggaggtgtgattgcttcgccagttggtgagggcaatcccaggctgaacaccatggtcaacttggctgccgtgctcaacaggaccacgcccttgacgagttgggcaagattcgggtggatgttgcggaattgcgtgctgagtgcgcagcacaccactatctggatggtggttctcctgcccctgtcgggattcagcacccttatcgttcaccgccctgtggtcgcttcgactatgatgtctgagaacaggcgcagaggtgcgaggcatgctcagcctaaacaacaggcaccccaagaggaggcagccctgcagcagcatttgccaccaccaccaccgatgaccattgagcaaatgttcttgatgtag

SEQ ID NO: 21042 - DNA, 363 bp, Zea mays
  Peptide Sequence Number=SeqID_64417
atgccttaccggagttactccggcccgcctgagaccttctcaccgccgttctcccctctctgcccgtggattcatggcctcttccccgccattgagttcgttgtggcgttctctccctctctgcccaacttcggcgaccccagagccaccctagcccacgccagcctcaactccagcgacctcgccgctgcggagaagagcagcgccgcccgcagccgttcgtccccctggtcttatcccctccgtccgattcagatcgcacggctcagatcacgaataacgcttcgcgcaagcgcgcctgacactctggcccgcttgtcagtgcccaagtcccctggcgctgggcccgctcggcccctgtaa

SEQ ID NO: 21043 - DNA, 144 bp, Zea mays
  Peptide Sequence Number=SeqID_64418
atggagctctccctgtcccctgccgatgtccttggtgagggcgcgctcctgctgactcgggctcagcggatgagggaaggaaaagggttcaccaggtttagcttctacttccatatggttgacctgcccccggttgatagataa

SEQ ID NO: 21044 - DNA, 474 bp, Zea mays
  Peptide Sequence Number=SeqID_64419
atgggggggtgtgccagggccggtgatgtccccgacggtgaatccggacgtggtggcggcaggtgcgtccatcgggcgtggacgcagcagggcgacaggacagagaggcagaggggtgctgcagtcgggcgcggacctgctgatggcgtggcgtcctgggcgaggggcgtcggtgcagcaggcggcgaggtgaacagggagggagggcacggcggtgtcctggcgggaggcgacgcggcgtcgacctggcgtggtcgcggctgcgtccggccagagggcggcgcggcggaccgggagggagggcgcggtggcaccctggcagcgggcagcgggcggcgcggcgacggcctggagcggtcgcggctgcgatcggccagagggtggggggcgcggtggcttcctgctgcgccgaggcagcaggcggcacgggcggtggggagtgagggagggagggagggttgggagtggtattaa

SEQ ID NO: 21045 - DNA, 291 bp, Zea mays
  Peptide Sequence Number=SeqID_64420
atgacgatgggcgacggtatgccctcatctcccctctcttctctcccttttttcttcctctcttctattggggcaaggcacaaaaggttgatggctgctaggggtgggaggacgtggcttctagggttagggaggtataaatataagaaaacttccacaatcctaatatccaatggctcagatcaaccggcactcgaaaaggctcatccggactctaaacaaggcaaactagtgattgattggaatcatcttgatgagatctatacatctacggcctccaatcatccatag

SEQ ID NO: 21046 - DNA, 663 bp, Zea mays
  Peptide Sequence Number=SeqID_64421
atggcgacagcagctcgagccacgacaccgacctttctgctgaccaggagccagaaggatgggttgctcggcccatcactcgcgacgctgctcgtgggtgtcacttccacgatgcgcttgacaccctgctacgtcgggcacttgaccgccgtacttggtccatcgagtattgctgtgtggtctaccagcatagtcgcgggagaacaatctctgggtgctgaggtctgctcggagcactattctatatctgagcgggactcagctgaggcggccatgcaagatgccgcacggcgtgcgctttcgcactactgctcagtgctcggcggggtagccgatagtctcaatctgaagtattacccccgccgtccatctggcagcacaggaggcgtgattgtttcacttgtcggtgaggacaatcctaggttgagcagcacagtcaacctagccgccgtgctaaacacggagctggaccatgcactagacgagctgagtagggctcgtgctgagatcgcccagctgcgggctgagcgcgcggagcgtcgtcacctggacgatggttcccccgctcccgtcgggactcagcacccgtaccgctcacctcggcgtggacaccagccttatggcaatcccgactgcaagaccaagatagacttagaaccatag

SEQ ID NO: 21047 - DNA, 735 bp, Zea mays
  Peptide Sequence Number=SeqID_64422
atggttgcctttcaagggggtcaccctccttttaaaggcaactctccccacttgcgtcctcagccgtcgcggactgagtcttctccaacacgctccaaggtcctccccctacgacacgggggctgggccccacgcatcgtgcaagctggcccaagacagaaggagccaaaaccgccgcgcgcgatgcgcgcaactgcccagcggttacgagcattcctccactttcgcccagaccagcgggtgaaagggcggaccgccatgcaggcaacatgcaaccgcaccaagggggcgcaccccttcaacttcgacgcgtctagcgtggaggcccaggcccacacgtcatgtaaccggcgcgccggttactacgtgcgagaaactgcaccgccacttgcgccactaccgcgcctcctcgactgcggaaccagtgccgcgactcgaggcgaccctgcgcacggcccaacagtgccaaccgagcacatcggtcacgggtcagtcagccgcgggagaagggatcgggaaaggggttactccaaaagggatccttctccgcgaaggaagcgggccccgagcccccctactgatcagaggttcgaaggccggcccctcggaagggttcaacggccgcctcagagcactcgggctccgcgcccactactggtcagaggttcgaaggccggcccctcggaagggttcaacggtcgcctcaggccactcgagctccgcgcccactactga

SEQ ID NO: 21048 - DNA, 1527 bp, Zea mays
  Peptide Sequence Number=SeqID_64423
atggctgcctccgccaggactaccagctcgttgccctacctagtcgccgtctcctcccccgcggctcaccgccacggggccagccacccgatccgcgcctcggtgggggaggcgacaatggacgtggtgtcggaggcggagctgcgggagaaagggttcttggggatgcggaaaacgaaactggtgtgcacggtggggcccgcctgcgtcgaggcgctgccggcgctggcgcgcggcgggatgggcgtggcgcggatcaacctctgccacggtggccgggagtggcatcgtgccgccatgcgctctgtgcggaggctcaacgaggagggaggattctgcgtgacgcttatggtcgacaccgagggttcccagctcctcgtcgcggaccacggaggcgccacctcagtcaaggccgaggatgggtcagagtggatatttacaaacaaaaaagctgatgaagcccatcagttcacaatgcatgtgaattttgataagttttctgaaggtttgcttcttcctcgagccaaattgtcattctggaggaacggaaaaatagttcaaaggaactttggccttcctacattgtcaacaaaggattgggctgacatcgaatttgggatagctgaaggagttgattgcattgctctatcatttgtaaatgatgctaatgatataaagcagttgaaagcttacctctctagaagatcgttagagcacatcaaagtatttgcaaagattgagagtctagaatctctcaagaacctgaaagacatcatagaggcatctgatggagttatggtagcacgaggggatcttggagttcagattcctcttgaacagatcccagccattcaagaatcaattgttaaactatgtagacacctgaacaagcctgtgatagttgcttctcagcttctcgaatcaatggttgaatacccaacaccaactcgagcagaggtggccgatgtttccgaagcagtgcggcaatatgcagacgctgtgatgctatcagcagagtcagctataggtgcatatccccaaaaagcgctatctgtacttcgtgcagccagtgaaaggatggaatcatggagccgtgaggaaaacatgcagaaacttcttccacggcatcagcttgcaattgcattgcctgaccggatctcagagcagatttgcagctgtgctgtagaaatggcaaacaaccttgctgtggatgccatatttgtctacacaaagcatggtcacatggcatcacttctatcgcgcaaccgacccaaccctcccatattcgcgttcactgataatgccaattcaagaaagagcatgaacctctactggggagtgattccacttcatctaccattgtcaaatagcatggaggataacttcaacaaaaccatcagcctgatgaggtcgaagggttcagtgaaacccggagacacggtcttggtggtatcagattctgatctaaaccaaccttgtgctgccacctcggtgttccaatccattcaggtccggctagtggagtag

SEQ ID NO: 21049 - DNA, 237 bp, Zea mays
  Peptide Sequence Number=SeqID_64424
atggagcggaccacgacgtcttcgagggacgggcaaggctccaggttttataggccccggcggaggatttttggtatccttaagttttcagagacattgatggccctaaaaaccctaatgcctattgcctcaagattcatgagtgttgatccaactaccttgttcatagggtctgataatcatgccttcattgacgttctacttgaaggcattgaaccatttgcaatggttctatga

SEQ ID NO: 21050 - DNA, 144 bp, Zea mays
  Peptide Sequence Number=SeqID_64425
atgggggaacttcgccgcggatctgcccgctgccgtggcctgcctgctatgtcaatgaccaacgctgggcacgccgggtcgctggatctctgcacgccggtgaactacgccgccgtggggagcttgggtgcaggtgtgaggtag

SEQ ID NO: 21051 - DNA, 81 bp, Zea mays
  Peptide Sequence Number=SeqID_64426
atgggagaccacgtctcaggttgcgtgaggggtaaagtctacgggcaggtccactcagaattaataacaattatgccttag

SEQ ID NO: 21052 - DNA, 972 bp, Zea mays
  Peptide Sequence Number=SeqID_64427
atgccgcgtacgaggaaaaccgcgcataagtccacgggacctattggcgtgcctcgtcatcagttggctccaagacatgaagggagcagcagcggtagcaacaatccaatcggagacttggaagcccaagtggaacagcttcgaacgaagctacatcaccgaaacagggtgatggcacaagacggtcagagtattaatgagttggcagttgacgtcagacgcctgcaagacgagcttgctgaaaaggatttggcagtcaattgggccatcaactcatgttcggttgcttgggaccgtgaagccaaagctcatgctcgtgtggcggagcttagcgtggccctcgataacttgcaggtgtactccaatactttacatgaggaagtgcatgtactgtattcgcgactgcacccggacgtgcctgccgaccttgaccatcctctttgttggctccaagacgtgaagggagcagcagcggtagcaacaatccaatcggagacttggaagcccaagtggaacagcttcggacgaagctacatcaccaaaacagggtgtgggcacaagacgatatgccgcgtacgaggaaaaccgcgcataagtccatgggacctattggcgtgcctcgtcatcagttggctccaagacatgaagggagcagcagcggtagcaacaatccaatcggagacttggaagcccaagtggaacagcttcggacgaagctacatcaccgaaacagggtgtgggcacaagacggtgtactccaatattttacatgaggaagtgcatgtactgtattcgcgactgcacccggacgtgcctgccgaccttgttgcaatgggactcagtccatcagggacagcaggtgaaggaactcatggggaactggacctttttaggcctcctccttccatgaacctggctgacgatcggtctcccaccgcagggaatgaagaaaacaaggacgacgaagactag

SEQ ID NO: 21053 - DNA, 799 bp, Zea mays
  Peptide Sequence Number=SeqID_64428
atgcgccgacaggaggaccctaccaggtcagccactgtctacccgcgtggactccgtcccagtcacctacaggtgggcccgcctcgtcagaaccttctcccacctatggctggaaatgttgagtccgtgagatctgttggaacctccgattgccgcgcgcggaattgtagctaccagattccgcgggctttgcgtaaattctgcacccagcttcgtctctccctgtataaaaccagacgccgccgcctcctgttagttcacagaatcctctcccctccgcgccaccgtttgagggtcgtcgtcggtcggggagcttcgcttcggttcggtgatagcttccgcggcatcgacgtcgggttgggtgcgttcggcgccaacgaattttacaccggatcacctccgttcaccgtgaacctgggagctcggcgtacagctctggaccgcatcctgccgtgggcgggtgccttcgcggcctactactccggcccctgcgccgtcccgtcccaaggatgggcggacacgattagatctagaacccagtcagccgtggccgtcagatttgtgcgggcggctgtgatcgatccctgggcgtaccgcttcaggatgaatatggaccatagattccggatccaacggtggttcggtgatagcttccgcggcatcgacgtcgggttgggtgcgtccggcgccaacgaattttacaccggatcacctccgttcgccgtgaacctgggagctcggcgtacagctctggaccgcatcctgccgtgggcgggtgccttcgcggcgtactactccg

SEQ ID NO: 21054 - DNA, 483 bp, Zea mays
  Peptide Sequence Number=SeqID_64429
atggctggaaatgttgagtctgtgagatctgttggaacctccgattgccgcgcgtggaattgtagctaccagattccgcaggctttgcgtaaattctgcacccagcttcgtctctccctgtataaaaccagacgccgccgcctccagttagttcacagaatcctctcccctccgcgccaccatttgagggtcgtcgtcggtcggggagcttcgcttcggttcggtgatagcttccgcggcatcgacgtcgggttgggtgcgtccggcgccaatgaattttacatcggatcacctccgttcgccgtgaacctgggagctcggcgtacagctctggaccgcatcttgccgtgggcgggtgccttcgtggcatactactctggtataattccaccactagctttgcctccctctgctcctcgcgatgccctaaaccgcataagaaatagagctggggggacttcgatttggatctcgtcggcatga

SEQ ID NO: 21055 - DNA, 921 bp, Zea mays
  Peptide Sequence Number=SeqID_64430
atggccataagaatttgtagagccagcgacgacctatattattacttcattagtattgcttttagccagacaagatcacgagagactagaacaatttcagaaaaacatgagattatgtcactcctctcaaggaacttaccttatgatgtatataaaaatacactgcagtgcatagttgagggatataacttagtttttcaagcctgtccatctccagcagatggtttagttggggaagaatcttatgctcaggtacaaattggtaggcaaattctaggcaaaggagttgggttaacatgggaagaggccaagctccaggtggtggcatcaatggactggcttgaaatcaccaagggaaagctttacgccgtcgtggtgctccacatgcgcaccaccgccacgacccgaagagagaggagttcacgtgagatagacgtccacaacctcccctcctcctcaagggcaacagacttcaccagcaccccttcctccatcggcacaggtacaatccctagcgagaagatgcatcttagcgagatcgaggggattgagggtctgcgattcacggcagcagctataataacattgttgtttattattgcactcaatttggctattgggatactacctcacgttgacaactttgctcacattggtggattcgcgacgagtttcctcttgggttttgttctgttggcaaggcctcaatttagctggatggaaagtcatgagttgccacacatgaagcgtcccgatcctctgggactcaaatgtgatacaattactagtcccaggaggctagtaaacacatttatacatcagatgattccagatctgcttaaacgagacaaacttataaaggtggcgaacaactttaagagttggtccacaactcgggacatatcatcagagtggggctga

SEQ ID NO: 21056 - DNA, 725 bp, Zea mays
  Peptide Sequence Number=SeqID_64431
atggccatgatgggttcaacatcggaaaagatgtacctctaccagtgtagactgcccccgctcccgcacgcccacgcgccagcgaaaccgtcgctcccgcacgcccacgcgtcagcctcccacgcgcgccgccgacctcgctcccgcaacggcctccgaaccgccgcatcagccacaaaatccggaccaatgcatcccgtgcgccgccagccatggattccgcacgaccgccgtggattccgcgcccacgccgccagccatggcgcggaacggccgcctccctacgcccgcggaacaaccgcgcagaaacctccgcgcgccgtgcctacgcgaaccccaccccagccgcaaacgcccgcgccgcccgcacgccacgcaatccgctcctcccttcgcctgagattgtcgtcatcagtctgcgccgcgccggatccgtctgctccccccgctcgcgatggcagccccagctatgcccgcgtcgagccctcaccaacggatccgaggatctcctacctctctgcgccggatcagctcctccctccacccgagattgtcgtcatcagtccgctctacgtcagatccgtctgctcccccgctcgcgatggcacccgcgtggaacagcctcctcccttattggacctcgccaccgtgctcgtcgtccgtctctgcccaagcccatctacctcatcaactttgcatgctacaatctggccgacgagctcaag

SEQ ID NO: 21057 - DNA, 906 bp, Zea mays
  Peptide Sequence Number=SeqID_64432
atggctgcaagaaagaaaaagcctttgcttattgcttgccaagcaaccagtgccagaataacaagatctcaggctgctgcaaatagtacaagatctgggctggctccttctgtaccagtacctctgaaaacggagcataaccatgcagcgaaaaaaaagatgaaaagggaagcttcagatgaaaatgcttctgctgatgctggagcttcagctcctctgcctaaaaggcgtacagttctcaagaatgtaactaacataagctgtgctaaaatttccaaaaggtgcactgctgtgactgggctgaagttgggtccctcccagaaggctgggcagagcataaacaagcaatgcacaaacaagatctccatgcttctccctctggctgttggagggagttcacttgtggatgattctaataatgctgaagaaacacaaatggtagaccttttggcacagaaagagaagcagattgttttgcttaaggaggctcagccattacagaatactgaacaaaacaaaggcggtgcttgtgatgaggcatctgttgaggaaagaaatgccatgaatgtacacgaaactgctgccttaaaggctggggtctctaatggtttaaacattgtagatattgacaaaaataatggtgatcctcaaatgtgtgttacctacgttgcagagatatacagaaatctaatggcctcagagcttataagaagacctaggtcaaattacatggagactttgcaacaggacatcacagctagcatgcgaggtgttctaattgattggcttgttgagttcctcactggtgatctaccgtgtcctgcttatcctactgctcgtacatcgcctgtgactccaaaaaaggttattgatgagaaggaattgcttacaaactatgatgattag

SEQ ID NO: 21058 - DNA, 174 bp, Zea mays
  Peptide Sequence Number=SeqID_64433
atggggcggcgacaagtttgcatagcacgcacgcaaggaccaggaaggcagtgtgtctcctccccgggccgcaggccgggcacaggggacagccggacaggcagcggcgcgatctgcgacgagtgcgataagaaaacagaagagaagagagaagacggaacgtccagactctag

SEQ ID NO: 21059 - DNA, 393 bp, Zea mays
  Peptide Sequence Number=SeqID_64434
atggcggtgagcaaattcaaggaattctggttgcgccacttcactgaggacgcacacaagcacctacacacaggaaggggcgtggacgactccgaggaagcggtgacgagtgaggagcagcacggccgtgttgaagtaggctgctgcgtgactgttccaggctcggcgagcaccacggtggcgatcctatccaaaaccaagcaatggcaaggagacgagtgccgcacacatatcttggcccgcccgaaccacggtggcgatcctatccaaaaccaagcacgaactgaacaagttcagttatctgaactgaaatatgcaccaccccgactgacagagacactttgggggtactttactcccaatttctcacagcaccaagccaacctcacttaa

SEQ ID NO: 21060 - DNA, 453 bp, Zea mays
  Peptide Sequence Number=SeqID_64435
atgaagctgtggaaggagacttccaggagttccaagactacgacgagttctaggtgtgggttagcggcaaccccccagtcggctgcctgtgaaggccgcgttatctacgtttcttttccgcactttgatttattatggctcgacttagacacactgcacgaaagtccgtcatccccttcttaccctcccgccttgctgagcgtccgcttcgccgtcccgtggccggacagtccagccacttggagagactacaccaccgcctgcatgtcagagaacaggcgcagaggaggaaggcgtgctcagcaggagcaagccggtcaacaagatgaggcgccccagcagcagcagctgccacccccgcccccgatgtcgatcgagcagatgtttctgatgcagactcaggcagttcaggccatcggtcagactctggccaccattcagcagcagcagtag

SEQ ID NO: 21061 - DNA, 1708 bp, Zea mays
  Peptide Sequence Number=SeqID_64436
tgaccttgtgtgaccgtgtgccgtctcccgtcctgcctggatcgtcacctctcgtgatgccgcgcacgaagaatgcgtcggcgtcagggggtggcgatgacgaggaccctcgtcgccccttcaggcaggtgaagggcaagactgtctatttggagcagcaggaaggccgcaagaagcggcgttcggacagagaggcccgtgcagcggcagcagctgcagcagccgctgcgcaggccgcacttggagatcagccgcatgttccatccgaccagattgcattccgtgctcgtcgtctcacctcccggcctcgctcctccactcacacctccgcttccactccgccacccactctgcctgctcctgtcactcctattgctccatccacctccacagccatacccactaccagcactacgccagcttccactgctacccctgctcccgctcccgcttcagctcctcctgtccctccacctcgcttccgggagcgtgatgagactgaggtccgtcctctggtttcggatcctcgtctgtttgatcttcagcgtgctactgcagcacgggtacgtcggttcaggtacgtacccgtggagtcttggctgccagctcagagagacccagcagcaggagttcttttcagcacacggattcaggagtcattcttcagggctcagatgtctgctcagatagcgctgcgcgtgcaccgcctcttggatcttccagcttttctgcttgcagccggtgctgagtctgaggcgcatctcacctatctgcctggcctcctgtcccttctgactatcagcggtagatatgttgaggagtgggtccgcgtcttctacgcctctgtttggattgacccggatcatcattggatgaggttccgctttgagcgcgaggatgtcacgatcactgccaatcagatccgacagctatttggattccctgagtcgacgactcgccttcacagcctctgctacggcacttctgatcctcctcgtcgccctcacggcgcagcgaagtacttatatgagcttatcagacggacactcctgccgaggatgggatacagggaggctaccactcacattcagctttggctccttggtgccctggtatcccactcacagtttgatgttgtggacttcctgatctgtgagatcgaggacactgttctggatgggattcgtgctcgtcggcagctaccttatgctcactacttatgccacatctttgtgcagctgattcagccacctcgttttcagagcacccttgaggcctcacgccttgtatttggatcttaccgtcctgctcctgagattccagtgccagcttctgcttctgtgtttgactctcaggccgaggatgcagctcttcgtcagtatgacactcagggtacagcagctgatgatgatgatgatgatgattttggagttcctcctccgcctccgcctcctatgcctccacgctcacatgatcatgaggctgggagctctagtgctgcccctgctactcctcaggctatggaccctgctcttgcttcgattctccagactctctctcagcagcaggctcacctggcagccgagcaggcccgtttatccgagaggatgctctcgatgtttcagaacatcacctccggttcagtctgctccgcctcctccgcttcacgctccagtggtgccttcgatcttgtcgggaccccctgctg

SEQ ID NO: 21062 - DNA, 345 bp, Zea mays
  Peptide Sequence Number=SeqID_64437
atggccgccccgccaaccactcgccccgtcgcattaactccgcggcgggacaggcggcgattctggcaggagaagcggacgacgcttcgccttcgccataacaaccgcgtcaaaaaagggaccgggaaagggggacaccccgaaaaggatccttctccgcgaaggaaccgggctccgagcccctccctactgatcagaggttcgaagactggccctccgaagggttcaacagtcgcctcagatcgcgtgggcccgacacccactactggtcaggggttcgaaggccagccccccgaagggttccatggccgcctcaggctactcgggctccgcgcccactactga

SEQ ID NO: 21063 - DNA, 342 bp, Zea mays
  Peptide Sequence Number=SeqID_64438
atggctcagtgtcgccatcacctcctcctcatggtttattgctgctccggaacactatcgatagagcctaagccacaaaaaccaacagaccaacacacacaaggatccaaacgccccgtaagagaattcaagattaatgttgagtgcaaccatgctactctatctagacactggttccaaagcccccctggtgctttgccatcatcgctgcttggatatgaggcactaacaggttccctagatgattctggatttgaagattatcttcacagactgaaccaagattgtgagcaccttgtgttgctaagacaattctgcggacaaacaactgcctctgattaa

SEQ ID NO: 21064 - DNA, 369 bp, Zea mays
  Peptide Sequence Number=SeqID_64439
atgaagctgtggaaggagacttccaggagttccaagactacgacgagttctaggtgtgggttagcggcaaccccccagtcggctgcctgtgaaggccgcgttatctacgtttcttttccgcactttgatttattcgactcgaggcaccccgcgcatggcccaacaaagacattaagtacggtcgtcatgggccagtcagccgcgggggcaggcgtggcagtcggcgtgaccataggcggactggcagtaactgcatcgacggatgcgcaggagcagcgagccgatcgccagtcaaactctggccccacctgcaggctcgcattctcccctaaggcgggcccgggggccactgtcggtaccctggattag

SEQ ID NO: 21065 - DNA, 426 bp, Zea mays
  Peptide Sequence Number=SeqID_64440
atgaagtctctgcagtgccaaatcgggtggggcgtcggggccctttttctccagtcttgcggtcgccgggtccttgtgataggatggccgagtgcagggcgtgttggggaactcactgaaaaaggagaaagtcgttggggtcgtgcaagcgttgatggtggcgtggtgttcctggagagtgaccaagatgcctcatcagattgcgtcgcatgtcttctgcgtctagtcgagcaaaaagggaatggctggagatatggacccaacgaccgagcatgtgctccggcaatggcggccaccgcggtggtctctcatgccaccgtatttgatgtctataggaggaagatgtggcctggaccgttgatcggtgtttgggtgactaggattagttgggataccgctttggccgggcgcgatctgggacgttaa

SEQ ID NO: 21066 - DNA, 195 bp, Zea mays
  Peptide Sequence Number=SeqID_64441
atggtgaagacttttgacaggcagctggggcaagggaaaaggagtgactttgtttatgggcccttccaccctgctgttaacatgcaagcactttgcttagtgtatgatctgattttgaatggggaaataaaagaatctggaaaatacatgaacaactgtgaattgtttactacaaagacttttggaggttcatag

SEQ ID NO: 21067 - DNA, 303 bp, Zea mays
  Peptide Sequence Number=SeqID_64442
atgaggaaccggaggagcagcaccgtcgttgggaaggaggcaggccactgcaccacgctggtgaagatgggctcgggttcggggagggaggagaggaatggggaatcggtcctgggttcaaggagggaggagaggaacggggaatcggcgggctcggtcctaaagacgattggagaggaatggggaatcgactggagaggaagacgactggagagaaatttgggtccacacatcagtcgacgacaactcacgggaacaacatgggagtgcatgaatgaggaaaggagagcggcatgggtatga

SEQ ID NO: 21068 - DNA, 303 bp, Zea mays
  Peptide Sequence Number=SeqID_64443
atggcccaggtacgggtctgtgctgctcacccgctgccccgagtgcaaacgtccagagccactagtgaggctcatatcgaaaaggttcatgaaaaatgcaaatttttcatgtggatggatgattacattaagatggtcgaagggacagggtttactcgcggcctgggggagatgatggcatctaattttggggacgaacgagtggcagcaattagggcagatgttactgcgaattgggacatgtttactacagatctgaagaagatgaataataacttgagcgacttgaagaagatgttttga

SEQ ID NO: 21069 - DNA, 390 bp, Zea mays
  Peptide Sequence Number=SeqID_64444
atgaccactggcgggagactgcagctgggctacatgatgaaaatccttgaagccgagcgatggcagaagagcgccaacacccacgaggtcgtgctcctccaacaacagcaagaaggagacaagatcggtagcaccaccgcagaggaaatgaagagtgcgagctccccgacgatttgcccgctcgtgccccaaagcgtcacgggcaaggtctcccccgatgcgcaccaggaccagccgcccggtcacccttgggcgcgcctctggtcgcccccagccaagccggaggtcgcgccatggccccagccgagcctggacagcatgggccacatcccgcccagtacctggacaccaactgctgccccaaggtcacaccagcagtgccccggatga

SEQ ID NO: 21070 - DNA, 1032 bp, Zea mays
  Peptide Sequence Number=SeqID_64445
atgaagacgtcgcggcaggcgtacaaggtggaccgcgaccggccagggtccgacgtcgccggcgagaccgcggccgccatggccgccgcgtccatggtgttccgggagcacaacccgcactacgccagcctcctcctccaccacgcgctgcagctgttcaagttcgccgacaagtaccggggcaagtacgacagcagcatcgcggagctcctctgggccgcgctctggctccaccgcgccaccggacgcgccgagtacctggactacgtcgtcgacaacgccgacgacttcggcggcaccggctgggccatcaccgagttcagctgggacgtcaagtacgccggcgtccagatcctcgccgcaaggctgctgctcagcggggagcactcgccgcggcacagggagacgctggagcagtacagggcgaaggcggagcactacgtgtgcgcgtgcctgggcaggaacgccgcggacggcaacgtggagcgcagccccggcgggatgctgtacgtgcggcagtggaacaacatgcagtacgtgacgagcgccgcgttcctgctgtccgcctactcgggctacctctcctcgtcgtcgtcgtcgtcgtccgtgacgtgcgcggcgggcggcggctcatcggcggccgccagcgccggcgaggtgttcgcgctggcccgggcgcaggtggactacgtgctgggcagcaacccgcgcgggatgagctacctggtgggctacggcgcccggttccccgccagggtgcaccaccgcgccgcctccatcgtgccgtacaagcacagcaaggagttcatcggctgcgcgcagggcttcgacgactggttcgtccgcaagggcgccaaccccaacgtcgtcgtcggcgccatcgtcggcgggcccgaccgccgggaccgcttcagggaccacagggagaactacatgcagaccgaggcgtgcacgtacaacacggcgcccatggtcggcatgttcgccatgctcaacaggctggccagggacgaggcgggtgtaaatagatag

SEQ ID NO: 21071 - DNA, 426 bp, Zea mays
  Peptide Sequence Number=SeqID_64446
atgaagtctctgcagtgccaaatcgggtggggcgtcggggccctttttctccagtcttgcggtcgccgggtccttgtgctaggatggccgagtgcagggcgtgttggggaaatcatgggagaaggagaaagtcgttggggtcgtgcaagcgttgatggtggcgtggtgttcctggagagtgaccatgatgcctcatcagattgcgtcgcatgtcttctgcgtctagtcgagcaaaaagggaatggctggagatatggacccaacgaccgagcatgtgctccggcaatggcggccaccgcggtggtctctcatgccaccgtatttgatgtctataggaggaagatgtggcctggaccgttgattggtgtttgggtgactaggattagttgggataccgcttcggccgggcgcgatctgggacgttaa

SEQ ID NO: 21072 - DNA, 1596 bp, Zea mays
  Peptide Sequence Number=SeqID_64447
atggaagtggtcgatctctcccccacgtcccgccccctctcaccgctcctctccaccgcacccgcccgccgcctccgcctcctccctccccgctgcgtcgtcggcctgcgcgcctctccccggacccgagcctcagtagaacccgctacccaggaattgggaacagcggatgcagtggagtggagtggggatgccatacgtcggcgtttccttgaattttatgcagcccgtggccacaagatccttccgagctcgtcgcttgtgcctggcgacccaactgtgttccttaccatagcgggaatgcttcagttcaagcctatattcctcggcaaggaacctaggcgtgtgccacgcgccactacctctcagaagtgcatacggacaaacgacattgaaaacgtgggtcgcactgctcgacatcagaccttctttgaaatgcttgggaatttcagttttggtgattacttcaagaaggaagcaaccacatgggcatgggagctggcaaccaaggagtatggattgcctgcagaaaggttgtggattagtgtttttgaagatgacaatgaagcattcaacatctggcacaatgaggttggtgtgccaaaggagcggatacagaggatgggtgcagaagataacttttggactagtggcgcaactggaccttgtggaccttgctctgaaatttattatgatttctatcctgagagaggatcatcagatgtggatttgggcgatgatagccgattcattgaattctataatcttgtctttatgcaatataacaaaaaagacgatggatctctagaaccgttgaaacaaatgaacattgatacaggaatgggccttgagcgtatggcacgcattcttcaaaagtctaacatcccccgcagtcgcaacgggggcactacacacgatgagactggagtagaggccgaaggtaggagccgacgggttgaaatccccccgcagtcgcagcgtcgtgatggtgcgaatgttgaggctggagtagagaccggtgtgtgctctaagaagacgatagcccctagatgccgaggtagccgaagtcgaggtggttgcggttgggagacgcgcagcagaagcctgatcttcgggaggggtcgacgttcgagcgtcaacgatcggcagggcgacacaacaaaagggcgccgacatgctgaccttcctgcttcttcgatcgtccgggcgtcaaggagccccgccagggaggccgatagtagcgcacgcgtctgcgccggtcatggtgtccgcgcctgtggcagaaaagaaggggaaacgacagatccggccgggaaggccacgacagcgacagatccagccgggaagacgcgatccagccaaagggacggcggatcgagtcgtaaaggtcacaacaacgtggatccgaccgggaaggccgccgcagcgatagatccagcaaaggcgatgaagggggtgggcggcggggcgggtccagccgagaaggggcctgcgccggacctggcaaggggtgtcgacgacaccggtaacgggagaagctcaaagggccgatgttgcactaggcccggcgatggcagcactgcggtggctgcatag

SEQ ID NO: 21073 - DNA, 369 bp, Zea mays
  Peptide Sequence Number=SeqID_64448
atggagctgttcgcgcgcgcgaaggtggtgcgcctcaggagccaccacgtcaagttcctgtacgcggacgaggtgcgcgtgacgcaggaccgggacgggtactcggcgaacgcgcggtggaccgtcgaggcggcgccgcacagcacgggtgtcgtccgcctgcgcagccgctatgggcgctacctcaccgcctctggggagccgttcctgctggggatgacggggcggaaggtgacgcaaacggcgcccgctgcgccgcgcctggccaacgcatctgtggactgggagcccctgcgggacagcttccaggcgcgcctccgcaccaaggcgggccacttcctccgcgccaacggggggctcccgccctag

SEQ ID NO: 21074 - DNA, 1671 bp, Zea mays
  Peptide Sequence Number=SeqID_64449
atggcgatggtgtcctatgcaaaagctgatgatgccacaaagacaaatctcaagataattggagatcacatgagagcagttgtttatctcatatcagatggggtaattccctcaaatatcgggagaggatatgttgttcgaaggctaataagaagagtagttcggatgggtagattgataggaataagaggtgacgggcatggaaactctgaaggtgcatttttaccttcactagctgaggtagtgatcagccttagcactgagatagattcagatgttgaatcacgacggagatcgatccttggagaacttcaaagggaagagatgcgatttgttcagactttggaaagaggagaaaagttattagctgaacttctggatgaagctttattaaatgctggtaataatggaaacaagccttccttatctggaaaaaatgttttccttttgtacgatacatatggtttcccagtagagattacagctgaaatagccagtgaacaaggcgttactgttgatattgagggatttgatattgaaatggaaaaccagaggaaacaatctcaagctgctcataatgtagtcagactttctgtaggaaatgagaccgagatagtaaagaacatcccggatactgaatttttgggatatgattctctctctgcttctgctgtcattaaaggtctcctagttaatggaaacccagttaatgaagtttctcaaggttctgaagtagaaatattattagaccggacaccgttctatgctgaatcgggtggtcaagttggagataatggtttcttatatgtgaatggaggggaagatagaagacaaacaacagttatagaaatcaatgacgtccaaaagtctctgggaaatatatttgtgcacaaaggcatgattaagcaggggtctgtagaggttggcaaggaagtagatgcttctgttgatgcaaaattgaggcagggggctaaggctcatcacactgcaacacatctactacaatctgctcttaaaagcgtagttggttcagaaacttcacaggctggttcccttgtggcgtttgaccatctccgatttgacttcaatttccatcgcccactttctgaagaggaattaacaacaattgaagcacttataaaccaatggattggcaatgcagcacatgttgagacaaaagtcatggctttgcaagatgcaaaaaatgctggtgcgattgcaatgtttggagaaaaatacggtgaacaggtcagagtcgtagaggttcccgggatctcattggaactctgtggtgggactcacgtcagtaatactgctgagattcgtggtttcaagataatttcagaacaaggaatagcttctgggatcagaaggatagaagcagttgcaggtgacgcttttgttgactatgtgtgtgctcgggacaattacatgcggcgcttatgcttatcccttaaggttaaggctgaagatgtgaacagtagagtagaaacaattcttgaagagctaagagcaaccagaaacgtagcatcatctctacgcagcaaaattgcagtgctaaaagcagcttctcttgcaagtagagctacaactgtggagccccagaatgtcaggtacttgcttcagttatctatcaattgcgtccttcgtatcactacgccctgtctgtaa

SEQ ID NO: 21075 - DNA, 330 bp, Zea mays
  Peptide Sequence Number=SeqID_64450
atggatgcccccgcctctgggccttccttctctagtgccgagtcctccgctgctacagctcagccatcgacgaccgacgctcaagcgcctccggtggatctacaggcacaggtgcccgtgcagggtgctggcaacggcgtcgcgcgagcctgccgccaccacacatacaaccgcaagcagaagtcgctcggcctcctctgctccaactttgtagcgttgtacgaccaggagaatgtgcaggtgattggtctggacgacgcggccaagcagctcggcgtcgaatgccgccgaatctacgatatcgtcaatgttctcgagagcgtcgggtga

SEQ ID NO: 21076 - DNA, 435 bp, Zea mays
  Peptide Sequence Number=SeqID_64451
atgatgttgctgggagagacgttgaaattatcttttgaactggccattggaggccgatctgatagatcttcatgtgatgtccccagcggagtcgccaaaaagtgtgttggtgccgatctggccgccaatcactgcgaggtgtatcgacggtggtgctttttgcggcaggaagaaatggacccttatttcggtgttattttccttgacaccgagattacatgtctcagcgtcaatattgatgatgctaaggtctcgactctacatgacgacgtggcatctatgcggcctgagctcagtgtcaatagacgtggcgtcgaggtccctaagtccgtgttcaacggtctctatatttctccccctaaatcccactatcttgccacgtcagcaaactctccccctatatcttcaccctatgcaatggttcctcctaattaa

SEQ ID NO: 21077 - DNA, 175 bp, Zea mays
  Peptide Sequence Number=SeqID_64452
ccgtgctcacggttatgagcggccaagggagctccagagattagtgatacttgatcagagatattttggtacaggtggcaatgagattgatggttctggttatgattatggtattggcgaagatgaagctgtggaaggagacttccaggagttccaagattacgacgagttctag

SEQ ID NO: 21078 - DNA, 396 bp, Zea mays
  Peptide Sequence Number=SeqID_64453
atgatggatgaggagaagaacttagccacagaaagacgactggagtctctgccttggtgtgattgtggagatcgtgttgtgccatacaatggacgtaagtgtattttcagagagtggttgtatgggctaaggtccaactggcctgagctagaggcaaaggagaagaaaaaaatgagtggggcagaagagtggaagtccaatcctatactctgtaaatgtggtattgaagctaagtatggactagttcgttttgagcttagtgtgggttatttttgtggatatggagatgaggaaatgcagctgggagagatacgccgagaaataagaggtgatgcatacaataaagtcaaagtgactcatgggatagaagatgcgttgtggatctcagcttgttga

SEQ ID NO: 21079 - DNA, 369 bp, Zea mays
  Peptide Sequence Number=SeqID_64454
atgccgaaagctcccttgcgcacagcttcggctctgttccatcatttcgttttcccttgtgcttcttcacactgtgattttgactcaagtccgaaagggtccaagtccgaagagaacgatctggttgaagagcctaaggaactcacaggagaagtccctgagcagcagctggttgtcagcattgcaacccctgctcagaagaagatgaagctgtggaaggagaccaccaggagttccaagattatgatgagttctaggcatgggttagcgacaacccccagtcggctgcctgtgaaggccgcgtttatctacgtttcgttttcgcactttgattattgtaaagactatgtggatgtctcagacatatga

SEQ ID NO: 21080 - DNA, 222 bp, Zea mays
  Peptide Sequence Number=SeqID_64455
atggattggggctggctgtggctcattctgctcctgattttgtggaatatcatcttgattgaaggatgtaagctggaatggaacggcgctggattggagcggcggtggattggcgctgcgctggattggaggcgcggaaatcgcctggcgagtcgcctccaacgaaaggagagtctgcgggctggggttttcttcctgcaggcgctggtctgcctccgttga

SEQ ID NO: 21081 - DNA, 141 bp, Zea mays
  Peptide Sequence Number=SeqID_64456
atggccatgatgggttcaacctcggaaaagatgtacctctgccaggtgaagaagcagcaaacttttgttgcttctcttcaaaggtggtaccaaaagaagagaaccaagactaaagttgtgggaggaaaggtcctccattaa

SEQ ID NO: 21082 - DNA, 552 bp, Zea mays
  Peptide Sequence Number=SeqID_64457
atggcggtggcaggcgggcgggcgcagcagtcacgtcgtcagccaggctcacgtctcatcccgggacaacaagagagcctcctctcacggcgtgaagacggtgcacccatgacccgttcctcgaacggatcgcgcacgcgcaacggccgccccgccaactacccgccccgtcgcattaactccgcggcgggacacgcgatgcctctgggcgggagaagcgcgcgacgcttcgccttcgccgtaataaccgcgtcaaaaagagggaccgggaagggggataccccgaaaaggatccttctcgcgaaggaaccgggctccgagccccccctactgatcagggggttcgaaggctggccctccgaagggttcaacagtcgcctcagatcgcgtgggcccgacacccactactggtcaggggttcgaaggccagcccccccaaagggttccatggccgcctcaggctactcgggctccgcgcccattactgatcaggggttcgaaggctggcccccgaagggttcacagtcgcctcagacaccgagcgagggatga

SEQ ID NO: 21083 - DNA, 459 bp, Zea mays
  Peptide Sequence Number=SeqID_64458
atggcgctacgggcgtcgacagcttcagctccggcgaacgtggcatcgacgaacgagtgtgggcgcgacttctacatggcggtgagggcggcgacgatgaacagcttcggcgaggcatggagccggggatgggccgagagtgggcgcgggttggggaggaagaacagggtgaaggtcgagaagacgaacatgatgtccgacgacgccgaaaacgatgggctggtgtcggacgaatacgaggaggaggtgcctgctctcacgccctctgccaagaatggggtggcgcggagacagaggcatgaggggagagagagaagagaagtaggatggcgaatgaggtcgcgacaactaaggcgaagaccatcattaccgtgtggagtgaaggtgaatggatttgtttgcaaggaccccatggctgtgaacgctgacgacttctttaaggctgcaaaactggactag

SEQ ID NO: 21084 - DNA, 360 bp, Zea mays
  Peptide Sequence Number=SeqID_64459
atggctgttggaccgctgatttgcttcgctgcgtatatcgggctgcttcagccccactctgatgatatgtcccgagttgtggaccaactcttaaagttgatcgccacctttataggtaggacgatgatgtggaaggtggggaggcgctccggaagtcgtgcgatggacgaggcaacgctgcgggaggtgggcggtgcttcgggaggcgtgtggtgggtggaggcgcctcgacggatgtcgctacaagcggaggtggcttcggctccaacggatggaactttgggaggcgtatggtgggtggcggtgccccagtggatggcgctacgggtggcggcggcttcagctctggcagacggatga

SEQ ID NO: 21085 - DNA, 297 bp, Zea mays
  Peptide Sequence Number=SeqID_64460
atgggcggcgaccatggcggtgggcacgccggcggtgacttccgccagaaggtatggagcatgacgggcggaccctactgccgcccggtccactggcgccgtaacaccgccatcgccatgttcggcgtcttcctcatctgcattcccatagccatgaagtccgccgagctcgaggtatacatgtgtatccccatcacccagactctgaccctacgatctctccttggcgtgcacgctgtaaaattccaaagtggtgacattgccaatgcttttgatcctgttggaagtgccccttga

SEQ ID NO: 21086 - DNA, 372 bp, Zea mays
  Peptide Sequence Number=SeqID_64461
atgtgtgtgaggttctaccggcctgacaataacatatcattttttcagaacgatgaaaagtatagctgcagcgaaactggctatcgcctgcccttgaaatgtgtacaggcacaaaatgctacaaaagaaggaaacatgagcaagcagaggaagatattggatgatgcatccacatcaggtggcacaaaatccgcatcaggtggtccaaagcattatattacttacagaagttgtgtgccgttggttggagaggagaatttatctgttcttggttttgaggagcgctcggtactgatggctgtggcaaatgcagctgcagtcgccgccatcactgccgagcaagctggacacagactgagaccaaagacttga

SEQ ID NO: 21087 - DNA, 762 bp, Zea mays
  Peptide Sequence Number=SeqID_64462
atgccgccggaggcctttgccgaggactggcaccccacgcccgacgaccacatgggtattgttcgttggattgctgatcgtttctctgagtctgttatcagagcacctggaatggaacccttgaaggtccctctttctgtggaatgtgccacaatcagtgatgtctctgtgtgggagtggactggcgctgcttatgatgaaggtgctgaagcagccgaatggttttccacatttttggggtgcccaactcgactggtgcgctttaacgaagattcagaaactaggctgactgaccctgactatgcacgaggttacaaaaccatgttttctgatggcttcccttatctgatagtctctcagggctcattggatgcattaaatgagatactcaaagagcctataccaattaaccgcttcagaccaaatattttagtggaggggtgccacccatatgcagaggatatgtggaaatcagtaaagataaacaagttaacatttcaaggtgtgaagttatgtggccgttgcaaggtccctacaattaaccaagacactggaatacctagccctactgaaccaactgaaactctgcagacatatcggtcgggtgaagtgctgcttcgtagccacaaaaacaaacgccaggtgattgttgcatgcatcttctccgtggaacatatcactccatatgcagatatatgcagatatgctggtgaaatagattcatcatggcttaaatcattgaaactgcgaaagggcctctaa

SEQ ID NO: 21088 - DNA, 882 bp, Zea mays
  Peptide Sequence Number=SeqID_64463
atggcagctcgcaacgaacatagattccgaagagagaccagggcatccataattatccaattatccagagcttatgctgcttacaaacagcaacagaaagcttctttgattctccaatgcttgtggagggcacgcattgcaagaaaggaacttcggaaactgagaatggaagcaagagagaccggcgcactgaaagaagcaaaagacaagctagaaaagagagtagaagaactgacatggcggttagacgtcgagaagcgtttgagggctgaccttgaagaagcaaagagccatgaaattgaaaagttgcaatctgcactgcaaaaaatgcaagaaaatctcaaggaagcccatgcaacaatagtaaatgagaaagaggctgcaaagttagcgattgaacaggcaccaccaaagatagtagaagtgccggttattgacaatgcaaaacttgaggagttgacaacccaaaataaagaacttgagatccaccaaatttgtctcaaggaggaactaagtacgtttaaacagaaggctgaggatcttgaaaataagcttattgagttccaaaaacagtctgatgaactgtcacaggagacacaagaacaagcatccaaagttattcaacttcaagagctggtcgaaagattggaaagcaagatcgccacctttgagtcagagatcgagttgctccacaacaattctgcactagctattcaggccgtggttactcctgaaatgaatcagacaacaataattgaggaatttgacaagggacaccagcttgaagaagttaaaacggtcaataaaatggccatcggtgtccctaaaaagcggaatgacaaatggatggctaatcagcttttgaagctacatctggagtaa

SEQ ID NO: 21089 - DNA, 780 bp, Zea mays
  Peptide Sequence Number=SeqID_64464
atggagaagaaagagcgttataatttcccactttacctgacatttgttccacgtgcagaggaagacccttcaacaaaggtacccaaagtagaagtgcctcaggtaaggcctgttattatgcctaattcgctaggcatggcatttcctccgcgaccagcttatggtgtggcacctccaatctataatcctgcactcaatcctttgatggcccggcctccaatttggcctgctgcaccagcgcaagcttggtatccgcaacaagcagcatatccacaacaatcagctgtttcagttcctcccatagtcgctggcctcccaccacaacagccactattcccaattcagaatgtgcctactcctatgacatcagcagctgctaatgtacttcaaacatcgtttcctatggcccctccaggagtaccttcacctgttgcccctcatgtttcccagcctttgtttcctgttaacacttcagctgtcaatggagctgtaaattccccatttttagcatctgttgcacctggaaccattccagcaagctctccagcagcagtcggtgttgcaggaattggatatggaaccaataaccaaggcactagagatccagcagttggatcttcacctgcagtatccaataataaggcgtctggtgcccaaccagctacgaatgaggtatatctggtgtgggatgatgaagcaatgtcaatggaggaaagaaggttgtcgttgccaaagtatcaggtgcatgatgaaactagccagttcagcaatgagcaatag

SEQ ID NO: 21090 - DNA, 435 bp, Zea mays
  Peptide Sequence Number=SeqID_64465
atggagcctggcggagggacagctgtcggagcggtcgagtccttgctgacgtcctcttgcttccgtaagggggctgagagccgccgtcgtcacagagttgggcgatgtggaagctcctccgaagccgaggtcgagtctgtcttccgtggccgaggtcgagtccgagcccctgggtcgagcgagtttttagttcgtcgtctcctagggctgagcccaagtccgagccctaggtcgggcggagcggagttcgccatcttccgggacgtagcccgagtccgtgccctgggtcgggcggagcggagttcgtcgtcttccggggctgagcccgagtccgagccctgggtcgggcagagcggagttcgccgtcttccaggacttagcccgagtccgagccctgggtcaggcggagcggagttcgtcgtcttccagggctga

SEQ ID NO: 21091 - DNA, 1188 bp, Zea mays
  Peptide Sequence Number=SeqID_64466
atgccgccaccgcccaccgccgtatcatcctgctggcgcggcacaagacgccaccgagccaagaatttgcatcctcatcctgcggctgtcagtgtcaagcagccaggctcaggggtaaggtttcagcaattcagctccctcgcctccgccgcggcaccggcactacgagtgcttcgctaccagccagccagcacactctacgagtcgccatcttccactccaccgaggcagctccaagccatggccatggagaaggccgcctccttcctctcctccctcttaggcggcggcggcggggagccggcggcgactgtgaaatctatcttcatataccctatcaagtcctgcaggggtcttgccgtgtcacaggcgcccatcacctccactgggttccggtgggatcggcagtgggtggtggtgaacgccaaagggcgagcatacacccagagggtggagcccaagcttgctctggtccaggtggagttgccgccggaggccttcgctgagaactggcagcccacgcccgacgaccacctgggtgcaggattcccagacattgatcatcaaccacctgtcggcgttgaccgcccggctgggggcgatcgaggcccttccggcgtcggttccagtcatcctgggggtcttttctgtgccgcatgtcctgcctgcgagttcgatgcccggcccttttccgcagccggtcaattggggtacgccgacagatactcgaggcagccttggtggcggttgacctcggcacacgggggcgcaacctcgccctatcggacggccatcagcatccgcatcgacttgttgtctccaagtgcgagcatggtgcgtgtcccgcgggtgacacacttcaactctaccgcagcggcggttggaaaggcgctcccctccttgtcattggtgagggagcactgcttagcaccaccacattccgctaccggccgtcatgaggacgcctctgctggtcattgttgcgacctattccagatggtcatccatgtgttcccctttcgttcagatggcgtctatgggatccaagtggctgcacacgtgcaggtccaatgcgccggagtcatcgttaggttgcagctcgaggatgacctgcttatccaggaggggtgtagtgtcagagcccaagaggaacgctacaagattgttacagtaatggcagtactatag

SEQ ID NO: 21092 - DNA, 387 bp, Zea mays
  Peptide Sequence Number=SeqID_64467
atggccatggagaaggctgcctcctccctcttaggcggaggcggcggggagccggcagcgactgtgaaatctatcttcatataccctatcaagtcctgcaggggtctcgccgtgtcacaggcgctcatcatctctaccgggttccggtgggatcggcagtgggtggtggtgaacggcaaagggcgagcatacacccagagggtggaacccaagctcgctctggtccaggtagagttgccgccggaggccttcgccgaggactggcagcccacgccctacgaccacctggccactcgcagtctggccactgattcaaaatcatttcccaactccaaactcaacatcctggagaccaatctccagatattgttggcaatacagcattga

SEQ ID NO: 21093 - DNA, 65 bp, Zea mays
  Peptide Sequence Number=SeqID_64468
gtaaagaagaaggcgtcgaggcggatccccaggaatgccaggacttcggcgagttcgtggtttag

SEQ ID NO: 21094 - DNA, 111 bp, Zea mays
  Peptide Sequence Number=SeqID_64469
atggggagtcatgatccccgggcaagacgggaatcacggctcatgggtaaagaagaaggcgtcgagacgaatctccaggagttccaggacttcgacgagttcgaggattag

SEQ ID NO: 21095 - DNA, 1143 bp, Zea mays
  Peptide Sequence Number=SeqID_64470
atgtcccgcgagaagccgccggcgccggccgtggtctccacgggctgctcaggcttcatgtcctgcctctctcgccaccgccgcggcccgcagcagcgggcggtgccgaggggcgccgctgtgctgccgcgaagaagcgatgctggcggctgcgacgcgggcgccgaggccgcggaggggtgctggaagagggtgcagctcctggaggaggaggaggaggagggcaagaggctgagcggccacgaggagaggccggcgccaggcgcccccgagcgcgtcgccaggggccgcgccaagcaggaccgtgcggagggaggcggcgaggtcaccgatcgcgtcgggaacggcgccaaggccacggcggagggcggcggtagcgtgatgagcatgggcacggccaagaccacggccgccacgacgtgtgccagcgccggccacggcgtgcaggaggtggtgaggctggaggacggcagctacatgcgcgaggtcaggcgggtagtagggcgcccgtgggagcggctggccgtgcaggtgtcgcggcccgtcgtccccgccgacgcggcgagcgcgtccgaggttcttggcaagatggcggcgatgaatgccgaggacctgcgcaagttcctggtccagctaatgccgctggaggacataaccgggcagaagaaccccggcgagcccgtgcgccgagcggcgaggccgagctcgggggacgacctcgtggaagctctcgtcctcgacacgatgggcatgctggaatctctgctcctggaaggcctgaagatccagatggcctcaccggccaccgaccccgccgcgggcgacgggaggcgggacagggccgtcgccgtcggcaaggactgcatggtccacgtggtcctgatgcaggcgagggatcccaaggaaaggtacggcgccatcggcgaccccatgattgggctgatcgaggcgtctctggaaaagaaggatgccacggcggtcaggctgcggatcctggggctgcatgttgccgggatcagcttcgtcgtgagaaggcccagtgatgatggcagcaggtgcatgctgtggagtgcgtatctaaggcgatgcaaggattcacacgacggtgacgggggaggcgatggctgcagtaatatgcggtga

SEQ ID NO: 21096 - DNA, 144 bp, Zea mays
  Peptide Sequence Number=SeqID_64471
atgaggacgaatcgtataatccgtgtgacgactgacgacgacgacgacagcaaggattacttcagcagcctggacgacgaggccgagtgcaccgatgtcgcggacgacgacgagaactgcccaagcgacggctactgcggctac

SEQ ID NO: 21097 - DNA, 168 bp, Zea mays
  Peptide Sequence Number=SeqID_64472
atgaggacccacgcgtcaggtgttgaaagccgtgggaccgtgctgtcagggacgccaacgcagacggaaacgaagtgcggcaacgcccgcatcacccagtccggccaatcccatctcaactgtggtgcaaaaactttggcaaggaatactgaaggaccttccaagtag

SEQ ID NO: 21098 - DNA, 210 bp, Zea mays
  Peptide Sequence Number=SeqID_64473
atgcgaaaggccaagttactggtatggtctgtagctgctgtgctggcatgtgctgttgctttgacagatgctcggctggagaatttcttgcacaaagaccccgggcgggacctgagtccgaccggatccgagcttggacagtacatcggccgccgtgttccgatctctttctatatgatgaaactccagaccctcgaatttatcttctag

SEQ ID NO: 21099 - DNA, 288 bp, Zea mays
  Peptide Sequence Number=SeqID_64474
atggcggccctggccgccccgccgcgccccggctcgccctggctgcccgctcggccgcccgcctggccgcgcgccctggccgcccgctcggccgcccgcctggccgcgcgccctggccgcccgctcgccgcccgcctggccgcgcgccctggcgcccgctcggcgcccgcctgggcgcgcccttgcgcccgcctgggccctggcgccccccctgggcgctcggcggctcaaccggcccggtcggccgcccctgcgcgccctgcccccggccggttcaaccgcccctag

SEQ ID NO: 21100 - DNA, 837 bp, Zea mays
  Peptide Sequence Number=SeqID_64475
atgcaggtggcgtgcaaccgcaccacggggacgcaccccttcgacttcgagcatccagcatggagacccaggcccacacgtcatggcaaacgacgcctttggcaggcgaagcgggcaacgtttcacctccgccatgatgaccgcgtcaaaaaagggaccgagaaaggggatactccgaaagggatccttctccgcgaaggaaaggttcgaaggctggcccctcggaagggttcgatagccgcctcagaccactcgggctccgcgcccactactgatcaggggttcgaaggctggtccctcgaagggttcgacagccgccctagagcacgcagagcgagggatgactctaggtacgtccgatatatggccaaggctcgggctacactcccgagaaggaggtctccgcctcgcctgaccctagggctcggcccccgccttggccttggaaggtggtctacgcctctcccgaccccaaggctcggcctcaacctcggcctcggaggatggtctccgcctcgcccgaccccaggactcggcctcaacctcgacctcagaaggaatcgcgtcctcaccccaccccggcctcggcctcaggaggagtcttcgcctcgcccgaccttgggctcagaccgaccacgccacaggggggacatcattaccctacccctagctagctcaggctacggggaacaagaccggcgtcccatctggctcgccccgggacccctcggggtcgaaacaccaacaatatgggaagggaagttttcaaagaaaagacttgatggtggatccctcatggccatgatgggttcaacattgaaaaagatgtacctctaa

SEQ ID NO: 21101 - DNA, 600 bp, Zea mays
  Peptide Sequence Number=SeqID_64476
atggcggatcatcctatggcggagggcgccgtaataatcgaccgccgccgccgccacgcgcctgctaggcccgtcgccatctgcctgccccgctgcgcccgcgtggcgtgtactgtatcctttatctcaagcgaatggcaacgtcttgagtgcaaacaaaccagacgagaacaagaacccgcaattggcaaactccgaaaggacgtgcactgcacgcggtgggcaaaaaattataagaaacgacacggacacggccttctcctctcccgcactttgaaacctcgcgaattttccaaagctcgacgcacccccgccgcgcagtcgcgcaccgtttccctcttcctcgtcgtcaccgctcagtcgctcaccaccctccctaaaacccaacacgtgccgccggcgtcgcccatgcgccggcaacgccgcaccggcggcctccgcccggtgctgctgctcctccccttcgccgcgctcatttcggtcgcaaccttctccctgcactccgccgaccgcctcctcagctcctccgacacgggcacggcgcagaaggccgcttcgtcgtcccggcagcatcggcggctgcccgtcgccaccctcgac

SEQ ID NO: 21102 - DNA, 819 bp, Zea mays
  Peptide Sequence Number=SeqID_64477
atggccgtgatggattcaacatcggaaaagatgtacctctgccaggaccttgtcgatgtaggcctgctgaccgaggaccctttaactggtcacatgcctcgtcatgggctcgcgtccctcctgagcgacaggagagccctctcccacggcacgaagatgacgcgccccgcgaatcggatcgggaaaggggatatttcaaaaaggatccttctcagcgaaggaaacgggccctcgagccctcctactgatcaggggttcgaaggctggcccctcggaagggttcgacagtcgccccagagcactcgggctccgagcccattactgatcaggggttcgaaggctggccccttggaagggttcgacagccgccccagagcacacagagtgagggatgactctgggtacgtctgttacatggccgaggctcgggctacgctcccgagacgaattcacgcctcgcccgagggcctcctcaggcagtgggcgcaccctcggctcgcccgaggcccagctcaggcaggcttcgtcgagaagcaacattggccaaatcgcctcaccaatcgaccgtatcgcgggcggattcaatgcgaggatcgcctgacaccttatcctgacacgcgcgcctcagtctacaaggtcgaagcaggactgacaacagcaaattcagcctcggacgtaacaggaaactccgcctcgcccgatcttaggcctcagcctcgggaggaggtctccgcctcgcccgaccccaagactcggcctcagcctcggcctcatgaggaatcgcgtcctcacccgaccccggcctcggcctcaggataa

SEQ ID NO: 21103 - DNA, 1551 bp, Zea mays
  Peptide Sequence Number=SeqID_64478
atggagagccgggggcggcggccgcggagccccgagcgccggaggccggcggcgcggaaggtgccggtggtgtactacctcacccggagccgccacctcgagcacccgcacttcgtcgaggtgccgctggcctcgccggaggggctctatctcagagtcgatggtttcaggagctacaagaacgggttcgtgtggcacgacctttcggaggacgacctcgtcctcccggcaaccgacggcgagtacgtgctcaagggctccgagctcgtggaccaatccccttcgggtccattttaccctgtcactgtcagcaacggcaaccagaagcaacagagcaggccgaaagagggcgcgcggcagccactgccaagagaccaatccgacccatcctccccgcctagcgtgacagtcagagaagccaaggcccggcggtcaccgtccgtgccttcgcaagacgaggaggatgacaccccgtctccgtgcagggatcgctccatgtcacagccacaggagctggagccccagcggaacgagaggaggacgcaaccgccagcgagcgggtctgcgagcccagtggagctcagagctcacaggcccaccaccggctgcacggacgccgcaacccagaccgacgatctcggcagaaggccggcgggccgcagggcgctcgagctgccgcgcaagaagagtctgagcacggaccacgacgccgtcgtccgtgagatcgcagagtaccggcagagccaccctcgccggtcggcagacctccacgggatctcccgggagctcctgcgccagtgcatcactactccgctgaccgtaccctcgacctgcgccaagtccgagagcctagagtcgctgatacgcgcggacaacgtgatgacggacagcttcaggatcctcgaagaggaggacgtcgtcgcgcgcacctgccccaagctgaggccggcgagcgtgctgatgcagctcgtcacctgtggctcgctctcggtgaagggtcacggggacgctggggtcgttcggacgtgcaagccgaggttccccaacctcaggttcctcccctcgccgctgatctcgcgcaccatgatgatgggcgagctcgactacctgtcggaaaaccccaggttgatggggatgaagctggaggagaaggagtacttcagcgggagccttgttgagaccaagaagacgcaaagagatggtccggctgagaggtattcggcgcttaaacggtcttcttcctacaatgcagaaagggccggcgaggctctggactgcacaagacgcgaagaggataaagccgacgacgtgtcgtcgcgcacgaggtgcctcccgcggacgccgatcctgtcatccttcctgcacccgaagggcgactcgctcaggtctcccgtctcggactgccggcggagctcctcggcccggcgggactacgacgcggcctccggggacgggagcaggaggttcgccgacgcctccgtcgcgtccgcgaccacaggggccgagtcgttcaggaaggaggagaaactcgtcaagatcgaggaaagttaa

SEQ ID NO: 21104 - DNA, 609 bp, Zea mays
  Peptide Sequence Number=SeqID_64479
atgtctccgctgccccgccgcctcgtggtcctcgtcctcctcgccgccgccgtcgcggccacggcgtccgccgcgtccctcagcggcgcggcgaacgacctgctgcccaagtacggcctcccgaaggggctcatcccggactccgtcacctcctacagcttcgacgaggccacgggcgccttcgagatccacctcgccagcacctgctacgtccacttcggctcccacctcgtctactacgagaggaccataaccggcaagctctccaggggcgccatctcggacctctccggcgtccaggccaagaagctcttcctctgggtctacgtcacggggatggtcgcgcaccccgaccagggcaccatcgagttccaggccggcttcgtctcggagtcgctatcagcctccatgtttgacgaggtgcgcacctgcggttccagcgctggcgcgcagctgcgcggcgcggctggggtcatcggagagcttgggctgctccccgttgcgcagatggatcttagtgtaaaacatgctcacgagttcaataatgcatacagtttttatgtggcgatgttttttttttgggtccagagggcctggctcagagtttaa

SEQ ID NO: 21105 - DNA, 804 bp, Zea mays
  Peptide Sequence Number=SeqID_64480
atgacgaagatccttgaagctgagggcgggaccaagatcgcagcccggcttgcttctccccaccctggaactggtggtcaccgtcttgggacaggcgacacctttggcaggcgaagcaggcgacgcttcgtctccgccataatgaccgcgtcaaaaatggggtcggaaaaggggatactccaaaagggatccttctccgcgaaggaagcgggccccgagctccctactgatcagaggtcaaaagctggcccctcggaaagggcccggcccctcgaaagggttcaacggccgcctaagggccactcgggctccgcgcccactactgatcaggggttcgaagggctggcccccgaagggttcgacagccgcctcagacgtagagcgagggatgaccctgggtacgttcgatacataaccgaggctcgggctgcgctcccgagagccgaaagtgaccgcagtcacttcgccgctccactgaccggcctgacaagaagacagcgccgcctgcgtcgttccgactgcttgccactcgacagagtgaggctgacagcagccaagtccggcctcgggcgccataggaaacagggctcggactcgggctcgaccccggaagacgacgaactccgcctcgcccgaccccagggctcggactcgggctcggccccggaagacgacgaactccgcttcgcccgaccccagggctcgggctcggccccggaagacgacgaactccgcctcgcccgacctcagggctcggaccgaccacgtcacagggggggccatcattaccctatccctagctag

SEQ ID NO: 21106 - DNA, 510 bp, Zea mays
  Peptide Sequence Number=SeqID_64481
atggtggtctttccttacaaaggggaaacttctctaaggccattgaaaggcaagggaaataataagacatgcaggatagggggtatgagcataataaaggatggagctaaaagcaaggattgtatccgacagggagagaatgcaaccaaggtcaggataggtaaaacaccatttctcaaatcgagatgggaaaagatgatatttcaaaaagacaaaacttgtaaggtgtcaaaggattggggagcagtcaatgatggaatagatgatgcattatccccgaacagggatggaaatgaggaggcttcaaagggtggaagagaggagattttttttagagcaagaataaagataggtgtcaaggcaagaccgatggatgacaaggaagagatgggtaactcacagctctcaaactgggttgagagaaaggggaagcttttaaaggatcagttcaaggtgacaataggcaaggatatgagagaaaagatgaaggcattgaagagccagtggtag

SEQ ID NO: 21107 - DNA, 465 bp, Zea mays
  Peptide Sequence Number=SeqID_64482
atgacggtggcaggcggacgggagcagcagtcacgtcgtcagccaagctcacgtcccatccagggacagcaagagagcctcctcccacggcgtgaagacggtgcgcccgtgatccgttcctcgaacggctcgcgcacgcgcaacggccgccccgccaaccactcgccccgtcgcattaactccgcggcgggacaggcggcgcttctggcaggagaagcggacgacgcttcgccttcgccggaccgggaaagggggataccccgaaaaggatccttccctgtgaaggaaccgggctccgagccccccctactgatcagaggttcgaaggctggccctccaaagggttcaacagtcgcctcagatcgcgtgagcccgacacccactactggtcaggggttcgaaggccagcccccggaagggctccatggccgcctcaggctactcgggctccgcgcccattactga

SEQ ID NO: 21108 - DNA, 258 bp, Zea mays
  Peptide Sequence Number=SeqID_64483
atggcgcctcatgttgacgtggctggtttgcgccctaggttgggcgatgtggaggctcctccgaagccgaggtcgagtctgtcttccatagccgaggccgagtccgagcccctgggtcgggcgaggcggaggtcgtcggctgaggccagggcggagtccgagccctggggtcgggcgaagcggacccgagtccgagccctgggtcgggcggagcggagttcgccatcttccggggctgagcccgagtccgagccctag

SEQ ID NO: 21109 - DNA, 594 bp, Zea mays
  Peptide Sequence Number=SeqID_64484
atggcgctccctgttgacgtggcgggcccgcgcctgaggccgggcgacgtgggggctcctccgaagatggggtcgaatctgtcttccgttgccgaggccgagtctgagcccctgggtcgggcgaggcggaagtcgttcggcagaggccagggcggagtccgagccctggggtcgggcgaggcggagttcgtcgtcttccggggccgagcccgagtccgagccctggggtcgggcggagcggagttcgccgtcttccgggtcttagcccgagtccgagccctggggtcggacggagcggagttcgccgtcttctgggtcttagcccgagtccgagccctggggtcgggcggagcggagttcgccgtcttccgggtcttagcccgagtccgagccctggggtcgggcggagcggagttccctatggcgcccctggcgaggcctgactgcctgtcagactcactctgtcgagtggcactgcagtcggagtggcgcaggcggcgctgtccttctgtcagaccgctttatgctgatgggggttaccagctgagaattaggcgtcttgagggtacccctaattatggtccccgacagtag

SEQ ID NO: 21110 - DNA, 873 bp, Zea mays
  Peptide Sequence Number=SeqID_64485
atggtgccaagtggaggcaggaacaatggaggcaagggcttagggtgggacaacatgagcggaggaaggtggagtggggaagcaaataggttagaggggccggagccgttgcatccagcaaccacaacacgagtggcgactttcaagagccatcaggggcacccccatagagccaccggaagggctgatggggctggtagtgaactggttgacgacatgagtgggtggggaatatggcaatgcctcgaccatcatggagacaatggtggtgttagggagcagaaatggtccgagggcgtggcgaccctcttgatgataaagctcgacacagagatggaggacatggttcatgacccgatcaaaggccacaaaggagccccgaagaagcagaccatcatgaagggacacatgcatgcagtagggaggcacaagaactgcatcggatcaaagaaggggagcatcaaggggagggccaagacacaagcgctggcggttgccgacgtgcgtgctgaaggggggacattggggccactaggggctggagcaggggcgctgggggctagagcggggccactagggcagagcgttatggctgatgtggatgaccgccgagaagtggagctcgactatatcacggtggatagggttcatgacccgatcaaaggccgcaaaggtgcccccggagaagcaagtgtcatgaagggagacgcacacgcgataggtagggacgagaaccgaggcggagcaaagaaggggcgtaggaacaaccacgtgagggcgatgcgacccataaccgaggaagaggcacagagcgcggggcgaacgacgaggaagagcaaggtgacagggaaggacgcaaccacagcggtctga

SEQ ID NO: 21111 - DNA, 1289 bp, Zea mays
  Peptide Sequence Number=SeqID_64486
atacgtacccgtgggagtctggttaccagctcagagggaccctgcagcagttgacctattcagcacacgtatttaggagtcttttcagagctcagatgtcttcccagatagctctgcgagtgcaccggcttttggatcttccagcctttctgcttgcagccggtgctgactctgaggcgcacctcacatatctacctggccttctgacccttttgactaccagtggccggtatgttgaggagtgggtacgagtcttctacacctctgtatggatagacccggatcatcattggatgaggtttcgttttgagcgagaggatgtcaccattactgccactcagattcgccagctctttggatttcccgagtcgacgactcgacttcacagcctctactacggcacttctgaccctcctcgtcgccctcacggcggtgtggcttcgggtacagctcacgtcgcggctctgttccgcccgcccttctcagatgggtcgcgacgttcaccggcagattttactacatcagccaagtatttatttgagcttatcagacggactcttctgccgaggatgggatacagggaggctaccacacatatccagctctggctccttggtgctctggccgaggatgctgctcttcgtcagttcgacactcaggatacaacagctgatgatgatgatgatgatgattttggggttcctcctccgcctccgccgcctatgcctccacgctcacatgatcatgaggctgggagttctagtgctgcccttgttgcccctccggctatggaccctactcttgcttcgattctccagtctatcactcagcagcaggctcacctggcagccgagcaggcccgggcattcatggctcttatgctacagcagtctggtgtctcagttcctccggttcagtctgctccacctcctccgcttcacgctccagttgtgccatcgattctgtctggaccccctgttcccactgttggtccttctccgctccggccggtcactctggcgttcacgtcaccggttctcagctctgtctgccctcagccgccagtgccaccagcatctgctgtaaccactactgctgtggcagtatctgtgacctcttctgttccggcagctcctgcagcgtggcctcagtccgagtcagtaccagctccagcttctacagcagatcctagatccgagactgactctgaccccccgccggcgttcgctctgctgcctcgaccgcgaccggatgcgcccccgccgcctcctcccacttcagatgtttag

SEQ ID NO: 21112 - DNA, 921 bp, Zea mays
  Peptide Sequence Number=SeqID_64487
atggaggagagcgacgcggcggagggggtggcggtgcagctgatcgatggcgagggcgagttcgcggccgcggcggcggagcgattcatggcagccgcgggagtcgccggatgcgggctctcctacgccgtcgtctccatcatggggccacagagcagcggaaagagtaccttattgaaccaactatttggaaccaattttagggagatggatgcattcaggggaaggagccaaactactaaaggtatctggatagcacgttgtgttggtgttgaaccttgtactgttgtattggatctggagggtactgatggaagagagagaggagaggatgacactgcatttgagaagcaaagttcgttatttgcacttgcaatttcagacatagttctaattaacatgtggtgccatgatattggccgtgaacaagctgccaataaaccacttctaaagactgtatttcagactccacttgaacatctagaaccagttctaagggaggatattcaaaagatatggaattctgttgccaagccagaggcacacaaagacacccctatcagtgaatttttcaatgtacaagttactgcattgtccagttttgaagaaaaagaggagcagtttagagaacaggttcaacaacttaggcagagattttcaaattcaattgcaccaggaggtcttgcaggtgatagaagaggagtagttcctgcttcaggttttctgtttagttcacaacagatttggaaagttatccgagagaacaaggatcttgatcttcctgctcacaagaagacacaatctctacctatcctcaggggtgcgcagctacagggctaccttgatggctctgctattgcaccagaagagaagatcaacaccaagaaagacgacgattcgttagataaacacaaactataa

SEQ ID NO: 21113 - DNA, 318 bp, Zea mays
  Peptide Sequence Number=SeqID_64488
atggaattgggcgtcgaggtgaagggctcgagcatcccggttcctgaggaactgttcctcgagagcgagccacgcctgatggcccgtgttcgcttggtcgcagatgatgtcctggagctcgacggtgatggtgtcgtggagcaaggagagcaccatggtcggggactaggccgaggacggcggggcaacgatgtcgtcgaggatgtggtcagcgagagcatagcgccgaagggtgaggaggacctgccctcgccaacgagggtagtgggaggatgttgggtccaagacgatggacaggagggcccagatgttgtgtag

SEQ ID NO: 21114 - DNA, 1938 bp, Zea mays
  Peptide Sequence Number=SeqID_64489
atgactggagctggatggcgccagagagcagtagggtttacgcctgaacaaaggctggcggctggcagatacatgaattttggtaggtgcatagcaaaatctatgtgcctagaaaagccaaaataccttacaatttggaatagagtaatggttgctacggttaggtgtgatgaaattgcaaacgagaagtttggatgcataacctcggacacagaatggttagatgtggagagtgctgtccaatctggtccagtacctggttttgggaaaaaacttagcaatatcgtggaagttcacttgcaagagtatgacaaagaagctttctattttgatgaagctgttaggaaaggaaaacgacaacatttggagtccagaatactgaatcttgtccaacctgcattccagaaaatgttgactcatctgcgcatgaaggctttagaaaaatttaaagctggtcttaattcatctttggagagtggaaaagaattcgcgatatctgcaagagacaatactgaatgctctctcaaagactttgaacaaggatgtgctgatgctataatcaagcaggcgaactgggactgctctaaaatactagagaaagtacggcgtgatattgaagatcatgcactttcaattcgtgaaagaaagctatcagaattgacaacccatgctaaggagaaactaagaaaagcactagctgaacctgtggagtctctatttgatgctgcagaccaaacaacctggacatcaataagaaacatttacaaacgcgagacagaggccatcctaccggagtttctgaaaaccatttgtggctttgaaatggaatatgctcaagcagaagaaatggtatccaaattaagggattatgcccggagtgttgtgcaaagtaaagctaaagaggaatctagcaaagtattgatccatatgaaagagaggttgacaaaattctctattgttcttcaacgatatggagtattgatccatgatttcctgacactgtttcctcttgttgccaggttcacaacagtgtttagccatgacaaggattcaattccaagggtctggacaggaaaggaagatgttcatgcgatagcaaaggaagctcgagctgcggctctcaaacttctgtctgtaatggcggccattcgctgggatgatgagccagataggattgaaagcatcatcacttcaacacttctggaaggctctgttgtatcaaagattgcaagtgctgcttctgctgacccacttgcttctaccacttgggaacagattcctccagagcatacaatgattactccttctcagtgcaagttactgtggaagcaattcaaatcagaaactgagttcaccattacacaagcagtatccacacagcaagctcacaggcgtggtaatagtaagctgcctcctccttgggcaattgtggccattgctattcttggtttcaatgagatcatgacgcttcttaggaatcccatttatgtgtttttgctatttgtgggctacttgatggtcaaagctttggcagtacaactagatgtcagcagagaattccaaaatggagtggttcctgggataatctctgtgtcagcgaagctcctgccgacgatacagaacctggtgaacaaagtggcagccgagcagcaggatgagcaccggcaccctcaccagcagcaccctcaggtagcagaacccctacagccacagatgcagccgccgccgctgctcctgagcccgagaagccccatgagcgagctgcggaggctgcacatgccgtcaagcccgcgcaaggtagcgtcttcctcctcgtcgccgtcgtcgtcctcctcgtctgccgtatcgtcccctaggcacgttggcgaggatcagaagccaagaccaggggcagctgcgcctgagaaccagtccaccatcgctgactcgatagtgtga

SEQ ID NO: 21115 - DNA, 444 bp, Zea mays
  Peptide Sequence Number=SeqID_64490
atgtgtgaacaggtgaacagtactcccgtactgttcacgctgacttggcattcgcttttgcgtcacgcttatacttttgctttccgtcaagccgaaggtttgtccttcataaccttcgtccggaactcattatatcctaagtatttgagaacaagtcctcaacagagccctttactgatcaggggttcaaaggctggcccctcggaagggttcgacagccgccccagagcacgcagagtcagggatgaccctgggtacgtccgttacatggccgaggctcgggctacgctcccgaggtaccctaggacatttccgagaccagcgggaacgatttgtaacggaatcccaccggagggaggcatcgagcccttggaccctatcgaatgggtccgggtccggcaaatcacctgcatgtatttttggagcgcgcctctaggccactag

SEQ ID NO: 21116 - DNA, 423 bp, Zea mays
  Peptide Sequence Number=SeqID_64491
atggcactcggcaaagaaggaaacctgggaaccggcaaagccatctttgccgagtgctgttgccaaggcactcggcacagggactggcggtggggcccactggacccgtctttgccgagggccgtgatagcatacactcggcaaaattggcctctttgccgagtgccaaagaagacactcggcaaaggatccgtcaccgtcacttggcgccgtgacggtgacttttctttgccgagtgtcaaatggcactcagcaaatgctttgccgagtgcccgacaaaaagtactcggcaaagaggctattgccgatgtacagttcgccgagtgttacactcggcaaagccgtgttgctgttcacatctactgtgtggggggctttgcagaggatgtcgttgcggccgtagagggcttctgtagccgctag

SEQ ID NO: 21117 - DNA, 150 bp, Zea mays
  Peptide Sequence Number=SeqID_64492
atggggctcggtgtatgtggctcgctctgccaagatgatgatgaggataatgctggtttctatggtgtttatgattatggtaatggtaaagaagaaggtgtcgaggcagatctccaggagttccaagacttcgacgagttcgaggattag

SEQ ID NO: 21118 - DNA, 609 bp, Zea mays
  Peptide Sequence Number=SeqID_64493
atgcctagttgctgggcgaaggcacactatgattatgaacgcttgccgctgcctagtttatggcaggggcgagtcatcgtgtttcccttgagcaagacaaaacgccatggtcgccgtggcgcttttggacaaactccccaaggcggatatgatacacccagcccagaattgaatgctatagctcttgtaaggtgtaggaagttggaaaacttggatgcaattgaatgtggggtggttggggtatttatagccccaaccaccaaaagtggtcgttgggaggctgtctgtcgcatggcgcaccggacagtccagtgcgccaccggacactgtccggaaaatagcgccgcctgcactgctctgactgctgtgccacctgccagggtgaggatgacagccgttgagtccaacctcaggcgccataggaagctctgcctcgcccgaccccagggctcggactccacctcgacctcggaagacggtctccgcctcgcccgaccccagggctcggactcaacctcgacctcggaagacggtctccgcctcgcccgaccccaaggctcagactcaacctcgacctcggaagacggtctccgcctcacccgaccctag

SEQ ID NO: 21119 - DNA, 498 bp, Zea mays
  Peptide Sequence Number=SeqID_64494
atggttgccccgcctcctcctccatcggcggggaaggtgacgggacagacccagatgctgctcttccgccacgcggggaagacgtcgtcaattccaccgccggcgggcgggctgaaggccgccattgccgttgtcgcgcggcggtggaaggagtaccatgtcgtagctgccgtcgagggacatgaactcgagactcctgaaacggagcatcatcccgggctggagaggttgctggagactacccatctggagcttgacgggaagctattcatcaacacgcagcaggcccctacctggcgcgccaactgtcggtgtttcgacctcggggggtccctggaccgacgagtaaattgtcgctacgtgtcccagcccagatgggtcggcgcgagacggaacacaagggggaacaataaggggaaccgcgactcgtgttgtcctacacccagggcggatgcgcttgcattagggggttacaagcgttcgcgagggagagagtga

SEQ ID NO: 21120 - DNA, 165 bp, Zea mays
  Peptide Sequence Number=SeqID_64495
atggccatgatgggttcaacatcggaaaagatgtacctctatcaggaccttctcgatgtaggcttgatgatcgaggaccttttaactggtcacatgcctcatcatggggccatcaatggggtccgcggctatgacctctgggaaatctttgtaaaggctgcatag

SEQ ID NO: 21121 - DNA, 921 bp, Zea mays
  Peptide Sequence Number=SeqID_64496
atggcccatattaggtgcactgcacgtaagtctgtgatcccctttttgccttctcgcctggcagagcgtccactgcatcgcacggtgtcaggtcaatccagccacttggaaagactgcatcgtcgcctgcacgaggagcaggagcgccgacgccaggagcaggagcaggagcagcaggactcttccccttcgcctcagcgggagatggagtctgagaggccaccttcacctgcacctcaaccagagatgccccttgcaccaccacagggcatctcggctgctagaggagaccctgacagagacgacgatgacgtcggcgatagtttgagccacggcacggagcgctcggaggagccggagccagagggatggatcgctagacccatcactcgtgacgctgctcgcggtctaccagcatcgtcgcgggctataacagaccaatgggaggctacttgcttggtgcgtcgtccgaacgatgatctccggggtgcagaggccttctcagagcactattctatcactgagagggacactgccgaggcagtcatgcaagatgcagcacgacgagcactttctcagtattgctcgttgttcagcggggtagctgacgacctagacctgaagtactaccctcgccattcgaccggtagtgctggaggtgtgattgtatcgccagttggtgagggcaatcccaggctgagcagcatggtcaacctggccgccgtgctcaacacagagttggaccatgcccttgacgagttgggcaaggttcgggcagaggttgcggaattgcgtgctgaatgtgcagcacgccactatcttgatggtggttctcccgcccttgtcgggattcagcacccttatcgctcaccgacccgtggtcgcttcgattatggtaccccgactgcaggacccgcatag

SEQ ID NO: 21122 - DNA, 891 bp, Zea mays
  Peptide Sequence Number=SeqID_64497
atgggggatacccgccgtcttttcgcctcatcgttggaggaacgcaactccgtgggagttggtacctttcaaccatcgttcggcttcaaggattttcatcagccagcccggctgtatccccccccccccccccgccgacggtcacccaagacggtgaccactagttcctgggtggggagaagcaagccgggctgcgatcttggtcccaccctcagcttcaaggatgttcatcatcctcgctggggtgggggccgggctgagccggcgctctacctcccgcgcgggttcgtgggtcaccctctcccgcgacgttcgagggagagggcgctcactggccctgcgggcggcccggacttcgacaacgcggggctggtcgacggcgggcgtcgtcacctccagcgtgttgggctcgtcggcttggcttccggcggcccctcctgccggagggcggctgccgcgccgcactcgcctgttgattatctgaaccgcttcaccaagcatgagtcgcctcgtgtcaaggtgacgagtgagcatgaacagaggcggagttggctcgaaaatgaaaacctggttggccggagcctggccgggttgtccgttagcgggaccgacgccggagttgaccagccgaggcctcgggtcgggctggcgcccttggaagatggtcggccgaggccccagagggatgtttgtgcgagcgagagttgcttctcgcggaaggtgatgagtgagcccccgggtacccccagcaagggctcggggtgctgtgcgatggtcggggtcttcggcttcgatgccccgtttggagataatgaactccaagaccatgccctggggcgccccgaggacccacctttcagggtagagcttgacgcttttcgcttcttttag

SEQ ID NO: 21123 - DNA, 1131 bp, Zea mays
  Peptide Sequence Number=SeqID_64498
atggcgagcgacagcgacgtcgacgaggacgagctcctccagattgcgctgcaggagcaggcggcgcgggacctcagccaccagcgcccgcccgccgccaacaagcccgtcgtcaacctcgtccgcccacccgcccccaacgcccgcggcggcaacggcagagccgggggcgccgcagcgaaggcgcgccagcccagccgcggcggagacgaggacgaagactcagatgttgagctgctctctatctcctctggcgaagaggacgacaatccccgcgctcgtggcccgccgccgccccgcgggggtgggggtgggcgcgctggggcgcggagggccgtggcacgggacgatggggacttcgacgatgaggagcccaggagctggaagcgcgtcgacgaggcagagttttatgcagacattgagtcaaaattgagacagatagaggaagatcctgaaggtgcaggtactgctcacttgtattcagtgacacaaaaaattagtggtgtggcgaatcgtgcatttgagcctctatttgagaggcaggcccaagctgaaaagatcagatctgttcagggaatgcttcaaagatttcggacactatttaacctcccaagtgcaatccgtgggaacattagaaaaggagaatatgatcttgctgtcagagagtaccaaaaagcaaagtcaattgttcttccttcccatgtggggatactaaaacgtgtactcgaagaggtcgaaaaggtgatgcaggaattcagaggcatgctttataagtccatggaggatcctcaccttgactttgctgagcttgagaacattgttcgtctactgttggagctggaacctgaaacagatccacatgttccagctttctggagattagctttatctgttttcagtggaaagtttgccaagacagcttctggtaatgtagtttctgattctgacatgaatgcaaagccgtctgcaaataagaacgatgacaaaggtggagatgtgaatatgattcttaatctgatgagcgagactgcgaagtcatatgacatttctcaaccacttcaggaaattaatgagtctgtcagacttgcatttttgaattcctttctggattttgctggtatgaatctctaa

SEQ ID NO: 21124 - DNA, 1017 bp, Zea mays
  Peptide Sequence Number=SeqID_64499
atgttgttcttccaccacgcggggaagacgtcgtcgattccgccgccggcgggcgggctgccggccgccattgtcgttgtcgcgcggcggtggaaggagtatcatgtcgtagctgccgtcgaaggacatgaactcaagactcccgaaacggagcaccgtcctgggtcggagaggttgctggagactgcccatctggagcttgacgggaagctgttcgtcaacacgcagcaggcccctacctggcgcgccaactttcggcgtttcgagaccggggggtccctaagccgacgagtgaatgtcgctgcgtgccccagcccagatgggtcgagcgcgtgggcgagcgcgaaggggggaagcgaggtggccggagttgggcgtgagagaggtggaaatcccgcggccttcatgttcgtcccgcgcccagcccgagtccgagccctggggtcgggcggagcggagttcgccgtcttccgggacttagcccgagtccgagccctagggtcgggcggagcggagttcgccgtcttccgggacttagcccgagtccgagccctggggtcgggcggagcggagttcgccgtcttccgggacttagcccgagtccgagccctggggtcgggtggagcgcagttcgccgtcttccgggacttagcccgagtccgagccctggggtcgggcggagcggagcttcctatggtgcctttggcagggcctgactgcccgtcagtctcactctgtcaagtggcactgcagtcggagtggcgcaggcggcgctgtcctttggtcaggccggcgggggctggtggtgaccggtgggcagcagcgtcggatacggaggtggaggaggtggcggtggtggcatgggcgtcgtggtggccgcggcggcgggagccagaggagccgtcatcggaggagtcagaggaggatggggatggaggtgagagcgcggcggacggaggcgacgaaggggccttgcttctggcggcggaactccgggtggtagaaaagaggaaatag

SEQ ID NO: 21125 - DNA, 1137 bp, Zea mays
  Peptide Sequence Number=SeqID_64500
atggggaccggcggcagctgcgcggcggccgtgcgcggcgcgaggccggcggtgggcatggttgcggtggagctcgccttctcggcgctgcagatcttcatcaagctcgcgctcgacgatggcatggacgaacgggtcctcgtcgcctaccgcctcatgttcgccaccgccttcctctgcccgctcgccttcctcgtcgagaggaagaaacggccaccactaaccatgaaggtggtgctagggttgttcatgtgtggactttttggaatcgcaataaaccagaacttgatagtgcttgccatgaagctgacgaactccacgaccatcgtcacagctctcagcaacctcacgcctcagtccacattcatcgtcgcgatcttgacaaggcaggagacggtgaagcttggcaaggccagtgggcgtgcgaagctggtgggcaccctggtcggcctcggcggcgcgatgctagtcaccttctacaggggcccggagatcgggttcatgcaccggctcgcgcgcacggccgggctcagagacgccggccggctcagcggcggcggtggccatgggacgtcgtctgccgccgcccgggtcgtgggctccttcctcgccatcaccagctgcttcagctacgcgatctggctgtccatccaggcgcgagtcggggaggtgttcccgtgccactactccatcgcggcgctggtgtgcctcttcggcgcggtccagtccgcgctgctcgcgctctgcttccacagggacatggcgcactggaggctcggcctcaacgtcaggctctactcgtcagcctacgcgggcatcgtggcgtccggtttcgccttcccgctcatgtcgtggtgcctgcgggagcgggggcccctctacgtggccatgttcggcccgctcatcatcgtcttcgtcgcggtgctcagctcagtcttcctcgacgagaccttgcacctcgggatcgcgctcggcgccgtcctcatcgtggctgggctgtacatagtgctctggggcaaagcgagagaagcgcaggagaaagctgctgctgctgtgctcacagatgaagagcttggcaacgactcgtccatggctcctgctgctgccaataccaaatataacggtgaaacaaaatga

SEQ ID NO: 21126 - DNA, 540 bp, Zea mays
  Peptide Sequence Number=SeqID_64501
atgcccgtgcttggattatcttccccacccccgaacgccttcaccgcgcttgcttgcgaggcacagtgggggattgagagagtacaatcgggggtagtcggctggtgtcctcggcaattgctcgtcatcgtcgtgaacccgtcccgtgccgtgggcaaccattcctgcgaccctattgctagccttagatcgcctgtgctccggtggagctccgccgtgctcaacgcgccggtgcctctgtttggccgcaggaggaggacgattagcctgggccgttggatcctggccaatggtggagaagtgagcgacttgataccggttcagagttttgatcggaaccattgtgagatgattgtgcagttaggattgaagatgaagaactccctcggcgaatgcgatcggtcatttgcaaacgagaacccggggttttctcaaaataaccctcagtccactctgggggttgctgagtctggggaatccttcaagtaccacaggatgaggcgcttagaggatgatgtgacgagttcgttagaggtctag

SEQ ID NO: 21127 - DNA, 162 bp, Zea mays
  Peptide Sequence Number=SeqID_64502
atggggctcggcatatgcggctcgctctgccaaggtggtgacgaggatgatggttttggttatgcctatggtaatggttgtccgcgttgcaaccactggtcaggtgaagatgaagtcgtggaggaggacttccaggagttccaagagtacgatgagttctag

SEQ ID NO: 21128 - DNA, 414 bp, Zea mays
  Peptide Sequence Number=SeqID_64503
atgggttccttatccgagaacatgacgcggagggcactgtccttggtttgcagcggacccaagcataggttgttcagcggcgagaaattccccgccactaggttggccatcgaccccgacaccacatcgaacatgttccaggagggcctcaacacaaagagcttcatcaagaaactccaatcaacgacgatggatggtatgatgacatgtaccatgcagagttgcaggctaccccttggccatcttcatacaagccgccatagcttcccatgtatgatgggcactctgaccctgtcacacccggttttagaaggcaaaccgaatgcgaaccatgtacgtgccaggatcagcaattcacgtacacagcagttacataactggacatcatcacacagtgctcaaataatagcataa

SEQ ID NO: 21129 - DNA, 684 bp, Zea mays
  Peptide Sequence Number=SeqID_64504
atgaggagtccggcctgctcacggcgcgatagttcaattgaacgggtcagagagcttcaccagggaacaaggaaggggcttccagtgaagttctgtcgggtcagagggcttggaaagcttcacgggccactggcggagctagccgaagcactggctcgacttgggggtggccggagtgggttggccacggtggccgaggttctggaggcagtggcgggcggaaaagagctcgtcggagctaaggaggggtggctggccggtgatgagatatggagcctggaaatccggtctgtctccctgctcaaacccgaggcaaatccagggcacacggcgaggctggcgacccggatagcccgcaccaaccggaacccgcagatcacggtgtgccatcgccatgcacggcgagtcagttgggaggaggagctggtatccaggtctcggttgtctgcgacactatttcttcagtacgcgaaggagaacgaccagatggggtgggtccacgagccagtgaggcatttggctcaggcgtgcgcggtgctcgctgaccatgcggtcccacagtcggccacacatgcaaagtgggcgcgagggagcaggccgcgcccaggagaagggttcaggcgcgcgtgtggtagtgggctgaggagttggggcgcggcaatgactgacaaggggccccactag

SEQ ID NO: 21130 - DNA, 294 bp, Zea mays
  Peptide Sequence Number=SeqID_64505
atgagaagggtaaaggcaataagaaacaaaagcacaacaaaggatgaggttacaaactcgcgagccaaagaagaggatacagccaagagaaagaaggtcagcggtcctacagtcagcacggctttgataccacttatgtcacacccggttttagaaggcaaaccgaatgcgaaccatgtacgtgccaggatcagcaattcacgtacacaacagttacataacatggacatcatcgcacagtgctcaaatagtattaaaaagggaaataatagtcgattacatcatgatgtctga

SEQ ID NO: 21131 - DNA, 136 bp, Zea mays
  Peptide Sequence Number=SeqID_64506
agatgttcggattacagatggtgttgagaaggttggtttggtattaactctggtaatgcattgcaaccactgctcaggcgaagatgaagccgtggaaggagacttccaggagttccaagactacaatgagttctag

SEQ ID NO: 21132 - DNA, 525 bp, Zea mays
  Peptide Sequence Number=SeqID_64507
atggggctcggtgtatgcggctcgctctgccaagatggtgttgagaaggttggtttggtattaactctggtaatgagtaagatctattgctcgattgagggtagttgctatagcagaattgtagctggtatgaagggctacaagtttgctacagatgtattggcaagttgttgcacaaaaattcaagatctagacattgcaattggatttgtcaggcgctctgaatcgggtttcaatggtacaatgaccagatcagaacgccagctcagagaactcaccatcggtgactgtgcgcccagattcgcgcccgccgcggtgattcgtgctcgacgtagttggataatgcagagggggcgatttagggctcggattgtgcaattgagcaaggggaaacgattattaggtgttgaattaggtgacagccaagttagggcaccgtccattgcttatcttggccggtacaggttcgccggagctcggttcatcgccgttcgccgtcgaggactgcgggctgtgaagaaatag

SEQ ID NO: 21133 - DNA, 969 bp, Zea mays
  Peptide Sequence Number=SeqID_64508
atgaacgtgctttctcgcgaagggtgccggcactatgaagtcttcgaccaagctgatgaggatttcgagcgtgatatctacaaggtcgaggaccctatagtgaaggaatccgccggagccctttacaaccggatgtggggcccccacggtcgagaggtggtcagggaacgggccgagacgacgaggggtcaggcggcgcgtggtgagagggtggatgactttggggctttgaacagcacgctgcctgacccggagtcgaacccggcggaggccgccctggagccgctcccggagaccgccgaaggcgcccctgatgcccccgcagccgctgcggccggcagaggcccgcccccggagaccgccgaaggcgttcctgatgcccctgcagccgctgcggccggcgaaggcctgccgctaactgctgcgctgagggttgaggatcctgtgacggtggcggcggaggcgacagcggaggctcccgcgacggctgggtcttcgcaggttcaagattttgggcctgcgcacgcaaccgccactactaattttttggcggcttcgaccgtggatgatggtaataaatcggatgggtctgcgtctaagttttctgattttggtgactctgggagctcggttgagtggactgatgagtcgtcggatgaggacttggactattttgcggccttggatgtggcagcggcagaggcttcaccgcgtgctgcggatgcagaagatgtgcctggtccgagtactgggcgtaagcgaagggcgattgcgaagcatagagtgagtggggcggacggcggtcgacttcgtgtgagcagggctggccggcaggaactgttgtccttgccggccgccgtgagtataggtgagggggagttgcgaagtctttttgtgggtgaggagcttaggataatgttatttaactatagggagatgggaattatttcgaaggctgagccaatgtag

SEQ ID NO: 21134 - DNA, 1089 bp, Zea mays
  Peptide Sequence Number=SeqID_64509
atggagagttatgatctccgggcagaaaggggatcacggcttgtgggtggcaatgagactgatggttctggttatgactatggtgctggtaagtggtattctttccgtttggaaaggatggctcgtcttagacacactgcacgaaagtctgtcatccccttcttaccctcccgcattgctgagcgtccgcttcgccgtcccgtggcaggaaagtccagccacttggagagactgcaccaccgcctgcatgaggagcaggaatgtcgacgacaggagcaggagcagcagggctcttctttctcgctccaacaggagatagagtccgtgaggagctgctcccctgtgcttcccctggaggcaccccctgcaccaccactgggcgccccagcctctggagtagctgctggaggagacccagacgacggaggagccggaaggatggttgctcgacccatcactcgcgacgctgctcgcgggtgtcacttccacgacgcgctcgacaccctgctacgtcgggcacttaaccggcgtacttggtccatcgagtatcgttgtatggtctaccagcatagtcgcggggtctacccggaccgctgggaggcgacctgcttggtgcgccgtccggagaacagtctccagggcgttgaggtctgctcagagcactattctatctctgagcgggactcagctgaggcggccatgcaagatgctgcacggtgtgcgctttcgcactactgctcggttctcggtggggtagctgacgatctcaacctgaagtattacccccgccgtccatctggcagcacaggaggcgtgattgtttcacctgtcggtgaggacaatcctaggttgagcagcacagtcaacctagccgccaagctaaacacggagctggaccatgcattagacgagctgagtagggctcgtgctgagatcgccctgctgcgggctgagcgcgcggaacgtcgtcacctggatgatggctcccccgctcccgtcgggactcagcacccgtaccgctcacctcggcgtggacgccagtcttatggcaatcccgactgcaagaccaagataaatctagaaccatag

SEQ ID NO: 21135 - DNA, 165 bp, Zea mays
  Peptide Sequence Number=SeqID_64510
atggggaagcctgtcccatcactcctcatgctcctcctcagccgagtgaccgcacttgtacccaccataaccggaatgggagaccacgactcaggtcgcgtgaggggatatgtccactgccaggttcactcaggatttaataacattatgctaaaaagaaactaa

SEQ ID NO: 21136 - DNA, 738 bp, Zea mays
  Peptide Sequence Number=SeqID_64511
atgacttcccacggatcctcagatgacggaaatgcactaacccacactgacgggcttgcacgagagggctttccccgcattttgtgggaggtacttcagggggccggatacgtgacaccccctcagtacgcggtgcagcagttcgagaagcaccgagtgccccgctgtaggctggctacccaccccattggcttgttccccgccgaaagggaggacgacccaatgtggaaggatcgggtggagcatgccaaggacatctgggccatctacccaggacagactacgcacttgactgtacggtgcatgaatgcgctgtaccgtctgcaagtaatgcgcggtgaggcgatgtcccacctgatggcattgttggaggctacaaagatcaccttggacaacagagaggaactcgtggttgacttgtcccaagaaatggtggagaaggacttgcaggtggaacagctatccactgatatccaagagttggaggagctagtgggcaccagggagaacaccattgaggttcttgaggatcagctcattaacactcagcagcagcttgctgaggctaacgagcacctggattgcatcaccaggagatccaggacctggaggccaacgaggacgtcgacatcgagggaggagatgagcctgcctctagtgtggacactgctggctcgggaagaccaccttcccccgagtcgagtgttgcctcattcgctcactagatgtccagagtag

SEQ ID NO: 21137 - DNA, 396 bp, Zea mays
  Peptide Sequence Number=SeqID_64512
atggcgctggcttggctcggccgcggcgctgggcatgcgggggcgcgcgcgagcgtgctctggcgtgggcaggaagcgtcgaacacgtggagtcttcgccatggaagaggcagtagaattggcgaggcggctgcgcacgcccccgacccctaccgcgagttccatttccgtagccctaggggggatattcctggcggcgaggggcgtcagcagcggggtgctggttggcgatgttgtgcacttgctgttgattgcgaccgtctcgaccggagtcttgctgcggagtcctcgtccacgtgcgcctggactgtggagcatctttgggcttcctttgagactcaaccttgcgctggtggagctcttcggatttggcgtattttcaaacagctgatataa

SEQ ID NO: 21138 - DNA, 534 bp, Zea mays
  Peptide Sequence Number=SeqID_64513
atgaaaccacaaagaaaaccgttggggcgtaaccctcttagcgacgcgccatatcggaacccgggtatggtgttaaatgagcaagggccgggtcgtcacccctcaagtgacgcgctgtctcttgatctggagccggtgataagtgagcaaggatcgggtcgtcgcatccttagtggcgcgctacatcggcgcccgggtgtagtgaaaaatgagcaagggtctttgcatcttcctcggcgggtgcgaagggtaaggaagctagtcgagccaactagggtccgtgtaggcagttggaacgtaggttccttaacagagaccaagtggaagggacagaaggcgaaggaagtggaaggtacaggtttcaagttgtggtacacggggactgcaacaaacaagaatggagtaggcgtcttgatcgacaagagcctcaaagatggggtagtagatgttaagagggtaggagatagaatcatcctagtcaagctggtcattggagacttggttctcaatgttatcagcgcgtatgctcctcaa

SEQ ID NO: 21139 - DNA, 378 bp, Zea mays
  Peptide Sequence Number=SeqID_64514
atggaaaaagggagagatgggaaggccaaggccgcggagaaggaaaggggcgtaaacaacggactcatgggtatcctctgtcgaaacagtaaacccatggcaaatccgccaagaacagagttctcgcggaggaagaaccccgatagatacgaggtggaaaagttcagtttcagaaatgacggacatgtggttacctgcgaaaggcaactggctgttggggtcaattcctcgaggtcttcctcttgggtgccatctcgattctaccagcgagcggagtgggaggcgaatagcagagaggattcagaagcgagaaaacaagaactaggggacggaaagcaaaggcggctaaaagcgcaacacttatgggatattctctag

SEQ ID NO: 21140 - DNA, 351 bp, Zea mays
  Peptide Sequence Number=SeqID_64515
atgcgcgtggggatgtggtgcgggaacgcgttgcgcgtgccgggggtgcgcgagccgcaccgagggaccacgctgccgagggcaggggccgcgcggaccgaggccgggacggccgcgcgcagaggactggaacggctacgcgtcggggccagggggccacgcgcaggagaccgagggagccacaccgggggccaaggggccgagccgtcgtggggctggggggctacgcgcgagggggtcaaggggccgcgcgtgaggggtgccaagagccgcgccaccgggggtcgggacggctgcgccgggaggtcgaggggccgcaccggggggggcgaggggccgcgcgcgaggtag

SEQ ID NO: 21141 - DNA, 756 bp, Zea mays
  Peptide Sequence Number=SeqID_64516
atggtgcttggtgaagacatgatgagtgatgatgacaaggaaaatagcgataatactacttttgaggcatctttcttcgccgatgaacttgccgctgagagaactcctgaggtaaaggtgtttggttttgagcatttgatcgaagatttggtgaaactattgatggagctggtggagaagctggtgacccccatcagcacaaagctgcaaaggcctgatgggcgcgattcaggtcaaggctccgtccactcaagggacacgatctcgcctcgtccgagcccagcctcgggcaaaggcagccgacccgggaggattcacgtctcgcctgaggggctcggactcagcctcgacttcggacgacggactccgcctcgcccgaccccagggctcgggctcagcctcgacttcggacgacggactccgcctcgcccgaccccagggctcggactcaacctcgacctcggacgacggactccgcctcgcccgaccccagggctcggactcaacctcgacatcggacgacggactccgcctcgcccgaccctagggctcggactcaaccttgacctcggacgatggactccgcctcgcccgaccccagggctcgaactcagcctcgactctggaagacggtctccgcctcgcccgacccccgggcccagactcgacctcgacctcggaagagcctccgcctcgcccgacctcgggctcggaccggccacgtcacagggggggccatcattaccctacccctag

SEQ ID NO: 21142 - DNA, 987 bp, Zea mays
  Peptide Sequence Number=SeqID_64517
atgctggacgtgtcgaagtcgaaagggtgcgcccccttggtgcggttgcatgccgcctgcatggcggtccgccctttcacccgctggtttgggcgaaagtggaggagtgcttccttcgctcgacttcaaggattttcatcaggcagcccggctgcatcccctcgccggtggtcacccaagacggtgaccaccagtttgaaggtggggagaagcaagccgggctgcgacctctgcccctccctcagcttcaaggatgttcatcatccttgctggggcggagggcgagctgagctggagctctacctcccgcacgggtcggctggccacctcttcttccagcttctgggggtggaaaccatcctccagctctgcggaggaggcgccctccagccatgccggggaaggcgaactattgctgcccagccagggtgcaacattctgtcctctgtcctcgcttttgtggcgaggacgggagtgaggacctgccggtgcgctttgggggcggccggcgctcgctggtgcggtgttggtggacaggtggacgctgtcgtcggtgctgaggtggtggcagctggagaaagcttctccgccgtcgagaccgtcagcgccacctgcggacagacctccggctctttggctttaatatctggttctcgtcccttgagtggggatgcgaacgagagccttccggcggcagcgtccgtcctgggaccgtcgctgctgctgcagaggtcgctggcgagtcaccaggagtttgtcgccctgcaggctctccgatgtggaggttgttcatacccgcgggggcggaaccggagttccatttgtaatggcaccttgagtgccggtgtctgttcatcgtggctgttggggcctgaacataaggtgaagagtgaggtatccgtatcccggagaaaccctcggccgctctgcgatgagctggagccggaggcagcggtgccagcacggacagaggcagagttggcttga

SEQ ID NO: 21143 - DNA, 228 bp, Zea mays
  Peptide Sequence Number=SeqID_64518
atgaaggttgacagccagctgttcccaggtgtcaacatggtggagtgtgctgaccaagttttctcattcaacatcaatatggtaggatctgcaagatatcaggatgcacggaaggcatccgaacatttgctcaggaagtatgagtaccaatataggcagcgtcatcatcatgagcccgaggatgaggaatacaagcaccgtactgggaagcgcctgaggaggcgttaa

SEQ ID NO: 21144 - DNA, 720 bp, Zea mays
  Peptide Sequence Number=SeqID_64519
atggcgaacactcagacgaacatgtctggaccgatgcaagactcacccatcacatacgaaaagttgcctccagaacaccaagtgaagtatgatcaaatcaaagctctttttgaagccaaccccattggcactttcgagaggacctgcaactatggcatccagtggaaggggttcctgctcgagggcgctcttgacgaggttgacctcttgttacattcggaagagtgtactagggatttatgtcaagaagtcaactatatggtggctcatccgctccatcgtcactctgggagcctaatgaatgcattcaaacgcatggccattcacattgtccaagagatcatgaggcatcaatactatccaatgggcctagtgttgggaagtcacaaaagggagattactttccataccaggtcacccctaccgtattcagtcgcttccccagaagcacaatcggccgcttcaccggcgtatgttgtgtacaagatgggtggaggtcctgaagattgtcaattcttcaacgagccacttaaccacatcccacacggatattcgtgcatgcagaagcgtggggaaactgttttggagttcattcaacagtgctactcatcccgcatcacagaaaaagaggtcgtcgagctggcaactctcggccttgcgaagacgatcaaggttctagcttttcagcttgaattcaattccttggctcacctggcatag

SEQ ID NO: 21145 - DNA, 2322 bp, Zea mays
  Peptide Sequence Number=SeqID_64520
atggaggctctacggagttgggatatttgtggatccaacgttcgcttgaatagggttttcgagttgaatcgtttgccgtacggtggctatcccggggatgacgctgttgtggccgtcgatcgccgcgggaagaaaccggtggctacggctggggaaggttcttcacgagaggctccgccggccatgaagaagagaaaattaggtactgcagctgaagggttgggggtctctgattgttttgttgtggagttaatgggtacttgtgtggccctcgggggaaggatgtcttcgcccaagctccgggagtcttcggcgcgaatgctgagggttaccgggggtcgatggccaaggaacgttccgatcccccgtggggccggcgaagacatatttatgtctcgtatggctcgagagttgaagatttttccttatggacggaatattgctactgttgtatcggtagtgatggagaaggatcgtcaagatgtggcgcggaagcaccgggcggtcactagggtcggggaccctttccgcgaggcgaagaaggtgcggggaggcacgaagtctgccgcccctagcagtagcaaaccactgcctgctgtgaagccggccacccccaggcccagcaagtcttcggcgggtgcgaaggctgctgcttctaatgtgggcaagctgccctcggccaagcccacaaaggagcaaaggctgccgtcgccggcacgcattgacgtggcgacgacgcgtgttgctgactttgacacaaacatctgtgtgggggattatctcgttgggtcggatgtgggacagctggctgttgtctcgactccggtggcggccacttcgccgacgacggtggttggtgcgaagggtgcttcgcaggacccgtggtccaacttctacgcgagcggcgagatttcgtcgggcgccgccgctaatgatgtggcgggctctgtgtcccagcagctgaggcatgcgtcgcagcaactgaagcatcatacggatgctgttcgggagaagtcggctgcggaaaacaaaagctgcaggctaacggagaggttggctactgcggaggccgagaagggtgatctccatcgccagctggtggaggagaggagggacgcgaacaaggccattgccgatgcacaggctgctcaagccgaggccaaacttgcgcgggcggtggccagtctcgcccgccaacgagtcgaggagctggaggcgaggctcaacggcctgtgcaaccacgtggacaaaaccgaggcctcgacacgcgcggaggtcgagcggacgcatgcgcagctcgtggatgcgtactgggagctgggtgcgcggaccgccgcctttgaagcgcccgaccaagaggtgggcctctgcttcctcgagtggctacaggaggagctgggggtgctcccgacaattgtgacgggcctcatgtcctttgcctccctcgtcacctgcaagggggccgtgaatgctctgtcccgcaaggggtgcgggcactacgaggtcttcgaccattcggacaaaggcttcgaacgtgaaatcttccaggtcgaggacccagttctgaagcggtcggtgggggcgctgttcgacaggatgtggggccctcatggccgagagacggtttgggagaggtccgaccgggcgattgatcagatggcgcacgacgaagaggttgaggatcttggcgatctggacggtacgctgcccgacagtacactccccgaggcatcgggggtggagctggcgccgccatccgatgcgggcaagggcccctcagcgatccccgcgccgactggagctggcgaagaccccgcgccagcccctgcgctgacggcggagacttcaccgcgtgtggagggttccggggatcttcctagtgcgagtactgggcaaaaccccctggattcttctaatcctaacccgaggtccttcccccaaattaaacagtaccccgcggcggaagaaagggcgaaggggcttaccggcggcaagattgctccagtgggggagctcgtcggcggcaaggagtccagcctatccagggcacaatcgaccaatcaaacgggtcagagagcttcactagggatcaaggaaggcgttgaagttctgccaggtccgagggcttggaaagcttcacgggccaatggcgatgctaaccgaagcgctggcacaacttggggtgactggagtgggctggccacggtggccgaagctctggcggcaatggcgggcgggaaggagctcgccggagctaaagaggggtgtctggccggcggtgggatcaaggtgaacacgcttgatctttggctcaaggtctga

SEQ ID NO: 21146 - DNA, 300 bp, Zea mays
  Peptide Sequence Number=SeqID_64521
atggcacccaagagagctagttcgaaggcagccccatccgtcgacgaagcagcgaaggcaacactgctagccgagaaaaagggcaaggccctcgcagataacaccccccaagaagcctgcgaagacgaagctctcagcaagagagagcgcaacgaacaaccaactcccaaaggcaccctacgcacttgcagcttcggaggacaaccacaagcaccacccccaggcttcgctccactagagggcgaggacgcaacagaggacggcaaagtcattagcgtctcagcagaagaacagctatag

SEQ ID NO: 21147 - DNA, 294 bp, Zea mays
  Peptide Sequence Number=SeqID_64522
atgaacgtaaatggaaatttgcagaatggaattgggattcagatgggtcaagttaaggcgatagaaatcaaggagaccgcggagaagaaaaggaacataaatcacggattcatgggtatcctttgttggaacagtgaccccgtggcaaatccgccaagaacagagctccttcggaggaaggaccccgatggacacgagatggagaaggtcaggctcagaaacaacagacatatggttacctgcgaaaggcaactgactgttggggtcgatagggggaatcaccgcagcggatga

SEQ ID NO: 21148 - DNA, 417 bp, Zea mays
  Peptide Sequence Number=SeqID_64523
atgggcaagagtaacaaacacaagagcgagccgactcctccatcagaggacttcggcgactcggaatacacggaggaggagttctcctccgagtccgaggggtctccagctctcgtctctcccccggcgtcgtctgacgattcagacgactcccaggggattgccgtggaggtctggacttatatccgggccgtcgagcgctccgggctcgagggttcggatgagtcggagtactcctcggacgaggaggactcttcggactcggccgaggagggcggcggcggcgatggcggagacgaagacgacgaaggaggcgacggtgacgatggcggtgacggcgacagcaggggtagcaagggcggcgacggcggcagcaacggcggcggcagcaagggcagcaacaaggctagtggctag

SEQ ID NO: 21149 - DNA, 357 bp, Zea mays
  Peptide Sequence Number=SeqID_64524
atggcctcacctaatgttggaggtactgggggtggattaggggttacttccctcccgacaggatctgcagatccccgattggatcgttgctaccactgctactatcttgatgctgtggggctagttgatggcgggaggatgggcttcgctccgataccagctgtgacggaacctcccaagtcattaggcccacctacagttgtctttgtccaacaaacctcagacaactctgcaggtgcacctgatcacttgacaagttcgttatctgaactccttacctttcccaagagcatttcacccgccatgcagacattacaattcatcggagatacggaagtgcgaaagcagttacaataa

SEQ ID NO: 21150 - DNA, 711 bp, Zea mays
  Peptide Sequence Number=SeqID_64525
atggcggacgacgtgggggcggcgatggtcctaagcatcattattatggctacgtcgacccctggcctccgtagcctggggcttggctcaacccgtcatgtagtgccctgcgagaggccccagcgattaggggctcctttcttcagcacactctccgactggcgggtcctagggacttggggtcatttcctagacaaatgccgcctctcctcttcctcccaacgcctgactggcatcctgcttctcctgactccaactctccctctctccttcgcttggcagcctgcttctcggatctacggacgcggcgcggcgcctggcgaccggaacggcggcgcggcaggactcttcttcaccggcgcagcgcctggcggacggaatggtagcgcggtaggactcttcttcaccagtctacgtcttcaacggcctagcagtagccacaccgggaggagctccaagccgatcccgagctccaattccacactgggacggatccgcggacaaatcggtggcgcggcaggagtcttcttcaccggcgcctggcagatctgcggcgcgcggccttccgggtggatcctcggcatcgaggcttgcttcaccggggaagaagaggctccaggacggatctccgccgcgccatggagggaggaatccgcagacgacgttggtcttcggcgcgcggcctaccggcttgcttcacctgcttcgtga

SEQ ID NO: 21151 - DNA, 762 bp, Zea mays
  Peptide Sequence Number=SeqID_64526
atggaagaaacacacctccacgtgttcgacgcttcctgcccgcgccagagcacgctcacgcgcgcccccgcatgcccagcgccgcgcccgagccaagccagcgccatggcccgtgcccgcgcctataaagccctcccaggcttcgactgcactcttccgcgcaccctcaaacctcaccggagtttagctcaccgccgtttgcccgtgcgcagcgtgttcgcggccgcccaatccctctgtcaccatagaccggccaatagagccattcccaactccgtccagccctcggagaagactgtgcacacctccgtgaagctccccgagcgaggaatcggagtttgcttcgccggagaggccagtccacgctcgccggagctctcaaccccaccggattcgccgtggtttggccggtacactcgccgccgacgagaacacccgcctgcgcgcgtggaccgggcgattccggccatccccgacgtcaagccgtacctcgacgtgaccgccagagtctccccgagccaaccccacccttcgccggacctccctcgccgccgacatatcccctcacgcgacctgagacgaggtctcccattccagttatggtgggtgcaagtgcggtcactgcacgacggccagtcggggtcagtgaggcattgttctctggaggaaatggttgctggattaacttggccgtccaccttgccaccgggttggactgtcgagtgggaccctgcctcggctgaggaggagcaagaggagtga

SEQ ID NO: 21152 - DNA, 324 bp, Zea mays
  Peptide Sequence Number=SeqID_64527
atgcccctccccgcgacggcgctcgcccgcccgcccctgctcgccgcccggcggcgcccgtccgcccccgcccctcccctgttcgcgcgcagcgcggccccggtgtgcccccggcatggcccggcgcggccccggtggccactactcgccggcgcgaccccggcgcggcccccggcccccggcgcgtccccggcgcggccccggccggctcggccgcccctggccggttcaaccgccctggccccagctcgcccgcccgttcccccgtcccggcccctcgcccgaccgtatcttctcgccgcgctcgcggtgattgctcgttaa

SEQ ID NO: 21153 - DNA, 198 bp, Zea mays
  Peptide Sequence Number=SeqID_64528
atgaagctgtggaaggagacttccaggagttccaagattacgacgagttctaggtgtgggttagcggcaacccccagtcggctgcctgtgaaggccgcggttatctacgtttcttttccgcactttgatttattgagcctcaccggtgcactccagtacctcaccttctctacgcccgacatcgcctacgtcgtctag

SEQ ID NO: 21154 - DNA, 300 bp, Zea mays
  Peptide Sequence Number=SeqID_64529
atggcgaatcgcacagagacccctggcgtgctaagtccacgatggtggatggcgacgagtgtgtctccggcgagccgatattggccgaagaacgtaatgaccggcgctccggtgtggctgacacccaattctacctataacgaccataacccctcaatcaattgcaagattccagctcataatcgttttgtccatggtggcgatggaaaccggagaaatcttaacatgttctgggtgattcaaggcggtctaattcaatcggatggttctgtgagcaacatgggacatgagggaggctag

SEQ ID NO: 21155 - DNA, 834 bp, Zea mays
  Peptide Sequence Number=SeqID_64530
atggccgttcgacagggcgaggtcgcgctcccgtgtgccgaggtcaaccgtcaccaaggctgcctcgagtatctaccggcgtatctcccgcactctccgtcgtgcaaggaagccacgagtagcagcttagacgccgtcaacgaagatgatgtgacgaaatttggcgttgtccctggagatgggcacgccggcgtccaggatgtggtgacaaaattggctggcgatgctacccatggagatgaggatgctggttgccaggatggcgtgacgaaggtagcatgtggcgcagcccatggagatggggacctcggttgccaggacggcgtggcgaaggtgacatgcggcgcagtccatggagatggggacgccggttgccaggatgacgccgcgaaattggcagcagaagccatgggatcagatcgaaacccaagctctccgatactagatgctatggtcactagatcagtgagggattggagagggaattcgatgattgaagctgctggtggaggtggtgtggtactgttcatgcgtgaacagtactcgcggtttcatagaagtggaaagatcaaacaaaaatttgggattgttagctcagaggatatggctgagcatgcttgtgaagatagatacgctaatgttgatttagtttgtgctctatgcgacaatggaagtaaaattgtaaggctgtttgtcctttggttcattgtggttcagttgtcaaaagtgaaatttaatgcatatggactgaattgcctggaaatcatgtcctttataagatcatatgtcgtgcccgaaggcattgcagatagtgtcacaccttcatatgtttga

SEQ ID NO: 21156 - DNA, 162 bp, Zea mays
  Peptide Sequence Number=SeqID_64531
atggccccacgtgtcagcatcgcgggctgcataccccgcactggaatcgttactgacaacgagcagctcgtggttcctgagtgtgttaccgaagaccttcctgagcaacaatctggtgaaggcaagtgtcctctgacccattatgtcctacatactttataa

SEQ ID NO: 21157 - DNA, 714 bp, Zea mays
  Peptide Sequence Number=SeqID_64532
atggggtgcaccggtgttgccttcttcttcctgccgttggaggagcacgacctcgtgggcccggctgcagtttcccgccagtggtcacccagaatgatgaccaccagccttgtggcagagaagagcgagccgggctgtggcctcccccctgccctcagcttcaaggatgttcatcatccatgctgggggcgagggcaagccgagttggggtcctgccttccgcataggctggcaacccgcttcttcctccagcattcgggggagaagggcgtcggccgcgtccacggcccgtcccgcgctgtcggccacaccagggggtcgtacaagacgtcgtacgccgtaggggcggtgtccgcgttcctggatgccgccattcgccggggcggcgtcagtgcgcaggtggccgctgtcgtcggtgctaaggtggtggccgtcggtgagccacttggagtttgttatcttgcagcccttccggtgtggagaatcacttatctgagcgtgagctacctttcacggaaggtgatgagtaagagggggtttcccccttctagacccgaggcgaccgctcgggccgggacccttgcagagggcctggccgtgaccgttgggtctgcccggtccgcccaagccatggcctcacagcagcgtgcctgggccgaagggttcgaggcggctctcgacgagtccgtcaagaactgcaagacgcttgcctag

SEQ ID NO: 21158 - DNA, 1296 bp, Zea mays
  Peptide Sequence Number=SeqID_64533
atggctgaaaaacatcttcaaaatagaccgtcaaggctggaagacaacactattcaccccgtttcgactactgtgccaaccaccggggtaagactaacaacaggagctccgcctcgcccgaccctaggcctcggcctcagcctcggcctcgggagaaggtctccgcctcgcctgacctcggcctcggcctcgggaggaatcacgacctcgcctgacctcaggcctcagcctcagcctcggcctcgggagaaggtctccgcctcgcccgaccttggcctcggcctcaggagaggtctccgcctcgcccgacctcggcctcagcctctggagaagtcaccgcctcgcccgacctcggcctcagaccgactatgctacaggggatacatcattaccctacctctagatagccgcctcaggctacgaaggaacaagaccggtgtcacatctagattactccggcagcagacgccaacaggcagcgagaaggccgagtgggcccaggaggacggtttcaaggagatctgcacgtcatggattgcgctgagaagggagtatcggtcgtggttcctgagcttcctggagtatgcactcgagtcaggattcgtgatggagggtggaagtaggaacacgagggaacacatgtggggacaacccaagggtggggacggcggcgggaggatcgtggcccggctatcgcagctcaagaagacgagcgactggctcgaccgagaccgtcgagcagctgaagcggaaggtctaccagtgcttgcttggaacggtcgaaactgtggcgtcggcacccgaaggaaggcgcggggggtgaagaacacgactgaggcactgaatgggaatatcagagaagaggagaatgggtggggagcaagtgacattaccacagcagatctcggggaggagacgagtctgaggtggcggcggcacgacgctcgaggaggagacgagtcaagaggcggtgcggcgatgttcaggacgagtgaggtggagacgagtgccaaaggttcacaacaaaccaatacaaagttaaaagaaagggttcaaaacaaaggagcaaagaaaaccgaaggttgccctggtctagcgcaccggacagtgtccggtgctccatggacagtgtctggtgcaccagggagatcaactccgaacttgccaccttcgggtttctggaaaatgctcgacgctataattcactggactgtctggtgcagcaccggtctgtccggtgtgccagcggcagcaacggctattgcgccaacggtcgactgcaaaagtgaacagtaa

SEQ ID NO: 21159 - DNA, 693 bp, Zea mays
  Peptide Sequence Number=SeqID_64534
atgtcaaggaacaagacatttgacaagcaccacactattatcaatggtatgctagaaacaagtggctttggttgggatcggaacaagaacaagatatccgtcgttagtgattctgtatgggaggcttatgtggcggtaaatttcagttttttcctgtttttctgttattacactatcatcaatgtaaaactaggcagtaatgcatggtatcatctagagctcacctcaaatagttttctgcaaaaaattaaagaagctaatgggtacagacacaagacagtcttatactgggacttgatcagcttagtgtttgggaaagatcatgcaaatggtgaagcgacaaagaccctagctaatggtgcaagagatatgagtaaggaagaaggaaccggtaaagagcttacttcatcaacaacctctggaagcttgaagaggcagtggtccagtgattccttcacctcaatgatggcggagaaattagacaagttcactgaagctattaaggatgaagcaccaaaagggccgacatcaaaagaaatttttagcacattagaggagatagatgggttagatgaagacacatttttagacttgtttgatatcttaataggtgatgcgcacaagtacgagtccttattggcacttctagtgatcctaaggaagaaatggttgcttaagcaacttaaaaagtga

SEQ ID NO: 21160 - DNA, 1053 bp, Zea mays
  Peptide Sequence Number=SeqID_64535
atggcgtcacggtcggaggatctccaccttgaaggaagatgtcagcatcgcgcctgggccatcatcaccagggtctcctccaggaacccggcccaagcagacggccggactggccgctccgtagcctcagccggctgtcccccgaggacaccggcccggctcatagcctcggcagcccgactccagggttggtcccgccagtggacaacctggccaggttctagccaccgctgctacgcctcctcggcctgggaagtcccctactcctgggccgacggagtttcttctccagccgactccgcgggggcccagcggttacaagcactcctccactttcgcccagaccagtgggtgaaagggcggaccgccatgcaggcggcatgcaactacaccaagggggcgcacccttttgacttcgacgcatccagcatggaggcccaggcccacacgtcatgtaaccggcgcgccggttactacgtgcgagaaactgcaccgccacttgcgccagtgccgcgcatcctcgaccgcagaattggtgccgtgactcgaggcaaccctgtgcacggcccagcagtgccaaccaggcacgccagtcatgggtcggtcagccgcgggagaaggcacgacggtcgatatggccagaagtgggccaacagtaatggcggcaggaccgggaaaggggatactccgaaagggatccttctccgcgaaggaagcgagccccaagccctcctactgatcagtggttcgaaggctggcccctcggaagggttcgacagtcgcctcagagcactcgggctccgcgcccactactggtcagaggttcgaaggctggcccctcggaagggttcaacagccgcctcaggccactcgggctccgcgcccactactgatcaggggttcgcaggctggcctctcgaagggttcgacagccgccccagaacacgtagagcgagggatgactctgggtacatccgatacatggccgaggctcgggctacgctcccgaggtaccctaggacatttccgagaccagcaggagcgattctgtaa

SEQ ID NO: 21161 - DNA, 834 bp, Zea mays
  Peptide Sequence Number=SeqID_64536
atgaaggggcgtatgaaaaaagccgagtcagtccttgaccgtcctctcgccctgtgcaaaggctcgggggctgctctcgcaaacctggctccggccaaaccattgatagcgtcaacataccagcccgagaactcggaacctgactatgcacccgggcaacgaccactggtaacccccatcagcacaaagctgcaaaggcctgatgggcgcaattccggtcaaggcttcgtccactcaagggacacgatctcgcctcgcccaagccgagcctcgggcaggaacagtagaccaaggcagattcacgcctcgcccgagggtctcctcaagcaacgggcgcaccttcgactcgcccaaggcccaacatgggcaggcttcgcggagaagcaaccttggccagatcgccacgccaaccgaccgtatcgcaggagcattcaatgcaaggatcgcctgacaccttatcctgacgcacgctctccagtcgacaaggccgaagaatctccgcctcgcctgaccccagggctcggactcaacctcgactccggacgacgttctccgcctcgcctgaccccagggctcggactcaacctcgactccggaagacggtctccgcctcgcccgaccccagggctcgaactcaacctcgactccggaagatggtctctgcctcgcccgaccccagggctcggactcaacctcgacctcggacgacggtctccgcctcgcccgacccccgggctcggactcagccacgacctcggaggagccaccgcctcgcccgaccttgggctcggaccaaccacgccacaaggggggccatcattaccctacccctag

SEQ ID NO: 21162 - DNA, 927 bp, Zea mays
  Peptide Sequence Number=SeqID_64537
atgtcgtgcgcgtttgatgactactatatcaaggactatggcatcatcttgatgcaagaggtgacgcagaggaggaccgacagcaatgaccactcgccatcgtcgggcgtgtatggtggtgcgtacctgatgactgacaatatacgagggaacttctaccggcaggtgttaggggtgaaacaggtcggcttcggattcgggttggatacggagcaagaactacccagaaaatacccagatattcgggtcggatacgggtacccggaattcggacaggaaattgagcccgcgggctcagcagccccggcccgggccgggctgggcggcccgtttggccatctctacacaacccacacaagtacctgcaaccttctagccttcaccaaccctgccccctcgtccctcgacgtagccgacgccgacgccggcgccggcgcctctccgaaccgacgccatgccccccgtcaaatggtaccgttgatgcactggcatccgagtcccggggcgacgctcaacagccagatcctggcggaggcgtgtggctgcgccgagtccctaggcggctccaaggacgggcggtggaagacctccatcttcttctaccgcgccatgacccgggacggcgcgggaggccccgcggtgcagcagcaccccgacttgcctagggagctcctcggcgtcgcgctccacgagcgcccgggtctctacttctccatcgtccgcgcccagcgcctcgttctccaggccgatgcggcgttcccccaggtcatggagaagctccagtcatacagaatccgcgtcgccctcaacttcgagctccttgggttggcaggcacaggctcagtaagtcagccaacgctgtgctttgtccatgtccccatccggtgtacatttgggccggacctgatgggctggcccgaagcatga

SEQ ID NO: 21163 - DNA, 684 bp, Zea mays
  Peptide Sequence Number=SeqID_64538
atggacgaagggataaatttagcaacacttttcccgcaggatctcctgcaagaagaggataatctccaacttcgacttgtcaattttatttctcatgaaaatagcaagttaactcaaagaatttatcacacgaatagtcaattcgttcgaacttgcttagtagtgaattgggaacaagaagaaaaagagggagctcgtgcttctcttgttgaggggtttcagtatcaactgggtgatttctgcctgaggataggaaaatgtgttcccaataattctgaagcactgagaggaatcatgatggaggtagagtattatcccctaacttccattgaaaaatccaaggcagtcatggaggacttctttgacatatggcaggaaacagttgcgaagaagtcattacctggtcaattcattcatgtagactcaaacttttcagaatatggtctttcagatcaatattcttttcaacatactgcagttcaatatgcaacttgcttgcagcagctcatggctgcagtaacacattcacaatgcctggatatatgttgtgtaattgacatacaatttacaaatgggttcccttcctcatgttcttttaagatgcccactacaggtacatacaaggttgtcaaattctcaattgtagattctaagggggtgtggggtgtttgtttgggattataa

SEQ ID NO: 21164 - DNA, 1158 bp, Zea mays
  Peptide Sequence Number=SeqID_64539
atgccctcttaccggcctctgatatctggtctcagccaagcagtacaaatttcagacaatgcattgtttcaaactctcataaaaatatgtgacatggttgctgttgctaagatcctgaaggcaactctggttcttccttcactcgatcatacatcctactgggcagatgacagtgaatttaaggaccttttcaactggaggcacttcattgagtcactgaaagaagacattgatattgttgaaacacttccccctgaatacagtgacattgaacctttggctaaagctccggtgcattattacagagatgaaatcctcccccttctgaagaaacacaaagtcatttactttacacatacagattctcgccttgctaacaatggccttcctagttacattcagaaattaagatgccgagttaattacagatctttgaaccataagttcttggaactacagcagcaaataattctacaaaagtacgagaaggacatgctagcttttactggttgcagccataacttgacatcagaagaagaggaggaactgcgtaaaatgcggtatgaagtcagtcactggaaagagaaagaaatcaatgctactgagagaagaagccttggtggctgtcctttgacgccaagggaaacttcaattttactcaaaggactgggtttcactcgaagcaccagaatttacttggttgctggtgaagcttttggcaatggaagcatgaatgctctgaaggacgattttcccaatatttattctcattctacgctggcaacagaagaggaacttgcacccttcaaaaaccatcagaatatgcttgctggtcttgattacatcgtggctcttcagagtgatgtctttatttacacttatgatggaaatatggcaaaagctgtacaaggacatcgtcgttttgagaacttcagaaagactgttaatccagacaggatgaattttgtgaacctgatagatgaattcgatggaggaagagtgccttgggatatattcagctcagaagtgaaaagattacacaaagatagaataggtgctccatattttagggagcctggcgaattcccaaagctagaagagtctttctttgcaaatcccttgcctggctgtatatgtgagcaacatagtgaagaatga

SEQ ID NO: 21165 - DNA, 534 bp, Zea mays
  Peptide Sequence Number=SeqID_64540
atggctgaaaggtgccaactcccatggagttgcgttcccccaacgacgaggcggaaagacggcggatctcccccatccgggggcttggaaggtggaaagacacgatgcataagggagtgcgaagacatgatcgccttccaagggggtcaccctccttttaaaggcgattctccctacttgcgtccccagccgtcatgggctgagtcttctccaacacactccaaggtcctcccctacggcgcgggggctgggtcccacgcgtcatgcaagccggctcagagcagaagaggccaaaccgccgtgcgcgggaccgggaaagggggataccccgaaaaggatccttccccgagaaggaaccaggctctgagcccccctactgatcagaggttcgaaggctggccccctggaagggttcgacagccgcctcagatcgcgtgggccctacacccactactggtcagaggttcgaaggccggcccctcgaaagggttccacggccgcctcaggctactcgggctccgcacccattactga

SEQ ID NO: 21166 - DNA, 54 bp, Zea mays
  Peptide Sequence Number=SeqID_64541
atgacgggatattttactttgaccgggaggaagtgggcgatcttgagactgtaa

SEQ ID NO: 21167 - DNA, 175 bp, Zea mays
  Peptide Sequence Number=SeqID_64542
ccgtgctcgcggttatgagcggccaagggagctccagagattagtgatacttgatcagagatattgtggtacaggtggttatgagattgatggttctggttatgattatggtgctggcgaagatgaagctgtggaaggagacttccaggagttccaagattacgacgagttctag

SEQ ID NO: 21168 - DNA, 309 bp, Zea mays
  Peptide Sequence Number=SeqID_64543
atgcccggggtcaatggtgtcgactacaccatgaggatcttcaactctgatggcagcgaaccagagatgtgtggtaatggagtctgttgcttcgctcggtttatagccgagattgaaaatctacaggggacaaatagattgagcatgctcaacatctggctccaggcgcaacaaaccgctttggcaagcatgccagaccatctattagatgatgccaaccgtgctggaagcaagattagggtggaaagggctgagcgaagctcctacacatttcaatcactgttagatggcggtgctgagagcacctag

SEQ ID NO: 21169 - DNA, 1533 bp, Zea mays
  Peptide Sequence Number=SeqID_64544
atggatgaagagaagcaaaataacttgactacgaaggaggaagccagttttgcagtaaatggtagtaatgcagctcaaaagttccatctgaaggctgaaataaattttgatctacagcacaaacagatcaaggggttgagaggtactgtttcttctatcaagtctggaatggaacaactgaaattgcactactctgaggagttcactaaacttgggaagcatttgtacactatatccaatgctgcttctggataccataaagttcttgaggaaaatcgcaagctgtacaaccagatacaggatcttaaagatgaggtcttttcagatatgcaaccattgatacgatcagttcttgatggttttaatgtctgtatatttgcatatggccaaacaggatctgggaagacttatacaatgagcggacctaaagttttaacagaggaaagcctaggtgtcaactataaagcattaaatgacttatttaatcttcaagcacagagaaaggggacaatagattatgatatttctgtacagatgattgagatatacaatgaacaaaaaggacttgcggttccagatgcaagcatagttcctgtcacatctacgtctgatgttgttgaactgatgaatcaaggccaaaagaatcgtgcagtgggttcaacagccataaatgaccgcagtagccgctcccacagttgcttgactgttcatgtgcaaggaagagatttgacatctgggacagttttaagaggtagcatgcatctggtcgatctagcaggcagtgaaagggttgataagtccgaggttgttggagatagactaaaggaggctcagtacataaacaagtcactttcagcactgggagatgtgattgcatccctttcccaaaagaacacacatgtaccttaccgaaacagcaagctcacccagctcttgcaagattcacttgggggacaagcaaaaacacttatgtttgttcacataagcccagaacttgacgctgctggtgagaccataagcaccttgaaattcgctgaacgtgttgcctccgttgaacttggtgcagccaagcaaaataaagaaggcagcgagattagagagctcaaagaacagattgcttccctcaaggctgcattggctaagaaggaaggagaaccagagaacattctaagcacacggtcaagcccaagcatatacagaattagaaaaggcaatgcaacacctgcaactcctaaagacaggcagccaatggaagaagttgggagcctagaggcgtccactcaaaagtgcaccacggttctgccccacgttcttcctcccccacgcgcccttgctcatgcccaaacccgccccgccatcagcgccaccaaatcctcggtcgacaccgcgccatcaacaccaccaaatcctcgcagggcggaggagagttcacaggggcacgagcaggccgccgctggagggaagaagcacggcacaggcggagctcggagggggcttgaggaaagcctggagtctggaaagatcgccgcctag

SEQ ID NO: 21170 - DNA, 192 bp, Zea mays
  Peptide Sequence Number=SeqID_64545
atggcgctcgaagagaagagagcggttgggactgggatgatgtggacgttgcgggggaagggaggtggcgaagttggaatggggagatatcatgggcatctatatgtggccattgggccatgccatgccggcacgacccgagcccgtcataggtcgtgccaatttaatcaggccgaagcacgacacgaataa

SEQ ID NO: 21171 - DNA, 291 bp, Zea mays
  Peptide Sequence Number=SeqID_64546
atggatcttgtgcccggtgatgaaattctggccgccccaacggtcattccctccttctccggccacgagcgccccccaagcaacgtattgaagcccccagaccccctgtggaaccccgactgcaagctgaggccgagggcgacgttggtgcgatggcggcgaactggattttttttcctcactgcgttaatggcggaagcgcagggtcttcatttatctactggcgccgcgtctgttaccgagaacgcagggaagaagataggccccggcgagttcggcgcgggtggttga

SEQ ID NO: 21172 - DNA, 1494 bp, Zea mays
  Peptide Sequence Number=SeqID_64547
atggggctcggtgtatgcggctcgctctgccaagtttgggttcgccccttggggaggaggtgcgagtgttatgaaactgatatatcagccgtgctcgcggtttatgagcggccaagggagctccagagattagtgatacttgatcagagatattgtggtacaggtggttatgagattgatggttctggttatgattatggtgctgctagtccactacagccaaacaggatacttgctgagtatgttgatgtgtactcacccttgctctacacaccaaaccccccccaggttgtcagtgttgcaaccactgctcaggcgaagatgaagctgtggaaggagacttccaggagttccaagattacgacgagttctaggagtgggttagcggcaacccccagtcggctgcctgtgaaggccgcgttatctacgtttcttttccgcactttgatttattgtaagaactatatggacgtctcagacatggctcgacttagacacactgcacgaaagtcagtcatccccttcttaccctcccgccttgctgagcgtccgcttcgccgtcccgtggccggacagtccagccacttggagagactacaccaccgcctgcgtgaggagcaggaacgtcgacgacaggagcagcggagctcttccctctcgctccaccaggagatagagtctgtgaggagctgctcccctgtgcttcctctggagccgccccctgcaccaccactgggcgccccagcctctggagtagctgctggaggagacccagacgacggagatggcgacgacagctcgagccacgacaccgacttctctgctaaccctgagccggaaggatgggttgctcgacccatcactcgcgacgctgctcgcgggtgtcacttccacgatgcgctcgacaccctgctacgtcgggcatttgaccggcatacttggtccgtcgagtatcgctgtgtggtctaccagcatagtcgcggggtctacccggaccgctgggaggcaacttgcttggtgcgctgcccggaggacagtctccagggtgcagaggcctgttcagagcactattctatctctgagcgggactcagctgaggcagccatgcaagatgctgcacggcgtgcgctttcgcactactgctcggttttcggtggggcagctgacggtcttgacctgaagtattacccccgccgttcatctggcagcacaggaggcgtgattgtctcacctgtcggtgagggcaatcctaggttgagcagcacagtcaacctagccgccgtgctaaacacggagctggaccatgcattagacgagctgagtagggctcgtgctgagatcgccctgctgcgggctgagcgcgcggaacgtcgttatctggacggtggttcccccgctcccgttgggactcagcacccgtaccgctcacctcagcgtggacaccagtcttatggcaatcccgcctgcaagaccaagataaacctagaaccatag

SEQ ID NO: 21173 - DNA, 999 bp, Zea mays
  Peptide Sequence Number=SeqID_64548
atggcgcttcctgttgacgtggcgggcctgtgccctaggcagggcgacgtgggggctcctccgaagccgaggtcgagtctatcttccgttgccgaggccgagcccgagcccccggcccgagtccgagccctggggtcgggcggagcggagttcgccgtcttccgggtcttagcccgagtccgagccctggggtcgggcggagcggagttcgccgtcttccgggtcttagcccgagtccgagccctggggtcgggcggagcggagttcgccgtcttccgggtcttagcccgagtccgagccctggggtcgggcggagcggagttcgccgtcttccgggtcttagcccgagtccgagccctggggtcgggtggagcggagttcgctatggcgcctttggcaaggcctgactgcctgtcagactcactctatcgagtggcactgcagtcggagtggcgcaggcggcgctgtccttctgtcagactgtcagggttgcttctgagcgaagccaaggcctcgggcgagccggagctttatgctgatgggggttaccagctgagaattaggcgtcttgaggcccgggtgcacggtcggggcccaagctctcgggctggtatgttgacgctgtcaacggtttggccggagtcgagtttgcgagagcagcccccgagcctccgcacagggcgagaggacgatcagggacagactcgactttttacatacgcccctacgtcgcctttccgcaaggaggagggggagtgcgccatgttaccctcgatgggcaccgaacatggtgtctccggtgagctgcaagcgggtaatccgagtggacgtccgtgccccgttcgttgggggtcgctaggggcccagaggcacgcccaaaagtacctgtgggtgatttgccggacccggtcccctggcgacggggtccgagggctcgatgcctccctccgatgggattccgttacaagatcgttcccgctggtctcggaaatgtcctag

SEQ ID NO: 21174 - DNA, 915 bp, Zea mays
  Peptide Sequence Number=SeqID_64549
atgtcctcttcctcccttatgcgtcgcgtctttccatcttccgagcccccggatggggggtacccgccgtctttccgcctcctcgtcggaggaacccaactccatgggagttggtacctctcagccatcgttcggcttcaaggattttcatcagccggcccggccgcacccctacgccgacgatcacccaggatggtgaccaccagtttctgggtggggaagagcaagccgggctgcgatcttggtcccaccctcagcttcaaggatgttcatcatcctcgctggggtgggggccacgctgagccggcgctctacctcccgcgcgggtccgcgggtcacccttttccgcggcgttcgggggtggaggcgctcgctggccctgcgggcggcgcggacttagacaacgtggggctgatcgacggcgggcgtcatcacctccagcgtgtcggagtcgtcggccgggctcccggcggcccctcctgccagagggcggccgccgcgccaggccggtgccccactcgtctaggaggatttgagtggggatctgccggggggctggcgtcccctgccatcggcgccgaggcggaggcggctcgagaagtcctcgtcgccgacgggatcgctgccaccatccgcgccccgggccactgcgccggcgtacttgtcctcgcccctcgagcgtcggcgtgggcgagggcaagattgcagcagcgctcgcccactgtcgccgtagtcagaacgggcggcggcgagccgcttgtcagtcttctgtcgctccgcaggccttccccatggagtggggtcgaatctctcggctcgatcggccttgttgtctggggctcctctagcttagttaaagagacccctcggccgctcttcgatgagccaaggccaggggtagcgatatcagtatga

SEQ ID NO: 21175 - DNA, 705 bp, Zea mays
  Peptide Sequence Number=SeqID_64550
atggcctccagaatctggatctgctccggcctggggttccaccggggctttggatccggggtccgctcctcgccacctacgcatgcacaaatcgagaaccaagataatcaaccagcacggggcatcacgaatggggcgtccatacggcaactgtcggggcggggaccgcacgacaagcaggggcgccggccatggatggtggcgaggcgtagtccaacacagaggcgaggtcgagcaccaagaacggtcgacgctgggagcggcgcgagcaggggcagtggtcgtggattccgggtatcccgggcgcggcgctgggtgcgcgacggtgggggcggccgcaggggcgacaatcatagcgccgaggtcggggaaaagggggcgcttcgcacgggcggtttgcggcgggcggcgggagttcgtaccggcgggattcgcgacggcgggcacgcgggattcgcggagcgtgcgctacggcaggatggcccccactcccttcggcagggaggcatcgtcctctattggctcgacgtggctagacctattgtccccctccctctcccttgggaatctcgggagagttacagagtcttctgcgcagcgcaggaggctatcgaggctgaggccgagttgctacgggtccaacggtcgcgtggttggccccctgaccctggtttatctcgagccatttttgggtatgggggttga

SEQ ID NO: 21176 - DNA, 1245 bp, Zea mays
  Peptide Sequence Number=SeqID_64551
atgccctgcaccggcctcggccactcttctccccctttcccgagctcaaccgcctccagctccgccgcccctccctccactcagaacaccgctcccctgccctcgatcaccacccaaacttcaccggcgacgactcccgccgcggagctctgccaccccaccgtggtcagctccctcccagtcacctctagcaaaattggacccacccttaagctcgccagcctctcctcgtgctatggcacctgcccaatcctcagaaaccggggccaccggcgggttatgaaggctggggagcaccgggaggataaggagggggaatgttttgtccggtttggacatggcggtggcctgactcctaccggtataaccgttaaggttaggacgtgcgagatggaagactctctggtcattaggacatcctactgctcagaggtagaggggttcccacatctgttgcgaagttgtgcgcttcgcatggggatccgcaagaagccaaaatatgtctggaaggaatatctcgagattagaatggagaattgctctatggcagtctacctgggagaaagccgaaactacccaaaccaccctcttttccaagtcactttcaccggacaccgcttcccagacacttgccaaaatgttgcccgaaaagccctccgacagctatgccaaaactacagcagagtagtctttgaaactccccttcactactttccacccagcaacaaaaatacccctgcctggaggaaaagacttcaggccctgtcaggaagagatcctaccgaggatgaccctaccatcgtctacatggccggatacctccacactctcgataaccaatatgatgacctttcctcccactgcactcacctaaactcccgggtggaaagcctggagcaacaagtcaaggaacttaaaagggaaaaggcatccctccaagagagtctcgaaatagcggaaggcgaggaaaccaacactcgtgaagcctaccgaaccctgaagatggattacggcaagaagctaaagaagctcgcccccgcgaagaaaatccgaaagaagaccagaagccaaggatgccagactgagcagaaggaggaagcccctccagccctacctcctaccaggatagagaactcgtccgacaccgaggatatgtccctagcttgccttgatgacctcctcaaggaatttgcggacactttagaaaaggagttcgggagtaccttagatagcacccacgggtag

SEQ ID NO: 21177 - DNA, 351 bp, Zea mays
  Peptide Sequence Number=SeqID_64552
atggacgatgttggtgaagaacgccaccgcctgctcggacctgatgctgttcaggggtcggacctcgatccacttggagaatttgtcgatggcgaccagcaggtgcgtgtagcccccgggtgcctcctgcaatggaccgacgaggtccagaccccatacagcgaagggccaggtgatgggtatcgtctgcagagcctgagcgggcaggagttcctgaccttcggcgatggagacgcagcgctggaggatgcccgaggggctccggtggtagagctcctcctcgccacccagcaagacgaacgacttggcgcgtcgtgctacccgccgagcctcggcttggtcgaggggtag

SEQ ID NO: 21178 - DNA, 189 bp, Zea mays
  Peptide Sequence Number=SeqID_64553
atggggctcggtgtatgcggctcgctctgccaagtttggttcgcccttgggaaggagtgcggtggcaatgagattgatgttttttgtattgactctggtaatggttgtcagcattgcaaccactgcttaggagaatatgaagccgtggaaggagacttccaggagttccaagattacgacgagttctag

SEQ ID NO: 21179 - DNA, 768 bp, Zea mays
  Peptide Sequence Number=SeqID_64554
atgggggtgttcgatcggctgcccccgatggaccacatgcgttccgagaagatgtgcttcgtgcagctcatcatgcccgccgacagctcgcgcctcgccgtcacttacctcggcgagctcggcctactccagttcaaggacagaaaagctgtaggagaaatccccacaacacgaaaaatattttattacgataagagagaaacaatgtacaaaccgagcattacactggacaagaatttagaggagaaacataagaaagatggggagggagcccctaaggttactggtttcctgtctaaggcgcctaaggttattggtttcctgtctaaggcgcctaagccaggtgacttcagcaacgacatttgcaacagctcggtactcagcctcggcgctggagcgggagaccgtgttctgacgcttggaggaccagaagatgagactatcaccaaaaatacaacaaagcctaagagtagcaaggtgaggctcacaggggtcgtgcatatgaaggcaggtctgctggactgcataagagatgtcaggccgtgtgaaagtgagatactggagggcccctacaaggctacggaaatctgtaggatcagtcactggattactaatagtgccagacagcttgggattgacatcaattggggtggaacagagcttgcattcagccatgccagctcggtcaaggatgtcaatcatgtactgacgttgagacaaaacaaactagttgtcgtgcgttggacctgcatccccaagaaatggtga

SEQ ID NO: 21180 - DNA, 411 bp, Zea mays
  Peptide Sequence Number=SeqID_64555
atgggtaagagcaagaaaggcagaatctccttgcaccactccggcgacaagcagaagcgcgagccgactcctccctcggaggacttcggcgattccgagtactcggaggaggagttctcctccgagtccgagggatcaccggtccatgcctctcccccgtcatcgtctgacgactcagacgattcccaggggattgctgcagaggtgtggacatatatccgggtcgtcgagcgcgctgggctcgagggctcggatgagtcagaggaggggagcgatggtgacgacggcgacgagggcgacgacgacgacgggggcgacggtgatggcgatggcaacaaggatgacgacaagggtgacagctggggcggcagcggcgagggcggcagtggcagcgacaaggccagtggctag

SEQ ID NO: 21181 - DNA, 540 bp, Zea mays
  Peptide Sequence Number=SeqID_64556
atggagcaatcaggacctgggtacctccacaagtcgaagacaaccgatcaagccaaggatggaggcaagaagagcttcgaggtaccgagtgcactggacaaggtcaaggagaccaggaacccaaagccaggggtggagaagaagacttgcaaagtcaaggttgatcgagttaagagttatggtgacatccagatcctgttcctggacatagggaactttcaagtgtccaatggcggtgccaacagcggcgacctctggctcggtgatggagactccgcggcccggcacctagcgcagtggcgcggcgccccctgtctccaaacgccggagcacccagtggtgggcgcttgggcggatcgagtaagggaagcgatctgggattatatatcgcagattcccagcaggcggatccaaggtgatattcttgttgagagatttcggcgaacacaggagctagctgcgatacttttgtgtccatccgcaaggttggcgctgaacccgccaggtggggcccgcaaggaagtgaccaggttagagtga

SEQ ID NO: 21182 - DNA, 132 bp, Zea mays
  Peptide Sequence Number=SeqID_64557
atgacgaccgacaggccgcttgagctactccacatggatctattcggcccgttcgcttacataagcatcgacgagagaaaaatcacaaacccaagggaccctaaagggattcttgagatgagctcaaaatga

SEQ ID NO: 21183 - DNA, 435 bp, Zea mays
  Peptide Sequence Number=SeqID_64558
atgggcaggggtaggaggggcaggggttggcctcaccgcgccgacggcaaacgcaagcgcccccccaagtccccctcagaggacttcagcgactcagaatactcggaggaggcctcctccaagtatgatcgatcacccactcctgcttctctagtggcatcgtccgaggattcggacgactccatgggactgtccaccgtggcccgagcatactggcgctccatcgagcgcgccgggctcggtggatcggatgagttggaggaggtctcctcggaagaggtggactccttcgaggagtggagcggcggtgagggtgacggtgagggcgatggcagcggcggcgatgacgacggcaacaagggcgaaggcggcaagggcgatggcgacgggagcacggacgacgatgacgacagcaagggcgacggtggcagctag

SEQ ID NO: 21184 - DNA, 102 bp, Zea mays
  Peptide Sequence Number=SeqID_64559
atggcgtatgagataaaggcgagggcggcgaaggccttgagcgaagggtggcgtcttcgccttcgccccaacatttgccctccgagggaccagttcaattaa

SEQ ID NO: 21185 - DNA, 897 bp, Zea mays
  Peptide Sequence Number=SeqID_64560
atgcctgtggctgttggaccgctgttttgcttcgctgcgtatatcgggctgcttcagccccactctgatgatatgttccgagttgtggaccaactcttaaagttgaccgccacctgcatcgtcggcagcgtggcgagcgccaccggcgacgacgggcgatgtcggaccgccgcgtctgagcttcgccttgacgtcgtgaagctcttccacccttcctcgaccctagccgaggccgggacggccgcgtctgccaccggtccactccactgtgccgccattattgccggtgatgagctcggtcccgagctcctgcggccccgcaatcagtaccgctggatccgcaacgatgaggtgaagccgttggcggtgaccacgtcaccggagacctcaccgtcgcccgctatggctgacaggtggggctgctggccacggggacccacctatcagtcgcttggcatagatccgagtgcactgcactgggtgtacccagctttttccgatccatgtgtcaaagattcacaacaagccaatcaaaaagaccaaagttggattcaaaatgaagagctaaaggctgcccaagagcctccctggtctggcgcaccggactgtccggtggcgcaccggacagtgtccggtgcaccagggagccctgtgctgaactcctcagcctcgggtttttccaggagctgccgcgctaaaaatcaccggactgtccggtgtacaccggacagtgtccggtgcgccaaaggaggcgcggctccggaactcgccagcctcggatttctacgtaggctgctccgctataattcaccggactgtccggtgtgcaccggactatccggtgaaccacggagcaacgactatatccgcgccaacggctctctgccgcgcatttaa

SEQ ID NO: 21186 - DNA, 69 bp, Zea mays
  Peptide Sequence Number=SeqID_64561
atggggacaaatgggcacctcgacctcgacatgggagattccaagccggtcctaaggaatgccacctaa

SEQ ID NO: 21187 - DNA, 48 bp, Zea mays
  Peptide Sequence Number=SeqID_64562
atgaaccggctccaccgcgacaccaacgccgttgcgttagcttcgtaa

SEQ ID NO: 21188 - DNA, 1317 bp, Zea mays
  Peptide Sequence Number=SeqID_64563
atggagcttgacggagggacagctgttggaacagctgtgctcttgctgatgtctccctgctttcgtaagggagctgggagctgccgtcgtcatggtccagtgagacgccatcattgcctatctggcggagctggccagatgggacgccggtcttgtcccctgcgacccaagtcggctcagggcagggtgatgatgacgctccctgttgacgtggcggtctcgtgtcctaggtcgggcgtcgtggaggctcctccgaagccggggtcgagtccgtcctgcaagacagaggcagagtccgagccctgggtcgggcgaggcggagatcgtttggcagaggccgaggcggagtccgagccctgggtcgggcgaggcagagcccgagtccgagccctgggtcgggcggagcggagttcgccgtcttccggggccttagcccgagtccgagccctgggtcgggcggagttcgccgtcttccggggccttagcccgagtccgagccctgggtcgggcggagcggagttcgccgtcttcaggggccttagcccgagtccgagccctgggtcgggcggagcggagttcgccgtcttccggggccttagcccgagtccgagccctgggtcgggcgaggcggagttttctctggcgcttttggccaagcctggctacccgtcggtcttaccttttgcgttgaaggccccagggatttgggcggttggcgcggtcgggtgtcgtggaggctcctccgaagccggggtcgagtccgtcctgcaagacagaggcagagtccgagccctgggtcgggacgaggcggagatcgtcgtcttccggggccttagcccgagtccgagccctgggtcgggcggagcggagttcgccgtcttccggggctttagcccgagtccgagccctgggtcgggcggagcggagttcgccgtcttccggggccttagcccgagtccgagccctgggtcgggcggagcggagttcgccgtcttccggggccttagcccgagtccgagccctgggtcgggcggagcggagttcgccgtcttccggggccttagcccgagtccgagccctgggtcgggcggagcggagttcgccgtcttccggggccttagcccgagtccgagccctgggtcgggcgaggcggagttccctctggcgcttttggccaagcctggctacccgtcagtcttaccttttgcgttgaaggccccggggatttgggcggttggcgcgctttatgctgatgggggttaccagctgagaattaggcgtcttgagggtacccctaattatggtccccgacagtag

SEQ ID NO: 21189 - DNA, 69 bp, Zea mays
  Peptide Sequence Number=SeqID_64564
atggctcgtagaagatcccaaaagaacaagaagtccaaggagaacaaggagagtgataaaagcttttag

SEQ ID NO: 21190 - DNA, 186 bp, Zea mays
  Peptide Sequence Number=SeqID_64565
atgggccaaagttggccacgggccgacctccgactctacggccttctgcccgtccttgcctctcgagttttgggcaagggcgggggcctcccagcagcagcatccgccctgaggcccacccccgtcgagtggggttgttcgtacctgcggagacggaaccggagttccgtttgtaatggcacttga

SEQ ID NO: 21191 - DNA, 309 bp, Zea mays
  Peptide Sequence Number=SeqID_64566
atggaagcatgcgtgtggctctcacgagaccagggccgtctctcacacaccgaattgctcaccggagcaaaacttcgccggggacccgccctccaccgtgaaccggctccaccacgacaccaacgccgcagttttcgtggtggggaattaaccaccctatcgccggacgggtgtggctctggcgagtcaccaccgtggggaggcctcgcgccgctggtggggagggtttgccgtgggccgttgatctgggttcaacggtggggattagaaatgggcaccgctttggccgggtcaattcgggccgtttga

SEQ ID NO: 21192 - DNA, 402 bp, Zea mays
  Peptide Sequence Number=SeqID_64567
atggcaaacgccgccgagagatgtgctctgaaagcgagcgtggccgctaatggcgctcgtcgtgcggctacctctgcggcaaacgccgccgtggttgctggagacctatgtgctgcaacatctgtgggtaaccaatccactgtttccaccctagatgttctcataacagctacttgcgcggagactcgagctgaatcggcatggggtgaagctcgcctcgctgccttgctggccgaggaatccagggtttccaacttgcagctgacttcatatgtagctgaggacgtttgcatcacaattgttgctgagggcgtttgcatcacttactctcggttaactgacttcatatgtgttcatggatcagttctgtttactaaatttataagtgctgtaaccgtgtga

SEQ ID NO: 21193 - DNA, 579 bp, Zea mays
  Peptide Sequence Number=SeqID_64568
atgtgtgagtttttcaaaagaaaatgttttcataatgggtatgatgaagggttatcacccttgtcacctttgagcgggatgatcagggactccctggtttgggagggccttaaggtggtggctcagccggggttatggtggctggggagcaccggaaggacaaggaggggggaagttttgtcctggtttgggcatggaggtggccttgttcctttcggtataaccgttaagagaaggagatcgctgatcagaagtcagaaggaggttctctgccaaaccagctattgccggaatgaagatagtttccccaagttgttgagagcatgcacagttcgcctcggaatcaggagccagccagagtacgatggtcatgagttcatcgagcatggcatagagaaatgtgttgtgactgtatacattggatccagtccgcaccatgtggaatggagtgtcgctgctgcggggcgcagattcagagacacctaccaagtcgtcgctcgcaaggctttgagggccctgcgtcaaatctacgaggaagaggtggccgacaccctgctcaggttctttccgcccttttga

SEQ ID NO: 21194 - DNA, 1440 bp, Zea mays
  Peptide Sequence Number=SeqID_64569
atgaacgagatgcaacctaggaaaccgaggcctacctacgtgacgtttaccccgaatttcataaacaatgccgagtactccagttcatcgagcgctccagttcgtccgtctccttggtccaagtggtggccgcgaactcctactggatgctgcgtcctccccaccgccgccgctgaccaggagctgaggacctcggcctgtaggtcatggactctccacgagggaaattgtaatccaagtgaatatgttgattgggattcaatcgaagttgaagacaggtggaccgaggaaggaagacagaatgttactagtgaacaagcattgtatatccagctgggtttgcataatgaggatgtgtttgaatctgctcaaagggaagaagaatcagctcgtcatgttagatggagtaatagagactttttggatggtgaagcatcagctgccattccatgttctgattctgtggcgtcgccggctgcgtggcggaacaccgccgtgccgagcgccgccgcgcgcgtttccgttgcccctctcacgcaaccaccttaccagcgagctcctgagcttcgccttgacgcaccgcaccacccgctccactccgttcgccaagcgcatgagcttcgcctcgacgccgtgaagctcttccacccttccttgaccctagccgaggccgggacagccgcgtccgccgtcgaaccgcgccaccgtgccgccattgtcggcagtgagctcggtcctgagctcccgcggccccgcaatcagtaccgctgggtccgcaacgatgtggtgaagccattggtgaaagatacaccagtcgagattctcgaggaccaggaggaagggctccagtcagtggtgcccgaggacgtggaactggtggaggagctgcctgagtgtgttgatcaccacccgagctcgttcgaacgaggcaagccccggagcattttccctccctacgatggacagatgtactatggctactgtgccaactgcctctacccggctatgggtgattatttgaccatgggcgcgcggatactttactctctaggatatccggaggggaaggagcctcgctactattgggataaggagccactctgtgatgggatgctagtctacgtgacagctgtggtccgtgctaagggtgatgaccctaattggggcggctggcacttcgagagtaagggtcggacacccaaggagggagctgacagggccgcatacatggtattgcaagagatcatggagaggtttctaggagagctcgctattgcgatcgccagggtctttcctcggggtgacccttacacctcggtgtggaatcagccaaagggaggtgctctggagggtggcagcgttgagcatcagtacagtgataacgctgcaatgagcgccttgtttgccatgatcaaaggcatacaagggtgtggagagtag

SEQ ID NO: 21195 - DNA, 944 bp, Zea mays
  Peptide Sequence Number=SeqID_64570
cgttgtccagttggatgaacgcgaagtgacctggtttgggcgaaaacgatgctttaaaaagcatgcacagcacccgtgtcggtttttggctctgtgttcgcggtcaccgcacgcgtcacgtcaccgaccgtcgtgcgtgggcgccgctgtgcccgcctgcgtgctgctcctgcctcgcttctccgatgcagctgttagacacgcgatgcgcgtcgcgacgttgcgggcgttggagtcatcgcgtcgggtccgctgttcctcccgcgccacgacgttgtggccgctgtggaactccgcttgctgtttatggcgctgcggccttgtcgtgcgctggggagctcaaccgcgcagtcggacactgcacgagtgccgcgcagctgtccgggccgcgttgcgacaagccaggcgaccggagtcagcctgccagtctcctcaccgcagtgggcgccggacccacgccatcccttttcttcagataggaagcacttcgagccaattcatcccgtctatcgctccgctgggaagtcaaccacccgaccaacctcatcccacctcgactggagcacagttgagctccaattttggcgtttggccgttgcggacgccggagtggctgttatcggtcgcgtgggctataacttccccgattactcaattaactttaccatcaacctcacttagacctcctctgcaccctgctcacacccaccgaaccgctaccgtcctcccttggccgctgacgcaaccgcgccaccgcggagcgccgccgagccgttcaggtcgcacgtggctggccctcctccagcgtcctctccttcaaccgtcttctcgggtagcccagttggccggcataatcgtccagtgccgcccgttcgccgcgccgtcgagcgcgcggtcgttgggggcttcgccacgggaattcggatccatccagggggctgagg

SEQ ID NO: 21196 - DNA, 231 bp, Zea mays
  Peptide Sequence Number=SeqID_64571
atgccattcgtgaaccagggggggaggccgaggcaagatctacacaccagtggttatatggtgctgggtgagggaggccctgaactgggagggtatcccggcgtcttttcaagacttaaaatgtgcgattgggtcgtgggctatgtgaaacaatggcagaagctgcagatatcagcggtggagctccaggaagatttggccaggttgatggagaggatcaaagagttctag

SEQ ID NO: 21197 - DNA, 123 bp, Zea mays
  Peptide Sequence Number=SeqID_64572
atggtgatggccccctgggtgaagtaccttagccaagaatacgaccccatgtcaacgtgggctgccagcacctaccgctccccctattgcccatctttcaggttaaacaaggaatacaggtaa

SEQ ID NO: 21198 - DNA, 387 bp, Zea mays
  Peptide Sequence Number=SeqID_64573
atggaggatatcttccgggccaccaccagctcgtccatcaaccaccacgccgtcttcgtgttcgagttcgagaacgtgcagatggagctcaagcagctggcggaggcggaggacgacggcgcaggcgcagcagggcagacggggaaggtcgaagaggaggtgcagagtaacgctgagggcgggagcaatcaggagggccgaccaggcaagatgggtcaaatcatggggtgggcctccaaatcgctgaagccgcaaatccttcaggcaagatgggaagggaaatccgttttgggccactgggcccttatgcatgtgcaccccccatccgctgggctccgccttctgtccaaaccttggagatccagccttggcccttggagtagataa

SEQ ID NO: 21199 - DNA, 333 bp, Zea mays
  Peptide Sequence Number=SeqID_64574
atggggggaaggccgccgcggttgaccttcacgctccgggccgcccagctccaaccacatgcacgggaggtgtcgccggtgcacgccgcccacgtacgtggattttccgggtggaatagttggtcggagtacgggagatttctcaccggagctgcttcatcgccgccgagtcgccctactcgtggtctgcaccgccacggccttaatcaccaaatcgaggttaggggctcgaatgtgttgggcagggaatcgcggccatggcgccgccgtcggcacacagtgccaccacgtgctggtcgtcggagggcagtaaaggaggaggagatagcgtga

SEQ ID NO: 21200 - DNA, 519 bp, Zea mays
  Peptide Sequence Number=SeqID_64575
atgtccggtggcgcactggactgtccggtggcgcaccggacagtgtccggtgcaccaagggacctcgagcagaactcctcagcctcgggaattttccaggagccggcgcgctataattcatcggactgtccggtgtacaccggacagtgtccggtgctccaaaaggacgcggctccggaacttggcagcctcggaaatttgcagcggctgctccgctataattcaccggacatgtccggtgtacaccggactgtccggtgcgccagcggagcaacggctacctcgcgccaacggtcaactctgacagcgtacagtgcgaaacagtacacacggcagaagtcagagcagaaggacagaggggcaccggactgtctggtgccacatgaggacaaagcctccaacggtcgaccagctccaaccccaacggataggatgacgtggctggcgcaccggacactgtccgagagggaaagggttgaaaaagacccgtccttaagtggactcctcaacggggactag

SEQ ID NO: 21201 - DNA, 369 bp, Zea mays
  Peptide Sequence Number=SeqID_64576
atggtcgtgatgggttcaacatctgaaaagatgtacctctgtcagatgccatcaagaactcatgcttatgacagggcgggaacttcccgcggcggggaggaaactccaaacccgccacctgtacctcctaccttggctgaggctatcgttgccttagtcaatgctaccattgacaacacgtgtttcctgcgtgaattggcgggaaatcaatttcagcaacatggaggtagaggtcaacctcaaggaccacgagacaccacatatctagagttctctaaaacccgtccaccactctttgttaaagctgaagaaccattggaagcagatgaatgggtatgggttatggagcaaaagttcaggctgatctga

SEQ ID NO: 21202 - DNA, 729 bp, Zea mays
  Peptide Sequence Number=SeqID_64577
atggcgcctcctgttgacgtggtcggtccgtgccctgggttgggcgacgtggaggctcctccgaggtcgaggtcgagtctgtcttccgaggccgaggtcgagtccaagcccccgggtcgggcgaggcggagactgtcggctaaggccagggctgagtccaagccctggggtcgggcgaagcggaattcgtcgtcttccggggctgagcccgagtccgagccctggggtcgggcgaagcggagttcgtcgtcttccggggctgagcccgagtccaagccctggggtcgggcgaagcagagttcgtcgtcttccggggctgagcccgagtccgagccctggggtcgggcgaagaggagtttcctatggtgtctgaggccgggcctggctgctgtcagcctcactctgtcgagtggcacagcagtcggagcggcgcaggcggcgctgtcctcttgtcagaccggtcagtggagaggcgaagccacctttgcattaaatgcccctgcgatttggtcggttggtgtggcgatttggccaaggttgcttcttggtgaagactgggcctcgggcgagccgaaactttgtgctgatgggggttaccagctgagaattaggagtcttgagggtgtatgcaagtctaggtttggtgaagagaagaccccagagatgatgcaagatctccactggaatgctcaggcaatgagcatcatcaaaggaagtctaagtgtataa

SEQ ID NO: 21203 - DNA, 312 bp, Zea mays
  Peptide Sequence Number=SeqID_64578
atggaggcccaggcccacgtgtcatgcaaccagcacgccggttgctacgtgcgagcaactgcaccgccactcgcaccactaccacgcctcctcgactgcggaaccagtaccgcgactcgaggcaaccccgcgtacgactcagcagtgccagccagaggctcgggggctgctctcgcgaacccggctccggccagaccgttgacagcgtcaacataccagcccgagaacttgggacccgaccgtgcacccgggctacggccagctcgcatgagggaactaccagaccagcctaagcattgcgcgaggcattaa

SEQ ID NO: 21204 - DNA, 2169 bp, Zea mays
  Peptide Sequence Number=SeqID_64579
atgcaggtgcggagtcctgccttcgcattgaatttgcatggccgcgatcccgccgcattcgtgcgtgaggtggaggatagggcgatgcggattgttggtctctatgtgccaaggacggaggcccagcgtagttgggatatacgcggatccaacgatcgcttgaatagggtcttcgagttgaaccgtctgccgtatggcggttatctcgggcaagacgttgtcgaccgccgcgagaaaaaaccggcggcggagactgaagacgactccgcgccggcggccgccccatcctccaagaagaggaagctaggtactgcgaagggaggacttggggtctccgatagttttgctatggagttaatggggacatgcgcgacccccgagggaaggatgtcttcgcccgagctccgggagtcttcggcgcggatgctgaaggttaccgggggttggtggcctaagaacgttcctatcccccgcgcggccgacgaagacttttttacatctcgcatggttcgtgatatgagagtgtttccttatggacggaatattgctgctgttgtgtcggcagtgatggacaaggatcgtcaagaggctgcggagaagcgtcgggcagtcatcaggctgcccgaggctaggccgaagagagcgcgggggactgcgaagtctgccgcccccggcggtagccagtcgacgctggtggcgaagtcagccgcccctgggtccagcaaggtgccagaggtcgcgaaggcagccggagccggtggaaccaagtccgtctcggccggatccgcgaaggcccaagaattggcttcaccggcgaggcgcgttgccgactttgccaccgatattagcgtggacgattatctcgttggatcgggcgaggggcaacttgttgttgttccgcctgcggtggcgaccgcggtgcctgtggcgaagggaagcgctctcagcgctggtggtgagattccggcgctcactgccgtgaaggacgaggcgggcactgtgtcccgccggctgaaggaggcgtcgcagtggctaagtcaggcggctgacttcgctgaccgcgtggcgttgggggcccctacggctgtggtgtctgccgaagtcgagaggcttcgggcgcagcatgctgacgtcgtatgggaaaagtcggtcgccgatagcaagtgccgcaaattggcggagaaggtgggcgtgctggagggcgagaggactgaactccggcgccagctggcggaggagaggagggaggcaaatcaggccctcgccaaggcgcggtctgcacaggcggaggccagtttggcacgggtggagggtagcctcgccaggcagcgcgccgagaaatgggaggagcggttcaacgctctgcaggcccgtatggagagggccgaggcgtctacgcgctcggaagttgagcggacgcgtaaacagcttatggactcataccacaagctgggcgcgcggaccgctgacttcgaggtgcccgaccgagagtcgggccttcgctgcctcgagtggctgcaagaggagttgcaggcgctcccgaccattatggagggttttatgtcttatgcctccctcgtcagctgtgaaggggcgatgaacgcgctgtcccgcgaagggtgccgccactatgaggttttcgaccgatctgatgaagattttgagcgcgagatctacaaggtcgaggacccagtggtgaaggagtccacgggggccctctttgaccggatgtgggcccctcacggtcgggaggtggttagggagcggtccgaccgggcgaggggccaggcggcgcgtgccgagatcgtggaggactttggatctttgaacaacgcacgacccgaagccgagatgaacccggtggaagccgaggctgaggatcaagattttgggcctgcgcacgcaaccgctactgctaattttgtggcagcttcgacggtggatgctgggaatgaattggatgagtctgcttctaagttttctgattttggtgactctgggagttcgattgagtggacggaagagtcgtcggatgaggacttggattactttgcggccttggatgtggctgcagcagaggcttcgccgcatgctgcgggtgctcaagttgtgcctggtctgagtgcttgggcgttaggcggcgaagggcggttgcgaagcgtagagtga

SEQ ID NO: 21205 - DNA, 462 bp, Zea mays
  Peptide Sequence Number=SeqID_64580
atgggcgagggcctcctggcagcggcatctagcctgaggtcggcgttgccgctgcttggtccctcggagcagaaggcgtcgtcgtcgccgctgctggagcaggtgacggcgcgccattcgtcggccttcagttgctccgtaggccttccccctcggagtggggtcgttcgtgcctgcggagggggaaccggagttccgttcgtaatggcacttcgaatgccagtgttttttgttcattgcggctgtcggggcctgaacatggatgtttgtgtgagcgagagttgctttttcgcggaagggacgagtgaggatccgctttccgaagtagtcaagaagcacgaaagaaatcttgctaaaaagagatccttttttgaggaaaaattcgacgcagagggggtctccccccttttagcccccgagggagggtcgggctttgccgaggctaggccgacccttccttga

SEQ ID NO: 21206 - DNA, 354 bp, Zea mays
  Peptide Sequence Number=SeqID_64581
atggccgtcatggacccctctattatcttcatggtcatggtcatcgcaaggtccaactcacaccactgcaggaccagtgatcatggcaacgagcatcgcaccatctcgtcctcctcctcgtcttctacttcctcttgttctttcctcagggtcagctgcgccccctgctgctcacacattaccactactcatcctagatgtgtcgtcacatcgccctcattcgctaatgctaccaccgctaccttcctcgaggatgggatgaagacaacttctcttgcttccagacaaatagggacgccgcaacggcaagagcccccatggtcggcgaataggccgccaccgtcacaaaggtag

SEQ ID NO: 21207 - DNA, 432 bp, Zea mays
  Peptide Sequence Number=SeqID_64582
atggggcccgccagccaggcggctccttacccaaacgcctcgacgagaaaaagggggcaacatgcccccatgaaccgcctcgcgcccaacctccctctagcgccccactccctcacgcccttgccgtcgtctggggtcgtgctcgcccagaactcccatcggcaccgtcgttcgtcgtcgagcccagagctcgcggtgcgacccccttcgtcccccttcctggcccagcatggcgcggccagggcgctcgcggcctggcgtgcggccgcggcatggcccgtcgttcatggccagcgtggccggcttggcctgcggcgcgtcggcgcgtggctcacagcccggcctctccccccggtgcggcttggacccggcgtgatccctgcgcgccctatccccgtgcacgcagccccaacgcgcgtcgtaccgttttaa

SEQ ID NO: 21208 - DNA, 519 bp, Zea mays
  Peptide Sequence Number=SeqID_64583
atgcgctcgacaccctgctacgtcgggcactcgaccagcgtacttggtctatcgagtatcgttgtgtggtcttccagcacagtcgcagggtctactcggaccgctgggaggcgacctgctttggtgcgccgtccggagaacagtctccggggtgcgaagatctgctcagagcactattccatctctgagcgggactcagctgaggcggccatgcaagatgctgcacggcgtgcgctttcgcactactgctcagtgctcggcgaggtagccgacggtctcaacctgaacacagtcaacctagccgccgtgctaaacacggagctggaccatgcgctagacgaattgagtagggctcgtgctgagatcgcccagctgcgggctgagcgcgtggagcatcgtcacctggaggatggctcccccgctctcgttgggactcagcacccataccgctcacctcggtgtggacaccagtcttatggcaaccccgactgcaagaccaggataaatttagaaccatag

SEQ ID NO: 21209 - DNA, 417 bp, Zea mays
  Peptide Sequence Number=SeqID_64584
atgaggacgattgctgcttccaggctaaggcccactgatcttacgcttgcgatcctccatctctttgcgcttcctctctgtcatgattgctctgtcaatcaggtgctggaatgtcgggaaggtgatggtgtcggggttggcgtgagtggcgagataagactctcaccaagactgagctgctcctctcaacagacggggaccatacagaaccttctccctgtcatcacattgagcggtatgcaactcccgctccacagtacgcagccagtcttcatcatccatgggatcagaagacacgcttgtccctgggcatctgaggcatctgaggctgaggtggtggctgctgctactgctgttgctgctgaatggcggccagagtctgaccgatggcttgaactgcctgagtctacatcatga

SEQ ID NO: 21210 - DNA, 276 bp, Zea mays
  Peptide Sequence Number=SeqID_64585
atgcacggcgacggtagcgacgcgaatcgctccctcgcggcggtgtctggcggcgggatggtggagagtttggctcggtgcatgcgcgagggagtagcaggggagaacgggtctcgggaaaacttttatgggtgggcgatcgcgtatggagaggatcccgggacgcggccgccatgcgcggagttggttgacacgggtggtggacggagtctgagcgcgtggaaggagctcctggccagtgggcccgaacacccagtgacgcgcgataggaaatag

SEQ ID NO: 21211 - DNA, 237 bp, Zea mays
  Peptide Sequence Number=SeqID_64586
atggcgccccctttcttccacctccggcagcagggatcggctcccatggcgccctctctaagctcctccatggccatggcgctccctgccacgcccatagcccagcagcaagctcgcctctggtactgcgcgcgtgagggagatccctctatggctgcgtccaaggtagacggccagccaaactccctcctgcgcgacctcggccagagcgccgctcgctggcctctctgttcgtga

SEQ ID NO: 21212 - DNA, 195 bp, Zea mays
  Peptide Sequence Number=SeqID_64587
atgcagtggatcgacgacctgaagaatgatggacttatccagtggatgctcgccaagcgagtgccccccagcaaacactatctaagtgttaaattaaagactcagctagtgcttttggcaaaccaaacccctcagccaaacagctgcatgtctagaggtagaggagtagactcctcacaccgggtacctcattga

SEQ ID NO: 21213 - DNA, 303 bp, Zea mays
  Peptide Sequence Number=SeqID_64588
atggctgaggtgaaggtcatgcgggctcgtgctgatggaccaggagcggtgaagggtgagtgttgggtcatgactgacgaatcaaagcagccaggtgaccaaccatggtggctgacacctaggacacgcacttgtgcgaggacatggtggagtggatcgtgttgccggcgtggtcaaggactagcaggacacacatctgatcgtggaggacgtgcacgaggtgcggtgctcatggcagagggaaccggtggcggcacgcggcgtgatcgcggagggtgcgtcaaggcgaagcaatcagtgtga

SEQ ID NO: 21214 - DNA, 2241 bp, Zea mays
  Peptide Sequence Number=SeqID_64589
atgatagaagttgtgcgtttaatgcttggctcactcttcctctcacaaactgtcatgaagtacgtgacagtaaattctgggggcattgtttttattgcattattcaaagctattgaaaatgttgatcttccgtccaaggaaacagctgcagtaattaaaatagcaccttcaaggatggccacacagtctgaacgctttgggtacgaactcgctaaatggcttggagtgagaactcctcaaggtagagtcattcatagctcctcagatgaatggcaacaagtcaaggatgcagttgaaaatgctcgaaatgcatcgatagcttctggtgatgaacttgaggagatgatttgcgccgaggttttagaagcccttgaattgagtcgttgcctatttctgatgaattatgtacatggctccgctctgctagagaatgtaatgcccttcgagtcacggcaagctgctgaaaaaactgctgaagcattaggtagggtcttaatcttggacctcgtattgaggaatgaggatagactgcgatgccgtccccttggctggcgtggaaattatgcaaatctacttgttgccaacagggaagcttatgccaaccttgactcactagatgatgtttatgattctgctatcattcgatacaagccagagatcattagaagccctcagaaacagaagcagagaagagctgtttcaattagtggcagtattggctcagatgtctctgacctcacattggaggactcttatgcttctagtggacatgtgttttctagctttaatattgtagccattgattcaggtgtaccacgcaggccaccagccagtaagcgggcaaaagatcaggagagctaccccaaactagtggagttaacattgaacaacttcgactattcttccaaacttctgtttgaggtgtccttcggaaaacttggcaccccaggacatgaagaatttgatgtaccatcagactacagttataattctcctctctctgagagtgatatggtagcaacagtgcattcattccgaggaggttttcgtagtgctctgagagaccttcagcgattccacatttttctcatcacactgtatcagaagctggatggtctattaaaaattttcttcaaccttatgtataaatgttccaatgaatatgctagggaggatgctggtacttcggattcaccattgtgttcagtggaaccacaaggagattcaaatgatactgatgttccaaggcatctgccttttatcaccagacatttcaaaggaaatggtgattcctcccgtggtcttcggttgacaatgaagctgcgagattttaacaagtatgccaagatagacagtgaattaagcaaagagatagaacaatggaatgacatgctgaggactgaagtagtaaagttgtgtcaagacaacaattttcaaacaggtttttttgaaggcactgataatagcactgttgttgatgcttacgagttgaaggttcgacttgagcacattctcgagaggatatctttgatctctgatgctgcaagtactgagcgtccatcacagatcacagattatctgtatattggtggtgctcttgctgctcggtcaacacacacacttaaacaccttggcatcacccatatattgtgcttgtgtgcaaatgaaattggacagtcagaatcgcagaagcctgacctttttgagtataggaatttctcgataaacgatgatgacaatgcagacattggtgatctctttcaagatggttctgatttcatcagttatgtggatcacttgcgtggcaaagtacttgtgcattgctttgagggaaaaagtcgaagtgcgactgttgttcttgcctacctgatgctgaggaaaaactgtactctcctggaagcatggaacatgctgaagaaggtgcaccgacgcgcgcatcccaatgatgggtttgctaagatcttgctggatcttgacaagaaactgcacgagaaaatctccatggaatggcaacacaagaggcctgcaatgaaagtgtgtcctatctgtggcaagaatgctggtctcagcagcagttcactcaagctccacttgcagaaggcacacaagaagatatcctctgggagcgtagacagtgcaatgactctggagatacaaaaagcattagaggcaatcaaagctggctggggcggcagtgacagcccagtgcataaatcacaatcacacatagaaggattttga

SEQ ID NO: 21215 - DNA, 1083 bp, Zea mays
  Peptide Sequence Number=SeqID_64590
atgtctttcgtgctttctgactacttcgaaaagtggatcctgaaaacgatggagtacacaaggcacacgctacaagacaatctgatcctgcaggctcgggtcttgacgctggaagggggcagcggcaccctcggcattgacgacaacttcggcgaggttcgacctagcctcggacggcgacgcggtccgaagacctccactccgaaggacgacgtcatcaccacgcccgggccatcgccgccagggtcttctccgggaatccggcccgagcaggcggctcggccggtcgcctcaggggcctcggccaaccatcttccatgggcgccagcccgacccgaggcctcggctgccaactccgcctctgttcatgctgatatcgctacccctggcctcggctcgtcgaagagcggccaagggcagcgcaggcctcaggatgggcgctgctgcaatctttccctcgcccacaccgacgctcgaggggcgaggacaagcgcaaagagccggaggcctgaagcgcggatggtggcggtgatcccgtcggcgacggggacttctcgaaccgccgccgcctcggcaccaacgcaggggccatcagccctctggcagatccccactcaaatcctcccggacgagtggggcatcggcctctgcgtgaaggcgccatcccgccgccctccggcaggaggggccgccgggagccaagccgacgagcctgacacgctagaggtgacgacgcccgccgtcgaccagccccgcgttgtcgaagtccgggccacccgcagggccagtgagcgccctctccctcgaacgctgcgggagagggtgacccacgaacccgcgcgggaggtagagcgccggctcagcccggcccccaccccagcgaggatgatgaacatccttgaagctgagggtgggaccaagatcgcagcccagctttgcttctccccacccaggaactggtggtcaccatcttgggtgaccaccggcgggggggtacagccgggctggcagatgaaaatccttgaagccgagcgatggctgaaaggtaccaactcccacggagttgcgttcctccagcgatga

SEQ ID NO: 21216 - DNA, 342 bp, Zea mays
  Peptide Sequence Number=SeqID_64591
atggttgcccctagtggtgtcgcccatggggacggaaacgccattaacaaagatgatatgacgaaatctggcgttgtccctggagatgggcacgtcggcgtccaggatgtggtgacaaaattggcaggcgatgttgtccatgaagatggggatgctggttgccaggatgtcatgacgaaggtggcatgcggcgcagcccatggagatggagacgccagttgccaggacagcgtgacaaaggtgacatgcaacgcagtccatggagatggggacgtcggttgccaggacgatgccacgaaattagcagtagaagccatgggatcggatcgaaacccaagctag

SEQ ID NO: 21217 - DNA, 408 bp, Zea mays
  Peptide Sequence Number=SeqID_64592
atgctggtagactacacaacggtactcgatagaccaggtgtgtcggtcgaaggcccgacgcaacagggtatcgagagcgttgtggaagtgacacccgcgagcggcgtcacgagtgatgggtctagcgatccatccctccggctccggctcctccaagcgctccgtgccgtggctcaaactgccactgacgtcgtcgtcgtctccgtctccgggaaggtggcctctcagactccacctcccactgaggcgagggggaagagtcctgctgctcctgctcctgctcctggcgtcagtgctcctgctcctcgtgcaggcgatgatgcagtctctctaggtgactggaatgacctgacaccgtgcgacgcaggggacgctccgccagtcgagaaggcaaaaaggggatcatag

SEQ ID NO: 21218 - DNA, 372 bp, Zea mays
  Peptide Sequence Number=SeqID_64593
atggagagggcacaccgaagggtgtcccgagtagctgacggcaaggcgaagctcaccgtggcactggacggggcacgggcgcaactgcggccatggaataggcggtggacgtcggcagagcgagagagagggcgagtgggctggacagggggcacaaatgagagaggggaggggggcgagcagggcacggggctcaaaaggggcgcgaaggctcggacgtggccggagaacgcgcggtcgtgggcgtatccacagcggggagatcgtgggcgagaggttagagacgagctgacaggtggggacggcgggacagagagagggagcgggtgcatgcgagagaaacagtgccgacaggactggcccacgggatag

SEQ ID NO: 21219 - DNA, 405 bp, Zea mays
  Peptide Sequence Number=SeqID_64594
atgaacagggacccggccgaggtcggcccagggagcacctgcgcgctggggaagaaggccccctactgcagccgctcgccaagaggagtagggagggcgctcgaccattgggggagtttggcttctcgagcttcgccggcaccatgggaggagaggagccggcggccaggaaggaagcgctctgcgcacgtacaggaaaaacagagggaagagacgtgggggaaaatggagaagggcactggctgcttgctgctggaggtacaagaaaaggggcgctgtgcagggaggaatgagggcgccgctggcttgaggaagaagaagggcttgggcgccatccatgggagcgactgctccctgcttgcagccgtgtgcgcggtgaacagaggagaagagagctgtgcttga

SEQ ID NO: 21220 - DNA, 426 bp, Zea mays
  Peptide Sequence Number=SeqID_64595
atgaccagcagagacagcgcgtcagctggcaaatgggcccaatcggtcagcggcgttggcgaagttggacgcgggatgcacacggtgcggctggcaatgtgccccctcgatgtcggcgaacccagtcattctagtgcgcgcacgacagatgactggtggggcccaggtgtcggcaccacagtgcgggagcaagagctgggctgcgcgcgtgtccacgacgacgacccgcccaaggtcgaggtctctcatgtcgtcgactacagaaagatggagaaggagaactacgcggatgggttcaagcaggcgctcttggtccacacttctgtcaatggctacctcctcgtgtcctcctcctttggctggcacgtcatcaacccgacgacacaccaatgggcctccatcgcggaccttagctctgaaacatga

SEQ ID NO: 21221 - DNA, 1671 bp, Zea mays
  Peptide Sequence Number=SeqID_64596
atgacttctccggcgctagactccctcgcgcgggcacgtgccggtagggggcaagacaaccatcaccagccaccaacgtccgatctaaagcagaagcccgagttgccaccgactgctcgtgaggtcgcccctcctcccgtagccgacccccaaaatattgctttcagaggaccctgtcgagcccaaggtcctgagccacgaggagatgttgctgctgcccatggggccctaggagcccttagtcgtgggagcggtcctacgacggtggcttcgacaaccctgggaaggcatcggaagagagcacacatatatgtagcagttgccactgccacatgcgaggagaagaagcaagaaggcgctcaggtgcggcggcgatgcttaggtgcacgaaaggatacaatttggggcaggctctgggcgggtggcgtcgccggcaagctcaagaaggtcgccacgagtgatgtcttctttgttcgtgttggtggaccaggtgagcaaggcaacaagggagaagtggcatgctatatcagattaagacacgtgtggtggagaagggctgctggccttggctttgtgggcaacacactagctgaaggtgactatctatttgttccttcgaaatgtaagggtggcattcaaagagttcatattataaaaggatgtgtagatggatcacttctattagaattatttacaggagatggagaaggaacaatgatcgctagcaataaaaacatttggaaatttagcatctacaatatgtcatgggaattccctaattgtacttttcttatggatcagaccctcactaagcttcgctttacaaggaatgattttactgaggacgataaagcgacgttcaataaagtgcttcgggaagatggcttttatacaattattaggttgccatctaatgcgttggacactacaaagaaacctcatgttgtttcttcaattaaagttgtgaacaaaatattttcggagaatgcatttgatgttgttatgcactttgttactgttgcttatgttggtgtcatggaagctcggtgcatgactaaagcaaggaggcttggtgttcctaccccagtactttatgatgtggatccagttctgcatactttgacctttgagcatgtggatggcttgtctgtcaatgatatacttcttaggtttggttcaaatggggtcaatgaggaacgcctgaatgatattgccacacagataggaaatgccatggcaaactacatgatggaggccttgttcatgcaaacttatatgggtaacaacactgatcttgatgatgaaccagatggagaaaatccttgcggcgtacagaaaggcttcgaagcaatggtgctctacccggaacaagttggctcaagccctgcctctacatggacgccggcctcacttccgcggtcaccgcgctccagacctgcaccgatgtcgcgcacccgcgcacgtgctccagcagttttgcctcgcctggtgcggcatgctcgtccaggatgcccgcgccgttgctccgtcaagggcctcggcttcgacctcttcatcattaggggtggaaacagtgctttcaatgcatgctggcgatgtgatcgatattatccatgcttgataaatgatgacaaggttgatagccatgatatatggtcaatattgtattga

SEQ ID NO: 21222 - DNA, 342 bp, Zea mays
  Peptide Sequence Number=SeqID_64597
atggcgagctcgtcagtgctcgccgtcccctccatccctctccctcttccgagcgcctataaaaggacccgcccgagccctgttccctccacaccagctccggtcatctcctccgcttcccccgagctaatcgagctagcaccgccgcactcccccgtcgctccggtgagccccgctcttccctcccaagtgagttttggtcaaattagactagtgcttgagctctcccacatgatcacggtcacgaggcacacctccccaccccctattgcacccaactgcggcaccggcgacctcgccaccgtggacacccgccaccgtgccgcggaccggccgccatag

SEQ ID NO: 21223 - DNA, 885 bp, Zea mays
  Peptide Sequence Number=SeqID_64598
atggttcgtgccgtgggcacgaggaagagagagtcgggcgattttctgcatgttcgggatgctttgaggggcgtaataccctacttcatggggtggcttcgcaccgcgccgcgcctccgcctcttcttgaccgccgcgagctcgccgttgtcatctcacgcaacagtaacacaccgcggcagcgatgctagagcgaggaagaagaggacgttccaaacggcgatcccagcaaagaggagtcatgagacgacggaagaggatgcggccgggtttgacggcaccacggacgaagacgaaggcggcgtcgaggcgagctccgacgacaggaacgagctacgagcagggcggcgtcggtccacagagaccgacgttgctgacgagcagcaaccacgaagttcaacttcacggcgtaatggcggagcacatggtcacggtgaaccggaccggcgggccctgaacgcggccatccccccgccggggagcccctgcggtgctgcacagcgcgatcgcgtacgcgtcttaaaatttctcgtcgatgtggtgctctccgtgctcgacagcagcgtcccgtcatcgacggacggcgtcgcagacctcatcgagagcttcagacgcaaggggctctccgccgacaacatggtcaccctctccgacgcgcgcaccatcggtcgctcccgctgctccttcagcagacagttggcgcgaacagacccgtctctcgacaccgcctatgccgagcacctcaggacgcgctgcctgtggcccaggatcgtccacttcaacgccgcagttgacaaggcgtggcaggtcaagttcgtcgaggccatggttaagatgtgtgaggtccaggtgcttcgtcgtcaaggacccacacttattaattga

SEQ ID NO: 21224 - DNA, 1149 bp, Zea mays
  Peptide Sequence Number=SeqID_64599
atgaaccctcacagtcgttgttacgtccccgccgtcgtacgggcaacattccaagatccagcgctaccactaccacccgccggctgcaatattccaagacctgtctccgactacggcaacgttaacccattttacgccgacaccggttattcccttggcatggaggttccagcaccgtgggaccggtggtactgctaccgcggcagccgccacttcgtccagcggaccgccgaggagcccgtgccggtgatgtccgctgctccggtctgcgacggcggcagcacccgtgacgacgaaaaaaactccacgagggttcctactactaagtacggtccctatcacggttacgacaaagagatcgaagacaccctccggacccaggagcgcgaagccaagccgtccccggactacctcgagacgacgcagaggggtcggatgagccaggacgcgcgcgccgacctcgtcagctggatgaaagcgttcacccggcactacaacgacgacctcgcccccggcacgctgcaccgcgccgtctactacgccgaccggttcctctcggtgcggtccgtggaggacgtcgccatgcaccggctctacctcctgggcgccgcggccgtctacgtcgcggccaagtacgaggaccagggaaccgtccgcaagctgaacgccgagaaggtcgctagatactacggccaccgcagcggcggcttcgcgtccaccaagcagcaggtgctcgacatggagcgcgcgctgctcgtggcgctcgactaccgcctcggccgccccacggcgtacacgttcgtgcagcacttcacccgccattatggccaagcggaggtggagcaggacctccgctccgcggcgcatgacttcgcggacatgtcgcttctccactacagctgcctccagcacaacccgtccgccgtggctgcggcggccatgttcctggcgaggctgacgctgaagccgtggtacgggcagataacgcgttccaacagagagctcagggagctgacggggtacgaaccccaaaaactgaagcgctgcgtcgaagcaatacactctctgattcctcaatatggtaatggctcctacagcgacatcgacctctttcccatgttttatgcggttgcggcggaccctaggtag

SEQ ID NO: 21225 - DNA, 651 bp, Zea mays
  Peptide Sequence Number=SeqID_64600
atggggatccgcaagaagccggaatatgtctggaaagaataccgaaaaaacagagttgagaagtgctctatggcggtctacgtaggaaaaaagaggtctttgaaaccccccttcgttacttcccacctagcaacaaaaatacccccacctggaggaagacttcaggcccagtcagggagagatcctaccaaggatgaccccaccatcgtctacatggtcggatatctccacactctcgataaccactacgacgacctttcctcccactgcacccacctaaactcccgggtggaaagcttagagcagcaggtcaaggaacttaaaaaggagaaggcgtccctccaagagtgtctcgatatagcagaaggcgaggaggccaacactcgtgaagcctaccgaaccctgaagatggattacgataagaagctaaagaagctcacgcccacgaagaaaatccaaaagaagaccaagagccaaggatgtcagactgagcggaagaagaaagcccctctagcaccacctcccaccaggatagagaacttgtccgacgtcgaggatatgtccctagctagccttgatgaccttctcaaggaatttggggtcactttagaaaaggagttcggaagtacctcagagagcgctcgcgtgtag

SEQ ID NO: 21226 - DNA, 675 bp, Zea mays
  Peptide Sequence Number=SeqID_64601
atgccgtctcccctctccctctctggcgtgtggtcccacgcccacggcgtccgccgcgccgtcccccgctcctcgtgggccaactgggcccatttggccgcgacgccgcacgcccgcgcccgaccaggccgaaatcccccccggcccgccaaagtcagctctgtctgggtgcaccggactgtccggtggtgcaccggacagtgtccggtgtgccaggctggctcaagcgaacttgctgctctcgggaaaagattgacggcgtacgactataattcaccggactgtccggtgagccaacggtcgaccgggccaatggtcggccgcgcgatccgcgcgagacacgtggccgagccaacggtcggaagggggcaccggactgtgcagtgtgcaccggacagtgtccggtgtgccaacggctcccaggcgccaacgatcggcttcgccaaagaaggaaagaaatccgcaccggacagtccgatgcgccaagcgacagaagacaagaattgtcttcctggattgctctcaacggctcctaggtgccttggggctataaaagggacccctaggcgcatggaggagtacaccaagcattccttgagcattgttgatcactcacacttcattcttgcgcacttgttcgacattcttagtgatttgagctccgttctagtgtga

SEQ ID NO: 21227 - DNA, 510 bp, Zea mays
  Peptide Sequence Number=SeqID_64602
atgaacgaactcactggcattcgaagtgccattgcaaacggaactccggttccccctccgcaggtacgaacaaccccactccgagggggaaggcctgcggagcgacggaaggccgacgaacgacgcgccgtcacctgctccagcagtggcgacgacggcgacttctgctccggggggccgaacagcggcaacgctgacctcagggtggatgccgctgccaggaggcccccgcccatgccaaaactcgtgaggcaaggacgggcagaaggccgtataagttggagggaccgggaaaggggaataccccgaaagggatccttctccgcgaaggaaccgggctccgagccccccattactgatcaggggttcgaaggctggccccccgagggttcaacagtcgcctcagatcgcgtgggcccgacacccactactggtcaggggttcgaaggccagccccccgaagggctccatggccgcctcaggctactcgggctccgcgcccattactga

SEQ ID NO: 21228 - DNA, 556 bp, Zea mays
  Peptide Sequence Number=SeqID_64603
atggcccagcaaaatgagatcttgtggcagctagctcagcgtcagctgccacctcagcactatggtggtggtgatcatcagcgtcaccccgcagcagccacttaccaggagttcctcagtacccagccaccattgttcaccagggccgaggacccacttgatgcggatgtatggttgagagtagtggaatccaaattcccgctactccatggagtttgcttagaggtcactaaggtcagccagatgaccgagaggtggaatggagagagtacaaggcagctttcagggggcaccatataccagcaggcctttaatgacctgtgccagtatgctgggtatcatgtagacacggacgagaagaagagggacaggttcagaagggggctcagcactaagctccgtgaccgcctcaacacagtcagggccaatagttataatgagttggggcagaatgttaatcagaatcaaggcaagagacagaaggtgcaagtgaggcaaggcaggctgaacttcaccaccatggctgatattctagagggagcacccgtcaagactg

SEQ ID NO: 21229 - DNA, 705 bp, Zea mays
  Peptide Sequence Number=SeqID_64604
atgacttcccacggatcctcggacgaagggaatgcactgtcccacactgacgggcttgcacgagagggttttccccgtattttgtgggaggtaattcagggggctagttacatgacgcctcctcagtatgcggtgcagcagttcgagaagcaccgagtgccccgctgtagggtgaggatgaccctggagcctcatcccctacagccaggctggcgttcgctggactctgagtcgtttggataccgggcagaggatacgatcgaggcgattgctcttcgcgggttgaccactttctgcggattccaccccttggagctgtccactcaccccattggcttgttccccgctgagaaggaggacgacccaatgtggaaggacctagtggagcatgccaaggacatctgggctatctacccaggtcagactgcccacttgacactgtcaaatgagatccaagagcttgaggagttagtagggaccagggagaacaccatcgaggttctcgaggatcagcttatcaacactcaacaacagcttgcggaggctaacgagcacctggatatgcatcaccaggagatccaggacatggaggccaacgaggatgtcgacattgagggaggagaggagcctgcctccagcttggacactgctggcttagggagaccaccttcccccgagtcgagtgttgcctcgttcgctcactag

SEQ ID NO: 21230 - DNA, 714 bp, Zea mays
  Peptide Sequence Number=SeqID_64605
atggaggcaataagagcttcgaggtaccgagtgcacgggagaaggtcaaagaggctgaggaacccaaagccaggggtgaaaaagaagacttgcaaactcaaggttgatcgagttgagaagagatatgggggacaagccagatttggcgtccgcatatcttctgacctagggcttatcttcccttggaactcacatacaagagatagccataggtgccaggaagaggcagatgaacacctccacgtgttcgacgcattctgcacgcgccagagcacgcccgcgcccgacctcgtgtgccccgcgtcacgccaaagcccagccggcgctgttgcccgcgcccgcgcctataaaacccccagggacttcgaccgtactcctccgtgcacgctcgacctcaccggagcccgaaaccaccggcgtttgccccgtgcacggcatgtccacggccaccagaacccctgccaccgtagaccggccagcagagcccttcccaaccccgtccaaccctcggagaagactgtgcacgcctcggtgaagctccccgagcaaggaatcgaagtttgcttcgccggagaagccagtccacggtcgtcggactttgcccgaccgccggtgaacgtagaccgggtaatcctctgctccattcttcgattccttgtgcacatagcctctacgtcgccctatgaagctcatcgtgccattggattgaactag

SEQ ID NO: 21231 - DNA, 555 bp, Zea mays
  Peptide Sequence Number=SeqID_64606
atggccccctgtgacgtggttggtccaagccctaggtcgggcgaggcggaggctcctccgaggtcaaggtcgagtccgtcttccgaggtcgaggctgagtccgccccctggggtcgggcgaggcggagaccgtcttccgaggccgaggttgtgtccgagccctggggtcgggcgaggcggagtccgtcgtcaagcgtcgaggttgagcccgagccctgggtcgggcgaggcggagaccgtcttctgagtccgaggctgtgtccgacccttggggtcgacctcactctatcgagtggcacagcagtcggagcgacgcaggcggcgctattttcttgtcaggcgatccttgcattaaatgctcctgcgatacggtcggttggcatggcgatctggccaaggttgcttctctgcgaagactgggcctcgggcgagccgaagctttgtgctgatgggggttaccagctgagattaggagtcttggggggcgccgaacatggtgtctccagtgagttgctaatgggtgatccgagtggacgcccgtgccccattcgttag

SEQ ID NO: 21232 - DNA, 213 bp, Zea mays
  Peptide Sequence Number=SeqID_64607
atgccggggcgcgcacgagtgagctgcaccggccacgtgtcgacgagcgtccccgcagccgagcagcacgcgggcaagcgcctctacgcgtgcgggctagccgcggctgcatgcggctgggcgagcggcggctacggctacgagtggcgagcgcgctggggacgcggttggacgcggcgcgcgacggctgggcgagcgcgctgcgggcgttag

SEQ ID NO: 21233 - DNA, 519 bp, Zea mays
  Peptide Sequence Number=SeqID_64608
atgcaggcggcatgcaaccgcaccaagggggcgcaccctttcggcttcgacgcgtccagcatggaggcccaggcccacacgtcatgtaaccggcgcgccagttactacgtgcaagaaactgcaccgccactcacgccagtaccgcgccttctcgactacggaaccggtgccgcgactcgaggcgaccctgcgcatgacccgacagtgccaaccgagcacatcggtcacgggtcagtcagccgcgggagaaggcacgacggtcgacacggccagaaatgggccggcagtaatggcggtggcaggcgggcggaagcagcagtcaagtcgtcagcaagcttgggacagcgagagaaccctctcccacggcgtgaggacgacgcgcccgttttctgttcctcgaacgactcgcgcacgcacagcggctgcctcgcgaaccactcgtcccgtcgcattaactctgcggcaggacaggcggcacctttggcaggcgaggcaggcgacgcttcacctccgccataa

SEQ ID NO: 21234 - DNA, 189 bp, Zea mays
  Peptide Sequence Number=SeqID_64609
atgacgcacaaggaggtaattgagttcataactgagcatattattcatagattcggcattccccagaccttgactacagatcaaggtgaccgacaagaggatgatagctttgggagcaatagaaaaggacaagatcatggtagccagggcctacaacaagaaggtcaaagcaaaaatcattccaagtag

SEQ ID NO: 21235 - DNA, 510 bp, Zea mays
  Peptide Sequence Number=SeqID_64610
atggccgtgatgggttcaacattggaaaagatgtacctctgtcagggttgtccaagttggctccaagacatgaaggaagcagtagcggcagcaacgatccaatcggagacttggaggcccaaaagtggaaccaacttcagacggagctacgtcatcgaaatagggtgtgggcacaggacggatttggtggtcgattgggccgtcaactcacgtttgatcgcctgggtccgcgaagccaaagctcgtgctcgtgtggcagagcttagtgcgacccttgacaacttgcaggtgtactgcaatactttacatgaggaattacatgtattgtatgcgcgactgcacccggacgtgcctgccgacactgttgcaatgggagctggaccatcagggagagcaggtgaaggacctgatggggagttggacctttttaggactcctccttccatgaacctggctgacgatcggtctcctgcagcaggaaatgaagaaaccaaggacgacgaagactag

SEQ ID NO: 21236 - DNA, 252 bp, Zea mays
  Peptide Sequence Number=SeqID_64611
atgggtcacgcgtgcgacgattattttaatcgtttctcgccaacgagctcagggaagttaagaacaagtccacaacagatgccatcacgggctcgtgcgcatgacagtgtgaggacttcccatggtcaggaagatactcctaattcaccacctgtaccaccaacgctggccgaggctatcgctgccttggtcaatgctactacagataatacctgcttcttggatgagatggcgggtaatcagttccagtag

SEQ ID NO: 21237 - DNA, 147 bp, Zea mays
  Peptide Sequence Number=SeqID_64612
atggcggcgatgacgctcgagagaaggaaaacgagtgagagagaaacgaatttgaactacaagtcactcgaaaaatgtaaaaccgtgaatgtaaaaataatatccatgttaggagttgaacgtctcatgtcagtcgatgatgattga

SEQ ID NO: 21238 - DNA, 174 bp, Zea mays
  Peptide Sequence Number=SeqID_64613
atggagagtcatgatctccgggcagaatgggaatcacggcttgtgggtggctataagatcgatggttttggttacgactatggtgctggttgtcagcattgcaaccactgctcaggcgaagatgaagctgtggaaggagacttccaggagttccaagactacgatgagttctag

SEQ ID NO: 21239 - DNA, 447 bp, Zea mays
  Peptide Sequence Number=SeqID_64614
atgacgggtgaggagtgtcggaggcaggtgatgaagattttccgatggacttctacggcgcgggcggccacacccgcggcacttgcagcggcattgtccggcgatcctgcattctacggtgtcaacgatcgttcgaactccattgagcctgtagcagacgatggcgagggcatgcttcggacgggtcatgccgatgagggcgttgccacggcttgggccgccaacgccgtcgcagccggggtcgctcctgcggccatgtttcgggtcgccagcaccgctgggcctcagaccgtcaacaccacgctggggctggccacgccgccgcgctggcagccgcccatgccaaggggcacggcgtcgcgctgcctgcaggccacgttgccgcactggcagctatccgggaaagggggcaaggcgttgcgctggctgcgggccatgccgccatga

SEQ ID NO: 21240 - DNA, 975 bp, Zea mays
  Peptide Sequence Number=SeqID_64615
atgtctgctgccgcagcagctgcagctgccgctcggtgcgtccctctccgggtgtcctcgccggagaccgcgaagtccgccgcttccattcccacctcctcggccgcctctgcgtctgctcccctccgcgccgccgtcgccgcgggacccggccgccggcttccggcgccgccgttccggtgctcctcatcgtcgccggagaactctgccccgcgcgatcttggattgcttctggaggtggaaggagttcttgcagatgtctaccgttttggcaatcgccaagctttcaatattggctggcctacatctttgccaactagtgagaaaggatcatttataaaaagtgttcttcgtgagaagctgaaagctttggaagagttctcagcttctgatagcttaccactacggcctggagtggaaaagttcattgacgatgcacttggtgaaggtgttcctttggccatattggctgcatatgggagaaatggagaaaagatttcaagatctatagctatgaagttaggtcccgaaagaatctcaaaaataaagattgttggaaacgttgaggttgaagaaagcttttatgggcaacttgttcttggtaaaggagtcacatccggtttggatgagcaacttgtcagggaagcccagaaggctgcttctgcagagaagcagaggattgcagaaaaggttgcatcgatcctaaaacttagtgttgacatcacagcatccgaaagctctgacaaggtaatagctgctctccgagctggttcagaatacgttgggtgcgacgtgcaaagctgcatccttgttgcgggcagccaatctggtgtccttgcagccgaacgcattggcatgccatgcatagttgttcgaagcagattatcgaaaaagctggtcagaaaaagccgaaacaaacagatcctccactctccgatcctggtagactgctttgctcgttgcatccctggatag

SEQ ID NO: 21241 - DNA, 363 bp, Zea mays
  Peptide Sequence Number=SeqID_64616
atgacacggtggttatcccgtggttcggccaaattcacatttaagcacttgtgttggcacttaatcaccaaaatacttagaaatggcccaaaggcacatttccctttcaaagacaatggtgttaagcttggtgacgacaatgaactctcagcatggtttcatggagcagcggccgccactttgggggaagactggaaggccgacaatggtaactatggtgcatcaccgatgagcaccatcggccaaactccagcaccatcagctcgtcgtaggggcgggcgtgcacctcgacctccagctgctgtaactcgctcctctacacgctctgtctccctggacgtcaacctcgctgatgcaaggtaa

SEQ ID NO: 21242 - DNA, 627 bp, Zea mays
  Peptide Sequence Number=SeqID_64617
atggctgccatgctcgtccgctcgtcgccttgcctcctcctcgtcgccgtcatcgcgttgtgcgcgtcgtcgtcctgtcagacgaccaccgccacgccagatgcatcgtcgtcgacgtcagccgcggtggcggcgctcccaccgtcggcgccgtctggaaccgcaaccgccgccaccgctccgaagaagttcccgcaaccgagccccggcggcgtgggcggcgggccgtaccagcagccaggcggcgtgggcgggccgtaccaaccaggcggcgtcggcgagccgtaccagccaggaggcggaggccacggcgagccgtacctgcccgcggcggaggtggcctcggcgctgccggtgccgacgcccgacgagctgcccagcggggccagcctggggttcggcagcaacggtggcctcgggttcggcggccccggcgacgagtgctgcggcggcccgggaggctacggctggttcggcgggcccggcggctttggccccggaacctacggatacagtgggcccctctactggggggcggcgccggcagcggcggggtcctttggacgcgtcaccaacgtcctgctgcctctcgtcgtggcttatgtttcttcatgcgttttcgcttag

SEQ ID NO: 21243 - DNA, 600 bp, Zea mays
  Peptide Sequence Number=SeqID_64618
atggcgagggtttggtttgaagacgagtgtgacaatgacactgttgaaattcgcagtcttggtaattgtaggcttgggagctgtcgcactgttatcctccacccaagagtccaatgtatggagccaaatggattactttttttaacaataaaactcactacctcaaaatttatttgtgactacaagaaaacgttgaaggagtgtcgaggtggcagcaggaccattggcaccttcatcaatttaagttcagtgtcagcggtgagtagtattatgcggttcatctccttggagttcaatgagtggagtgctgcaggagccagaaggctccatgggttgtccttatataactttatttcccagatgggttggcgcgagatggaacacaagagggggagaaccgtggctcgtgttatcctgcgccagggggatgcgctcgcagtaggggttacaagcgctcgcgagggagagagagagagagcgagcctgttcgtcagcccatcctcccccgcgaccaccctctcgcatgagggccctggaccttccttttatagatgcaaggagaggctccaggtgtacaatgggggtgtagctatgcgctaa

SEQ ID NO: 21244 - DNA, 921 bp, Zea mays
  Peptide Sequence Number=SeqID_64619
atggaggatgatgaggagaagccatcacaaaggatcaccaacaaggaggaagacgaagaggatgacgacttggtgttcccgggcttccggttccatccaaccgacctggagctcgtggggttctatctgaagaggaaagtagagaagaagggtttcagaattgacatcatcagggagatcgacatctacaagcatgacccctgggatcttccaaatgaagcacggcatgtggtgcaaggcgcaggaggagacaaggacgactggtacttcttctgcctgcgtggccgcaagtaccggaacagcatccggcccaaccgcgtcaccggctccggcttctggaaggccaccggcatcgacaagcccatacacgacggcgccggcgagcgcgtcgtcgggctcaagaagtccctcgtctactaccgcggcagcgccggaaggggcaacaagacggactggatgatgcacgagttccgactcccctccgcagagttggtcgagctccatgatgctgggatctggacgatctgccgcatcttcaagaggaacacgtcgtacactcggaggtgccagcagcagaagcaggaatacggcagcaagcgaagccagcagcaggagcaggagttgcagtactactacgactactaccgctaccatcaccaccaccatcagcaccattacttccactcgtccgaggcggtttatgctgcagctgaacaccatcgtcagccgtcgttcctgctgcgcggtttccatggctcgtcgtcgtcatcggccgagacgacgacgacatcaggattcgtgggagctcatccattgttgccgccatcaacgacatcgactctagggtggagcgacgcggcgagcttacgggacagcggcatcagcacctgggacgaactcgggaggatcctggagatctga

SEQ ID NO: 21245 - DNA, 403 bp, Zea mays
  Peptide Sequence Number=SeqID_64620
cgccaggctacgccgcctccgccccaccgcctacaggccgcgccgcctccgccccaccgctgcaggccgcgccgcctccgccccaccacctgcaggccgcgccgccgccccggctcggcaccgacagcaggccacgccgccgccgtgccaccgccccggctcgcgccaccgccctggctcggcaccaccgccccggctcggcaccgacagcgggtcgtgccgccgcccctgctcgccaaccccagcggttcaaacattagctcgttttcactgctactgcattgggttctgcatagttcttccttggttgtttgatgcaagttcacgctgggagaaaagacaagccaaagtcctggagaaggatgatagggctctctacctagatccccatgaagttcagatg

SEQ ID NO: 21246 - DNA, 240 bp, Zea mays
  Peptide Sequence Number=SeqID_64621
atgggcgaggttaatggccaaattgaccaatcctcaaccctagtccccagagagtccgatgaagtggtcgcgcccggttgcaacaacccgagtcagcagcgagaaaatcgggggagagattttgggtcttacattgatggaggaagaggattcctccttgtgtttgttgcggactcccttgagagagtcctccccgagcatgcggatttgtcgccggtcatgatttccctcttggcgtga

SEQ ID NO: 21247 - DNA, 174 bp, Zea mays
  Peptide Sequence Number=SeqID_64622
atggggattggagggtgctgtgtgtctggccttggagccgtgttttctctgcctgtgagaaccggcctcgatccgggcgacactttccctctcgtgggcttccaaaacaccctcacacgggctttcccttacacaggaaccttcggacttggaatgaagttgttcacaatatga

SEQ ID NO: 21248 - DNA, 300 bp, Zea mays
  Peptide Sequence Number=SeqID_64623
atgacacgacagaggtgcccggatacgtggcgcaaggccgtgcgacggtggttccccggcgagcttatctgctcagccgcaaaacagaaagaagatggtgacgggcacaaaccccataatttgaaagttacaaagggcttccaagttgaggcaatcacactgaaatgcagacttaaccaaaaagggttaagtatggctcttttgcacttaagtccaaatctcaagttttggattgcaaattcacatatgattgacccaaatgacctaatatacttatttaacttgatttttgcactttaa

SEQ ID NO: 21249 - DNA, 102 bp, Zea mays
  Peptide Sequence Number=SeqID_64624
atgggccgcccggagccggtcgtgctgttcgctcagacgatcctccactcccagctggacgagtacgtcgacgaggcactcagcctctgctccgcgagctaa

SEQ ID NO: 21250 - DNA, 945 bp, Zea mays
  Peptide Sequence Number=SeqID_64625
atggctgaaaggtaccaactcccgcggagttgcgttcctccaatgacgaggcggaaagacggcaggtatcccccatccgggggcttggaaggtggaaggacacgatgcataagggagcgcggagacatagtaaccttcaaagggggtcaccctccttttaaaggcgactctccctacttgcgtccccagccgtcgtgggctgagtcttctccaacacgctccaaggtcctcccctacggcgcgggggctaggtcccacacgtcatgcaagccggctcagagcagaagaaccaaaccgccgtgcgcggtgcgtgcaaccgcccagcggttacaagcggctctccacttttgcccagaccagcgggcgagagggcgggcagccatgcaggcagcatgcaaccgcgccaagtgggcgcacttctccgactcccaacacgcccagcatggaggcccaggcccacacgtcatgcaaccggcgcgccgaatgcttcgtgcatgcaaccgcaccgccacttgcgccaccaccgcacctcctcgactgcggaaccaataccgtgactcgaggcgacccagcgcacgacccagcagcgccagcctggcgcgacggagaagcgagcgacgcttcgccttcgccataatgaccgcgtcgaaaaagggaccgggaaagggggataccccgaaaaggatccttccccgtgaaggaaccaggctccgagcctccctactgatcagaggttcgaaggctggcccctcggaagggttcgacagccgcctcagatcgcgtgggctctacacccactactggtcagaggttcgaaggccggcccctcggaagggttcaatgaccgcctcaggctactcgggctccgcgcccactactgatcaggggttcgaaggctggcccccgaagggttcacagccgcctcagacacagagcgagggatga

SEQ ID NO: 21251 - DNA, 1008 bp, Zea mays
  Peptide Sequence Number=SeqID_64626
atggtgacctccagtttgatggcgggggaaagcaaaccgggccgcgacctctgcccctccctcagcctcaaggattttcatcaccagggctggggaggggagtgtgctgagttggggccggtccccgcgtgggcggtggcccgctccttccctcagagattggggggaaagggcggttgtcgtccgtggcgctggcagctgccgcgtgcctggctctcgggcccgagtggcttcggagccgctctcggcaccggcttctgccacggcagctggaagaggttcttccgccgacgagatagccagggccgcccacggaccgacctccaactctacggccttctgcccgtccttgcctcacgagtttgggcatgggcggggggcctcctggcagcagcatccgccctgaggtcattgctgctgctgttcggccccccggagcagaagtcgtcgtcgtcgccactgccggagcgggcgacggcacgccgttcgtcggtcttctgttgctccgcaggcctccccccatcgagtggggttgttcgtacctgcggagactcgcctgttggttgtctgaaccgcttcaccaagcgtgagtcgccccgtgtaaaggtgacgagtgaggccaggggtagcggtgtcagcgcgaacagaggcagagttggctcggaaagaagacctggtcggcggagcctggccgggtcgtccgttagcgggaccgacgccggaattgacctgtcgaggcctcgggtcgggctgatgtcctcgggggacagctggccgaggcctcggggtggccagccgagccgcctgcccgagccagattctcggagaaggccctggcggcgacggcccgggcttggtgatgacgttgtccttcaaagcggagacccttggactgcgtcgccgtccgaggctaggtcggacctcgccgaaggtgttgccgacgccgagggtgctgctgctcccttcaagcgtcaagatccgagcctgcaggatcagatcatcttgtag

SEQ ID NO: 21252 - DNA, 2388 bp, Zea mays
  Peptide Sequence Number=SeqID_64627
atggggtccacaggcttgggcagcatcttgttcatgtccccagggatctctgggcacaggcacagcagcatgcagtcatcgttccctgcccccttcagatgtttgagctcttcagggatgatcctatgtcattgcagcacttgctctgcagcattggtgtctgttcattgttcgaagggaaacatcagtgtcagctcggaaggacagcccgcagctgtggcatgggcgcatggctataacgaggacgattatcttgggatggagtcagcatcaactcctgtcaaagagaagggagggtcgcctttgggtcttgcaattttccattcagctgcagaaattcttgaagttttggttgtggattcaactgcttcatcgcttgaatcatggattgggtttgctgttgatctgcacaaggctctgcattcatcttctcctggttcaaacaggaaagatgcaccaacaaggttgcttgaatggattgatgctggtgttgtttatcagagaaatggtgctcgtgggcttcttcgttattctgctattcttgcatctggtggagatgctcatctttcttcaggaaatgtgcttgtgtcagattcaatggatgtagaaaatgtagttgcagattcaaacagtagagatggtcaggtcatcgataatcttcttggtaaacttgttgcggataagtattttgacggagttgctctatgcagcacttctgtggtccaattaacaacagctttccgtatcttggcatttatttcggatgataagcctgtggcgtcatccctttttgaagaaggcgccataactgttatatatgttgtcctgatgaactgcaagtctatgcttgagcgtttatcaaatagttatgattaccttgttgatgaaggggctgaactgagttctaccacagaattacttctagatcgaactcatgagaaagctattgttgacctcatgattccctcacttgtcttgttgataaatctccttcatatattacgtgaaacgaaagaacaataccgcaacaaaaaacttcttagttctcttctgcagttgcaccgagaagttagcccgaggctagcagcttgtgctgcagatttgtccttcatgtttcctacttttgctataggttttggtgttgtttgtcatcttatcacgtcagcacttgcttgctggccgttgtataattgggcacctggtctgtttcattgccttcttgaaaataccgaggctactaatgcgtccgtaccattgggcccgaaggctgcttttagtctgctttgtctcctgggtgatctgttcccagatgaaggcatatggctatggaaagttgaacttccttctctcagtgccattagatctttgagtactggagcagtgctagggcctcaagtggagaaaggggtgaactggtacctgcatcctgaacatgtgaccatattacttgtgaggctgatgccacaacttgataggcttgctcgtatcattgataactttgctacttcggtcttgatggtgatacaggacatgcttcgtgttttcattgttcgtgttgccttagaaaagattgagtgtgcagttgttcttctacgccctatatttatgtggttagatgataaagttgacaaaacttccctgtcagagagagacacctttaaggtccatcagttgcttcagtttactgtaaaattgtctgagcatcctactggcaaggcattgctttggaggatggggttcacaaggattcttagcaagttactacagaattgtagccgagcatctttcccgtatgataatcagacttttggaagggcgcactctaagaatgaccttatgctcaaatggaggatccctttgtttaaatctattgcatatatctttagtatcgacccatgtaataatgagaaggctgatgttgaagagtccctgaatgagaagtctgttcatgaatgctcttctgtcatgcatgacctcatgatgttctgccaggttttgcctgttggccgggaaatgttagcatgttcgttggcgttcaaggaattggtttattcttatacctgtagaagtgcagtaactttgatactttcacaaatacatacttccaacaaagatgttcttgaaaaagatgagagtgaccctaaccataactcaccatctctggatggttggaattgcttttcctcattgttcaagtgctggaagaagcttgtaaagtatgttggttctaatgaacgaacagattatttagtagaaactatttattccttgacactaggtgctatcaccctcagccagtatggtgaaaagagagctgcgcatcatttacttaagaggagaaaaaaggtcaaaaatgtacccaaatacaaagcctacagaaggcaatag

SEQ ID NO: 21253 - DNA, 1116 bp, Zea mays
  Peptide Sequence Number=SeqID_64628
atggggcagcggcttgaggacttggcccctctatttcctaagtgtgttgctaacaaaaggttgaggcactgtggtgcttccttggtgtctagtgtgggtggtggggttggtggtgacagtgagtgtgttgtgggcgctattgtgacgaaccacttagttctgcgtggaacttatcgcagtctcacccttgtaatttatggcaataccgccgaagaccttggtcaattcaacatagaactaggtctggaccattctcttgctaatgttgttagctctccatcagagggaaagcttgaagaccttccaccagcgctacattcatccaagttgtcatttgaagaatcattatcatcattgaaaccatcgagttttcatgccactgatgtcgacttatcaattgaagcgaagaaagtcttgcatttggctctgaaaatgtaccaaatatctgatgtggagaatcttattcccaacctaagaagtgcagttctctcagctatttcaaaatatgtgactgctagtacaaatcatattctacacactttgagtcaagattcagcaaatgcgtttatcaacagtgattttgattctcaggaaattaacaaaattcttgctgaagctggtaaggagctctctgaaatttggaagaatgtccatgctgttactgagagtaatcttttcaatgataatggttttaccattggagtagatgaagacttgcccacgaccaagattctaattgagttgtttaaccattgtttcccatattacaagaaattatctttacttgatctacaatgtccttctcagtctgcggtagtcaaagtgatttccaatattcaggcagataaactttctactgatggagttccatttcttatttctgctagtgttgaacttggtgaaatgctgaaattgataattttctgtggccctattgaagatccatcaccagtggctactgctagtagaatatttaagtctgaacatttagaaggcttgctttcgtacaaagcaacaattgatcttataacttcgtccaaatacagttttttgcagtatgatacggatccatacttattgtctcttatccaggaattaggggccaaatcttactag

SEQ ID NO: 21254 - DNA, 984 bp, Zea mays
  Peptide Sequence Number=SeqID_64629
atggacaaggatcgccaaggggcgggcgcaaaaacgccaggcgactgtgagggttcacgaagctcggccgaaaaggcagcggggaacggcgaaggctgcggcctccggcagaggcaaaccgccgctgccggcgaagggtcggacgagggcccgtttgctctagttgcgcctggcgcggcgatcgcgacagctgcgctagcgccgaaggcaaggggtgagacccttggcgtcggaggcgaggtgtcggccctcgcgctggtcagggacgaggcgtgcgtggcgacccgccggctgaagggagtgacggaggcgctgagtcaggtggctgacttcaccagccgcactgcgtcaggggcccttacggcagctttgtctgctgaagtcgagagacttcggacgcaacatgctgacgctgtccgtgagaagtcggcctccgacagcaagtgccgcaaactggcggacaaggtggccgccctggagaaggagaaggctgacctccggcgccagctggcgggggagaggagggaggccaacgaagccatcgccaaagagcaggctgcgcaggcggaggccaggctggcgcgggcggaaggcaatatcgccaaggagctcgccggagagctgcaggggcggcttactgccctggagagccacgcggagggggccgaggccgcgatgcgagcggaggccgaacggacgcgcacgcagctcatgactgcatatcgcgagctgggtgcgcggaccggtgacttcgaggtgccggagcgagaggccgggcttcgctgtctggaatgggtgcaggaggaactgcaggagctccccactgtcttggaggggttaatgtcgttcacctccctggtcacctgcgaggcggcgatgaacgcactctctcacgaagggtgccggcactttgaggccctcgaccaggcagatgaggattttgggcgagatatctttgaggtcgaagaccccgtggtgaagtaa

SEQ ID NO: 21255 - DNA, 216 bp, Zea mays
  Peptide Sequence Number=SeqID_64630
atggctaagctgaacttcaagttcaaccagggtccagggcaagttgaaccggggtccagagaggttcaaccggggtccaaggaaagttcaaccggggttctttccccagatctcactgatgttgatcctagggcaatagatcttgccatgagaatcgccgaaaggatgttcctcaaaatgaaggaagatgaggcgaagaacaagattgaagaataa

SEQ ID NO: 21256 - DNA, 306 bp, Zea mays
  Peptide Sequence Number=SeqID_64631
atgtgtgagagagagtgggaggtgttcttcaagttagaaatggagtttgggtcatgctcttctgtggggagagacgtaggagaccggttcaaccgcctggggcaggctgacagtcagtctgccagtcagattggcagactgcaggttagactgcaaaaacatgtcctcacaccggttgaactgcccctagggccaattcgaccgcctgggggtcagactggcagtcaggaggtcagaaccgatcaggtgacccttacaccggttgaacctcccctagggccgggttcaaccggttttgaccagtga

SEQ ID NO: 21257 - DNA, 273 bp, Zea mays
  Peptide Sequence Number=SeqID_64632
atgggccggatcacacgtgggcctctgagctggacgaagccgcacggtgggatgacgctgtcgcaggccttcgtctggtgccgaacgaaacgaagggtgtccctgcccgttttgtctccgtcagaccagcgactgcagcgaaggcctcgagcgaagggtggcgtctttgccttcgccccaacagcaggtgtgtgcgtccgtgatgtagaggaggcgccaaaagtagtcctaggtcgatgttgcgtccctgcaattccttctctgcaagcatag

SEQ ID NO: 21258 - DNA, 285 bp, Zea mays
  Peptide Sequence Number=SeqID_64633
atgaaacatgagatttgcaagattgaacggtcaagagcagaaaagaacgtcgatgagcttcgggcttcgaaagaaaattgttatgaaatatccttggaatgcgccaagaaattgaaggacagcttcgccagggttggggcatattcttttgagcaaaaatttatctgtgcggataatatgaaagacccttcgaccaaagcttctgcactaggcgggaaattttactccaaggtgtggatgaagggcgaccgtgagatagctgatgaagctattagaaaaaaatga

SEQ ID NO: 21259 - DNA, 681 bp, Zea mays
  Peptide Sequence Number=SeqID_64634
atgacttcccatgtacccactgacggagggaacgtatattcccacacaaacggtctcgcacgagagggttttcccctcatcttgtgggaggtactgaagggagcgggttacactacacctccccagtacgcggtgcagctgttcgaggagcaccaagtacctcattgtaggatttcaccccttggagatgtcgacccaccccattggcttgttcccgctgagaaggaggacgacccgatgtggaaggacagggttgagcacgccaaggatgtgtgggctctctaccccggacacaccgctcacctgacggccttacgaggtgaggcgatgtcccagcttatgggcctggtggagtctaccaagatcacccttgataactgggaggatcttgtagtggatttgtccactgagctagtggagaaggatctccaggtggaagtcagggagaacactattgaggttttggaagaccagctccagaacacccagcagcagctcgaggaagccaaccaacacttagacctgcaccatcaagagattgaggacatggaggcagaaggggccgatgaggacatagatatcgagggaggggaggagccggagcccgcatctagcttggacaatgctggctcaggaggaccaccttcccccgagtctagcgttgcctcatttgctcgttag

SEQ ID NO: 21260 - DNA, 528 bp, Zea mays
  Peptide Sequence Number=SeqID_64635
atgcttgttgtggtgctccttgtcttgttggggttttggagactagctgctgatgagctgctttcttcgggcaatgagtcacccaatggccttgttccccacagtggaaacatccacgacctcctccttgcgctggggctatctgattgctctgattggtggccatggcaggaaagcgaggtgcctagctactctaccactgatactgatttcctccctattggttgtgctggcagtactaccgtttctggaactactgttgatgctgacgttgatgttggtggtgttgatgtccttcaggtatctgcaattgcagttgaggctaaggttgaggctgctgttgcacctgttgcatggctgccagtgtctgaccaattgtctagactgcctgagtctgcatcagaaacatctgctcgattgtcattggtagtggtggtggcaactactgctggggtgcctcatcctagggtgccttctactctggctgggcacgccttccacctcgacgatgttgttagacatctgtag

SEQ ID NO: 21261 - DNA, 906 bp, Zea mays
  Peptide Sequence Number=SeqID_64636
atgggcaatgatggtgctccatacgctctagagcaacagcccctcaattttttacggaagcagggcgacgtaagcaaggactcgaccgctccaacagctgtccctccgccaggctccgtcgcaccttcgacagccacgatatcacgccagcaaggtgccaagacctctccggctgccgcattggcatggaggaccagggccttcttagaggaggttggccgcgcgggaccgaggacgggacaggcgctctcttggggccgctcgcttccctcacccgcgtggacgcttgtaacccccctactgcaagcgcacccgacctgggcgcgggacgaacacgaaggccgcgggacttccacctctctcacgctcggctccggccacctcgcctctccccccttcgcgctcgcccacgcgctcgacccatctgggctggggcacacagcacactcactcgtcggcttagggacccccctgtctcgaaacgccgacactgagcgagacactgccgaggtagccatgcaggatcctacacggcgtgcgcttttgcagtactgttcgttgttcagcggggtacctgatggcctcgacctgatgtactacccccgtcgttcgataagcagtactggaggtgtgactgtctcaccagttggtgagggcaatcctagatcgagcagcatggtcaatctggtcgacgtgctcaacaccgagctggaccacgcccttgacgagttgggcaaggctcgggtggagattgcggaactgcgtgctgagcgtgtggagcgccgccataaggaggatggttcccccgcccctgttgggactcagcacccttaccgcttgccaccccgtggtcatcatgcttatggcacccctaactgcaggaccaagatagacttggagccatag

SEQ ID NO: 21262 - DNA, 609 bp, Zea mays
  Peptide Sequence Number=SeqID_64637
atggaccaaggggcacctctagctaaggcacaggggagggctgcctcccaggctccaccttctgctgaggcgagggggaagagtcctggtactcctactcttggcgtcggcgctcctgctcctcgtgcatgcaatgatgcagtctctccagaggcactccgctataattcaccggactgtccggtgtacaccggactgtccggtgtacaccggacagtgtccggtgctccaaagaagagcggcctccggaactcgccagcctcgggaaaacacagcgactgctccgctataattcaccggacatgtccggtgtacaccggactgtccggtgaacctgcagagcaacggctacttcgcgccaacggtcacctgcaggcgcattcaatgcgcgccagaggcgcgcagaagtcaggcacgcccatactggcgcaccggacattgaacagtacatgtccggtgtacaccgaacatccaggcgggcccagaagacagaagctccaacggtcggaatccaacggcattggtgacgtggctggcgcaccggacatgtccggtatacaccggactgtccggtgcaccatacgacagtcagccccaccaaacggttag

SEQ ID NO: 21263 - DNA, 891 bp, Zea mays
  Peptide Sequence Number=SeqID_64638
atggatgaagaaatggatgaagatgtcatagtcaaggctgtggactgctcgaaccaatcagaggtagatatcgagctcaaacagtttatcaaaggctacttagatggcagcaaaggaggagatgaccacttgttgatgctgaaattgaaagagtggccccgacccagtgtcttggaggtgtttctgttgtgccaaaggccagaatttattgtcaactttcctcttgttgattttattcatcctagatggggtctcctaaaccttgctgccaagttacccccagatgccttacaacctgaattagggatgaaactgctaattgcacatggaagtcaccaagaacttggtaaaggtgattcaatgacaaatctaatgattaacatgtgcgatgtggttcacatgttaatgcgtgcaactaaagtgcattaccaatgtcccaagagggttaaatatcctatttatgatcaaacagtgtaccttaacaattatcataagaagatgttgaaggatcaatatgtttgggtattgaagcttgtatgtattgaagaaaatcgagcagattacaatggactcagctcggtcgagaccaatatgttcaagctctgcaaggtgaggtctgttcagtttggccagaaaggcatcccctacctgaacacctacgacggtcgcaccatccgctaccctgacccgctcatcaaggccaacgacaccatcaagatcgatctggagacctacaagatcaagaacttcatcaagtttgacgtcggcaacatggtcatggtgactagcaggaggaacaccgggcgtgtaggagtcatcaagaacagggagaagcacaagggcagctttgagaccatccatgtgctgcttggagctttttgctatgtctag

SEQ ID NO: 21264 - DNA, 780 bp, Zea mays
  Peptide Sequence Number=SeqID_64639
atgaagaagttctgtcaaaaactaggccggcgaagctatactgtacaaaagagaaaatgggcaaaggaagatgcacaagcattaactgagggtaaatctattccatttcaagacatgccaggtggtcgtcataaggattgggcaagggcgaggaatccttctagcgatgtgaacataacagagtcgcatccaatcataaagaaaattgtagatctaaatgaaaagtcagtagctggtacctttacaccattggataatatggacatacttgcaacaacaatagggagtaatcatccagggaggacaacaggggtgagtgcttatgtgggtttagggatgggtcttgctcaaggtgatggccctcgtaagaagaaacgtagaacaacgaaagaatatgtcaagaggattgtggatgagtatgaggccaagtttgacaaactgacagccctgtgtcagagtatggagtgtcgattaaacaattctgagagttgctcatcatcaaaatttgttgatacaccagaccatgcaacacatcattcagttaactcattacaagaggtgatgaaatgcaagttagtggtgcagataggtccgcaatctgttgtggtcgctagagggcaggcttaccctcgaaaggatgttgtaaccgtccatgggattgagcggaaacaacagttcatgcaaagcctcaacaagtcccacacacatcgcctcaggtactccatcacacaccggaaaaggataaaatgccaacaccaacaatgggtaccgaggatatag

SEQ ID NO: 21265 - DNA, 213 bp, Zea mays
  Peptide Sequence Number=SeqID_64640
atggctagtctgagcaacaaggtggttgacggtgagcgcgccgtcgccatgggtcaggtttttctaatgcttattcttgctctagaaaaaacaaaatgttttgttttgacaaaagatgatgcttcaagtgggatgggatggttttcaaaaataaaacttgatgatggatccatcatggccatgatgggttcaacatcgggcgagttgaaatga

SEQ ID NO: 21266 - DNA, 345 bp, Zea mays
  Peptide Sequence Number=SeqID_64641
atgtcattgccgacgccgcagtgggtcaccctctccgtcgtggacctctggaaggttgcatacaagatgctggtcatggtcgttaatgaggatatcactatgaataccactgagattcctacaatgcaagataatataataaacaattacatttatacctttagctctgcgaaggaggattcaaagatagctttggaaggcccggggcacggctcaagtgaatttagaattgaccttcggaagaaggagacccccaacagtagccccttcgcggggctagatcgttttttcataacaagctcggtccacgaaacatatgaaggcctcttcatgccgaaggtctga

SEQ ID NO: 21267 - DNA, 168 bp, Zea mays
  Peptide Sequence Number=SeqID_64642
atggggaggctagaaccccgggaagacagggaatcacgacttgtgggtaaagtgtacgacctctgcagagtgttagaaactggttgtccccattgtactcagtgctcaggaggagatgttggcaatatggaggactttgaggagttccaggactacgatgagttctag

SEQ ID NO: 21268 - DNA, 306 bp, Zea mays
  Peptide Sequence Number=SeqID_64643
atggcgcaccggacagtccggtgcacaccggacatgtccggtgccccagccacgtcaccaatgccgttggattcctaccgttggagtcctgacttctgggcccgcctggatgtccggtggcgcaccagacatgtactgttgagtgtccgttatacctttgccttgacaaagattggtttccgaataatgcgattgcagataccggaatccgtgaacagtagaggaatactgttcactatttataggcacagggcgcagcctgtgagagattacaagtatgccccttatgaaagtttacaacattga

SEQ ID NO: 21269 - DNA, 420 bp, Zea mays
  Peptide Sequence Number=SeqID_64644
atgcggcggcgcgggcgcctccccgcggtgctgtggctcgttgccgtgacgttggcggcgctgctggcgcggccggcgaacgcggcgtggtgcatcgcgcggagcggggcgtcggacaaggcgctgcagtcggcgctggactacgcgtgcggccccgcggggggtgcggactgcgcgcccatcctgaccagcggcctctgctacctgcccaacacgctcgccgcgcacgcctcctacgccttcaactccatcttccagcgttcccgcgccgcgccgggggcatgcgacttcgccggcaccgccaccgtcacgcttaccgaccccaagtttggctatcacagttatgtcccaattgttcaaggacttattgtacataacaccatgcgggttcaggagacaggagcctttgtctcttattga

SEQ ID NO: 21270 - DNA, 147 bp, Zea mays
  Peptide Sequence Number=SeqID_64645
atggaggccaagtcacaccatcaaccaaatcaaggaggcctcaccgccttggcatacaatgctccactgaccccggccgccgccgtgcagtggccgcacttgtacccaccatatctagaatgggagacccagtctcaggtcgcgtga

SEQ ID NO: 21271 - DNA, 153 bp, Zea mays
  Peptide Sequence Number=SeqID_64646
atggcggcttggccaaggttgcttcttggtgaagtctgggcctcgggcgtgccgaagctttgtgctgatgggggttaccagctgagattaggagtcttgagggtacccctaattatggtccccgacaacaatgttacaagaaacttcaactag

SEQ ID NO: 21272 - DNA, 978 bp, Zea mays
  Peptide Sequence Number=SeqID_64647
atggggggcgcccgtggttctcccgccttgtcgtcgttggggaaatgcaacttcgcggaagttggtacctttcagccatcgttcggcttcaaggattttcgtcaggcagcccggccacatcccctcaccggtggtcacccaagacgctgccgcgtgcccggctcttcgagccgagcggcttcagcgctgcttccggcgccaccttccgccacggcagccggaagaggtttctccgccgacgagatagccggtgccgcccacggactgacctccaactctacggccttctgctcgtcctcgccccccgagtggggatgtgggcgagggctttatggcagcagcatccgccctgaggtcatcattgctgctgtttggccgctcggagcagaagtcgtcgtcgtcgctgctggagcgggcggcggcgcgccgcccgtcggccttctgttgctccgcaggccccctaatcgtgtggggttaaaccctcggccgctcttcgatgagccgaagccggaggtagcggtgtcagcacagacagaggcagagttgactcgaaaagaagacttcgtcggccggagcccggccgggctgtccactggcgggaccagcgtcggagttgggttgccgaggccacgagccgggctgatgtcttcgggggacagctggctgaggcttcggggtggccggtcgagtcgtctgctcgagccggactcctggaagagaccctggcggcgatggcccgggcgtggtgttgatgtcgtccttcgaagtggagatcctccgaccgcgtcgccgtccgaggctaggtcggacctcgccgaaggtgtagttgacgccgagggtgctgctcctcccttcaactgtcaaggtctgagcctgcaggatcggaaggtgatgagtgagaggggttccccccttctagcccccgagggagggtcgggctttttgccgaggcaaggtcgacccttccttgatggttag

SEQ ID NO: 21273 - DNA, 138 bp, Zea mays
  Peptide Sequence Number=SeqID_64648
atggcgctcggcaccctctgcatctcctccccatgcgcagcagcaccactgcacgacacattctccaggaagaagaagacaactcgccgagccaatgacaagtgggcccaaggccaaattggaaaagtttttctgtag

SEQ ID NO: 21274 - DNA, 648 bp, Zea mays
  Peptide Sequence Number=SeqID_64649
atgcatcgtgtctttccacctttcgagcccccagatggggggcgcccgtggttctcccgccttgtcgtcgttggggaaacgcaacttcgtggaagttggtacctttcagccatcgttctgcttcaaggattttcgtcaggcagcccggccgcatcccctcaccggtggtcacccaagacggtgaccaccagctcctgtgtggggagaagcaagccgggctacggcctccgcccctccctcagcttcaaggatgttcatcatcagcgctggggaggggactgccgcgtgcccggctctttgagccgagcggcttcagcgctgcttccggtgccaccttccgccacggcagccgtaagaggtttctccgtcgacgagatagccggtgccgcccacggactgacctccaactctacggccttctgctcgtcctcgccccccgagtggggatgtgggcgagggctttatggcagcagcatccgccctgaggtcatcactgctgctgtttggccgctcggagcagaagtcgtcgtcgtcgctgctggagcgggcggcggcgcgccgcccgtcggccttctgttgctccgcaggccccccaatcgtgtggggttgttcgtacctacggaggtggaaccagagttccgtttgtaa

SEQ ID NO: 21275 - DNA, 129 bp, Zea mays
  Peptide Sequence Number=SeqID_64650
atgggaaccaatgggcatctcgacctcgacacgggaggtaaatccatagatcaaaagatattatgctttccgtatgcatgtgtgcaaggttccaagccgatcctaaggaagttcaccttagggccgtga

SEQ ID NO: 21276 - DNA, 765 bp, Zea mays
  Peptide Sequence Number=SeqID_64651
atggcgcctcctgccgaggtcgagtccgagcccctgggtcgagtgaggcagagactgtcggctgaggccagggctgagtccgagccctggggtcaggcgaggcggagtttgtcgtcttccggggctgagcccgagtctgagccctggggtcgggcgaagcggagttcgtcgtctttcggggctgagcccgagtccgagccctggggtcgggcgaagcggagttcgtcgtcttccggggccgagcccgagtccaagccctggggtcgggcgatgcggagttcgtcgtcttccggggctgagcccgagtccgagccctggggtcgggcgaagcggagttcgtcgtctttcggggctgagcccgagtccgagccctggggtcgggcaatgcggagttcgtcgtcttccggggctgagcccgagtccgagcccgggggtcgggcgaagcggagtttcctatggcgcctgaggccggacttggctgctgtcagcctcactctgccgagtggcacatcagtcagagcggcacaggcggcgctatcctcttgtcaggccggtcagtggagcggcgaagccatctttgcattaaaggctcctgcgatacggtcggtcggcatggcggcttggccaaggttgcttcttggtgaagtctgggcctcgggcaagccgaagctttgtgctgatgggggttaccagctgagattaggagtcttgagggtacccctaattatggtccccgacaacaatgttacaagaaacttcaactag

SEQ ID NO: 21277 - DNA, 1278 bp, Zea mays
  Peptide Sequence Number=SeqID_64652
atgggatatgcaaagcagacagatagctcttcatgtggtctctttcttttgaactatatcgaatactggacaggggatgaactgtctaacagttttacccaggatgacatgtcacactttagaaagaaaatggctgctatattactatcttcagaactgaataagagaagggggtgtctgttatacaaaaatgataaagaagttgactctggaagcccatcggatgttgagatattagaaaacccaacagattctaagaagaggaagctactccacgtgcttgatgataacgaagtagtgtatgaagatgaggaaggccctattactcaagcagacttgcaaaagtggtttgttgatgattgggataaaagaactcctgtaaaagtatctaacgatgggtgcaccaatgactttttaatggttggtctttccacaaaggacatgccagtgaccaaagccgattcaatagatgttttatgtgattatatcatggcaatagaagacgatacgacactagagatgacatgggtgcgaagtttcaatccttttaagatagaaatatctgttaaagacctacaaaatatattaacgataaataaagatatgactctaagatgttttgacatggctgttcggctgcttgccaataaagagtcatgtaggccgaaaggagaaatcataaataatagaaagcattatatggacatgcgtttctggagaatggttggttttggtaaacttccaaagtaccatcaggatcctacagcagaagagttagccaaaacactcgattgttggccatcaatgaattattatatcacgggttgtagatatgttcttatgccatggaaattcaacggatgtcacgcccttttcgtaatagatcatgttaaaaagcatgtgacttttatcgactttacaccgactcaagattggtgtaaacacatgccatacacgaggtttgcggaagcgattatcatggcctcaaagaaatataagattgcttacagcaaaaaacgttctggatgggcggaggatatctttaagtgggaacatacaattcagactggtgttccaattgacttaagagggtttaatacgagctacctcgttctacaagctatggccatgtgggggaatgacagacgaatgaaatttgttgggattgttcgaaggagctttgtgattgatctgttaagttatgaggataatttgtgccgatatgccatccctgcaaacatacaacagagacttatcgatatcgctaaaaaggattag

SEQ ID NO: 21278 - DNA, 213 bp, Zea mays
  Peptide Sequence Number=SeqID_64653
atggctcgcccagctggaccagctcatgtggaaccatgcctaggagctctccagctgagaaccgttggccaaataaatccttttgttggtggctttggttgggattggaacaagaacaagatatccgtcgatagtgattctgtatgggaggcttatgtggcgactatatatgccgacaaggagctgggagaagttcttagagatgtactgtaa

SEQ ID NO: 21279 - DNA, 411 bp, Zea mays
  Peptide Sequence Number=SeqID_64654
atggcgcatggagagatacctatggccgcgggccgcctcctacattctttgcctcaccgtcgctcggtgtccacgacatggtcaggcgtgctcggacgagcatgtggatcaagcacgaagaagttttggggcgcgcagtaccttgggacgatagagatcgctcacctgagcgtgttcaccgccgcggagccgcaccatggcgtgggtagagctgcagatagaataatcgtcggttttgggacatctgtgcgttgggtcgcgcgccaccgacagggagcgcctccgtgtgcctctacgccgtcgtgccccaacaccgggatggggaagatgaacgcggacggtccgattcgggatgatcggttgggattagatctagacgacgttttggcatcggacattgtggactgttga

SEQ ID NO: 21280 - DNA, 366 bp, Zea mays
  Peptide Sequence Number=SeqID_64655
atggatggggacgctaccgcgctcgcctccccctcgaccggtaccttcccagacaagcacccgcggtcggaaaactccgtccagcgagctccaggcgattctatcgccacttcaacgccgccggagaaggaagccgtggatccgcgcacggccgcgattcctttctactggtatgtgcgaaggcgccgccgccggtcgtctctgtccgccggatcggcgtctgctgggcggaggtcaacgggggttcgtcgattcgccgacagatctacgctcacccgatctgcgtcattagagcttcaagtgccaaggtacatgactcgctgctccaagttccagagctccgattcaatccgtgtcccaacataa

SEQ ID NO: 21281 - DNA, 1650 bp, Zea mays
  Peptide Sequence Number=SeqID_64656
atggggtcgcccaaggcggccaagagcatggtgaagcaacgcatctggcgtcaccggctcgtcgcgccgttcgctgccgttctcatcacggccgtcgtcgtattctccggcctgttcgcgcaggacccaagtgccacctcggagttcactgccgtgaacgcgggtaacaccctgccagtgcgcgataagtcggaatccacagcagccagaggatctcccaacaaggaggatcttgcaacagctgcatttgagcaagaattggatgttggaaattctggtgtggcattgttacttctcttactactgtttcatgtcccaattaatcaggcgagagagggacagcaacggcagtgccggtccaacgagaaagaagcagtggaggatctggtatgcagccctgctatcatcgtgaagcagtctccagatgctacaaatcggtacgacatctgtgagctttgcggtgatgctcgcgccattggccgctcctccaccgtaatgtacgtcccacagccccttacttccaacggtgaagagtggaacattccagcacaatcacggaagagccttccatggatcaagaaggtgactgtcaaaaccctgaaggcttcccaacaggcgccaagctgcacatccaggcacaccatgccagccatcgtctttgcgttgggcgggttcacaggaaacgtctggcacgacgtgagcgacgtccttgtccctctgttccttaccgcccgccagttcgaccaagatgtccagctactcgtcaccgacaaccggccctggttcatcaagaaatactcggcaatcctccgccgcctcacgagacacagtgtcatcgatttcgatgcagacgacgaggtgaggtgctatccgcatgtcatcgtcgggctgaggagccaccgggacctcggcatcgatccggactccacgccgcagaagaactacacgatggtggatttccgtctgtttgtccgcgaagcctacggactgcccgcgcctggagtggacataccgtacagggctgacaaagacgagcccgagaagaagaagccccggatgatgctcatcgagcggggcaagacgcggaggctcgtgaacacgcctgacgttctactcgggcttggctggttcggcttcgaggtggtcagggcggatccaaggacccactctgacctcgaggagtttgcccgcctagtcgactcgtgtgacgcgatgatgggcgtccacggtgccggtttgaccaacatggtgttcctgaggtcgggcgcggcgctggtgcacgtcgtgccctacggggtcgagttcatggctgacgggttctacggcgcgcctgcgagggacatgggcctcaggcatgtgcggtacagcgtcggtccagacgagagcacgctgctggagaagtacggcaggaaccatgcggtggtgagagacccggaggccgtaaggagcggcggatgggagaaggtcggggaggtctacatgaccgagcaggacgtcgtgctcaacgtgacgaggtttggacctagtttgttgaaggcaatagagttcattgagctagcttctgtgctcggacggtggtacacaaactggaggaagaatatgtcctttgtgctctgctggagcctcggctctcaacaaactcctctctag

SEQ ID NO: 21282 - DNA, 633 bp, Zea mays
  Peptide Sequence Number=SeqID_64657
atgggcctctgcatatccgtgtctctctggaaggagaagctctacggcgccgacggcagcagccggtcagtgcagtgtcgcgtcgtccatgaggttgccggcgtggagagtggtgactgcgagtgcgggaacttgggaagcgacgccgacgcgctgggggtagagcacaaggcggcggcggcggcggctccggcggccatgggcgtgaaaagcggtggagtggagggagctgccgctgccgtgtcgggtggcactcctgtgcggccgatatggcagaggagggtgctgatgggcgtcaagtgccagctgccgcggttcagcgggatggtactctacgacgagagcggccggccggtgtgcactggcgtccgggacagagctcgtgaccaggaatttatgaatatttatatattatcaccaatttcatgtggatcttatatgctagagcgttctatttttttaagttcacagccggtattcatcgacaaaccggattcagacggttttaatgacaaatttaagctcgggttcaatgttcaacctacgcatgagaaacatgctgcagcgatttcagtgctgaaaggacctgctttagtcttcgtcatcagaagcaggcggtggcaattctgttga

SEQ ID NO: 21283 - DNA, 408 bp, Zea mays
  Peptide Sequence Number=SeqID_64658
atgagcaagaacacaagagacacaagatttatcccgaggttcggtcacaccaccaaggtgccctacttcctcgttgaggcgcccacaaagagccgggtctctttcaaccctaatcctcccttgccgaccacaaaggtgcccacaaaagcaggtggccgttggggaaagttggccaaaaaccggttgaaccggtttgtaaaccggttgaaccggtttccaccaggaagaactcggttcactgacctactcagccggagagtcaaccggactcaaaaccggttgagccgggctcaaatccggttgaaccggttttcccaaaatctgcacacgactttttctgacaggactgactggcagactggcagtgacagagcggaacagtgcagaaaccggttgaaccggttttag

SEQ ID NO: 21284 - DNA, 264 bp, Zea mays
  Peptide Sequence Number=SeqID_64659
atggcgcaccagacagtccggtgcgccaccgcaccctccgtatacctctggactaccatcgtcgctctctttcccacgctcgacagccccttgaccaaggctggcatcccgccgtcgactgtcggagctctcgtcgtcaattgcagcgggttctacccggccccatggctcgccgccatcatcgccagccgctaccgcttgcgtgccgacaccaagacagtcaacctctctggcatgactgcactgcaggcgttgttggcgtga

SEQ ID NO: 21285 - DNA, 390 bp, Zea mays
  Peptide Sequence Number=SeqID_64660
atgatggaaaatttcggcagcaaaacagtgcaaatagcaatgaatgctgtggtaacttcacaactacttgtcagtttatatagtgctgcagtggaccgcaaggatcaaacagtaactctgcaaggtgggaccgacacgcgctcggaagtcggatcgtttctccgcaacgagctcagggaaggtgttttttggaccttcggcttcccgaagctgaagaggcttttttcacgggtcaagctcgttacgaagaacgatctagcaccgcgaaaggggctactgttggggtcgtgcttcggtgcgccgaaggtctcacacgaagaagtagcttcggctgaagtcgtctccaagagatggccgaaggtcccttttcatggagcttcggcgttttaa

SEQ ID NO: 21286 - DNA, 1383 bp, Zea mays
  Peptide Sequence Number=SeqID_64661
atgacagctcgaagagcacagctggtcatggcaatgctgggaatgcgcatgctcgttggggatggcatactcctgctattacaggtgacactcgacaaagaaattacctttgccgagtgtcacctaatacactcaaagatgctggtcaatagcagagttgagcgaagcatgacagctcgaagagcacagctggtcatggcaatgctgggaatggatatatgtcatttcattctttacctcatcgcactaccggaatcgagcgctctgccgcttgaaaaacactcggcaaagactttgtcgagtgtggcactcgacaaagagatctcagcgaacagtacatcggcaatgacttctttgccgagtactttttatcgggcactcggcaaagtcggtactcggcaaagaaaaatggccgtcacggcgcctggtgacggaggaggcgactttgccgagctgctattgaccatcgtcaatagcagagttgagcgaagcatgacagctcgaagagcacagctggtcatggcaatgctgggaatgcgcatgctcgttggggatggcatactcctgctattacaggcactcgcctgctattacaggctggtcaatagcagagttgagcgaagcatgacagctcgaagagcacagctggtcatggcaatgctgggaatggatatatgtcatttcattctttacctcatcgcactaccggaatcgagcgctctgccgcttgaaaaacactcggcaaagactttgtcgagtgtggcactcgacaaagagatctcggcgaacagtacatcggcaatgacttctttgtcgagtactttttatcgggcactcggcaaagtcggtactcggcaaagaaaaatggccgtcacggcgcctggtgacggaggaggcgactttgccgagctgctattgaccatcgtcaatagcagagttgagcgaagcatgacagctcgaagagcacagctggtcatggcaatgcggaatgcgcatgctcgttggggatggcatactcctgctattacagcgtacctcatcaacaatgccaacgacttcagtgacagatcctacagatctgttcctcggcatgtttacggaccgggccatgttcacttcggctggaattacgggaggcaacggaagtcggaagatggagtaggagatggcgagcaaggacgggctcactcgatccccatggcggtcctggcggaccagggtccagggcccggcgaccctgggcgcgcctgccgtgacgccggccaaggtaggcggcgggaaaggatcgtcgtccggaggctagctggaggcgaacgggatgcacggctgcactgtccagtgtacgggtacggcgacagccttggcgatggggactttaattag

SEQ ID NO: 21287 - DNA, 162 bp, Zea mays
  Peptide Sequence Number=SeqID_64662
atgaggaaaaacttcgaaggaaaaatttttatgcttcgttgtgtacgaaaagaagggaaggtgtttttcgccttcggctcaaaagagaagtttcgtccacagcaaagcagattgtacacagatagcagaaacaaaatatattacaaggaaaatatattgtaa

SEQ ID NO: 21288 - DNA, 318 bp, Zea mays
  Peptide Sequence Number=SeqID_64663
atggacaagaagctgagcgagcacttctctgcttacgacgagggggcgctcaaattcagattgtgggatgtgaagcaagaacttccattttgtcaaccatttgtctgcacgatctctacatctagacaactggaagctaagcgagatctcgtcgctggtgtcgtctacggcaccgacttcttcacggtgagcattatcagcagacactcgacgcgctcccacaacttgtgcttcacggagtgccccaggttcctcctctatgtcgccctcatctcggtcatgccgtgcataaggcggctgtcaagtgtcaacatctag

SEQ ID NO: 21289 - DNA, 948 bp, Zea mays
  Peptide Sequence Number=SeqID_64664
atggcggattccgggagcgacctcgtgcttgggcttgggatgggggtcggggtgcggagggaggaggaaacgcagagagggaggagggatagggaggcgaggagggagcttgagtttgagacggggaggtgcgcccggccgtcgccggagccggcggtgcgactcacgctcctgccaggcctggtgcctagccttggcctcccgtggccgctgtcgtccgagaccaatcgtgaggtgtcgacgcgtggcttcgacgacgtgaaccgggcgctgtccgtggccggtgctggcgcggaggaggacgaggcggccgtggccgcagccacggcggcagcatcctcgtcgcctaataacagctcgggctccttcgcgatggacatctccgcgcagggccagggccagggccaggaccaggcggcgcccgccgccgaccgcgcgtgctcgcgcgccagcgacgaggacgacggcggctcggcgcgcaagaagctgcgcctctccaaggaacagtccgcgttcctggaggagagcttcaaggtgcgcgccacgccgaacccgaagcagaagctggcgctggcgaggcagctcaacctgcgggcgcgccaggtggaggtgtggttccagaaccgcagggccaggacgaagctgaagcagacggaggtggactgcgagcacctgaagcgctgctgcgagacgctgacgggggagaaccggcggctgcacaaggagctagccgagctccgcgcgctcaaggcggtgcgccccttgttgcacatgcacctcccggccaccaccctctccatgtgcccctcctgcgagcgcgtcgcctccaccagctccgcggcccccgccgcgccggcgccagcgtcgccctcacctgctgctggtgctggcattgcggcgtcggccccggacccggatcagaggccctcgtcgtcgttcgcggcgtga

SEQ ID NO: 21290 - DNA, 1020 bp, Zea mays
  Peptide Sequence Number=SeqID_64665
atggagaaaggggtgcagctgatggaggggaggcaggcgtggccgctccacacgatggggatgcccgtcgccagtacgaccaccaccagcacctgcttcgacgactacagctgcagcagtagcgggtgggagcagtcggcaccgttcggctgcttcggcctcctcgccgccgacgtccatgacctcttcccgctcttcgcagccatggagccggccccgccgccgccgccgtcggcgcacggcgtggccgtcgcgatccccggggagctggacgaccttctcctgaacttctgggacgcgggctgccacgacggcgacgtgggcgagccgccgctcaaggcgcagcaggaggaggaggaggccgccttcaattccagctgcgcctgcgccagcgccacgcacgagcagggctaccgcacccccaccgactccttcacaattcactgtgatgatgatgaccaggccttgagctcgattttctcggcgggtcccgcgccggcagcggagagagcggcgttccagcagcaggcccccgccacagaggcggagcccctgcccagctcgtcctcctccagctgccgcggggacccgcgcgccgccggggccgggaccggcctgccgcttccggggcggggcgccgcgcgggggcctgcgcgggccccgccgcttccgaggacctgcggcccctctctgaaacgtgccgcgacacgcgaagagtcggagcaggcgtcggccgagagcggcggcggcaagcggcggaagggcgcgggcgtggtggtggtgcgtccgttcgcgctgctgaagcccgacggcctggacggcggcgcgacgctggcggacatcaacgcgcgcgtcctgatgcggccggcgcggccggtgcggcaccccgtgggcgagttcgcgtgcgcgccgcgcgtgtccgcggaccagccgggcatctcgggcaaggccgtcgccggcttcacgcgcctgcacacccccgggcgcggctccataaccatcataaggacgcgaggctag

SEQ ID NO: 21291 - DNA, 279 bp, Zea mays
  Peptide Sequence Number=SeqID_64666
atgagtttgtcttctcctgttctcccccatccgttatcaccatggcggcgcactattgcacggcacaacgccggcgagcaggcagaccagcacataggcgttcaaccgcagaaccgagcttcgctacgagagaagggaaacaaggctaacacactggtaggacccttaccggtgattacggcgtggaggcatccggccatggcgcggtgcggcatcacggtggcagaggaacttcggcgagaaatcacgtgctcgcaagctgtggatgtctcagtgtga

SEQ ID NO: 21292 - DNA, 534 bp, Zea mays
  Peptide Sequence Number=SeqID_64667
atggcgcctcctgttgacgtggccggcccgcgccctaggttgggcgatgtggaggctcctctgaggtcgaggtcgagtctgtcttccgtggccgtggttgagtccgagcctctgggtcgggcgaggcggagaccgtcggctgaggccagggctgagtccgagccctggggtcgggcgaagcggagttcgtcgtcttctggggctgagcccaagtccgagccctgggtcgggcggagcagagttcgccgtcttctggggctgagcccaagtccgagccctgggtcaggcggagcagagttcgccgtcttccggggcttagcccaagccacctttgcattaaatgctcctgcgatttggtcggtcggcgcggcgatctggtcagggttgcttcttggcgaagacagggcctcgggcaagccggaactttgtgctgatgggggttaccagctgagaattaggagccttgagggaccttcggcgacgaagcatggtcccaacagtagccccttcgtggtgctagatcgtttttcgtaa

SEQ ID NO: 21293 - DNA, 780 bp, Zea mays
  Peptide Sequence Number=SeqID_64668
atgacggtggagaagggccacgggtcgcgtggcagaacgacggttacccggtcggccatcaccaagcgaagggggtggcggcggagcggacaagggaccgggaatggggatactctgaaagggatccttctccgcgaaggaagcgggccccgagccctcctactaatcagaggttcgaaggctggcccctcggaagggctcgacagccgcctcagagcattcaggctccgcacccactactggtcagaggaagctccgcctcgctcgaccccaaggctcggactcaacctcgaccccggaagacggcctccgcctcgcccgaccctagggctcagactcaacctcgacctcggacgacggtctccgcctcgcccgaccccagggctcggactcaacctcgaccccggaagacggcctccgcctcgcccgaccccagggctcggactcaacctcgacctcggacgacggtctccgcctcgcccgaccccagggcttggactcagcctcgaccccaaacgacagtctccgcctcgcccgaccccagagctcagactcaacctctacctcggacgacggtctctgcctcgcccgaccctagggctcggactcaacctctacctcggacgatggtctccgcctcgcccgaccccagggctcggactcaacctcgacctcggacgacggtctccgtctcgcccgaccctagagctcggactcagcctcgacctcggaggagcctccgcctcgcccgaccttgggttcgggccgaccacgtcgtag

SEQ ID NO: 21294 - DNA, 1773 bp, Zea mays
  Peptide Sequence Number=SeqID_64669
atgtccggtgcaccggctgccgcacgctggaactccattttcctgtgcgctgtctggtggttcatcggacagctactgtgcgctgtccgtcatcagttcaggatgccgcacacgaagaatgtgtcggcgccagggggaggcgatgatgaggatcctcgtcgccccttcaggcaggtcaagggcaaaacagtttacttggagcagcaggaaggccgcaagaagcggcgtacggacagagcagcccgtgcagcggcagcagcagcatcagccgctgcgcaggccgagcttggagatcagccgcagactctgtcagatcagattgcataccgtgttcgtcgtctcgcctcccggcctcgctcctccactcacaccaccgcttccactccaccacccactctgcctgctcccgtcacccctgttgcgccatccaccaccacagccatacccgctacctccactacgccagcttccactgctcctcctcccgctcctgcttcagctcctcctgtccctccacctcgattccgggagcgcgatgagactgaggttcgaccccttgctgcggatcccagactttttgaccttcagcgtgctatagtggcacgggtacgtaggttcagatacgtacccgtggagtcttggttaccagctcagagggaccctgcagcagttgacctattcagcacacatattcaggagtcttttttcagagctcagatgtctgcccagatagctctgcgagtgcactggcttttggatcttccagcctttctgcttgccggcggtgctgactctgaggcgcacctcacatatctgcctggccttctgacccttttgactaccagcggcagattcgccagctctttggatttcccgagtcgacgacttgacttcacaacctctgctacgacacctctaaccctcctcgtcgccctcacggcggtgtggctccggatcgaggacaccgttttggatgggatttgtgctcgtagacagttgccatatgctcactacttatgccacatctttgcgcagctgattcaacctcctcagtttcagggcacacttgaggcctcacgccttgtctttggatcctaccgtcctgtgcctgaggctcctgtgccagcttctgctcctgtttttgactctcaggccaaggatgcagctcttcatcagtttgacactcaggatacagcagttgatgatgatgatgatgattttggggttcctcctccgcctcctatgcctccacgctcacatgatcacgaggctgggagttctagtgctgcccctgctgcccctcccgctattgacgctgctattgcttcgattctccagtctctcactcagcagcaggctcacctggcagccgagcagacccggttgtccgagagaatgctcacgatgtttcagaccatacagtacagacataattcacttcagcagcagctacttcaggatcgggctgagagcagggcattcatggctcttatgctacagcattctggtgtctcagttcccccagttcagtctgctccacctcctccgcttcaggctccagttgtgccagcgattcagaccggaccccctattccttctgttggtccctctccgctccggccggtcactttggctttcacctctccggttctcagctctgtctgcccgcagccgccagtgccaccagcttctgctgttaccactactgctgtggcagtatctgtgaccacttctgttccggcagctcctgcagcgcggctgaaagtcgcctag

SEQ ID NO: 21295 - DNA, 213 bp, Zea mays
  Peptide Sequence Number=SeqID_64670
atgggaaccaatgggcatctcgacctcgacatgggaggtaattctgtagatcaaaagaaagagcacatcggggacttgccagttcttgggaaggtctctggtgtcgtggacttcaaagaagcaaaattctgtggctctttctaccaccaaagccgagtatattgccgcaggccattgttgcgcgcaattgctttggatgaggcaaacccttag

SEQ ID NO: 21296 - DNA, 1215 bp, Zea mays
  Peptide Sequence Number=SeqID_64671
atgactttgcagaacctcgaagacctttcctccgacggcgactcccagtccaaacgaaggcaactttttgtgcccagatgcacaggattaacagctgatggtctggtgaaaatcattcattttctgcatgggcagcacaaaggcaatctaagtcgtgttcgactgcatggtatctgcaaggtgaataaccaccatctcgatattatcaagtctctcatgtgcagaggtagccaacaacaagatgctcaagcacttcactacaaccatagagtccatgaagtgctgaacacggacgacggtcgccctattgatgtagatttgtgccctttgtgcagaaatgtgagactcgtgtttgattgtacaaggaagaactgcagggaagtgaaggatggccggtctcgatgccgcggttgcttcttttgtgttgctagatgtgaaacttgtggtggctgcatcgacctggaggagctcgcttccaaaatgctgcacatgcaaccgtccctactgcgagaggcattcaaatttgaaagagaatctatcagcgtctgggcagttcacatgtcaggagtgtgcagcgtttgctacctcactcagaagtcggggagaagtgggtgcagacctcaaggtcttgcgcatccaacttgtctgaatgaagggactgccatgtcaaggggggacaatgtgaggctgaagaaggggccgtggacggcggaggaggacgagaagctcgtcaccttcgttatccttgcgccaacgcccactgctgcccaagctcgccggtgcgtgtgcatgcaatgcatgctcgaccggtcgatcgttcaaataacaagactccctgcaccaccaggcatgcttcgaccagcagacgccgccggcgattttctcacccgccgccgccgcctcgacggttcgacgccgacgacgacgtcgagctctgcagcctcggcggcggcgtccttgagccgcgacgaggcgctgttcccactcgtggacatggacttggaggagttacccgagatagcagtgttccagatgggggcgctagaggacatggtcgcgtcgtgggacgacgactccttggcgcagccgcagctgtcgccaccgctggtctacgactactgggaccatgcgtaccagccgcggaggagccggagcggcgtcgcgtttgaccaggagtcacgaaagaagattgagctcttctctagctattgttag

SEQ ID NO: 21297 - DNA, 888 bp, Zea mays
  Peptide Sequence Number=SeqID_64672
atggcgctccctgttgacgtggcaggcccgcgcccgaggccgggcgacgtgggggctcctccgaagctggggtcgagtctgtcttccgttgccgaggtcgagcccgagcccctgggtcgggcgaggcggaggtcgttcggtagaggccagggcggagtccgagccctggggtcgggcgaagcggagttcgtcgtcttctggggcttagcccgagtccgagccctgggtcgggcggagcggatcggagtggcgcaggcggcgctgtccttctgtcagaccggtcagtggagcggcgaagtgacggcggtcacttcggctctgccggggggcgcgcgtcaggataaagggttgcttcttagcgaaggcaaggcctcgggcgagccggagatgtgtccgccattaaaggggggcctcggccgagacggaaaatccctagggctttatgctgatgggggtgcccagatgagaattaggcgtcttgaggcaacctcatgtgatgatttgagtcaagaagagcaaactagtttacatgctgaattgactgaaaaagttgaagtcctgactttagacaaccaaaaattgaagaattacttgattaatgcaattactagaggaaaggttgctattgagaacaatgatttcaacaatgagttggcagtggataatcaaaggcttaaaaatgaggtcaagaaactaaaaggtgaaaatgaacatcttgcaacaagtgtgcaaaagttcaacaacgatcaatacctccaaaatgagttgcttatgaacactgtcatgaaaagcaacaagagtggtattggatacaatgcttttgtgcaaaagaaagctaccactcaatacaagccaaagcagactcacagggcctatcaaatgctttaa

SEQ ID NO: 21298 - DNA, 357 bp, Zea mays
  Peptide Sequence Number=SeqID_64673
atgtccggcataccgagggatgtcgccaagcactcgccagatattcgggccggagcccgacccgtcaggcagcctctgcgcctcagttgtcaaggaagggtcggcctcgcctcggcagagcccgaccctccctcgggggctaaaaaggggggaacccctttgcgtcgagattgggtgtacttctccgcatcaaaaattttcgatcaaaaaggggtttttgcgttctcccggctatgtcagaagcagggtcccaaggagcgaacgtgggtacatgtaagtggcaaggccgaccgagccgaggaactcctgtgcctctgggttagggacacctcactcatcacctgccacgaaaaatga

SEQ ID NO: 21299 - DNA, 249 bp, Zea mays
  Peptide Sequence Number=SeqID_64674
atggcggcgcgagcaccaaaggtggcggcttcaaggtcaatcccccagccctcccttcgatttgttcactgcatttggccaaccatccagatcattccacagagccccacgctgttcttcttcccttggctgcctagcaccatggcacgcgcgggccgcagcagcgcggtaccggcgacccccatcccgttgcacgactacccatgtggaccacccgcgcgacagcccaggtgccccaagacagcgtag

SEQ ID NO: 21300 - DNA, 438 bp, Zea mays
  Peptide Sequence Number=SeqID_64675
atgaagtgtatggaaacctggtgtttggggacaccccttacgtcccaatgggtgtctttggccacattgccctgtcttgagcataggatcactatcgaagagatggatagtgcctgggtggcgacttgggagcacttccccatattcttgggaacacaaaggaagatttttttcaggaggatcattggtctgctagcagaaacctcagagatatgttacagagaaataaaggacatcaagtgcatcacctgccctcacaagccaaaaggttccatgtttgtcatgtggttgaacaggaaaaaaatagtaatacaaatgaaacagttgagcactatgttagaacaatcagcatctgaaatgggtgttctcgacaaagaaagcttgtaccttaaaacaggaggatacaagaagctggagtggttgtctgaaggcttttga

SEQ ID NO: 21301 - DNA, 927 bp, Zea mays
  Peptide Sequence Number=SeqID_64676
atggctaggggtgaacggaaggtacaaaatgatattaatattgttgatgatagtgatagtgatagtgatgaggaatttgcttcaccttcatatgatgagctagctgacttgcttaaagattatactcaaatcattagaaagtcaaaagctaaatgtgataggttgaaaaatgaaaatgaatctttaaatgctaaatatgacatagttataaaagctagtgatgaaataaaagaagaaaataaaactatgtcatcaactgtaaatgagctcacaaactccctaaaagatgctaaggataaatgtgacaaattaaatgaagctaatagggagttgcaaaatagactagttaaaatcaaggaagactattgtcggcgtttcgagaccggggggtccctaagccgacgagtgagtgtgccgcgtgccccagcccagatgggtcgagcgcgtgggcgagcgcaaagggggaaaagcgaggtggccggagacgggcgtgagagaggtggaaatcccgcggccttcgtgttcgtcccgcgcccaggtcggctgagagtcgccgtcgtcacagggcacgtggggcgccatcattgcctatctggcggagctagccagatgggacaccggtcttgttctctgcggcccgagtcggctcggggtagggtgatgatggcgctccctgttgacgtggcgagcccgcgcctgaggccgggcgacgtgggggctcctccgaagctggggtcgagtctgtcttccgttgccgaggccgagcccgagcccctgggtcgggcgaggcggaggtcgttcggtagaggccagggcggagtccgagccctggggtcgggcgaagcggagttcgtcgtcttctggggcttagcccgagtccgagccctgggtcgggcggagcggagtccgccgtcttccggggcctag

SEQ ID NO: 21302 - DNA, 264 bp, Zea mays
  Peptide Sequence Number=SeqID_64677
atggtggcgaagccccggctgcgcacgaaccactccggtgagcgtggaccggacagaccagagagggagagggcacaccgaagggtgtcccaagtagctaacggcaaggcgaagctcaccgtggcactggacagggcactcgcgcaacggtggccatggaacaggtggtggacgtcggcggacggtggcggaggttctcggttcacgtgggtagagcgagtgcttcgagctgggcagagggcgcaaatggaagaggggaggtga

SEQ ID NO: 21303 - DNA, 195 bp, Zea mays
  Peptide Sequence Number=SeqID_64678
atgatgagcttcgcttgcggcggaactacgcagccctctccgacttcgctcacagcggtggcgaacgcggcggaactcgtcggtgacgagcagaccggccacggtgggcaccagaggcctgagggttggcctaggcgcgcaaagggggatctggcggactcagccgagggcaccacgcctgcgtgggagcactag

SEQ ID NO: 21304 - DNA, 1083 bp, Zea mays
  Peptide Sequence Number=SeqID_64679
atggggagcactcgcgttgctttcgtcttgctgccgttggaggagcgcgacgtcgcgaaggttggcacccttcagccgtcgctcggcttcaaggattttcatcaggcagcccgactgcattccctcaccaatggtcacccaggatgggtgcagcattccgtcctctgcccgggcgactgtggccggccgcaccagagggtctcacaacacgtcgtacgccgcgagggcggtactcgtgttctgggacggtcccgttcttgttttcgtggcgaggatgggagtgaggacctatcggtgtgctttggggcggccgacgctcgctggtgcggtgttggtgggcaggtggacgccgtcgtcggtgctgaggtggtggcagccggagaaggtttctccgccgacgagatcgtcggcgtcacctgcgctctgggcctccggttctttggctttaatggctggttctcgtcccctgtgaggggacacgaacgagagccttccagcggtagcgttcgccctgggaccatcgctgctgctgcagaggtcgccggcgaaaaccctcggctgcactgcgatgagccggagccggaggcagcggtgtcagcgtggacagaggcggagtcggctcgagaagaagcttcgtcggcccaggagcagctggctgaggctacggagcggccggtcaagccgtctgctcgggccgggttcctggaggagaccctggcggcgatggcccaggccgggccagattccgccgaaggtggagacgacgccgagggtgctgctgctccctctgttgatgtccgaacctgcagggagagtttgtctatagacttgttcgtcggtaacagaatcgtttatccgagcgagagttacttttcacgaaaggtgatgagtgaggaccccgctatcgaagcaatcgaaaagcgcaaaagacgttttggcagaaagacttttttgaggaaaatttttgacgcagaggggttcccccttctagcccccgagggagggcttcaaaatcttggcgatgatgaacggcccttcctagggaggagtgagcttgtggcgccctcgggcgtcttgtcgtag

SEQ ID NO: 21305 - DNA, 115 bp, Zea mays
  Peptide Sequence Number=SeqID_64680
acattgtggtacaggtggttatgagagggatggttttggttatgattatggtgctggcgaagatgaagctgtggaaggagacttccaggagttccaagattacgacgagttctag

SEQ ID NO: 21306 - DNA, 624 bp, Zea mays
  Peptide Sequence Number=SeqID_64681
atgatgaccaccagcttcgtggtggggagaagcaagccaggctgcggcctctgccccacccttagcttcaaggaggttcatcatcctcgctgtggcggagggcgagctgagccggggttctacctcccgcatgggccggcaggctgcctcttccttcagcatttaggggagagggcgctcaccggccttgcggagggagcgaacttcgacaacgcgagaccggtcggccgcaagcgttgtcagctccagcgtgcctggctcgctggctcggctggctctgtcgcggcctccgacgctgcctcctgccgcttgatccgggcgtggctgtccgtccaccgcacgggcgactgttgcgccgcgcgcaccgggggatcatccaagacgtcgtacgccgcatgggcggcgttcgtgttcttggattgtcttgtcctcactctggcacgaagcctccacgcggagaaccttcggccgctctacgatgagatgaagccggaggcagcggtgtcggcgtggacagaggcggagtcggctcgaaaagaggcttcgtcggcccgggagcacgtggcttccctggccgaggaggtgcaacagcggcggctggagcttggccaggtcgtccgctag

SEQ ID NO: 21307 - DNA, 267 bp, Zea mays
  Peptide Sequence Number=SeqID_64682
atgggacaggtggtccatgggccagtttacgatccgaggaccgaggacatcgacggagatgtcctcatgagggcccagctagaagaagagaggaaagaacgacatgggatggaggcgaggatgatagcagagcgggaggcccgcttggcagatcaacagaggatggtggagatgttccagtacatgcagagccttggcgccgcacatggttttgctccaccacctccgttgttccctccagttgaccctgctcagttccatactcct

SEQ ID NO: 21308 - DNA, 309 bp, Zea mays
  Peptide Sequence Number=SeqID_64683
atgaagtacgagtcgccctcgaggggtctggcgtggcgcaaacgaggtcaccactaccccctgggtggctccgagggaccggcctcctcggcaacccccacccccgagctcggcatagcttcaggggtatcgggtatggtgcgaaggaggttagagattgtgggcgacaccgcgcccaacacagtaccacccgcctccgtctcctccctagaggagacagtgatggcctctgttggtgacgcagggtgcgcgggaaccacctcggacgcgacagtgctgggctcaaccggagccccaggagtgggctag

SEQ ID NO: 21309 - DNA, 888 bp, Zea mays
  Peptide Sequence Number=SeqID_64684
atggctgactcgtcggacctcgcgcgtccctatgtcatatccatctgcctgtgctctgcgcgcgcgcccagccgagtccctctccatccccgtggcgcccagctcggcctgcgtgccgctgcgctcgcccatggtggcgtgtccctctcactagctcaccccctcagctcgtcgttgtcgccgagtccgaatatcccagctcgttcttgtggtcgtgagttcttccctgtgcttgcacgagctcgccagccgccgttgtcctacccgcgccagcacgcgaccgtggttgtgttcgagttcgtcgagttcgcgaacgctctgttgccgattcgactgtcgttgctatttgcacccgctctcatccatcaggtttcgcgcgtgctcgcgtttgccgtcaagccgttgaacccgtttttcccctgctcgacatcgtcttcgcccttctggtggccgtcgtcattatggtgctggactacgctccatcatctagtcgcactggctgttgactttgttggtcctttccatgttaaaccagcaagctccgccatcgtcactcagctgctcgcccctagctcttccgatacgtgcctcgtcgtgtttcgcctcctcatgatcagccccatctgggtcatgtgggcggaagatctcaacacccgtcagatgttcgacgacaagcccaaaccagaatttatcaacgttctcacaagtattgagtcacatttgatgctggcctgtatgatcaaggactatcttaactggccacatgccctggatatgggacaagatcctcagctgagtaaatcgattcagatcaccgttatatcctcggagagtggagacttgatctccgacctacaacctaagtcaggatgtaaatattatgagtaa

SEQ ID NO: 21310 - DNA, 213 bp, Zea mays
  Peptide Sequence Number=SeqID_64685
atggcgaccaagtgctgcatcgaggggcaagcaccagggaaggggcactggctgcagcagggaggggaggccatggctgaaggtagagatccgagccagggaagatggagcagaggagcgctccatgggagatgggatatttttggaacccagaattttagtgatacaaatgagttgagtcaaatgagatcgatagaaataaatgggacatga

SEQ ID NO: 21311 - DNA, 288 bp, Zea mays
  Peptide Sequence Number=SeqID_64686
atggacaagagtgttgctcaagaagaatccagcagtgaaggatatgaaacgcctagcgacccttttcctaccactaggatagatagggccgctacgcgaggtcttgtctcaatttcgtgcgatgctcgaaaaagctgcggcacgataccaagacgcaccggaaccgacccaagacgcaccggaaccgatccaaggcgcaccggaacccacccaaggcgcaccggaatcgaccgagataactttcgtgaggtcaaggaaaaggaagcagagcgatcggaacagaggtga

SEQ ID NO: 21312 - DNA, 558 bp, Zea mays
  Peptide Sequence Number=SeqID_64687
atggggtatagggaggctgccactcacatccagctctggctccttggtgccctggtctctcactcagagttcgatgttgtggatttccttatttgtgagatcgaggacaccgttctagatggtctgcgtgctcgtcgacagcttccttatgctcactatctgtgtcacatttttgctcagctgattcggcctccacagttccagggcacacttgaggcctcacgcctcctctttgggtcctaccgtccagcgcctgaggatcctgtgccagcacctgctccagtatttgacactcaggccgaggatactgctcttcatcagttcgaagctcaggacgcagcagttgatgatgatgatgatgatgattttgggattccacctccgcctccacctcctatgcctccatgctcacatgatcatgaggctgggagttctcgtgctacccctgctgcccctcctgccattgaccctgctcttgcttcgatcctccagacacttactcagcagcaggctcacttggcagtcgagcagacccgtcaggcagcaacccaccagtag

SEQ ID NO: 21313 - DNA, 252 bp, Zea mays
  Peptide Sequence Number=SeqID_64688
atgccgcgcacgaagaatgtgtcggctccagggggaggcgatgatgaggatcctcgtcgcaccttcaggcaggtcaagagaaagaccgtgtacttggagcagcaggaaggccacaagaagcggcatcccaggttgtttgaccatcagcgtgctacagcagcacgggtacgtcggttcagatacgtacctaaaggagtcttggatacggctcagaggaaccctgctgcagttgacctcttccagcacccgtaa

SEQ ID NO: 21314 - DNA, 537 bp, Zea mays
  Peptide Sequence Number=SeqID_64689
atgaaggaggaaccagcccttgggtctgtccagcaccaaggcagttgcccgaatgagggagacgaccctctttggccgtgcagggggctgcatacccagatctcgacttctgcatggggttcaaaaagtatagacgagacctggtggttggacgcgcaggctgcgagttggtgcagcgatgagctgatcagcaagtgcagcttccgcaccgcccgcctaacaaggaagctgcgcactgcggcttgcaggcgcaccacggcctgctcatgtgatgacggccatggggtggccctggaggccacaacaagccgagtgaatgcatctggagttggagagggcgggtgggagggcgttgcggcggcagatggcgcggcggctggtggtggtgagggatgggcggctggtggtggtgaggataacctggagctgataccaggtgtcatggaccttcggtccatgaggatagctgtcttctccggcgaggttatacccctctgtcgcaagcttggttctagggtagcagccctaggcgcttga

SEQ ID NO: 21315 - DNA, 201 bp, Zea mays
  Peptide Sequence Number=SeqID_64690
atggccgattgcgcgaactccggtgtggtgcgccgccgcgactctacgcagtcgcgtcgggggaagaagataacacgcgcactgttggatgcatgtttgtttgtattgctacgagtagacgagcaagtgaccgaggacccaggtgttcagcaagtggaaattgctgaccaggagctcattgaaggcaagttgtgcccttga

SEQ ID NO: 21316 - DNA, 1362 bp, Zea mays
  Peptide Sequence Number=SeqID_64691
atggctgaggttgctgcgaagaaagaaacccttaagaatgtcacaaactacattactgatatcatctgcaagcgtgcagatcttggttacaactatggtgttatccttataccagaaggcctgattgatttcatcccagaggttcaaaaactcatcgcggaattgaatgaaattttagcacatgatgttgttgatgaggcaggggcctggaaaagcaagcttcaggctgaatcaagggagctgtttgagtttttgcccaaaactattcaggagcaacttatgcttgaaagagatccccatggcaatgttcaggttgcaaaaattgaaactgagaaaatgcttattagcatggtggaaactgaactggagaagagaaaagctgaggggagatactctgcacatttcagaggacaagctcatttctttgggtacgaaggaagatgcggccttcctactaattttgattctaactattgctatgcattaggctatggtgctggtgcccttctccaaagtgggaagacaggacttatttcgtcgctatgtcctcctgtcctcctggatcccaaggaaagagctgaactgcggacttcacgttggatgaaaggggggctgcatacccagatctcgacttctgcagggggttcaaaaagtatagacgagacctggtggttggacgcgcaggctgcgagttggtgcagcgatgagctgatcagcaagtgcagcttccgcaccgcccgcctaacagggaagccgcgcactgcggcttgcaggcgcaccatggcctgctcatgtgatgacggccatggggtggccctggaggccacagcaagccgagtgaatgcatctggagttggagagggcgggtgggagggcgttgcggcggcagatggcgcggcggctggtggtgttgagggatgggcggctggtggtggtgaggataacctggagctgataccaggtgtcatggaccttcggtccatggggatagctgtcttctccggcgaggttatacccctctgccgcaggcttggttctagggttggcaaccttgcggctccagtagaagaatggactgttggtggaacagcattgacatcactgatggatgttgagaggaggcacggcaagttcaagccagtgatcaagaaggctatggtggaactcgatgctgcacctttcaagaaatatgcatcgttgagggatgagtgggccatcaagaacagatacatcagccctgttttgggagtggagacttggacactgggtctcctggagcagcctgcagtgcagtctccatattgtgaattgtctaataagaggttcgatgggagttttttgggtaccgactggatgtggtag

SEQ ID NO: 21317 - DNA, 702 bp, Zea mays
  Peptide Sequence Number=SeqID_64692
atgacacctggtatcagctccaggttatcctcaccaccaccagccgcccatccctcaacaccaccagccgccgcgccatctgccgccgcaacgccctcccacccgccctctccaactccagatgcattcactcggctcgaaaagaagtgggatcaattcgttgtgatgttccaccgctacaaggagaagacagagaaggaactccaagcagcggtgcggcttcaggcggcagcgcgagggttcctggcacgccgccaggtacagtcccttcgtggggagaagcaccttgctgtggcctccagggccaccccatggccgtcatcacatgagcaggccatggtgcgcctgcaagccgcagtgcgcggcttccctgttaggcgggcggtgcggaagctgcacttgctgatcagctcatcgctgcaccaactcgcagcctgcgcgtccaaccaccaggtctcgtctatactttttgaaccccctgcagaagtcgagatctgggtatgcagcccccctgcacggccaaagagggtcgtctccctcattcgggcaactgccttggtgctggacagacccaagggctggttcctccttcacctttcatccaacctcgaggacgagctggtcctcaagggagggggagatgtcatgggcataatagggagcgagaggcaacagctaggctgggataaggctagagaataa

SEQ ID NO: 21318 - DNA, 470 bp, Zea mays
  Peptide Sequence Number=SeqID_64693
atgaaacacatggatacccaaacagaagaatcaagtcaggctcagctacatgagatacagacacccaatcaaccctcaccccctattgatcaagcaaagttaactcgcaaagaactcaaagcaagaggtgcttgctactactgcaaaaatgaaggacatattattcgtgaatgtcccaagaagcgtctagaccgaataaagaagaaagctgccaagcatgacctaagcaatagttcagaagacccaccattttataagtatgatgatgaaggtcgcttgattggtatacattttggagcaaagaaccagaggccgcgcaacctcgcccccgcctcgacgcccgcctggacgccagagaccgacaccgcccgagccctcgtgcaccgcgccatgcgtccctgcacgcaagccatccgacgcccgaagcccaggcgccgcgacaccgccgtgtcgagccccgtccgtttctt

SEQ ID NO: 21319 - DNA, 4107 bp, Zea mays
  Peptide Sequence Number=SeqID_64694
atggaggccatggaggagctgtcagagctcgccgagtcgatgcgccaggcggcgtcgctcctcgccgacgacgacccctccgacgccgccgcgccgcgccggcccaccaccttcctcaacgccgtcgccctcggcaacgtcagctctggcaagtcggccgtgctaaacagcctcatcggtcacccggttttgccgacgggggagaacggggcgacgcgggcgccaatagtggttgacctgcagagggatccggggctcagcagcaagtccatcgtgctgcagatcgacagcaagtcgcagcaggtttccgcaagtgccctccggcattcactgcaggacagactcagcaaggggacgtctggtggatcagggaggggccgtgctgatgagatttacctcaagctgcggacgagtacagctccctcattaaagctgattgatttacctgggatagaccagcgagctgttgatgattccatgatcaatgagtatgctgggcacaatgatgcaatactgctcgttgtcataccggcaatgcaagctgctgatgttgcatcatctcgagctctgaggttggccaaggatatcgattcagatgggacaagaactgttggtgttataagcaaagttgatcaagcagatggagatgcaaaagttatagcctgtgttcaggccctactatcaaacaagggtccaaaaaaccttcctgagattgattgggttgctctaattggacaatctgttgcgattgcgtcagcacaatcagctgggtctgaaaactctctagagacagcttggcgagccgaagctgaaagcttgaaaaacatcttaactggagctccgcagaataagcttggtagaattgctttggttgacacaattgctaagcaaatccgtaaaagaatgaaagtgcgggttcctaacctattgagtggccttcagggtaagtctcaaatggttcaggatgaattggcaaggctgggagaatctatggtacagagtcctgagggaacccgggcagttgctttggagctgtgccgagaatttgaggacaagtttcttgctcacataacatctggtgagggatctggttggaaaattgttgcaagttttgaaggcaagtttccagacagaatcaaacagctaccgttggaccgacatttcgatctcaacaatgtcaaaaggattgtcttggaagccgatggttatcaaccatatttgatatctccagagaaagggttgaaatccttaataaagttagtactggaaatggcaaaggagccatcacgactatgtgttgaggaggttcatcgtgtattgttagacatagtcaatgcctccgcaaatgccacaccaggactcggaaggtatcctccattcaagcgtgaggttgttgcaatagcatcaaatgcattggataccttcaaaaatgatgccaaaaagatggtcgtcgcgcttgttgatatggaacgtgcctttgttcctccccaacatttcatccgcttggtgcaaagaagatgtccctctgttgatgccggcgggtggcaactggtggaatcgagaaggtccaggaggaggcgtttatttttgaagcaggagcctcggtcccgccgtgtgccggttgaccttgtaggccgctgcttcaactgcctctcgcctcatcactttgccaaggattgttgggagagatcaaggtgcttctgctgtggtggcctgggacatctctcctataagtgctctgctcccaggcgtgcagagccaagaagaccagtttggcggagacttggacctacggttgcaccggtgtccaagaagtcggtctgggatcggctgggctcgacgattgcgcatagcgatcggttagaccttctgtcttcgtcttctgcggctgcggcgcctgagagaatcccagtctggaggagaatcacccctgtcagtgatgcttcgcagcgtgccgaacctgctgtgctgactgggtcttctgaaggtggcccgactattggtggagaggctcgtccggctaagaggcgtcgtcgccgacaacggaaacgaccattggcacccattattcatgaggatgcccagttggcgccggtttcttccccgacccacgattctgcttcacctgtgctggaggactcttccccaccttctttcccttgtatcattggttggaaccagagtatgtcgcgggcggaggaagatctcgctacggcggttgtcatcactgtttttggtaatatggaagttgtgtctgccaatgatattgcggcacccctggcatcacgtctggaggttgatgaaggatccctggttattaggcagctctctacttctttcctgctgatgctgccttcagatggattggtgcaacaattgtgtggaagatggtcagttgtgcgtgctaattccttctcactttcttgcaaaagatggtcacgcctgatgaattcctctggaagcacccttgctcagttgttagaagttgaactggatggcatccctgtacatgcctgggaagtacccaccgtggagagtttgctcagcccttttgcatggatagagagtgtgcatgaagatacattgcaactaagaaatctcagcagcttccgttgttctgtttggtgtctggaccctgttagcatacctccggctagagatctttgggttgttgagcctctgcaactgggtattagggatggttctggtgtcagatcactggtctatccggttaacattcggtggaaggctgctgctgacactgaaaattcagctccccgcccccctccatcctcagtgatcactcctgcagaacctcgtcgtcatttgcgctcccgttctccgccggcatacagaggtcagcgtagtggagcttcctttggtcgtgctcaaggcacagatcactatgttcagggttcgtcctcctgccatggttttcgtgaagctagctgcagggatcctcaggttgtgcagaaagtgactcttgagccaccccatggctcggttatagctccgacatcctctcctgaagccggtttacagacgcttgaggctggccaccccacaccctccgctcatggttttaccgaagatgttggtggtggattatgcgttgtgcagaatgtgatcttggagccaccccctggttcggtcacagttccgacgcttgtatctactcacaccacaacctccattcagggtagtctcgaagttgatgatgatctcctctgcgttgagcagaacgtgaaccttgagccaccccctggttcggtcactgttccgtcgctcgtgagtgctcagacagtccggctagataccagaactgaaggcaggaaaaccctggctacttcaacgttgcccgctgggacttatggtattagggctggtttacaagcatccaacacggtaactaaggtttactacagaagacggctgggtgggaagcaggaaggttctctaatttcagagcagctgcctacgatggagcttgatggtgcaccaatggctaattctgcgcacgcgacacaaactgtgggtgatcttggctcggcggtggtttgtactgaggcacctgagtatatcaaggctatggcaaggcctgttacatctccttgcttggtggatgcttctccctcccatgttcctacttcggatgtggttgagctcactgcgactgtggtagacactcaggtgactctagttgcggtggctcctgcgtccatatgtggggggactctcgctgttgagcaggaggtgcttcattcacaccaaagacaagccttccttgcgtctgtttcccggcggccttccagagttctgcctgctccccccgtacagctcttaaaatcaggttacaagctgcccaccaaaccaattccaagacgcagtcgcagagttgctggagtgggtgttgaatttacctcggctgaccttgacagtcgtgctactaggaaaatcatgagagcagtaggcataattaccaataataatggtatggatcagagggcgcttgatgaatatgcaaatctgttcaagacacccttgtcaggttctcatataaaggctctggcagcgctgtttggctggcagcctcctgaagacatgtag

SEQ ID NO: 21320 - DNA, 426 bp, Zea mays
  Peptide Sequence Number=SeqID_64695
atggaatccgagcaggcagcgaggatcgagaggaagaggaagagagattgccgtcatggtgaccgccgccggggattgccatccacgcggtcggtctgcggtcggagagggccgcgaacgtcgcaggcatcggctccggcatcacggaccctaattcgacgagggcagcctcggatcatggggattccttaccggtgcgggtcttgccgcagtgccacaacctcgactggaatcgagcctcggcgattggaagcaccaggggtattggatttcgtcgtcggggcctcttcacccccgcggaaccacagtgcgccatcggggctcggcgacgggagctggaagatgagcggtggccgttcatcagaaaatgagcgctcgggattagatcctgggcgtaatggctcatcgtccaatctgggccgttga

SEQ ID NO: 21321 - DNA, 96 bp, Zea mays
  Peptide Sequence Number=SeqID_64696
atggagggcggcctagagagtctcaaggagctgggttttatattcccagggatgggagggatggtcaccatgaatatgctgattggaccatattag

SEQ ID NO: 21322 - DNA, 210 bp, Zea mays
  Peptide Sequence Number=SeqID_64697
atggggattccttaccggtgcgggtcttgccgcagtgccacaacctcgactggaatcgagcctcggtgcgcacgattcacggcgattggaagcaccaggggtattggatttcgtcgccggggcctcttcacccccgcggaaccacagtgcgccatcggggctcggcgacgggagctggaagatgagcggtggccgttcatcagaaaatga

SEQ ID NO: 21323 - DNA, 198 bp, Zea mays
  Peptide Sequence Number=SeqID_64698
atgacagagctccagggcctaacctcatctctcctgccgcaggatgagggtgaggtggtgtcaaacgtggtggcagatctctgctcactgtttgtcgtcacgctcattctcagaggcgtcaaacctgttatatcagggcaagttttacttgataatgtggacatcaagacgctgcaatcgaagcaacttagagactag

SEQ ID NO: 21324 - DNA, 735 bp, Zea mays
  Peptide Sequence Number=SeqID_64699
atggcgccccacaagctctgtgacgacggcggctctcagctctcttacggaagcagggggacgaaggaccagggccttcttagagaaggttggccgcgcggggacgaggacgggacatgcgctctcttggggtcgctcgcttccctcacccgcgtggacgcttgtaaccccctactgcaagcgcacccgacctgggcgcgggacgaacacgaaggccgcgggatctccacctctctcacgcccgtctccggccacctcgcttctccccccttcgcgctcgcccacgcgctcgacccatctgggctggggcacgcggcacactcactcgtcggctcagggaccccccggtctcgaaacgccgacaataccgacagttgcagggcgaacaccactgtccacggcgcacgacggacccacgaaggattttgcgctacgacggcgaattccgaggtatccggccacccttcctccgcagtgaggcccctggttctatcctcgaagcacggcgaggcacccaagcatgtattcatggacgcgacgtcgacggcgatggcgcggactgcgctacggtggcggaacttctatccaatggtggcgtcagccttttgtggagaaagcggcgctggagcagtacggggcgagcaggggggttgcggagagcgcagagggtcttatcccccacgacgcggcgagctcaggcccacagttccatatttcccgcggggtggtgggtga

SEQ ID NO: 21325 - DNA, 411 bp, Zea mays
  Peptide Sequence Number=SeqID_64700
atggcgcttcccgttgacgtggcgggcctgtgccctaggtcgggcgacgtgggggctcctccgaagccgaggtcgagtctgtcttccgtggccggggccgagcccgagcccctgggtcgggcgaggcggagatcgttcggcagaggccagagcggagtccgagccctggggtcgggcgaggccagagcggagtccgagccctgtggtcgggcgaggcgtagttcgtcgtcttccggggctgagcccgagtccgagccctgggtcgggcggagcggagttcgccgtcttccgggtcttagcccgagtccgagccctgggtcgggcggaacggagctcgccgtcttccgggtcttagcccgagtccgagccctgggtcgggcggagcggagttcgccgtcttccgggtcttag

SEQ ID NO: 21326 - DNA, 480 bp, Zea mays
  Peptide Sequence Number=SeqID_64701
atgacctacctactgttgccttcttccacaagatcacgaggttcgccatcgagctcaccactatcgatgctcctctgtgttttgaggaggtcctcgcctatctgctggcagagtagttttaaggcattgattcacaaggggtgcaaccacgaggcgcgcctggcctcagaggacttcattgtaaatcgcagtgtttatagcgaggtcattgtaaccacgagcgaggctgcggatgagatgctggatgaaatgtggagcccttatggcgtcgaagtagcacaacaacgctcctcaagaagagatggagcagatttagtagaaaacgtgtccatggcacaaccaaagggtttttatcatgcgcggaaaagaacatatgggatgtcacttaaggaggtccatttatggattaagaagcatctagacattggtatctcaagtttgatcagactatcaataagtttggttttgaggaaaacatga

SEQ ID NO: 21327 - DNA, 765 bp, Zea mays
  Peptide Sequence Number=SeqID_64702
atggggcgaggacgaggaggagggggagcacccgtaggacggaggaggtggtgtagcaggacgccgtcgtacaatagtaggtggagcaccaggccgctgtcgatgcagcacaacatgacaacgacgacgacgatgctcagcgggacgcctctgggtctggcgcatcagtccttcgaccactatgctataataagcaggtcggatgtggtggctaccacgagctataagaagctcgtcgtggacatgcactacaaggcgcacatccaggtcgtcgtcacatactacggcttcatccttagggagaagatgattccttgtccatgggccagattacgatccgaggaccgaggacatcgacgaagatgtcctcatgagggtcggaggaggcaagaggaatgggcggtactagattatcgatggggcaatctactcgtcctctactcccgctctatcttaggtgcgagtaaggagcacgagcgtgagcccagccatacgaccttggcaggacaactcacaacatcacatatagaaactccagctagaagaagagaggtgggaacaaatggagatggaggggaggatgggggtgaagcgggaggtagagtgggtggctcgcttggcagatcagcagaggatgacagagatgttccagtacaagttgtcgtacatagttttgctccaccacctctgttgttccctccaactgaccttgctcagttccatactcttgtgagcatcaaaattctagtcttgcatgatatataa

SEQ ID NO: 21328 - DNA, 504 bp, Zea mays
  Peptide Sequence Number=SeqID_64703
atgtcaaaaacccccgcggaaccacttcgagcgagggcagcgtctccgccatctagcgacgtcttcggcaccagtcgctggtctaacagagacaaaacgggcagggacacccttcgctcgattcagcaccagacgaaggcctgcgacggcgtcatcccacagtgcggcctcgcccagctcagaggcccacgtgcgatccggcccattgtagctgagggcacatgcgtccttaacacaaggcactgggcgctcaggagggtgaccaccggttcgatggtggggagaagcaagccgggctgcggcctctgccccgccctcagcttcaaggatcttcatcatccttgctggggctgggggcgagctgagccggagccctacctcccgtacgggccagcgggccacctcttccttcagcattcaggggagagggcactcaccggcctagcggagggggcggacttcgacaacacggggccgatcggccacaagtgtcgtcagctctag

SEQ ID NO: 21329 - DNA, 453 bp, Zea mays
  Peptide Sequence Number=SeqID_64704
atgaacgcgctctcccgcgaagggtgccggcacttcgaggtcttcgaccaagccgatgaagattttgagcgagatatctataaggttgaggaccccgtagtgaaggaatccgccggagccatctacgaccggatgtggggtccgcacggtcgcgaggtggtcagggagcgggccgagacggcgagggctcaggcggcgcgtggcgagagggtggacgacttcggggcgttgaacagcgcgctgcctgacccggagccgaccccggcggaggccatgtccggggccgccctggagccgcccccagagactgcggaaggcgcaccggatgcccccgcagccgctgcgtcgagggctgaagatcctgcgacggtggcggcggaagcaacagcggaggcaacagcggaggcaacgacggaggatcccgcaacgacagggtcttcgcaggtggcgtag

SEQ ID NO: 21330 - DNA, 220 bp, Zea mays
  Peptide Sequence Number=SeqID_64705
gttcaaggttgttcttggcacggcaagagcagcaacaacaggagccagtgagacggtgtacctgtcgctcaaggcgccacaccatcttggttgtggtagtcgggcagccaacgtcgttctccaacaagttttccacctccatcatctctcatcgaaagatcgggcacccttctacccgttgggtttatcaagtggtatcaaagctcaggttgctcggtga

SEQ ID NO: 21331 - DNA, 240 bp, Zea mays
  Peptide Sequence Number=SeqID_64706
atgccctgtggtggtgcaggggcatctctagctgaggtgctggggaaggcgacctctcagactccacctcctgctgaggcgagggggaagagtcctgctgctcctggtcctactcctggcatcggcgctcctgctcctcgtgtaggcgacaatgcagtctctccaggtgactggactgacctggcactgtgcgacgtagtggatgctccgccaggcgagaaggcaaaaaggggatcatag

SEQ ID NO: 21332 - DNA, 552 bp, Zea mays
  Peptide Sequence Number=SeqID_64707
atggagctctcagaggagccagagccggagggatggatcgctagacccatcactcgcggtgccgctcgcgggtgtcacttccacgacgctctcgacaccctgctgcgtcgggccttcgaccgacacacttggtccatcgagtatcgttgtgtagtctaccagcatcgtcgcgggctatacctagaccagtgggaggctacttgcttggtgcgccgcccggacgatgatcaccggggtgccgaggcagccatgcaagatgcagcacgacgggcattttctcagtattgctcgttgttcagcggggtagctgatggccttgacctaaagtactaccctcgccgttcgaccgacagtgctggaggtgtgattgtctcaccagttggtgagggcaatcctaggctgaacagcatggtcaatctgtctgtcgtgctcaacacagagttggaccacgctcttgacgagttgggcaaggttcgggcggaggttgcggaattgcgtgctgagtgcgcagcacgcactatatggatggtggttctcccgcccctgtcgtga

SEQ ID NO: 21333 - DNA, 492 bp, Zea mays
  Peptide Sequence Number=SeqID_64708
atggcgcagaggctcacccagtccacgtgctacggtggggttccgaactccggcgagcacgattgcgctattctggtggcgggggtcctcggttccatctcgggcaagcttcacgtcctcctaggggagctatctaagggcttggatcgagcggaggagggcgggaaagggttcggccatggtggttgccctcgggcgtctctggcgggtcgcggggaggtcgccggagctatgggcgagcttggggaagtttggcgtggtacagaggaggcaacggggaagatggccgggcactggggtgggctttatagccgcagcgcgggcgtggtcacggggcggccacgggcgcgcgaggggttcaacggccgatttgagcgccttagcgtgcagatcttggcaaaacccccatgtacgggatctttgggcgccattttgtcaattgggccaaaaggttttgagtttgggatcaaggtgaacatgttagatctttga

SEQ ID NO: 21334 - DNA, 294 bp, Zea mays
  Peptide Sequence Number=SeqID_64709
atggaattaatgattaatgtgtggatactgagtcaagggtttgaatgtactaaacacatgtcgagaaatatgactttactcctcactggacctgagacagggttctcccatgctagctatggtgggtacaagtgcggctgtggcacggtggcagccggggacaattggagcattgtacgccaaggccgtacgctacaggatatggttgacggtgtgacttcgccttccatcccgccaccgggttggacggttgactgggatgctgctccggtaggagaggaccagaaggagtag

SEQ ID NO: 21335 - DNA, 405 bp, Zea mays
  Peptide Sequence Number=SeqID_64710
atgagctcccccgcctgcgcacgtggaccggcatacgccgaccatccccggagacgatccgcacaccggcgtaaccgtcacaacctcccctacgccctcggccacctcaccggagcaatctcaccaccgccccaacatttgaaggcaagccccggtttttgtaacaccccaggtgttactcagggtgtccacctcagggttacccccctttttacccattatcacatggagattgaattgggcaaccgtgagacttgctcaagcttgacccggggggccctcgtcaccggaatagcccaatcacgctcaccggagttcaagaacccgccggcgcacgtggaccgggagccgccgacgacccccgccgcctgtgctcgtggccagagtagctccgaccacctctga

SEQ ID NO: 21336 - DNA, 354 bp, Zea mays
  Peptide Sequence Number=SeqID_64711
atgagcgcactgtaccgcctacaggccctgcagagcgatgctatggcacatcttgctaacctcgctcagactactaagctcaccctcgacagccgagaggacttcgtggtcgacctatcctcagagttggtagaaaaagatctacaggaaaaccagctccacaatgtgcagcaggagcttgaggatgctaacgatcacctggacatgcaccacctggagatggagggcaacgaggacggaagcgagggagaggaggctcccgaggagttgaaaccaacctctggtaccaatgcgactgcctccgtgatgcccccttcgcccgtatccagtgtcgcttccactactcagggttga

SEQ ID NO: 21337 - DNA, 1164 bp, Zea mays
  Peptide Sequence Number=SeqID_64712
atgcaggcggcacgcaaccgcgccaagtgggcgcgcccctccgacttccaacgcacccagcatggaggcccaggcccacgcgtcatgcaaccgggaccgggaaagggggataccccgaaaaggatccttctccgtgaaggaaacaggccccgagcctcacaactgatcagaggttcgaaggctggcccctcggaggggttcaacagccgcctcagagcgcttgggttctgcgcccactactggtcagagaggctcgggggctgctctcgcaaacccggctccggccaaaccgttgacagcgtcaacataccagcccgagaacttgggacccgaccgggcacccgggctacggccaactcgcatgagggaacgaccagaccagccgaagcattgcgcaaggcattaagacctcggaggagtcaaaccactcctccgaggcctcgggggctacacccggcgggtgcgctcgcgcgcacccgccggaacaaaacgcaactgagaaaggttggtccccttgcaaaaaagtgcgacaaaagcctccaagcgagtattaacactccctttgaggctcaggggctactgtcggggaccataattaggggtaccctcaaggctcctaattctcagctgggctcggactcgggctcaaccccggaagacgacgaactccgctccgcccaaccccagggctcggactcgggctcagccccggaagacgatgaactccgctccgcccgaccccagggctcagactcgggctcagccccagaagacgacgaactccgctccgcccgaccccagggctcggactcaggctcagccccggaagacgacgaactccgcttcgcccgaccccagggctcggactcgggctcagccccggaagacgacgaactccgcttcgcccgaccccagggctcggactcagccctggcctcagccgacggtccccgcctcgcccgacccaggggctcggactcgacctcggcctcggaagacagactcgacctcgacctcggaggagcctccacatcgcccaacccatgggcacggaccgaccgcgtcaacagtaggctccagcgctcctccgacggccacgacaccacacgaaccgggtgccaagacctctccggctgccacaatggcatgtacttagggcgctag

SEQ ID NO: 21338 - DNA, 417 bp, Zea mays
  Peptide Sequence Number=SeqID_64713
atgggaagcctgggggagggttgcataccgagggtaacgcggggcagaacgctgtcgacggggtctgaggtcgcgcatccacaggaacgttctagcgatccactggaacagcgtcaaggagtggtggacgtctactgcgaggtggacaatggcggcggcgattgttctctctccctcagccttacgacgaatttagggtcaccggatttggatgcaacaggaggggaggctacgagggggagctctgcctttataactagggagaccgagtccaagcgctcccaggaaaggccgccatcgctgcgcgcagaggttgagcttccgatgcttgcgcccacgacttcggtagcggtggttgaggattattccgaccagcggggcccacatgtcggccagcaaacgactgagtgcgggtga

SEQ ID NO: 21339 - DNA, 522 bp, Zea mays
  Peptide Sequence Number=SeqID_64714
atgacaaactcaacttccctgtatggtggcatccctgataactcttctgggaagacatccggaaaatctctaactgcatggatgttgtcacccacaaacttcttatctactaagaatgccgctagtctggtggcgatagttactgcaattccaacttcaaatctttctcctttggaactgggtctcctttgtaaaatgggcacggctgagggaaactccagatccaagccgttagatcaaaacagatggcccgaattagatttacccatccgcgaaccggtcgcgcatccacaggaacgttctagcgatccactggaacagcgtcaaggagtggtggacgtctaccgcgaggtggacgatggcggcgacgctcgttctctctccctcagccttacgacgagtttagggtcaccggatttggacgcaacaggaggggaggctacgagggggagctctgcctttataactagggagaccgagtccaagcgcccccaggaaaggccgccatcgccgcgcgcatag

SEQ ID NO: 21340 - DNA, 309 bp, Zea mays
  Peptide Sequence Number=SeqID_64715
atggaggtcgagcagcctgagaacctgcaccattgggattgggctgctgagcttcagcaggaggctcaacctgagttacctgtagaacaagtggactcgaaagttgtggtcctagatgatgatgatgatgatgatgatgactcggagtaccagctatctgatgtggacatctcctcaggagagatagacttgcctggtgatgatgccctagaagatgatgaggacccaaatgatgaatatatcaaggatgttgatccaaaagaagaagatccacatgagcttattgacattgatggcatgggaacgtag

SEQ ID NO: 21341 - DNA, 1191 bp, Zea mays
  Peptide Sequence Number=SeqID_64716
atggggcaccaggcgcagcacgccacggacgacaccgaggagctgctggcagcgcaccgcgagctgtggtgccatgccctgggctacgtcaagtccatggcgctcaaatgcgccttggacctgcgcatccccgacatcatccaacgctgcggcggaagcgccacactaggccagctgctcgccgccagcgaggtcccggcgtccaacctcggctaccttcgacgggtcatgcgcacgctgacagccatgcgcatcttcgcggtcgtcggccacggtcacggtcccgacaaggccgacgaccctgcagacgacgacgcgaccgccgtctcctaccggctcaccccggcgtcccgcctgctcgccaccagcgacgacgacgacgacgcctcgaagaataatctgagcatacatcccaacatctccagccacgtccgtcccaaaaacgtctccctcctgttcagcatggccgagtggatgaaggacgagcaggcgctctccgtgtcgctctacgagacggtgaaccgcaagtgcatgtgggcgtgcgtagaagacgacgccgcgaccagagcctgcttctacgaaagcatggacgccgacacccgcctcgtcatgcaggccgtgatccgcaagtgccctgccgtcttcgacgacggcctcacgtcgctcgtcgacgtcggcggcgcccggggcacggccgctgcggccgtcgtcgccgccttcccgcacatccagaagtgcaccgtcatggacctcccccacatcgtcgccgaggctcccgccggcaccggactgtgcttccacggcggcgacatgtttgagcacatcccgtcggctgatgcagttatgctcaaggtatatatatatacaaactggtatcaaatggattggattctgcacgactgggatgacgacaagtgcgtcaagataatggagcgctgcaaggaagcgatcagtggcaaggaagggagaggagggaaggtgattataatagaaacagtgcttggatctcggccagacgacgacgcgacatgcaaggagacgtatgtcttggatctccaaatactgagcttcgtgaacggagccgagcgagaggagcacgagtggaggaggatcttcctagctgctggattccgtgactacaagatcacgcacactcgtggtatcccgtcgatcatcgaggtcttcccatga

SEQ ID NO: 21342 - DNA, 276 bp, Zea mays
  Peptide Sequence Number=SeqID_64717
atggttaaaaattttggcagcaaaacagtgcaaatagcaatgaatgctgtggtaacttcacacctactcgtctgtttatatagtactgcagcatttgagaacaagtccccaacaggcacacttgacactcccaagacatcttgtagtgcatatatgattaggtcatatcaaaacaacttgaaagcttctgatgtcgaagatgacgctaatgttgaagaagaaagtgatcttcgactatctaaatcgagctatattgatatgggtgatcccttataa

SEQ ID NO: 21343 - DNA, 522 bp, Zea mays
  Peptide Sequence Number=SeqID_64718
atggtgaagaagaggttcttgcaagagatcaaggttggtcaagctgtgaagagacgcgaccccaccaatggagtccccgtgccctccctagcctccccgaccactcggattgccccagagccctgccaatcgcccgcgcccctcgtctccggcgagccctccgccgcggggacgagcgccgccgcccagctagccgtagggaagacccaggccgcccatccgatctccgccgttcagcccagatcgggcggccctgattcaactcacccggacctaatcctggccgtccgccagagatccagcggcccaggcccactgccccctcaccccgtccctctgcccgttaggccccacttgccagtcgcccgcgcgcccgcgctgtccgcccggtcccgcctgccagtcgcccgcgcccgcgctgtccgcccggccctgcctgtcagccgctcccgccgccgcgcgcccgcgcgcccgcccgcaggatctaatcctggccgtagatctgagatccaacggctgtag

SEQ ID NO: 21344 - DNA, 178 bp, Zea mays
  Peptide Sequence Number=SeqID_64719
ctcggagacaactgatcaagccaaggacggaggcaagaaaagcttcgaggtaccaagtgcacgggagaaggtcaaggaggctgaggaacccaaagccaagggtgaagaagaaggcttgcaaagtcaagggatgttggagccaagaaatgtcaatctagatcaagtcaagcagacttga

SEQ ID NO: 21345 - DNA, 159 bp, Zea mays
  Peptide Sequence Number=SeqID_64720
atggcgcccgttcccggtgcggcctcggtggtggcaatgagattgatggttcttggtattggctctggtaatggttgtcagcattgcaaccactgctcaggagaagatgaagccgtggaaggagacttccacgagttcgaagactacgacgagttctag

SEQ ID NO: 21346 - DNA, 303 bp, Zea mays
  Peptide Sequence Number=SeqID_64721
atgcagcatggatcaagcagtctcattagctgcgagaagcagatgattcgaatcgagtttttaaaccttgcaagtgaccgcacttgtacccaccataaccggaatgggagaccacgtctcaggtcgcataaggggcaaagtctactgccaggctcaatcaggttatgcataaaaccggggcttgccttccaaagctgtggcaggcagatcctctggtgcaggctctggtgctggatccgaggctacctcctgagcaacaccttgctccgtcggcataataatcttggaggtaggctcggataa

SEQ ID NO: 21347 - DNA, 318 bp, Zea mays
  Peptide Sequence Number=SeqID_64722
atgcgcctcatcctgtggtacctgttcttgacctttgggggggtgcgagacagcaagaactgtaaccttgctgacggagagtacgtcctcgtgccggagcaaggagctgctcaggaggtagccccagatccagcaccagagcctgcaccagaggacctgcctgccactgctttggaaggcaagccccggaatcctgttgagatgaatactagttctctggaggacatggttgctggagtgacttggccgtccatcttgccaccgggttggactgtcgagtgggaccctacctcggttgaggaggagcatgaggagtga

SEQ ID NO: 21348 - DNA, 174 bp, Zea mays
  Peptide Sequence Number=SeqID_64723
atggccaccgccgtggtgagcgcgcgctccgctgcttgcacactggcgtggggaggaagacagctgcgggccgttcaatctaagtgggccggcgtcggatgcgttgatggacgtggaccgcaacgtaaggaagatctcggaatgaacggtccaggctgcgtaccggttcagtga

SEQ ID NO: 21349 - DNA, 483 bp, Zea mays
  Peptide Sequence Number=SeqID_64724
atgggcaatgacccaattggagacctagaagccaaggtggagcaacttcggtcagagctacgtcatcgaaatagggcatgggcgcaggacagccagcgtatagctgaattgtcagctgacgtcagccgcttgcaatatgagatatcagaacgggattcggccattgattgggtcgtcaactcgtgttcgatcacttgggaccgcgaagcaaaagctctagctcgtgtggcagagcttagtgcggcccacgatagcctgcaagtgtactgtaatactctacatgaagatgtacatgtactgtatgctcgactgcacccggacatgccttccgacgctgctgcaatgggagcaagaccatcggggacagcaagtgaagaacctgatggggagttggacctttttaggccccctccttccatgaaccttgctgacgaacggtctcctgcggcaggaaatgaagcaaccaaggatgacgaagactag

SEQ ID NO: 21350 - DNA, 270 bp, Zea mays
  Peptide Sequence Number=SeqID_64725
atggtggcgctcggcgacggtgcttccgtctcggatggggtgaggaggagggatcgcgggccatgctttatagctagaggaatgcggatttcagagtcccgatcccgtcggcaagttcggactctgttgcggtgtgtcatagaaaacatgggtacatcatgttttagctatttggttaaccttgttcttgggtctgatttagggaccatcagtcatggtgttagatgccattatttgagttgggataacaattgcgggttgatggggtag

SEQ ID NO: 21351 - DNA, 177 bp, Zea mays
  Peptide Sequence Number=SeqID_64726
atggaatccgcagaaagtggtcaacccgtgcagagcaatcgcctcgatcgtatcctcagcccggacgagtgccctagtggccagggtgtcacgctccacaagatcgtgacagccataggaagtggtgtatcggttgctaaggcgcagtgtctttggaaggctgtagtcgggccgtga

SEQ ID NO: 21352 - DNA, 237 bp, Zea mays
  Peptide Sequence Number=SeqID_64727
atgccctcgggttcctattgcactgagtcgctgacaggcgcagaaaaccccctaggtgcccgcggtggaggaaagggcggaggggcttaccggcggcgagatagctccggtgaggcgtccagggaggtcggagaggttacggcggtcatgtcgaggacgtgccctagtggccggggtgtcacgctccacaagatcgtgacagccataggaggtggtgtatcggttgctaaggcgtag

SEQ ID NO: 21353 - DNA, 447 bp, Zea mays
  Peptide Sequence Number=SeqID_64728
atggcgcagagacttactcggttcacgttcaccggtgagcggaagaagtccaacgaggtctctggcgaagctagccgagccgatatcgaggactggggatggctggggcgagctggacacagtgcccgaagctcgggtggcttagcgggcggtggcgcgtcgtgctcaggggaaagtccggccaacatgggtttgggcggggctgtgagcgtgcggggagtatggtcgaagcctttgggctgctttataggcgcggcgcgggtgagggcgtgggtcgggcgtcgctcggcatgggcgcgcggtgtcgggtgccctgggcgtgctctggcgcgtcagcaagggtcaaacacgtggacgttcgcttctgctcttgttcaagcgcctatagggcgcaaatctttgcgaatttgggcaagatcgtcgtgtaggatttgttcctccgactga

SEQ ID NO: 21354 - DNA, 168 bp, Zea mays
  Peptide Sequence Number=SeqID_64729
atggaccggccgactccgaccacctctcacgacgacccgtacctcgacgtgaccgccgtaacctccctgacctccttggacgcctcatcggagctatctcgccgccgtggtagtagaaagcacccctatggccatgaatttagaaaatcaccgaaaaatgaccaatag

SEQ ID NO: 21355 - DNA, 96 bp, Zea mays
  Peptide Sequence Number=SeqID_64730
atggggtacgaggaaggggagctcgagctggaggagggcgaggcggcctccggcggcggccgtgagctggttattcccgacgcgctcacctgcatc

SEQ ID NO: 21356 - DNA, 174 bp, Zea mays
  Peptide Sequence Number=SeqID_64731
atggcgggcggaattgagctcgctggagctaaggaaagtggctggccggtgaggagatatggagccaggaaatccggtctgtctccctgcccaaacccgaggcaaatccaaggttttgtcgtgtctagggctcgcgtcccaatgccatcttctggcacacgacagaggggttag

SEQ ID NO: 21357 - DNA, 195 bp, Zea mays
  Peptide Sequence Number=SeqID_64732
atggccgaagctctggcggcaatggcgggcggaattgagctcgccggagctaaggaaagtggttggccggtgaggagatatggagccaggaaatccggtctgtctccctgcccaaacccgaggcaaatccaaggttttgtcgtgtctagggctcgcgtcccaatgccatcttctggcacacgacaaaggggttag

SEQ ID NO: 21358 - DNA, 3264 bp, Zea mays
  Peptide Sequence Number=SeqID_64733
atgagactgctggggctctggtgcctgaagttttgcctgatgaatctccacataatgaccagccattatattcctggaggacacttgctctcacccctcaaggaaaatgttctagaattgaaacaaaagcctaaagtgatggtaaaacaagaagcacctgaatttcaagtcaaagtagaattgcatggagactggggctgtacaacctctgctactctggataacaaagataagtgtaccaaggaaatcaagtctgatgaaaagaaagacaagatccccattttcaggagttcaaaaatcagagttaacaaaccatctgctgtgaataagggaactaagcctttacaggatgttttagatgataccggttcaaacttgttgcctacaattgtaaatacagaacatacagttgaggagccagcgaaatttacaggtgcaatttcagataaaatgaagggatcgaaggatggtgcatcaaaaggacacattagtggcaagaacaaaaacattaaggaggaaccttcgcttgatcatggattttctcgtaaaaacagatgtgattctgatgagtacaatggtaaacctcatgccagttcatgtcagttgcaaaacattcccaacaaaacttcgccactggagagggacaaagggaaagtattgcatatggaagatgaaccatctcagtacaaaagcaaggaaaatggagacctgtttagtgcagattccatggctgtcatggtaggaaatgttgatagaaattctttagggatgatgaaagggaagaagaaagtttcttctttgcaagccaccctgtctgggaagttcaagttcaaggcaaaaaaacaattgaatgacaacattgatagaaaaaaatatggtgaagacgagcattatgctttagaccatagaattggtttggataattcatatcaaatagataagagtgtgaggcttgagaaaaagaccatctcatctggggagattgataacaagtcagatgttggaaatgatggtggtgtcaatatctctgccatgtttgatgagaaatcagatgttttgccattagcatctgcatccctgcctgctccagaacccattttaataaatgaacaatgggtgtgctgcgacaagtgtgagaattggcgccttttaccctatgggatgaatccagatatacttcccaaaaaatggcggtgtagcatgcagagttggctgcctggaatgaatagctgcaaaataactgaagacgagaccacaaaagcccttcgggcactttatatggttcctgcacctgaaaataacattaaggatggtggtcatgataatgctatgtcaggcaaaggtacagctattgctccaacttttcagggaaatacacagtccatcagttcactggggaagctaaaaggttcccttgatggagccaatgtggcaaatactttggagtcagctggagaaattgttggaaaagaccaatcacgtcgaatgagaagcagtgtaggggttgatcatgataacctgcgagcatcaaagaaaatgaagaaagaatccaatggccctgtgatgaagcatcaaccctctgagtttgaaataagcaaaagtagtcctgccagtgagactctgaaaaacattcagaagcgcagttgcatttctcctggcatgggaaagtatggtttatcttcatcaggtaaacattctcatggtgaggataaagatttctcagctgtggtcattaaaacatcagatacagagaactctggccctcgagactcatccattaagaagagaaaactgaaacaaaggcagtcaagccagcattttcgggatccacactgtagcaacaatgacacaaatggtattacaaaacaaaatattactgaaattaatgctgtgaagaaaaaatccaggtcagaattgaatttgttaaagacagataggatagctactgattctagaggcacagttggtggagttgatgataggatatctactgataaggagtgtttaagtgagcaacttcaagaaaatacccatttccagcatccgtcactcgtagaaggcaccacaaagagggaaatccgtcatgcacaaacacctatagctgcgacttcgagttcatccaagatgtctaactccaacaagtatatagctcattttcaggaaacgagggcctctcctgtagagtcagtttcttcctcacccttgagatcttctgataagaatcctttgggtcgacatagaagctcttcatggacaattacagaaaatgtgcattctcaagagtcagggaagataaattcttcatgctcgaacagaaactatgatcttgggtctgattgtgataaagctaaggctcgtatttctggttgctttaacggagatgtgagtcatcatgttcagaaggatagggactttctgaaagataaacaagatgtgatgaacgcatgtcttataaacaaaggttctggatttggtgctagaaatttccagctgagtcctgaacataaagtcaatccagatgtcctttcatcacatgacaacgatggtcacaagcaaccaacagttcgtcagaatgggaaaacacagccccatttcggttcaaaccaaggtgaccatgcaaatttgacttatgggcatattaagcctggtaaagggaatataccaaataaggaccagaaaacaaatccatctgcagtcaaagcaagcaagcagcagccatccttaaacaatgcatcaaatggtgatgcctcttacaaggcaaggcaaatagaaaaggctgttattgaaaatttggacacgaggaagcacatcactctcaatggtgatgcttcaaatctaacaagtgcatctgttctactgaaggaagctcgagatttgaagcacttgtctaaacgtcttaaggaaaaaggggatgactttgagagtacaagcatgtgctttgaggcgggtctgaaatttctccatgttgcttctctgtgggagaccccaaacattgatagctccaatcaaggggtttctatacaagctatgaaactgtattccgaaacaggaatcctctttggattctgcgctcacgaatttgagcgactcaagaaaatggcgaatgctgctctggcatataaatgtgtggaagtggcatatatgaaggctgctttctttagaagtcctggtgtaattaaagatagacatgcattgcatgcagcatctttgatggttgctccaggtttttttttcacacatgctttggctcatttctactgctag

SEQ ID NO: 21359 - DNA, 640 bp, Zea mays
  Peptide Sequence Number=SeqID_64734
atgtccggtgcctccgccacgtcatcagtgccgttggaaattgaccgttggagttctgacttctgggcccgcctcgatgataatttcgaggctgaggagttcagcgcgagtcctcctggtgcaccagacactgtccggtgcaccaccggacagtccgccacccaccccattggcttgttccccgctgagagggaggacgacccaatgtggaaggatcgggtggagcatgccaaggatatctgggccatctacccaggacagactacgcacttgaccgtacggtgcatgaatgcgctgtaccgtctgcaagtaatgcgcggtgaggcgatgtcccatctgatggcactgctggaggcaacaaagattacattggataacagagaggagctcgtggttgatttatcccaagaaatggtggagaaggacttgcaggttgagcagctatccactgatattcaggagttggaggagctggtgggcaccagggagaacaccatcgaggttctagaggatcagctccttaacactcagcagcagcttgctgaggctaacgagcacctggacatgcaccaccaggagatccaggaccaggaggccaacgaggacgtcgacatcgagggaggagatgagcctgcctcca

SEQ ID NO: 21360 - DNA, 294 bp, Zea mays
  Peptide Sequence Number=SeqID_64735
atgtcgaacaagtgcgcaagaatgaagtggcacatttccctttcagaggtgtggatgtacatccgggccgtcgagcgctccgggctcgagggctcggatgagtcggagatctcctcggacgaggaggactcctctgactcgtctgaggtggggagcggtggtgacggcgacaacgagggcgacgacggcgatggaggcgacggcagcgatggcgacggcggtaggggcaacggcggcagcggcaagggcgacggcagcagcggcaaggctagtggcaaagcgccactggcttaa

SEQ ID NO: 21361 - DNA, 228 bp, Zea mays
  Peptide Sequence Number=SeqID_64736
atgaagaatgaactgaaaatgttgcaacaccagtcttcagatggcgatgttgctcgcatggagtcggcgaggctttcttctgaattggaaaagttgaacgcgaagtcgactgaggatgttgccaaggaacttagggtgtgcactgcttcttttgttgagggggacctgacattggaaaacaatttattggctgggtcgaaggggaactcggcagtcttacaacggtag

SEQ ID NO: 21362 - DNA, 381 bp, Zea mays
  Peptide Sequence Number=SeqID_64737
atgaccatcgccgtagtgggatggcgacgccgacgctcatgcctagaggcaaggggacgcggcacaactgggttgccgcagtgggatcgcgatgcaactgggtggctgctgccctatgccaagtgccttcacgggagtcttcgccaggcccttcgccaggttcttcatcgggtcagttactggactaaaccctcaaagtattcccaagaggagaccccttcctggactaagaacccggaggagaaagaagagctccaaacatcaaagaagcatgctgtcggcaagaagacaacgagaggtcaccacgctggagctgctgcacagcctagggctctcttaacccgcggctctttggaagagaccctgagcatccaattatga

SEQ ID NO: 21363 - DNA, 1080 bp, Zea mays
  Peptide Sequence Number=SeqID_64738
atgctgaacgatgccatccagacgtgtactgatcggccggagtggaagaacaactcacatttgtgcagccagcccaagggatcttcagtgccgtcatattttgggaatccaagcttctgcgctcctggagggggtgggccgtgcctgaagtcagcgccattggaggttttggaggaatcgctgaaggaatcgaacccaggacttagaggtgctactcggaagtccttaaccgctaggctagaggccctttcgcacctaagatttggtttggtaggtttcgagatgaagacgagggcaaggtctagcagtgccaactctaggtgtgctgctgcttacactgcgcggtggtggagctggtcatgttggcggccgtgcaatgcaagtgcccgccacgcccgcgtccaggaaggagacagggttttgacaggaaaggaagatgttcgtgcaataacaaaggaagctcgatctgtggtagaaccacacactaacaaaataaaaagggtaactatgtatcattgtattaagaagatgaaaggggtaaagagccttggaagaatagcccaagaatccaatcagaagcaacaagcaaaaatcacatcagcagatgatgaggacgccatagccatcttcacaactttccagccacgacaggggctagccttttggcatgtaaatctttcaccgatttcaaatgcttctatgggcatgcaggaaaataatccctcacagacatcattgggggaatatggcatgactgagtgggcagctgtggatcttgctgagtacatatgtgatgggtccgttggctttagagttagaccattgtctgattctgatcgcgtgaaggtcaaaaaagccctaagaattgtgaacgttgagcgcaccacaggctgtgagaattcatcgcggccaatgatgaataatactctccttcagcgccacaggcgctgcaggtcgggccagcactacgggccgaggctacaggccaagcacatcatggcgttcttggctcttgcaagcattaggtcgtttatgagaccacactggtgggtatgggtcacccgtacccacaaaaattaa

SEQ ID NO: 21364 - DNA, 333 bp, Zea mays
  Peptide Sequence Number=SeqID_64739
atggagcctggcggagggacagctgtcggagcagttgggtccttgctgacgtcctcttgctttcctagccagatgggacgccggtcttgttccctgcggcccgagtcagctcggggtagggtgatgatggcgcctcctgttgacgtggctggcctgcgccctaggttgggcgatgtggaggctcctccgaaaccgaggtcgagtccgtctttcgtggccgaggccgagtccgagcccctgggtcgggcgaggcggaggtcgtcggctgaggccagggcggagtccgagccctggggtcgggcgaagcggagttcgtcgtcttctgggatttag

SEQ ID NO: 21365 - DNA, 264 bp, Zea mays
  Peptide Sequence Number=SeqID_64740
atggcagttattggaagattatgtgcttttacccatgatgcagtaatgaatgaatgcgttgctccaatatcaaataacacttttgcaatatgggagtcgactgggaacatacctactatcatgtcgggggaagacgaggtgcctgctgattctgcctctggaactgacctcctcttgactgattgttttggcgattctgatactggtgctgaggatactgcctttggaactgctactactgaggtagacgctggttctgcctga

SEQ ID NO: 21366 - DNA, 516 bp, Zea mays
  Peptide Sequence Number=SeqID_64741
atggagcctggcggagggacagctgtcggagcggttgagtccttgctgacgtccttctttgcttccgtaagggggctgagagccgccgccgtcatagggtacgcggggcgccatcattgcctatccggcggagctagccagatgggacaccggtctcgttccctgcggcccgagtcagctcggggtagggtgatgatggcgcctcctgttgacgtggctggtctacgccctaggttgggcgatgtggaagctcctccgaggccgaggtcgagtctgccttccgtggtcgaggtcgagtccgagcccctaggtcgggcgaggcggagttcgtcgtcttctagggctgagcccaagtccgagccctgggtcgggcggagcggacttcatcgtcttccggggctgagcccgagtccgagccctgggtcgggcggagcggagttcgccgtcttccgggacttagcccgagtccgagccctgggtcgggcggagcggagttcgccgtcttccgggacttag

SEQ ID NO: 21367 - DNA, 1077 bp, Zea mays
  Peptide Sequence Number=SeqID_64742
atgacggtggcaggcgggcaggagcagcagtcacgtcgtcagccaagctcacgtcccatccaggggcagcgagagaaccctctctcacggcgtgaagacaacgcgcccgtgttccgtcctcgaacggctcgcgcatgcgcagcggccgccccgccaaccactcgccccgtcgcattaactccgcggtgggacaggcggcgcctctggcaggagaagcaggcgacgcttcgccttcgccataacaaccgcctcaaaaaaggctggccccccggaagggttcgacagccgcctcagatcgcgtgggccctacccccactactggtcagaggttcgaaggccggcccctcgaaagggttccacggccgcctcaggctattcgggctccgcgcccattactcatcaggggttcgaaggctggcccccgaaggcgggaacaatcttgtaacggaatcccatcagagggaggcatcgagccctcggaccccgtcgccaggggaccgggttcggcagatcacccgcagctcaccggagacaccatgtttggcgcccatcgagggcaacatggcgctttcccccctcctccttgcggaaaggcgacgcaggggcaggctcgggggctgctctcgcaaacccggctccggccgaaccgttgacagcgtcaacataccagcccgagaacttgggacccgaccgtacacccgggctacggccagctcgcctgagggaacaaccagaccagccaaagcattacgcaaggcattaagacctcgaaggagtgaaaccactcctccgaggcctcgggggctacacccggcgggtgcgctcgcgcgcacccaccggaacaaaacgcaaccgagaaaggctggtccccttgcaaaaaagtgcgacgacagcctccaagcgagtgctaacactcccttcgaggctcgggggctactgtcggggaccataattatgggtaccctcaaggctcctaattctcagctggaggacagcgccgcctgcgccaccccgactgcggtgccacttgatagagtgagactgacagacagtcaggcccagccgaaggcatcatag

SEQ ID NO: 21368 - DNA, 204 bp, Zea mays
  Peptide Sequence Number=SeqID_64743
atggagcctggcggagggacagctgtcggagcggttgagtccttgctgacgtcctcttgcttccgtaagggggctgagagccgccgccgtcatagggttgggcgatgtggaagctcctccgaggccgaggtcgagtctgtcttccgtggtcgaggtcgagtccgagcccctgggtcgggcgaggcggagttcgtcgtcttctag

SEQ ID NO: 21369 - DNA, 501 bp, Zea mays
  Peptide Sequence Number=SeqID_64744
atgacgaagtcaagagcaagggaggacgggtttaacagctcgacaacaaatgcgagcacgcgtgaagtccgatggacgaagagcgagtgtgccgcggtgacaacgagcaggcgcatgagcgttaacgcgagccagcggcaagcacgagtgatgagagaaacaaagaccgagctaagctcgacgccggacgaaacactacgcagtacctggcacgacgttcagctgcgcaagcacaaggggcgcaatgcagcggccatgggagatgctgtggaggaactcggcaggaaaaaaataaaacagagcaggcgactggaggagcgccggctggggaagaagcagctccgctgctggggaccagaggcggccgagcgaggcatcagggcgagcgccagggagtgcggcaaacagtacgcagcgagttgggaccaagcaccggccatgggagcttggacaggcgcggcgtcagagagctccaaccaggagccgagcacagggagatag

SEQ ID NO: 21370 - DNA, 333 bp, Zea mays
  Peptide Sequence Number=SeqID_64745
atgaacgagcagagggacggcgaccagggagttccggccggcagagaagcatggcgcgcgcacaaagcacagaagctgggcacggccatggactgggagataggctcggcaccagggagctccgagcagggacgccgcggtccgagcgccggacgccgggcggagcgcgcgacgcaggagaagctcgagcgcgcggggaaggggataagctccgtgaagaaaaatctagagattgggagagacgagctgggggaagcagggctcggactcgggctaagtcccggaatacggcgaactccgctccgcccgacccagggctcggactcgggctaa

SEQ ID NO: 21371 - DNA, 1455 bp, Zea mays
  Peptide Sequence Number=SeqID_64746
atggataaggatcaccaagatgcgacgcggaagcgccggacgttcactagggtctgggaccctggtcatgaggtcaagaaggcgtggggagtcgcgaagtccgccgcccctggcggcagcaagccaccgccggctgcgaagctagccgtcccggccctagcaaaccttcatcgggtgcgagggctgtcgctctcggctcgagcaagccgccttcggctgagcccacgcagaagccaggggtcggatgctgggcaactggttgttgtcctggctctggtggcggcttcgccggctgagtcggcgaccgaggcgaagggtgcttcgcaggacccatggtccaagttttgcgccagcggcgagattacttcggccgccgccgttaaagacgtggcgggttctgttgcgcagcagctgaagcatgcggctgccttcgccgatcatgttgcgtcgggcgctctgacctcggagttcgctgccgagaggcaacgactcgagggcaggattgagcgccttcgggcgcaggatacgaaagctgtgccggacaagtcagctgcggaaaacaagagccgcaggctgatggagaagttggcagctgcggaggccgagaaggaggacctcagccgtcagctggcagcggagaggaaagatgcaaacagggcctgtgctgaggcgcaggctgcacaagccgaggccaaacttgcgcgtgcggaggccagtctcgctcgccaacgcgccgaggaggcggaaacgagccacaacagcctgcgcgaccgcctggacaaagcggaggcctctactcgcgcagagcttgaccggacgcatgcacagctcgtggacgcgtaccgggagcttggtgcgcggaccgctccctttgatgcgtccggtaaggaggtgggcctccgcttcctcggatggctgcagaaggagttggaggtgctgccaacgattgtgacgggcctcatgtccttcgcctcactcatcacctgcgaaggggacgtgaatgccttgtcccgtgagggatgcgagcattttgaagtctttgaccgatcgggcgaagacttcgagcacgaaatcttccagtctgaggacccggtgccgaagcggtcggccagggcactttatgataggatgtggggccctcacggccgtgagactgtctgggagaggtccgactgggcgatggagcggatggtgcatgatgaggaggtcgaagacctcggggacttggatagcacattgcccgaagcgtcgtgtgcgaagggaggggactggggggagctggcgccgccgtccaatgttggcgaaggccccttggtgacccccgcgctgacctgtgctggcgacgaccctgtgtcggccgctgtgccgactggtggggacacttcggtggtggcgggcgaaccaaatgccgaagaccctgcggcgtcggccggcccttggcaggtggcggggtag

SEQ ID NO: 21372 - DNA, 483 bp, Zea mays
  Peptide Sequence Number=SeqID_64747
atgctggtagactacacaacggtactcgatggaccaagtgtgtcggtcgaaggcccgacgcagcaaggtgttgagagcgtcgtggaagtgacactcgcgagcggcgtcacgagtgatgggtctagcgatctatccctccggctctggctcctccgaggtcgtggctcaaactgccaccggtgtcattgtcatctccgtctccatcgaggtctcctccagcagctgggatgccctgtggtggtgcagggggcatctctggctgaggtgcaggggaaggcggcctctcagactccacctcctgctgaggcaagggggaagagtcctgctgctcctgctcctggcatcggcgctcctgctccttgtgcaggcgatgatgcagtctctccaggtgactggactgacctggcaccgtgcgacgcagtggacgctccgccaggcgagaaggcaaaaaggggatcacggacttacgtgcagtgcacctaa

SEQ ID NO: 21373 - DNA, 645 bp, Zea mays
  Peptide Sequence Number=SeqID_64748
atgggaaccattgggcatctcgacctccacacggggaggtgccaaaggttcatctataactatactaaatcgactgtccggaataccgtagattattccggacaggagaagctttttggaaaaacaggccaagcgcggaccgtccgggcccttgcggcggaccgtccgcgacacgaggatgtcactcggccagaaccaatgcaaaaatccaagtctgtgctatggactgtccggaggaaaagcaaagaccgtccgagcccttgcgcggaccgtccggcctctggcacggaccgtccggtagtcaacgaagaggatgacttctccttctgcaacgcgaccacggtcgtatgcaggaccgtcaccgtgttggccaaggcctcgatcgtcttggccagatcaacagtagttggtgccgacatggctgaaggagctgaagtggcgtcggttggtggtggtgatgttggtgggcggggtaagggcgcaacggctacggtgggttggggaagctgtcggtttaggggcgcagcggcggcggtgggttgtggaggtggcgcggaggaagacgaggaacacctggaaccggataccaggttgtcatgggctgagtatccccagacagctgggtctcgactacgcagttcgtag

SEQ ID NO: 21374 - DNA, 813 bp, Zea mays
  Peptide Sequence Number=SeqID_64749
atgccgcagaggtcggaggcgggcactgctggggagggcgacgaggagcagcggctgcgggctgctctgcgtcacctgcaggcggaggcgggggtgctggagcgcctggtatacaagcaccggaaccagcaccgcggcgccgcctatttccaatacctcctcaaggtgaggagggacctgaagcttctgctcggcgccggcctcgctgaggttctcaacgccgtgttcccagttctcgcatgccgcaagccggccaacacgatcctcgtccccaacaagcagtctaagaagaaacctgttgcaaaccacagccatcaccagaggcttttgggtgtagcccgcttgttatcccagatgtctgaacctgttatgaaggcagcaatgtatcctttttcttatgcttgctacatcatggttctgtttattttcttagcttctgctgtaggcactgaccctctggtacttatttcacagatgttacttgatgttgtgtctatatacaataaggtcactgatcttactgaaaggaagcaggctgttaagattagcatcagtggagtgcaggctttcagagagtactacccctctatgaatgatgcatgtacagttctggagtgtgtatggataaaagataaattcgttttgcatgaaaaggttaaagatatctctcaggaaacccaagttgagaatcagaagtgctgcggtcctgaatctacagtccagtatgaaacaattgcactgattagtgaagaattagctgacatgctcatgaatcatgagaatccttggtgctttgttgctgatttggtttga

SEQ ID NO: 21375 - DNA, 462 bp, Zea mays
  Peptide Sequence Number=SeqID_64750
atgagtcacaagaggaagtttgcttctgatagatccaaaaaatctggccccgagagcttctcgggtgtcaaagagaagagacaggtcagtgacaagaagcggaaaaagaaatggcaattcaagctgaggcgtgactgggaagctgaaaagaaaggtgacaagaggaggaagtgtacgtctcaagttttatctttaatgagtgacatatctggcagggaaactgaagcatattattatcttgctgaatgctatgtgaatcctgctatcatgaaggcgcagtggcaactgattctgaagttcacgtttggtttggagtcttggagacaaggagtgatggaggcggagagaatgcatggttgtttgttttcagtaattattgttcacttttccaatagaggccttgatataccgaacaagggcctcaaagatctgaagtggtgtaagggcttccacgataattag

SEQ ID NO: 21376 - DNA, 817 bp, Zea mays
  Peptide Sequence Number=SeqID_64751
atgtccggcaaaccaaacacgttgttaaagaacaacagatctagatggggggacaaacctgagaagatgcgattgttggtgcacacgaagcctcacaaggcgaacgattcgcggtgggaggcgatccagacggccagagctagagacgggatccttggaccgagtcatttcaggctgctgaagagactaggctccggcgatattggcagcgtgtatctctcggaactgagtgggaccgcgagctatttcgcgatgaaggttatggacaaggcatcacttgcaggtcggaaaaagctgcttcgggctcaaacagagaaggagattttgcaatgcctggaccatcctttcctccctacactttacactcacttggagaccgacaagttctcctgcctagtcatggagttctgccccggtggagaccttcacacccttcgacagaggcagcctggcaaacatttttcggagcaagccgtcaaattctacatagcggaagtcctcctggcactggagtacttgcacacgctcggtatcatataccgcgatctcaagcctgaaaatgtccttgtccgggaggacgggcacatcatgctctcggacttcgacctctctcttcgttgtgctgtcagtccaacactgatcaggtcctcaaaccctgacgcagaactgcagaagcgctcaggaagagcagccaaggctactgtgttgagccagcctgtgttgagccgtcctgcatcactcaaccgtcgtgtgcagccccaaccacctgcttcggcccacgcctgttctcctccaagtccaagaccaagagagaccg

SEQ ID NO: 21377 - DNA, 444 bp, Zea mays
  Peptide Sequence Number=SeqID_64752
atggaatcgctgacgcttcgtgcttcgacggccgcctcgccgctgcagcgacgccggctgcttcccgggcggcagcacgcgacgtacgtccgcgccacggcctccgccggcgagccggacctctccgtgcgcgtgaacgggctgcagatgcccaacccgactgctcctgataacgtggaggacaccctaacagtcatcacttcaaccccagtgtcattggatgctgaaaaagttatcaacgttactcctcgttatgcaaagcttcgggcagaaccaaatggggctgccatggggcgcatcattggctggcagaacattgaactcatcagtgacaggcctctggagaccatgctgaatgagttcaagcagttgaagaaagagtatcctgacaggatacttatcggttcaaatatggaggagtacaacaaagctaatgcaagataa

SEQ ID NO: 21378 - DNA, 1521 bp, Zea mays
  Peptide Sequence Number=SeqID_64753
atggaatgggggatgctgagtgcggatgggggcacgacgcgtggatggggatggcaggtcacagatgtgtataaggctgtcatccctggaatggcgtccgtcggggagttaaaacatccgcggctagggtttaaggattttcttctccgctcccccggcccccattcgcacccagcacagctacagacggtctctatggccaagaaaggggcgaagagaaagcagcagccgccgccggcggctcccaccgcgaagaaggggagcaaggctgtgcccccaccgaaggctgcgaagagagcgcccaagaagcaggagcttctcgagtcctccgacgattctgatacggagcagcagctcctggaggaggcctcccacctcgacgtcccctctgattccgacgccgaagagctctctgggtcggacgctgaggctgacgagctctcgggctcggatgccgattccgacggaagctcgagcagcggcgacgacgtggaggatgaggaggaggaggaggaaggtgatggaagtgatgatgaccccctggcggacgacttcctcgctggtagcgacgaaggaagcgagggtggtgactctggactggagtcagacgagtctgatgacctcgaggcaaaatcacgagcaattgatgagcagaaaatcaaggcggaagaagatgcagaggaggaacttcaaaccaacataagatcagaatctgatgagttcagattacccacggcagaggagctggaggaagaggcacacagaccacctaacctaccaaatctcaaaaggaggatttcagaaattgttcgagtgctctcaaacttcagcaagctgaggcagaaagatgttccacgaaaagattatatcgaacaactgaaaactgatatcatttcatactatggatataatgattttctagttgaagcattaattgagatgttcccagctgttgagcttgttgagttactggaagcctttgagaaaaggccgcccgagtgcttgcggacgaatacactaaagacccggaggagggatcttgctgctgctcttataccaagaggatttaatttggacccgataggaaaatggtcaaagaaacaaggtgcaagttcgtttttaccagtgatggcacttgctccacaggagaaggaacgaattgttgatatggcggctgctccaggtggtaagactacttacattggcgctcttatgaagaataccggaatcatctatgcaaatgagttcaatgagaaaaggttgcatggacttttgggaaatatccatcgcatgggtgtgacaaataccatagtttgtaactatgatggtaaagagctacccaaagttcttgggatgaattcggttgacagagtattgcttgatgctccctgcacaggaactgggaccatttggaaggatctacaaattaaaacatcaaaggacattgaagacatcaggagctgcgcctttgtccaaaaggtgtttggatacatagattctcagattgcagattctgtttga

SEQ ID NO: 21379 - DNA, 1059 bp, Zea mays
  Peptide Sequence Number=SeqID_64754
atgacgaagcttccgtggtggcgcgccgacgcgtcggagctggtggccgtgacggcgatgggagtgtgggaggccgtgctcgccgggggcggcaggagattcatcaagcggaaggacagcgacgccggcgagaccggtcgggcactggaggagttgcgaagctcgttgtacaatgaaatgcatagcgcagaaggtgctaagcgccagcagcagcgattctgtggaccaagtgttgcattgacattcaattttgctgttgctgttgggattatcatggcaaacaaaatggtgatggggactgttggatttaaatttccaattgcactctcattaattcattatgcagttgcatttgttctaatggccacccttaagacattatccttgttaccagttgccccgccatcgaaatccactcctttctcatctatatttgctttgggtgctgtaatgtccctgtccactgggctagccaactatcgccttcatatattctcagtatttttgctattcagtgtaggtttctatcaaatggctaagattgctgtaaccccaacaattgtcgtagcagaattcatgcttttccagaagaaagtttcctctaaaaaggctgtcacactggcagttgtgtcatttggagtcgctgtagcgactgttaccgatctggagttcaacttttttggtgcttgtgttgcattagcatggattgttcctagtgccgtgaacaaaatcctttggtcaagtttgcaacagagtggaaactggaccgcccttgccgcgacgtcagctttgtctcatgttgtgctgggccaattcaaaacgatcgtcatcatgctctccggctacctgatcttcggctccgaccctgggatcaccagcgtctgcggtgccgtgctcgcactcggcggcatgtccttctacacctacctgggtctgaagaaagaccccgcgaccagcggcaaaaaagcaccatcgagacagaactccttcatggcgagacctaaggtcgctgctgacgacagtgacgacgcggattcagagcaagatgatactgtatag

SEQ ID NO: 21380 - DNA, 1374 bp, Zea mays
  Peptide Sequence Number=SeqID_64755
atggaggtgaagcgcggctttaatgacgggcctgcccctggaaagcgcaaaaagggcagcgcggcctttttctccgagggtcccgcacggccccaccacataggcgacgagtatcgcataggattccactggattcagctgctgagcagggtactggaaggtggatttgatactagctctgaacagccagtagaatttctcaaatactgtccaggatcatggcttctctctgtgatttctgtgggaaacaaagctaatgcactgtctcgacgtcatacaaggacccttctttgtgatcgttgtggttcacagcctgcatcagtccgatgtcttgaggacaacgcatcactttgccaaaactgtgactggaatgggcatgatgcagaatcaggggcttctggacataaaaggcaagccataaactgctactcagggtgcccatcatctgcagagctttcgagaatctggtcatttattactgatatcccgactgtagcagctgagcccgactatgaggatggactaagcatgatgacaattgatggcagtgatgttactaatcgtcacgatacttcagatgataaaagattgttggaaatagctaacacaacactcatgagcgatccaccttcagccgacaagcttaaatctccgacaggctcttcttctggagatgggtttgatgttatgactctagccacagatcagcctgctggaccagtttcagcaacgcctaaggtacctaatgccagagatgatgataagttcaatgatggcatgtacgaagacttgtgtgtagatgatgctgaccttacattcgaggattatgaagagctatttggtacctctcacattcgaacagaggaactctttgatgacgctggaattgacggttacttcgaattgaaagagacaccacctttttatttcaacgagcagcccaaagctatgcagatagaatgtggcaacgtggtatcagctgattgtgcgatgtcaaacccaggggcaagggctgattccagcctttgtattcccgtcaggcaggtcagatctagtatatcccactccttatctggtctgactggtgagagcagcgctggagatcaccacgactgtggggtgtcaccgatgctcctcatgggtgagccaccctggcattctcctggtggtccagaaggctcagtcgctggaggcagcagagatagcgctctcacacggtacaaggagaagaagaagaggagaaagtttgacaagaagatcagatatgcttctcgcaaggctagggcggacgtgaggaagcgggtcaagggacggttcataaaggccggtgaagcgtacgactatgatccgctaagccagactagaagctactga

SEQ ID NO: 21381 - DNA, 249 bp, Zea mays
  Peptide Sequence Number=SeqID_64756
atggcggtgccaccccgtgaagtgcgtcacgaacggcgatgctacccgtgcgcggccagccagccctgccaccgggtacgagcatcactgtcgaacgagaaacttcgcagcccaggaaatacacagcacactagcacagaaccgccttgtaaatgcctaaatggtcttgccaaggcgagaagggagcgtcattgcaattgccggctttgctgcctgctgctacgaggcttcgtccgtggagtcatttga

SEQ ID NO: 21382 - DNA, 1293 bp, Zea mays
  Peptide Sequence Number=SeqID_64757
atggaagggggcggcgagcaccaccacccgcttagcgtattcctccgggacgcgaggctcgcattcagatgggacgagctcggtcaggagatcatgaggatcgcggtgcccggcgcgctcgcgctcatggctgacccagtcgcctccctcgtcgacaccgccttcattggccacataggtccagttgaacttggagctgtaggtgtatcaattgccgtgtttaatcaggtctcaagaattgcagtgttcccacttgttagcgtcacaacatcatttgttgctgaggaggatgctatgtccaatggcagagacaatgacaaaatacatcaacaaaacgaacgcaatgtttcggtcagtgaaatggatgaactgattcctcctgaaggggctagtgccagtaccagcatatcgtcttttgaaactgattcatgtgaggtcagtgttgagcagaagaggaaaaatattccatcagtctctacagcactactacttggtggggtgcttggcctacttgaaaccctactgcttgttctctctgcaaaacctatcttaggctacatgggtgtaaaaccggttgctaaaacaaccaatgccaaaaatttagagagtatacttgttcttgcagtcctgtttagtatggctggagatgcgatcaatatagttttggatccaatatttatgtttgtgttccaatatggtgttagtggtgccgccatcgctcatgttatatcacaatatttcattgcatccatactcttatggagattaaggttgcatgttgatttgttgccacctagcttcaaacatctgcagtttggccgatttcttaaaaatggttttctgctacttgcacgagttattgccgcaacttgttgtgtgacactatccgcttcaatggccgcacggctaggttcaactccaatggctgcattccagatctgcttgcaaacctggttggcttgctcacttcttgccgatggattggcttttgctggacaagccatacttgcaagtgcatttgctcgtaaggactatccgaaggccaccgccacagcttctcgtatcttgcagctggccttggtcttgggacttctcctaagcatacttcttggtgttggtctgcgcatagggtccagattatttacatccgatcagggtgtactgcatcatatctacataggaataccgtttgtctgccttactcaaccaatcaacgctctggcttttgtttttgatggtatcaattacggagcatcagatttcggatatgctgcctactcaatggcaagctga

SEQ ID NO: 21383 - DNA, 291 bp, Zea mays
  Peptide Sequence Number=SeqID_64758
atggattcggagaacgcaaagctccgaagagcactcgctcatttaatcagagtagtggagcagcgttgtgccgacatcgtcgatgtcgtccacggtgccttccaaccagttagcacaccagtcctcaatgaaatgaatcgtgctttaattcagattgaggacctcacgaaggaccttgatcaccttgcattggaaaaagactgggagatggagcacatggtgtcacacccggatttaaggaacaaagccaggtgcatctcatacatgcgccaaagaagacaacatatataa

SEQ ID NO: 21384 - DNA, 365 bp, Zea mays
  Peptide Sequence Number=SeqID_64759
atggacctaaatatcgagattagaatatgcagaacaccagacaacagcgtcggcgactatgtcgctgcagtgctgaagcgtatgcagccgtggggtgccgggttcaccgacgaggatcacacaaagggctgcatcccctgcttgctgcagctgcacgtgggtccgcacggagccaggggccaccatagcagcggcagaccggctcccatgcagaaggtgaagccgtcgggtggtgggtacgacgatgacggccatgcggcggaccgtgtcgtctgcccgctgcaagcctacaaccgtgcctgggtcctctcgatgatagagcccaccatagcagcgatggagcgtctcccgtgcggtgggcgaag

SEQ ID NO: 21385 - DNA, 468 bp, Zea mays
  Peptide Sequence Number=SeqID_64760
atgccctactaccctgcccagatgatgcgccaacaggagaagaacaaggcgagccagcaggaggtagctattaccgtagttgttggggagaatcgccaattgccgatggagcgtatgccgcggcagaggaacgcgtcgacgaacaatcccagtcgacgccggtcgagcccctgcctgacgatgcccacaaaagcgcccacgcgtattaacggagctgccacgacgcttttcccggcttggacggtggtgcagagggagaatccccgcggcggcgaggagaggcggcgcgcgagggtgtgggctaagctcgccgggattcacggagggcaccgcgcgcgatctgttgcgcccgcgagcgagtctggggaagaagaccagtgggtcccgcctggagagttgaacactgatgatatcgtcggctacgacgacggacgtgactactccaccgacaacacctatccctactag

SEQ ID NO: 21386 - DNA, 711 bp, Zea mays
  Peptide Sequence Number=SeqID_64761
atggagataatttctggggaagaccttcgagtagattgttttctaaaatctactcaaagctcgggggctacacccattgggtgcacctctggacccgacggccacaatgaacagacaccggcacttaaggtgccattacaaacggaactccggttccacctccacaggtacgaacaaccccccacgattggagggcctgcggagcaacagaaggccgacggatggctcgccgccgctcgctccagcagcggcgacaacgacttctgctccgagcggccgaacagcagcagcgatgacctcagggcggatgctgctgccataaagccctcgcccacgtccccactcaaggggcgaggacgagcagaaggtcgtagagttggaggtcagtccacgggcggcaccgactatctcgtcggcggagaaacctcttccggctgccacggcggaaggtggcaccgggagcagcgccgaagccgctcggaccggagagccggacacgcggcagctgccagcgccacgaacggcgaacgccctcccccccgatcactgagggaaggagcgggccgctgcctgcgcgaagaccgaccccaactcggcgcactcccctccccagcactgatgatgaacatccttgaagctgagggaggggcagaggccgcagcccggcttgcttctccccacccaggagctggtggtcaccgtcttgggtga

SEQ ID NO: 21387 - DNA, 978 bp, Zea mays
  Peptide Sequence Number=SeqID_64762
atggggaacactcgcaatccttccgccttgtcgttggaggaacgcaacttcatggaaaattggtacctttcagccatcgttcggcttcaaggattttcatcaggcagcccggccgcatcccctcgccggtggtcacccaagacggtgaccaccagctcctgggtggggagaagcaagccgggctgcggcctctgcccctccctcagcttcaaggatgttcatcatcagtgctggggaggggactgccgcgtgtccggctctccggtccgagcggcttcggcgctgctcccggtgccaccttccgccgtggcagccggaagaggtttctccgccgacgagatagtcggtgccgcccgtggactgacctccaactctacgaccttctgctcgtcctcgccccttgagtggggacgtgggcgagggctttatggcagcagcatccgccctgaggtcatcgctgctgctgttcggccgctcggagcagaagtcgttgtcgccgctgctggagcgagcggcggcgagccatccgtcggccttctgttgctccgcaggccctccaatcgtggggggttgaaccctcggccgctcttcgatgagccgaagccggaggcagcggtgtcagcatggacagaggcagagttggctcaaaacgaagacttcatcggctggagcctggccgggccgtccactggcgggaccgacgccggagtcgagttgccgaggccacgagctgggctgatgtcctcgggggacagctggctgaggcttcggagtggccggccgagctatcctccgaccgcgttgccgtccgaggctaggtcggacttcgccgaaggtgtagttgacgccgagggtgctgctgctccccctccgtcaaggagtaggatggtgtcgacgactgtagaaaaatggttcgtgccgatcgcacgacggacagtggacaagatttacaggttcgggccgcttagagatgcataa

SEQ ID NO: 21388 - DNA, 378 bp, Zea mays
  Peptide Sequence Number=SeqID_64763
atgatgaacaaaaaacttgcacatgcactcaaatatgacacgtctcaaatgagtgatacagctaagaaactacaagatactgcctctttctgctacacagatgaggatgttgtagatggtttcatgatgactcaagtagctcgttcaatggacgagttagctgaaatactagaagtaacttcaattgactgccaggttttgatgatggatcctactgctatattagaagctggctatggaagtgaagacagtgcggtgtgggaggacgtattccgtgaccgagaaattatgaatcagcctttagaagcggagacgcttggtgagcactgtgctaagtgggggcttagtttcaatgagatctgggatagatcaatgtaa

SEQ ID NO: 21389 - DNA, 633 bp, Zea mays
  Peptide Sequence Number=SeqID_64764
atggcccctcctgtgacgtggtcggtccgagccctgggtagggcgaggcggaggctcctcggaggtcgaggtcgagtctgtcttccgaggttgaggtcgggcccgagcccttgggtcgggcgaggcggataccgtcggctgaggccagggccgagtccgagccctgaggtcgggcgaggcggagttcgtcgtctttcggggccgaggccgaggccgagtccgagccctggggtcgggcgaggcggagttcgtcgtcttccggggccgaggccgagtccgagccctagggtcgggcgaggcggagcttcctatggcgcccgaggccggacttggctgctgtcagcctcactctgtcgagtggcacagcagttggagcggcgcaggcggcgctgtcctcttgtcaggccggcgcgcgacaggataaggtgtcaggccatccttgcattaaatgctcctgcgatacggtcggtcgtcgtggcgatttggccaaggttgcttcttggtgaagactgggccttgagcgagccgaagctttgtgctgatgggggttaccagctgagattaggagtcttgggggtacccctaatttatggtcccccgacagtagcccccgagcctcgaagggagtgttaa

SEQ ID NO: 21390 - DNA, 449 bp, Zea mays
  Peptide Sequence Number=SeqID_64765
aagagggatggaatgatgagcaggtcattctgggtaaaagagcttctactgatactctagatttggaggatcctatgacgaggaattctagcaaaaaggtcaaaaatgataaacatgatttaaaaactgccatatcccataatgatatggataggaatattatccatagtcaaaaggttttgatacaaggtgaaggcagtggtaaagaggatgctgaaaataaaaacagagacctagttgaaggggtggagaaacaggacaaagaggcttttgaggatagtgaggatgatctgtatagctcacaagaattggatgagtttatcaaaagtatggatgagaacactcatgagactcctaatgatggaattggggagaaaggagttgaatctcaggatgaggatttgcttgtggccaaaaacaagaaaggaaaaaatagaatatcaagctga

SEQ ID NO: 21391 - DNA, 291 bp, Zea mays
  Peptide Sequence Number=SeqID_64766
atgcggcgagatgatgacggcgcaagaccttatgcgaggggcagcggagtgtcaagtgtgggaaccacgccgtctaggtgcacctattcaaatgatcatgtctatcgtaatgttaatgggtatgggtacccgatgggtactcgctacccatggtgggtatgggtatggcataattttgtacccatgatgggtagtgggtatgagtatgggtctagggatggcaatgggtacccaaaacccgaaacccgatgggcaaaaaccctattagggcacgggtatggcggattttga

SEQ ID NO: 21392 - DNA, 1465 bp, Zea mays
  Peptide Sequence Number=SeqID_64767
atgggcttccaggtggctgccgtggcaccgccgccgtgcgcgcgctcctcctccgccttatcgtcgccctcgacctcctcgcggccgttgcccgccttcctcggaggcggcggcggatgcgccgggctcgcgagatcccgggcacccgtaaactggggaaccggcgtgatggtgcggcgcccgcgcccggctcggacgccagcgaggtgcgcgctgagcgcgagtttggatgggatgggtggcggggacgcggagttcatgaagaggatcgaggagctcgctgcggcggctggggtgcagccggccggcccggcgggttgcggctggcccgcgagcgtggagctgagcgcgagcaacgtcgggctgccgctgtcgctgcggatgctgaagcggaaaaagcagcaacagcaggcgcagctgcatgctgtagcgcgtccttcacgctgggacgatgggctgctgggctccgccggggagtcggtgggccgcgccttctcctccatggtgctcatcgtgcgggagctgcagagcttcgcgctgcagcagatgcgcgacgcgctgctctgcgacgacctgcagggcgtcctggcgcgtgtgcagggcgagatgcacgactccttcgtctggctcttccagcatatcttcgcgggcacgccggcgttcatggtctccctcatgctcctcctcgccaacttcaccgtccaatcgatgggccgcagcgtcgccgctgcggccgccaccatcccgcctactgcgcctgctgtcgcccttgtcaacgcccagcgccccgagccgtcacgtccgcggttcgacgcggcttcggtgaagacgttctccgtcgaccggatggcctcggtcgggggggacatcggcggtggcggcaagaccccgcctgtcgcgggtgccaccggcgacggccggtcggacgagtccttatatcggctaagccgtgtgtcgccgcagcagccgtcggcaccccctgtggctgaggtcgcccaagacgctgcggacgcggacgagcaggccatttgggaaatgatgctcgcggaggccctgaaggccagcccgcgcaccgaggagctgagcgatccggacgtgctcagaagcctcgtcgcgccggtggaggcggagctggagaccgaggaccacgccgagcacacgctgacggagcagagatacgagcaggccgtcgccgctgagcccaacaatccgctcatcctcgccaacttcgcgcagttcctctacctcgtgcagaacgaccacgaccgggcggagcactacttcgagagagcagtgcgcgctgagccggcggactcggaggcgctgagccggtacgctactttcctatggaaggcgcggaacgacctcgccggcgcggaggacacctaccaggaggccatcgcggccgatcccgggaacgcccaccacgccgcggcctacgcgcacttcctctggaacaccggag

SEQ ID NO: 21393 - DNA, 168 bp, Zea mays
  Peptide Sequence Number=SeqID_64768
atggcagtggcaccagaatccaacctgggttttgtcggggctccagcgctttcctggggtatcggacggacggtgggagacgacttgtcacaaattttgttttttgcttcattgcttattgggtacttgtttcagcttttagattttgtaccagtttgtttgctataa

SEQ ID NO: 21394 - DNA, 405 bp, Zea mays
  Peptide Sequence Number=SeqID_64769
atgttcggtgcaccagaggaccccgacttcaaactcgtcaccttcgggaaattccagaggcaactccgctataattcaccggactgtccggtgcacatcggacatgtccggtgctccaaggaagagtggcctccggaactcgccagcctcgggaattcatctcagctgctccgctataattcaccggactgtccgaggtcaggcacgcccatgctggcgcaccggacaatctacagtgcatgtccggtgcgccaccgtacatcaaggcgggcccagaagtcagaactccaacagtcggaacccaacggctttggtgacgtggctgtcgcaccggacatgtccgacaaggaaggcaagaaagatggtggaagctggaagccgtcgcatcaaaaagatggcaagtga

SEQ ID NO: 21395 - DNA, 741 bp, Zea mays
  Peptide Sequence Number=SeqID_64770
atgcccccattcacaaatcgaacccgagatacagcattactagcccatggcggagcaataggagaagtcctcaccggctgtctcggcgcggagaacgttcggcgagcaattggcgccgatgcaggggagtcttctcccgtgcaagcgcagcacctcactccccaggccccgcgactctccagtgtatgctccagggacagaacgccgacgaaggtgggaaaacccgagtggctggcgaccgggacccgccagtcagcgttgcgggtgacttgcgcgagggaaggccgatttgggccacgcggaggaaagcaactgtgggccgaaatgctgatctgcggcccaggtaccctcaagactcctaattctcagctggtaacccccatcagcataaagctgctaaggcctgatggggctcggactcgggctaagtcccggaagacggcgaactccgctccgcccgactcagggctcggactcgggctaagtcccggaagacggcgaactccgctccgcccgaccccagggctcggactcgggctaagccccggaacacgacgaactccgctccgcccgacccagggctcggactggggctcagccccagaagacgacgaactccgcttcgaccgaccccagggctcggactccgccctggcctcagccgacgacctccgcctcgcccgacccaggggctcggactcgacctcggcttcgaaggagcctccacatcgcccaacctag

SEQ ID NO: 21396 - DNA, 243 bp, Zea mays
  Peptide Sequence Number=SeqID_64771
atggcggctctcagcccccttacggaagcaagagaacgtcagcaaggacccaaccgctccgacagctgtccctccgccaggctccatcgctcctccgacggccacgacatcacaccagctgagtgccaaaatctctccggctgccacgacggcatgagcgtgcggatagagtctggtggtggagctatcgagagggaatttgatgtgcaattgactagagggtatatcaacaacacaagttaa

SEQ ID NO: 21397 - DNA, 408 bp, Zea mays
  Peptide Sequence Number=SeqID_64772
atggccgccccgccaaccactcgccctgtcgcattaactccgcggcgggacaggtggcgcctctggcaggagaagcgggcgacgcttcaccttcgccataatgaccgcgttagtaaagggaccgggaaagggggataccccgaaaaggatccttccccgggaaggaaccaggctccgagcctacctactgatcagaggttcgaaggctggcccccggaagggttcgacagccgcctcagatcgcgtgggccctacacccactactggtcaaaggttcgaaggccggcccctcggaagggttccacggccgcctcaggctactcgggctccgcgcccattactgatcaggggttcgaaggctggcccccgaagggttcacagccgcctcagacgccgagcgagggatga

SEQ ID NO: 21398 - DNA, 564 bp, Zea mays
  Peptide Sequence Number=SeqID_64773
atgaccgttgaaaaagatgaccttctcgttgctcatcgaacacggatcctttggctgcttggggcaggaacgctcgcagcctcgtactctataaaattcaaactcaagctgtccactgcagaaaagcgcacggcatcacggcccaaagttcaccaccattttactgcttcagaaagttttggcctctgcaagcgcgacttgaaagcccagcgtcgtgatctaaccaagggcccccacgaaatgtcccagcccaacatgccaagcggcaaacggcctcacgtcgaaaagcacgaaaaattcagtaactgccacgccggattgcaccttcaccaatcaccactccatctcatgtccgtgcccttcgtgtacctcacctacgtcaccgtgtccgagaccctggccgtgcgcgcgttcctctacgtcgccgtggcgggcctcgaggtaagggacaccgagggcgttgccccggtccgtgctcccaaggttctacgccggcgacgtccacccggagggctggcgcgtcttccgctcgttcgggagtgttacacacttaacacggcataa

SEQ ID NO: 21399 - DNA, 261 bp, Zea mays
  Peptide Sequence Number=SeqID_64774
atggcgaaggggcttaccggcggcgagactgctccggcgggggagctcgtcggcggcgaggagtccggcctaaccaaggcacaattgatcaataaaatgggtcagagagtttcagcagggatcaaggaaggcgagcgaccgaagtccggtgaggacgatattggttctccggtgaagttctgctgggtccgagagcttgggaagcttcacgagctaccggcgaagctaaccgaggggcaggcgcggcttggaagtgactag

SEQ ID NO: 21400 - DNA, 309 bp, Zea mays
  Peptide Sequence Number=SeqID_64775
atggcgtcgccatcgcggttgctcccgcccacgcctccttcggccgcccagccccgcggcccgcgggatcgcctcgccttgccgcgcctccggtgcctcgccgccgccgcagcctccgcctcgcccactgatggcgctgtgctgctggagcgtggcggttccgcggcggtggccgtgcgggagttcgtcacgcttgacgagctccgcgctgccgtgcgcctccgcgtccgcaccttccacgagtacgcagacgactccgtcggaaccgaggttgatcccttctcatctgttttctggcgtgctgtctga

SEQ ID NO: 21401 - DNA, 324 bp, Zea mays
  Peptide Sequence Number=SeqID_64776
atggtggtgacaactcgctcaatggaatgttgttatcaagttcttatccgttcttaccaagccacagtggtgaactgcaaccaacaggtggaaccggcctcagaatggtgtcaacaagctcctataaaaatttcagattttttgaacaaccgagcgaaaagttatgcccggtttaaggaagattgtaatctcgctgacggagagtacatcctcgttctggagcaaggagttgctcaggaggtagtccaggagctagcaccagagcctgccatcgaggatctgcctgccccagctttggaaggcaagccccggttttatgcataa

SEQ ID NO: 21402 - DNA, 162 bp, Zea mays
  Peptide Sequence Number=SeqID_64777
atggtgggtacaagtgcggtcactgcacggcggcagccggggtcagtggagcattgtgcgcttccgaatatggttgatggtgtgacttggcataccaccctgccatcgggttggacggtcgagtgggatgttgctccggcaggagaggagcatgaggagtag

SEQ ID NO: 21403 - DNA, 372 bp, Zea mays
  Peptide Sequence Number=SeqID_64778
atggcggaggggcttaccggcggcgagactgctccggcggaggagctcgtcagcggcgaggagtccggcctaaccagggcacaattgatcaatcaaatgggtcagagagcttcaccagggatcaaggaaggcgggcggccgaagtccggcaaggacgatcttggttctccggtgaagttctgccgggtccgagagcttgggaagcttcacgagcttctggcgaagctaaccgaggggcaggcgcggcttggaagtgaccggggtgggctggccacggtggccgaggctcgggtggcaatggcgggcggaagagagctcgccggagctaaggagaggcatctggccggcgaaggtgagcacggggtgaggtga

SEQ ID NO: 21404 - DNA, 291 bp, Zea mays
  Peptide Sequence Number=SeqID_64779
atggaggccaagtcacaccatcaaccaaatcaaggaggtacttgcaaaaattatgccacaagcaagtatgagtatactaatactcagctagacttacccgtgaccgcacttgtacccaccataactgaaatgggagaccacgtctcaggtcgcgtgaggggatatgtccactgccaggttcactcagaaattagacagattcagttactgaatttgcgaaaagcacaacttctaaacgatcagacttatgtctgtcaaattttaacacaaaatttagacagattcagttaa

SEQ ID NO: 21405 - DNA, 801 bp, Zea mays
  Peptide Sequence Number=SeqID_64780
atgaagctgtggaaggagacttccaggagttccaagactacgacgagttctaggcgtgggttagcggcaacccccagtcggctgcctgtgaaggccgcggttatctacgtttcttttccgcactttgatttattggtgaggatgaccttgttgcctcatcccttgcagtcaggctggcgttcgttggactccgagtctttcggataccgggctgaagacaccatcgaggccattgctctccatgggctaacgaccttctgtggttttcaccccttggagctgtctactcatcccattggtctgttcctcgtagagaaggaggacgacccaatgtggaaataccgagtggaacatgccaaggatatatgggctctttacccagggcagactgctcacttaacggtgcgatgcatgaatgccctgtaccgcctgcaagcagtacgaggagaggcaatgtctcatctaatggccttggtggaggctaccaagatcaccttagataacagggaggaactggtggtggaacagatggccatccagatccaggagcttgaggagctagtgggagccagagagaacaccattgaggttctcgaagatcagctgatcaacactcaacaacagctcgaggaggctaaccagcatttggatatgcaccatcaggagattcaggacatggaggccaacgaggatgttgacatcgagggaggagtggagccagagcccgcatctagcctggacactgctggctcagggagacccccttcccccgagtcaagcgttgcctcgtttgtccattaa

SEQ ID NO: 21406 - DNA, 429 bp, Zea mays
  Peptide Sequence Number=SeqID_64781
atggctcagcaaaatgatattctacgacagttggctcagcgtcagtcgccacctcagcattatggtggtggtgatcaccatcagcatcccccagcagcggccgcttatcaggagttactcagcactcagccgccattgttcacttgggcagaggatccgcttgatgctgatgtctggctcagggggaatcggacagtgttgcagtacgctcaggccttcaatgaccggtgtcagtatgcaggctatcatgtagacactgatgagaagaagagagacaggttcaggaggggcctcagtactaagctccgcgaccgtctcaacacagtcagggcaaacaactacaatgagttggtcaacatggccatttcccaggaagactgcatcacagcccgccaggcagaaaagaaaaggaagacccctgtggcatga

SEQ ID NO: 21407 - DNA, 468 bp, Zea mays
  Peptide Sequence Number=SeqID_64782
atggctgtctcgcacacgtatctctgtcgctgtcgggtggggtcacctggtcagcccaccaccacacacccttgtctcctggctatcactgagaagtgggccctgttgtccagatgcttcttctccccctctctcgtaaccaccgagcaaatcactagctggagtctgttacatcttcgccgggttggtgattcagccagggaaggggctataaagcttgggctccgcaacccctcgctgatccccaaatcaaatgtcgccgaggccttctgtgctggccagttttctcaccgtagcgacggcaccaccgtggaacttctgtgcatcgtggacaacttcatcgctaccctcgctgttgtagagttcgggcatcagggcgctagggtgcgggtgccggtgatggccgccaccgcattgagagcgcaggcaccaccgtgtttggtcagcgatagaagaaggagttggtag

SEQ ID NO: 21408 - DNA, 1048 bp, Zea mays
  Peptide Sequence Number=SeqID_64783
atggccggcagcgacgcataccgcaagtccttcctcgagtcggtcgtcgagcactataaccgcggcgcggtgtttgccacggctgctgcgcaaatcggggccacggcagtggcagggcacctaggcgcgcagtccgcgctcttgttcctcaccgtcgccaggatgacgcgcccggcatcccgatccctctgtgtgggcaccgtcgtatccacagccagaggaagaaggccatctcgcgaccgtccgatccggaatgaggtgatgctggctagatggcggagcatccactgcgtcgcacagtgccagatcagttcagttgcctgcacgaggagcaggagcgccgacgccaggagcaggagcaggagcaataggactcttccccctcacctcaccaagagtttgagccacagcacggagctctcggaggagccggagggatggatcgctagacccatcactcatgacgccgctcgcgggtgtcactttcacaacgctctcaacaccctgctgcgttgggccttcgaccgacacacttggtccatcgagtactgttgtgtagtctaccagcatcgtcgcgggttatacccggaccagtgggaggctacttgcttggtgcgccatccggacgatgatctccagagtgcagaggccttctcagagcactattctattactgagagggatactgccaaggaagccatgcaagatgcagcacgatgggcactttctcagtattgctcgttgttcagcggggtagctgatggccttgacctgaagtactaccctcgtcgttcgaccagcagtgctggaggtgtgattgtctcaccagttggtgagggcaatcccaggctgaacaaaatggtcaacctggctgccgtgctcaacacagagctagaccacgcccttgatgagttcggcaaggttcgagcggaggttgcggaattgcgtgttgagtgtgtagcacgccagtatctggatggtggttctcccacccctatcgagattcaacacccttaccgttcaccgcctcatggtcgctttgactatg

SEQ ID NO: 21409 - DNA, 609 bp, Zea mays
  Peptide Sequence Number=SeqID_64784
atgaccggctggtggctagggtttggcgcggcgtgcagggaagggaagatgggccgtgctagagttgctgggccacataaaccaacgaccgagattagatctgcggccgagggcgcgagcgggcgagcgctgataggcggcgccacacctcctcgcgacggtgaagttgccggagttggggcgggcacgtgctacggcggttccggggtcgccggaattgggcagaaagggggagaacgactcgtcgaactcggtggcggggttgtggccacgaatccgaggtcagagagggggaatggcgggggaaaggtctcgggcgggccggaggactccggtgagggattccggccgcggggagagggcttgaggcacgataaggcctgggataactttagcagagggaggggtaccttagggaccaacgtgggggcactgggccgggctaatttggccggtcaccgcgcgggcgcggcggaccgccacggccgaactccagcgaagccaaaattggccgacaacaaagcgaaattggggaaactaagcacgggcacaggtgtctcacctcggggcggagctcagggtggcttgacgcggtcttcgatgagctag

SEQ ID NO: 21410 - DNA, 210 bp, Zea mays
  Peptide Sequence Number=SeqID_64785
atgggcgcaccggacagtccgagccgaccattgcgcgcagatagtcgttgctccactggtgcaccggacagtccggtgaattatagcggagctgcgcttggagaacccaaagctgaggagtttaagctgattcaccgtggtgcaccagaccagggcacacttcggtttccattttgctcctttcttttgaagcctaacttgttcttttga

SEQ ID NO: 21411 - DNA, 900 bp, Zea mays
  Peptide Sequence Number=SeqID_64786
atggatcctggccacatatgctatgcattcggttttgcccccagaaccgggtgtgacataagtgtcaaggaaatccctgtggatctccctcgcatttgtgtggagaatagagttattctggaagacaactcagaggagtttttgcctacgcctaccccgttggcacaatcactagccttcgcaactggatcgtcagctttagcaccgcctgcaccagcagtccaagcccctgctcccagaggcaacgacccggacgactctggtgacgatgatgaagacgacgaagaagaagaagcggagaacgtcaacgaagaagccaacgatgaacaacaggaccattacatgaggttatggcctgtcactgaacattatacatcgatgttcgagacagggcacttcctaacctgttgcaggatgttctgcatgcgttgggaacctacgtccgacccctgtgatagagacttcaggactctatcagttcatgagtctctgacaccgctatccacctacgctgcttcggacaacgatgctgctaggcgaactctgtggtccctcagccacacctactggcagcagctgcacaacacgaagtacaggcatatttctctgtgtattcgtggaaaaagccaaaccaacattgttccaggtggagctggagaagatcgcctcaacaccctagctggtgtggtggcaggtcttaacaccgacctggatagtgctaccctggacctctctagggtacacttggagctggaggatgcacacgcaaggatcacagccctggaagctcagcttgatggaaggaatccccctaaagttcaagtctctaccatgacgttatcccctccccgcaagaggatccgctatggagaaccaggatctatcaccaggctgctataa

SEQ ID NO: 21412 - DNA, 2336 bp, Zea mays
  Peptide Sequence Number=SeqID_64787
atgtcgtcttcttcttcatccgctgcgaatatgccgttgggcgaatcatcgtccgagggtaccttcagtgatttggcggcggtggagctacacccgggccacacggtggaattcggcgtttcgaggatctcctcggttcgcgtgcaagacatgcagcagttgggttgcctgcgcatcgttttgtggtggaagacttcggtcgaagttgttgagctagttccttgcgcccgcaacaagtggggcaactggtatgattattggttttatgtggtgggaggcgaggtcgaagacctcccagcactcccgatggccgtgatgtgctcccactgctatgtggcattcccgccgtttgaggtggcggaggatgatagtaacgaaggggcccttcgttgtgctgcccgcatgagtagcgggcgcgatttatttgaggaattcatcggttatggagtgtggcctttggtgcatggctgggtgttgggcgaagtaggccctcgccagatgccctccctgggcgaacagctagtgcgaagtccggccttcgcgttggatctacgtggccgggatccagccgcattcgtgcgtgaagtggaagatggggctgtgcggattgtggggcgttatgtgccgaggactgaggctctgtggagttgggatatccgtggatccaacgttcgcctgaatagggtcttcaagttgaatcgtttgccgtacagcggctatcccggggacgacgctgccgtggccgtcaaccaccgcgggaagaaaccagtggccttgatgaggacgtgtgcggccctcgggggaaggatgtcttcgcccgagctccgggagtctttggcgcgaatgctgagggttaccgggggtcgatggccaaagaatgttccgatcccccgcgcgactggcgaagacatgtttacgtctcatatggctcatgacttgaagatttttccttacgggcggaatattgctgctgttgtatcggcagtgatggagaaggatcgtcaagacgctgcgcagaagcaccgggcggttgttaggatcgcggatcctttccgcgaggcgaagaaggcgcgggtggggggcgcgaagtctgccgcccccggcagcagcaagcaggtgtcggctgtgaagccggccatccctgggcctaggaattcttcagtaggtgcgaaggctgctgcttctggcgcgggcaagccacccttgggcgagcctgcgaaggggcgaaggttgcctttgccgccgcatagtaacgaggcggcggtgcgtgttgccaacttcgacacagatatctgcatgggggattatcttgttgggtcggatgtggggcaactggctgttgtcccgcctccggtggtggccacttcatcgacgacggcggttgttgcgaagggtgcttcgcaggacccgtggtccgccttctgcgcgagcggcgcgattccgtcgtccgccgccgctaaggacgtggcggccgacttcgccgaccatgtcgcatcgggtgctttgactgtggagtttgctgccgaagtcgagcgtctccgtgcgcagcatgtggatgctgttcgggagaagtcggctgtggaaagtaaaaaccgcaggctgacggagaggttggccgctatggaggccaagaagggggatctccggcgccagctggtggaggactggagggaggcgaacaaggccattgttgatgcgcaggctgcgcaagccgacgtcaagcttgcatgggcggagggcagtctcgcctgccaacgcgccgaggagctagaggcgaggttcaatagcctgcgcaaccgtgtggacaaagccgaggcctcgacgcgcgtggaggtcgagcggacgcatgcgcagttcgtggatgcatactgggaactgggtgcgcggaccgccgccttcgaagcgcctggccaagaggcgggcctccgcttccttgaatggttacaggaggagttgggggtgctcccgacgatcgtgacgggcctcatgtcctttgcctccctcgtcacctgcgagggggccgtaaatgctttgtcccacgaggggtgcgggcattttgaggtcttcgaccaatcggacgaaaactttgaatgcaaaatcttccaggtcaaggacccggtgctgaagcagtcgacgggggcgctcttcgacaggatgtggggcccgcacggccgagagacggtccgggagagatggcgcatgtcgaagaggtcgaaggaccttggtaaactggatagcaagctaccccgtggccccgggggtggaggtggcaccgccatccgatgccggcgaaggcccctcgacggcccccgcaacaaccatgctgactggagctg

SEQ ID NO: 21413 - DNA, 636 bp, Zea mays
  Peptide Sequence Number=SeqID_64788
atgcccaccccattggcagaatcactagccttcgtagctggatcatcatcttcgacaccgccagcaccagccgtccaagcccatgctcccacaagcgatgccccgaatgactctagtgacgatgatgaagacgacgaagaagaagaagatgaggaaaacatcaacgaggaagccaacgaagaacagcaggaccactacgtggggttatggcctataattgaacattacacctcaatgtttgagacagggcacttccctaacctgctgcaggatgttctgcatgcgttgggaacctacatccaacccctgtatgagacaagggtgatggatgcaagtgatagagggttcaagactctgtcagctcacgagtccctgactccgctatccacctacgctgcttcggtcagcgatgctgctaggcgaactctgtggtcccttagccacacctatcggcagcagctgcacaatatgaagtacatgtatcttccttcgcgtattcatggagaaaaccagaccagcattgttccaggtggagctagagaagatcgccttaacaccctagctggtgtggtggcaggtcttaacaccaacctggatagtgctaccctggactttctagggtacacttggagctag

SEQ ID NO: 21414 - DNA, 396 bp, Zea mays
  Peptide Sequence Number=SeqID_64789
atgacgaaggctacatcgacagaacacgccagaacaagtcgggggcgccgctcggacggcgaccagtgcgacccccttcggtctggtgttgctagacaaaggccccgccaaagtctatgggcctcacgcgctgtcatccgcctggggaggcccatgtgtgattcggcccatagtgatgggccccgtgagcgaaggcaacactactggaggaaaagaaaagctaggccctcgcggacaacacccctcaagaggccttcgaagatgacgctgtcaacaacaaaagacagcaccaagaccatcccacccccgagggcactgtacacacctgcagctctgaaggcgcaccacaagcaccaccgccaggcttcgctctaccagagggcgaaaacaccatag

SEQ ID NO: 21415 - DNA, 147 bp, Zea mays
  Peptide Sequence Number=SeqID_64790
atggagtccgcgagcgcgtgcagctcgtggatatgggcacctgctcgccgagaactgcgggtgcacgagcaagccactgtggattctgaggttcaacaagtagagatagctgagcaggagctcattgaaggcaagttgtgcccttga

SEQ ID NO: 21416 - DNA, 1296 bp, Zea mays
  Peptide Sequence Number=SeqID_64791
atggagtgtcgcccttggcgcacggctggttactgggcgaaagttggaggcctaggccgtgaagattgtgggaagatatgtgccgaggacggagactctaaggagttgggtatccgcggttcgaatgttcggttgaaccacgtttttgagttgaaccatttgtcgtatgccggctacccgggggacgatgacgccgatgctgctgctgtccgccgagggaaaaaggtgatgacgacggtcgacgaaggcccttcgcggggagcagcgtcaggcacgaccgccaagaagaggaaattaagtacaatggctgagggtttaagggcttccgaacgttttgctgcggattttatggtgacctgcgtggttcccagggagacaatgtctttgcccgagatccgggaatcttccacacgaatgctgaagagtctgggcaactggctgttgtcccggtgccggttggccaccgttgttgcggtggttggggcaaaggggtctacgcagggaccccatggtctaggttttgctccagcgtcaaaaattgctttggccgtcgtcatgaaggacgtggctggctcggttgcgcagaagctgaagcacacggccgccttcaccgagcatatcgcgtcgggggtgctgaccgtggagtttgctgccgaatggtggcgactcgaggggaggattgagcgcctccgaacgcagcatactgtggcggtgcaagacaaatcagccgcggagaacatgagccgcagcctgcttgagaagctgtcagcggtggaggctgagaaagaggacctcggccatcggctcgcggcggaaaaggagaatgcggacagggcccacgcggaggcccaggctgcacgtgccaaggccaacctcgccctccaacgcgctatcgacgtggagtcggcgcacaggagtcttcgcggctatctgggcagagcggaggcctccactcgcacaggggaggagctggagctactcccggcgattgtgatgggtctcatgtcctttgcctcgctcattacctatgaaggagctgcgaatgccttgtcccgcgagggatgcaggcacttcgaagtttttgaccgatccaacgaggacttcgatcgtgggatcttccaggtcagagatgaggtgttaaagcggtccactgcggcgctttacgataggatatggggcccgcacggtcgtgataccatccgggagaggtcgaaccgggcgctggagcagatggcgaatgataaagaagtcaacaacttcggaggcctagaaagctcggtgacctgggcggaagat

SEQ ID NO: 21417 - DNA, 270 bp, Zea mays
  Peptide Sequence Number=SeqID_64792
aacagtagtcgcgataggaaaaagtatggtggggctcaccggcggtggtctagctccggtgaaggggtctcggaagtcggggaggtcttggcgaacccgtcgatggtcggatggcggctggagatgatgaataaagaagaagtcgaagacctcgtcagtcttgagagctcaatgaccaggatgggtggcacagaggtgggagctgacagtcactcagcgcctcaggccagctccggcgaagaccctgcagtgtcgtctgctccggcgtag

SEQ ID NO: 21418 - DNA, 282 bp, Zea mays
  Peptide Sequence Number=SeqID_64793
atgtcgatgacttcgccgtcctttgtggcgtcctcgccctctagtggagcgaagcctgggggtggttcttgtggttgtcctccggagctgcagcacgaacagtgggcgccaaatgttggaacttgctctcctgggcaagttgatccaacgggggagtggaaaggatgcaacctctcaagggcactgtacgggggtatttataggtgcccgagcgcccaacgtcccgatgtaaggacgcttatgccctcagacacctggattatccccagaatattcccataa

SEQ ID NO: 21419 - DNA, 333 bp, Zea mays
  Peptide Sequence Number=SeqID_64794
atgtctaccacaactttccgcagaacgaaggtcgcgtcggcgggccccgtcggtcaggctaaggacgtcgtccatgcaaaggcccaagcgctcctcttcgcttcgacaagccgagacgaagacctccacgactgcaagggttgggaggctgtttggggccttcggcttccgaatctcctcaaaaacgtaccttcgaagtcagattgcgagtatacaagaacatggttaagacgaagcttgattgggacggcgatcacaacgaaggataagacgatcacgaagctacgtgcagaagagcttcggcataacggcagaaagaggaaaccgacttaa

SEQ ID NO: 21420 - DNA, 366 bp, Zea mays
  Peptide Sequence Number=SeqID_64795
atgacaggagtcttccctaggtgtgatattttcaaccccgagtgggaccagccagaaggtagagctctaacaggaggtgacagtgagcaacaacacaacgacaccgcaacgactaccagacattactcgtggaaatcatcagaaagggatgcagctttgactgaggtcgcacatctcagggaaatgcaggtcaacctaatgcagcagctgaacaatgctgaagcttggaatgctaatctgcatgaggaggttcaccagctgtatgcccagctcaatccaatcaacccgctaaaactagaagaagcagatgccaccgcagtcgacgatggaggtgtagtctccgagaccgacaacattcagatgtag

SEQ ID NO: 21421 - DNA, 618 bp, Zea mays
  Peptide Sequence Number=SeqID_64796
atggcacccaagaaagctagctcgaaggctgacgaggctgcaaaggcagcactgctggccgagaaaaagggcaaggccctcgccctcgtcgacaccacccaccaagaggccaccgaagacgacgctctcagcaagaggcagcgcaacgaacaacccactcccgaaggcagtctccgcacctgcagctctggaggacaacaacaacttcccccaggcttcgctccaccggagggcgcggacgtcatcgaggacggtgaagtcatcggagtctcggcggaagagcagctgcagctgcgcgccttgcgcatcaagaaccgcaatctccagaagcaaaaaaagatacttgaggccaagcgccaacgtgtgtctgcacaagccaaggtgcggcagatgatacgcgacgaagagcagaaggctcaggagctcgaaacaagagatcgcgctaatgcagcgcgaaaggccacctcggcctgcaacacggcccacccctgcaacagcgcgcacaagtcgaagacctatacttcccccagcgcggccacgccatcccacacgccgtggcattccaaggtgtcaactacctcgatgagcaaagtcccctggcgccacacctgcaagtga

SEQ ID NO: 21422 - DNA, 68 bp, Zea mays
  Peptide Sequence Number=SeqID_64797
cgtcgagtgccctggtgtcacacccggattttaggggtccaaaacccgggcgcgaacataatcaccag

SEQ ID NO: 21423 - DNA, 310 bp, Zea mays
  Peptide Sequence Number=SeqID_64798
ccggagtcccccgccgtcgacccgagacttcaccgcctccccgccgtcctctaggcactcctgggtttgcgctcctgagcagatatgatctcagccctccgatccagatccggctgttccccactctccccctcactcgcgcccctgctgctgggtctggtctgtcagccccgccctggttcgctgacgcccagagcccacctatcagcgttcgctgcacccgcgcctgcgcgctcgcgcacaatgagcaacccgtggttcctgagtgtgttgtcgaagatcttcctgagcaacaacctggtgaaggcaa

SEQ ID NO: 21424 - DNA, 300 bp, Zea mays
  Peptide Sequence Number=SeqID_64799
atgaacagtatcgaattacatttataccttcggcttgacagaagggataagccttcatggcgaggtcacttgtgtgtcacaggaccaaagaaccaaatggacaaggagaaggggcctaagcttaacgatgatgagtgtgtctctcaactggaattgaaggagatgatgtgcgcgatgactgaagcttttaaaaaataccaggactctgcggcgacatcctatgagcagcttgatcgacgagttgctgaacttgttacacgcatggacatactggaggtcgtcccccaccaccaactctag

SEQ ID NO: 21425 - DNA, 150 bp, Zea mays
  Peptide Sequence Number=SeqID_64800
atggcagtcggggtcagtgaggcattgtacgccaaggcgataggttctctggaggacatggttgctggagtgacttggtcgtccatctttccaccgggttggatagtcaagtgggaccctacctcggctgaggaggagcatgaggagtga

SEQ ID NO: 21426 - DNA, 150 bp, Zea mays
  Peptide Sequence Number=SeqID_64801
atggcagtcggtgtcagtgaggcattgtacgccaaggcgataggttctctggaggacatggttgctggagtcacttggccgtccatcttgccactgggttggacagtcgagtgggaccctacctcggctgaagaggagcatgaggagtga

SEQ ID NO: 21427 - DNA, 344 bp, Zea mays
  Peptide Sequence Number=SeqID_64802
cccgcatcgtcgatgtgcggcgtaagcgctgctacctcctcttgaacccctccgtgcgcacaaggatgctcagccgcctgcccctagtgatggggacaccccatccgccaccgcggcagcgtcacccgcttgttccatgcagaaatggagacacgacgatgatggcatgggctgaggcgggtggtgaagatcgtgatggtgttggcgacagtatcagaggtgcatggcggatggagctcatggcggtggagcaagcgctttcggtcgaggcacgagagacgctcaccgccgactttgaggggcatgtgcggcctaggatctgttcttggggaggggttgcatga

SEQ ID NO: 21428 - DNA, 228 bp, Zea mays
  Peptide Sequence Number=SeqID_64803
atggaaggagctgggagcaaggcgcggtccgagcagagggtgaggaaggaaatggggaggacgctcaaccataggggaggcgagggagcttggctgcttataggctggggaagaagacgatggagcgcggccagggataaggccgatggccaacgcagtgaaataaaatcagagaacggacgcaccgattttcggaacgactatgttccgaacatcacgaaaatttag

SEQ ID NO: 21429 - DNA, 366 bp, Zea mays
  Peptide Sequence Number=SeqID_64804
atgcagatcagcgcatatggctcaccaggatgttggtggttcaattcaaatttggcgttcataacaccagggttggagatcctaggatggctggtaacctcatcggcacaaagctgcaaaggcctaatggacgcgattaaggtcaaggctcagtccactcaagggacacgatctcgcctcgcccgagcccagcctcgggcaaaggcagccgaccccggaggatttacgtctcgcccgaggtccccctcaagcaacggacacaccttcggctcgcccgaggcccagtcttcgcagagaagcaaccttggccagatcgtcacgccaaccgaccgtatcgcaggagcatttaatgcaaggatcgcctga

SEQ ID NO: 21430 - DNA, 927 bp, Zea mays
  Peptide Sequence Number=SeqID_64805
atgcctgagactgttaaaccggaccatatcgtgaaaacattattgaacttcgtcaaggatgggtcggcgcgagacggagcacgaagggggaagaaacaggcaaaggggaaacccgcggccttcgtgttgccctgcgcccaggtcgggcgtaaggagaaggtccaggtgtacaatgggggtgtagcaggtaatgatggccccccctgtgatgtggtcggtccgagccctaggtcgggcgaggcggaggctcctccgaggccgaggtcgagtccgtcttccgaggtcgaggctaagtccgagccctggggtcgggcgaggcggagtccgtcgtccgaggtcgaggctgtgtccgagccctggggtcgggagaggcggagaccgtcttccgaggccaaggctgtgtccgagccctggggtcgggcgaggcggagtccgtcgtccgaggtcgaggttgagtccgagccctggggtcgggcgaggcggagaccatcttccgaggccgaggctgtgtccgagccctggggttgggcgaggcggagcttcctatggcgcccgaggccggacttagctgctgtcagcctcactctgtcgagtggcacatcagtcggagtgacgcaggcggcgctgttttcttgtcaggtgatccttgcattaaatgctcctgcgatacggtcggttggcgtggcgatctggccaaggttgcttctctgcgaagactgggcctcgggcgagctgaagcccccgagcctccgcacagagcgagaggacggtcaaggacagactcagcttttttcaaacgcccctgcgtcgcctttccgcaaggaggagggggaaagcgccatgttgccctcggagggcgccgaacatgatgtctccagtgagttgctaatgggtaatccgagtggacgcccgtgccccatttgttag

SEQ ID NO: 21431 - DNA, 726 bp, Zea mays
  Peptide Sequence Number=SeqID_64806
atgaggaaaaaatatggtattagttcagtccccgacagccacaatgaacagacaccggcactcaaggtgccattacaaacggaactccggttccgcccccgcgggtatgaacaacctccacaccggagagcctgcggggcgacaagctccgggcgactcgccaacgacctctgcagcagcagcgatggtcccaggacagacgctgcagctgaaaggctctcgttcgcgtccccactcaagggacgcgaaccagacattaaagccaaagagccagaggtcggtccgcgggtagcactgacgggcttgtcggaggagaagctttctccagctgccaccgcgtcagcaccgacagcggcgtccacctgtccaccagcgccgcaccagcgagcgccgaccgccccaaagcgcaccggcaggtcctcactcccatcctcgccacgaaagcgaggacagaggacggaatgttgcatcctagcttggcagcaacagttcgccttccccggcatggctggagggcgcctcctccgtagagctgggggatggtttccaccccagaagctggaagaagaggtgggccgccgacccgcatgggaggtagagctctggctcgcctcgccctccgccccagccaggatgatgaagatccttgaagctgagggcggggcagaggccgcagcccgactcgcttctccccaccatcgaactggtggtcaccgtcttgggtga

SEQ ID NO: 21432 - DNA, 747 bp, Zea mays
  Peptide Sequence Number=SeqID_64807
atgcaggcggcatgcaaccgcaccaagggggcgcaccctttcgacttcgacgcgtccagcatggaggcccaggcccacacgtcatgtaaccagcgcgccagttactacgtgcaagaaactgcaccgccactcatgccagtaccgcgcctcctcgactgcggaaccgatgccgcgactcgaggagaccctgcgcatgacccgacagtgccaaccgagcacatcggtcacgggacaggcggcacctttggcaagcgaagcaggcgacgcttcacctccgccatgatgaccgcgtcaaaaaaggtgcgccacgtcattcgatttcgtatccttttccgcttcctctttctctctcttgccacagggaccgggaaaggggatactccgaaagggatccttctctgcgaaggaagcgggccccgagcccccctactgatcagaggttcgaaggctggcccctcggaagggttcaacagccgcctcagagcactcgggctccgcgcccactactggtcagaggttcgaaggctagccccttggaagggttcaacggctgcctcaggtcactcgtgctctgcgcccactattgatcaggggttcataggctggcccccgaagggttctaacagccacctcagagcacgcagagcgagggatgaccctgggtacgttcgatacataaccaaggctcgggctacgctcccgaggtaccctaggacatttccgagaccgacgggaacgattttgtaa

SEQ ID NO: 21433 - DNA, 297 bp, Zea mays
  Peptide Sequence Number=SeqID_64808
atggatgagagcgggtgcaccgcagagacgacgagcaggcgcgcgagtgctaacggggccaggggcaagcacgagtgctgggggaagaactcacgaccacaagaacgagctaggatattcggactcggcgacaacggaaaagccagggaggagcagaggaaggcgggtccaacgtgcgcgcagcacgcgaactggtggagggcgacggtcgggaacgatgatcggatcgacgacaggttgaagctcgtagacggtgactccatggaaggagctgggagcaaggcgcggtccaagtag

SEQ ID NO: 21434 - DNA, 210 bp, Zea mays
  Peptide Sequence Number=SeqID_64809
atgacgcgtgtcatcatccttaatctcaatagctcttccgatacacgcctcaccatgcttcgcctcctcttgatcagccccatctgggtcatgtgggcagaagatctcaacacctatcaaatgttcgacgacaagcccgaaccagaatttatcaacattctcacaagtattgagtcacgtttgatgctggtacgtgaattaactacgtga

SEQ ID NO: 21435 - DNA, 744 bp, Zea mays
  Peptide Sequence Number=SeqID_64810
atggctctgcgcttttcttcgttgaatcggcgcagaggctgcttcacgggtcgggctccagctcgaatatccagcgagtgctcggcgacatccctcggcgtcgttgctggggtcgagagggacggatttgaccgtctcagctggctcgaagttgccggcgtggcgcttcacgtctggcgcctccttggagaggctctccaggtcggcgatgtgggccacggattcggcgagggcctcggcgtactccacgcactccacatcgcattcgtacgtgtgtcggtacgtggggccgacggtgatgaccccattggggcccgtcattttgagcttgaggtaggtgtagttggggacggccatgaacttggcgtagcatggcctccccagtactgcgtggtaggttccttagaacccgaccacctcgaacgtgagggtttccctttggaagttggagggagtcccgaagcagacaggcagatcgatctgtccgaggggttggacgcgtttcccggggatgatcccgtgaaaaggcgccgcgcctgtccggatcgaggacagatcgatctgcaggagcccgagggtctcgacgtagatgatgttgaggctgctgcctccgtccatgaggaccttggtgagcctgacgttggcgatgacagggtcgacaacgagcggatatttccccgggctcggcacgcggtcggggtggtcgccctggtcgaaggtgatgggcttgtcggaccagtctag

SEQ ID NO: 21436 - DNA, 108 bp, Zea mays
  Peptide Sequence Number=SeqID_64811
gtccgcgctcatcagagcacttcttgcgcagccggagcccgccgccgtcgacccaaggcttccccgcctccccgctgtcctccatgcgctcctgagttcgcgcttgtg

SEQ ID NO: 21437 - DNA, 1059 bp, Zea mays
  Peptide Sequence Number=SeqID_64812
atggatatggctagtcaaatatttgaaatattaagaaagccaggttacacatatctcacccaggatgacttcaagcctgtcctgaaagaactactggcaacacaccctggcttagagtttttacaagggacccccgagtttcaggagagatatgcggagactgtaatatacagaatcttttactccataaatagatctgggaatggtcatctgactctgagagagctcaaacgtggaaatttaattgctgcacttcagcagttagatgaggaagaagatatcaacaaagtgttgagatatttctcatatgaacacttttatgtgatctactgcaaattctgggagctggatgcagaccacgattttttgattgataaggaaaatctcatcaaatatgggaaccattcgttgacctatagaatagttgatagaattttcgcacagatcccaaggaaattcacaagcatgacagaaggaaagatgggttatgaagactttgtttactttatattatcagaggaagacaaatcatctgagcctagtcttgaatattggtttaagtgcatcgatcttgatggtaatggtattttaactttcaatgaaatgcaatttttctacgaggagcaattgcaccgaatggagtgcatggcacaagagcctgtgctttttctggacatattatgccagatgattgatatgattggaccagagaatgagagctatttaactctacgggacttaaaacggtgtaaactctcaggaaacatattcaatattcttttcaatctcaacaagttcatggcatttgaaactcgtgatccattcctcattcgccaggaacgtgaaaatccaactctaactgagtgggaccggtttgcacatagagaatatattagattgtccatggaagaagatggtgaggatgcttcaaatggaagtggtgatgtcttgctgcatgaatttggttggacatggatgattatggttgtgaagcggaaggattgtaaatttggtggctaccctgttgaggccattgtaggctcacagcagattcagtaa

SEQ ID NO: 21438 - DNA, 348 bp, Zea mays
  Peptide Sequence Number=SeqID_64813
atggctcagtcatccgctttcattaggagtgataccttcacactagggagccacatctccttcaattccctcgacttccttaacaccaccaccagtgaactctatctcaccgactccgacacacctatcacggcaagcacgagatgccccacatgttccaccatcgctaggagcaaggcggataagcgatgccttaagaggcacactgcctcccacaagcgacaccttaacacgctcgccgtcgccattaggcaaaaggcggagggaacctcaccctcaacatttgtggctgtcatcgaccatgaaagggaaatgtgcccttggaccatttctatattgttttggtga

SEQ ID NO: 21439 - DNA, 510 bp, Zea mays
  Peptide Sequence Number=SeqID_64814
atgtggcaggacgccaagaaaagcttcgcacagatgaacctaaatggaaatttgcagaatggaattgggattcagatgggtcaaattaagacgatagaaatcaaggaggccgcggaaaaagggagaaatggggagagcaagaccgcggagaagaaaaggaaagtaaatcacggattcatgggtatcctctgtcgggacagtgaccccatgacaaatccgccaagaacaaagctccctcgggggaaggaccccgatggacacgaggtggagaagataccgtctccaaaagcacccagtcagcacccggtagttacttctaatacaccggagtgccacatcgtcacccggcggctacttctaaaaccccgtcgctcagcggctatctcaagcgccgacgatgtcttcagtcgctcggcggttacctctaaagcaccgacgatgtctccagtcactcggctgctatctctaaagcgccgacgatgtcctcagtcgctcggcggttatctctaa

SEQ ID NO: 21440 - DNA, 606 bp, Zea mays
  Peptide Sequence Number=SeqID_64815
atggccgtgatgggttcaacatcggaaaagatgtacctctgccaggaccttgtcgatgtaggcttgctgatcgaggaccctttaactggtcacatgcctcatcatgggaaggtggttgccgagaagactcatgatggaggggagactctgaaggttgacgcctccagtacaagactgattgagagcccctcaagctggtccacgagcataggcccagcaagattgccgaacaactcggcccaaaggctgactaatccagcaggggcatatagctacaacctccaacatatgacgctcggcggtgttgggactgatagttcgatcaaagctaaaggggtcacgtccgttgagttaaccatcgggaccaagaccattgcgtaccatcctatcatcgaacgcgcgctatatggcgagtaccaattactcttggctgggctgccagatgaagtgcgcctcatgctcatcaatgaggtggacgatgagctagacggcgtgatgacgtcgttgtcggatgcgatgcctagaataacccgagagtcaccgacattggcgacgaccatgaggtccccctgcttgacggtagacagcgcggtgcagccgctctag

SEQ ID NO: 21441 - DNA, 381 bp, Zea mays
  Peptide Sequence Number=SeqID_64816
atgacttctcacggatcctcgaacgaagggaatgcacagtcccacacggacggacttgcacgagagggtttcccccgtatcttgtgggagctgttcgagaagcaccgagtgccccgctgtagggttaggatgaccctagagcctcaccccctgcagccaggctggcgttcgctggactctgagtcttttggatacagggctgaggatactatcgaggcgattgctcttcacggactgaccaccttctgtggattccaccccttggagctgtccactcacccaattggcttgttccctgttgtcggtgttttgggtccgaccgcacacccggggttgcccctcaaggtgtttttaggagtaggacggtgtcgccgactgtag

SEQ ID NO: 21442 - DNA, 396 bp, Zea mays
  Peptide Sequence Number=SeqID_64817
atgggcaagaacaacaaacgcaagcgcgagccgactcctccatcagaggactttggcgactcggaatactcagaggagttctcctctgagtccgaggggtctccagctcccgtctctcccccagcgtcgtccgatgactcggacgactctcaggggattgccgcggaggtctggacttacatccgggccgtcgagtgctccgggctcgagggctcggatgagttggagtactcctcggatgaggaggacccgcccgaggaggacggcgaaggtgacgacgacgatgacaacgacgacggcgacgacgacggtgacggcggcggcaggggcggcaacggcggcagcaggggcggcgatggcggcagcagcaagggcagcaacaaggccagtggctag

SEQ ID NO: 21443 - DNA, 546 bp, Zea mays
  Peptide Sequence Number=SeqID_64818
atggtcggtttaaaagatagctctaaagtttccgccgtcaacatcatcaagccgacatgggaaaccttgccggctgaagaacagctcctgttcgaggagcgccaggagcagctgatcccggaagcaaaggcgaaattcctggctgacttcaaggtggacagaaacaacaaagtcgttcggcaacgggtggcagatttggcttcgctccgacctactatgaataccccaatggactgcattcgcatgagtatcgatctagtcaccacacaaaatctggagaaaattcgccccaaacaagctctgtcagaccaactgatgaagcctctgatggtacagtgcactaaaggagatcaggtgcagtgcacctcgcctccggttaaccgtgcgctcagattcgcgtcgatcaccgtgattcgtgccgtcgggtggtggattgcgttcgcccgtaaaaagatctcatcgcggatgtgttcgggacactgtggccgcgctgtccctccaccatttgcgtcggcgacatggcctaacggccatcaccggagttga

SEQ ID NO: 21444 - DNA, 321 bp, Zea mays
  Peptide Sequence Number=SeqID_64819
atggcgcccttcctcctcggctccaatgcccctgctcctcttcaccgagccgagctcgtcgtccctgccatggtggacgctcggcactcgagctccattccccctgcttgcgtgctgctgcgcagtgcgtcgttgacgcttgctatgtgctcgacgaaatgcgcaacaagccaggcgttgttgattcctcgcagcagcaccgttcttcaccttgcgtcgtcgtcgagcttcgctgctgttttcccccatgaccagcatcctcgcagcagccctcgcccgctcggccctccactccgcagcgccgtcgttgtccctgcttaa

SEQ ID NO: 21445 - DNA, 1305 bp, Zea mays
  Peptide Sequence Number=SeqID_64820
atggaaggctctttggtcattaggacatcctactgcttagaggtggaaggattcactcatctcttgcggagttgcgcgcttcgcatggggatccgcaagaagccggagtatgtatggaaagaataccacgagaatggaactgagaggtgctctaaggcagtctacctgggagaaagtcgaagctacccgaaccaccctcctttccaagtcaccttcaccggacaccgcttcctagacacttgccaaaatgttgcccgaaaagccctccgacagctatgccaaaactacagcagggaggtctttgaaaccccccttcgttactttccacctagcaacaaaaataccccttcctggaggaaaatacttcaggccctatcaggaagagatcctactgaggatgaccccaccatcgtctacatggccggctatctccacaccctcgataaccactatgacgaccttttctcccactgcacccacctaaactcctgggtggagagcttagagcaacaggtcaaggaacttaaaaaggagaaggcgtccctccaagaaagtctcaaaatagcagaaggtgaagaagccaacactcgtgaagcctaccgaaccctgaagatggattacgatgagaagctaaagaagctcacccccacgaagaaaatctggaagaggaccaagagccaaggatgccagactgaacggaagaaggaagcccctccagcactacctccgtccaggatagagaacttgtccgacgtcgatatgtccctagctagccttgacaaccttctcaaggaatttggggacactttagaaagggagttcgaaagcaccttagaaagcgctcgcgtgtacaatccgctcgacgctgatgactggctgcgcacgataaaaaggaacgctgccgtaagagatgctacctgggcagaatttgaaactgcttttcgagaacatcatgtgccccaagggatcgttcagctcaaggaagatgaatttcgagaactaactcaaggtggaagatctgtcagtgacagcaagacaggcaccagagaattcgaccctttgggtttccacccaagggaccaagcttcaataagccagtgggacccactccgtcgtgtttcagtcagcagggtcaaagctcctttcaggccccctcagttgcaagcaaccaaccaccagctaatgcctgttggcactgcagagaccccagtcacttcaagaataactgccccccagttgaaggcatcgggacctacttactccaactcggtgaatggtgaaagtcacctagaggggggtgaatag

SEQ ID NO: 21446 - DNA, 420 bp, Zea mays
  Peptide Sequence Number=SeqID_64821
atggccggggagagctgcgtccccaagcccctgttcggcggcgccatcttcaccaccttccccgaccgcttccaggacgtgagcaacatccgggaggtccccgaccatcaggaggttctcgttgatccatcccgcgacgagagcctcattttcgagctacttgacctcaagggcgaggtggacgacgccggcagcgcgctctggttcctgcaagacatcgccaacgagcaagacgccggggacaacttggttgagcattctgggacacttgaactggctgctttgcatctcggagaagctcctgcagtggctgcaactgcagttggccagctggccgtctcaaaagggaggcagggcagagaagcacaaaacattgttcgagtgagtatacccacccttgatgataacattacatggtaa

SEQ ID NO: 21447 - DNA, 762 bp, Zea mays
  Peptide Sequence Number=SeqID_64822
atggagcttttccaaggcgtctcgggcccgcatccgctcgcgggcccgggccttctccgcgtccttctttttcttcttctcctccgcggcaacccgccgcgctgctcggtccaccgcatcctccgggacccgtggccgagaagtcttgtgccaccctacctcctggagacggatggaaatcccggccgtaagaaccaggggcaacccgacgcaaggggaaggaaggagcggacactcaccagggtcacgcacccttggtcggggcgcatcaagggctgggagaaggcgctagcgtccggttttcccaacgcgacggccacccgcccgtggagaacgtcgatgggaagaggatccgaggacatccacgagccctccaagtcagcctccggcgtcatctcccaaagcggcaaccgccgctccgccaagggaagcaccctccggcggtggatggcggcaatcactcccgcggcgggaccgggaaagggggataccccgaaaaggatccttctccgtgaaggaaacaggctccgagcctccctattgatcagaggttcgaaggctggcccctcggaggggtttaacagccgcctcagagcgcgtgggctccacacccactactggtcagaggttcgaaggccagcccctcggaagggttcaacgaccgcctcaggccactcgggctccacgcccactactgatcaggggttcgaaggctggccctcgaagggttcacagccgcctcagacacagagcgagggatga

SEQ ID NO: 21448 - DNA, 453 bp, Zea mays
  Peptide Sequence Number=SeqID_64823
atgggcaagaacaacaagcgcaagcgtgagccaactcctccatcggaggattttggtgactcggagtactcagaggaggagttctcctctgagtctgaggggtctccggctcccatccccctgcgtgagtcatctgacgattcagacgactcccaggggctcgcggcggaggtctggacgaacattcgggccgtcgagcgctccgggctcgagggctcggatgagtcggagtactcctcggatgaggaggactcggacggcggcggcgaggacgaggacgacgacgacgaaggcggccgcggcggtgacgatgacgggagcggcaggggcggtagcagcggcagcagggacggtgacggtggcggcatcaggggcggcagcggcggtggcggcagcagcaggggcagcaacaggggcggcagcggcggcggcagcaacagggcccgtggctag

SEQ ID NO: 21449 - DNA, 1071 bp, Zea mays
  Peptide Sequence Number=SeqID_64824
atggggaagcctgtcccatcactcctcatgctcctcagccgaggcagggtcccactcaacagtccaacccggtggcaaggtggacgaccaagttatcccagcaaccatctcctccagagaacctgtaaaaattatgccgcaagcaaggctgagtatactaatactcagctagacttacccggggcactccatccccacacacatcaaccgtccccatcgattccccgtcagcagagaggggctcaccgccttggcgtacaatgcctcactgaccccgactggccgtcgtgcagtgaccgcacttgtacccaccataaccggaatgggagacctcgtctcaggtcgcgtgaggagggcaatctgctgccaggttcaatcaggttatgcataaaaccggggcttgccttccaaagcagtggcaggcaggtcctctggtgcaggctcgggtgctggatctggggctacctcctgagcagctccttgctccggcacgaggatgtactctccgtcagcaagattacagtctatcgaaatgcaatgaacattccttccccttatgcaaacagtaaccgcgggaaagaaaaggacggcgcggcttaccggcggcgagggaggtccggcgaagggtggggttggctcggggagactctggcggtcacgtcgaggtacggctcgacgtcggagatggccggaatcgcccggtccactcgtgcaggcgggtgtcctcgtcggcggcgagtataccggccaaaccacggcgaactggttcaatccgagggcacggtgagcttcacggggtcacgcagcgactgtgtgcacaaggaatcgaaggatggtggagtggtttacccggtccacgtactccggcgggggcgagagctccggcgagcgtggactggcttctccggcgaaatactctccgattccttgctcggggagcctcacggaggtgtgcacagtcttctccgagggctggacggggttgggaatggctctattggccggtctatggtggcagaggggttgggcggccgtggacttgctgcgcacgggcaaacggcgacgagctaa

SEQ ID NO: 21450 - DNA, 1113 bp, Zea mays
  Peptide Sequence Number=SeqID_64825
atggctagggttgagctcctcgcgctgctgtgcctcgcgggcaccctgggcgcgcaggccaccgccggcccccgccccgatgcgagggtcggcgtgtacgagctcaagctgggggatttctccgtcaaggtcaccaactggggcgcccgattaatgtccgtcgtccttcccgactgcaaagggaacttggctgatatcgtcctgggcagagataccgtcgctgaatactttcggcttaaagttgttcttcccacgcagaacgacacttcttactttggaccgataaccggccgcgtggctcagcggatatcgaggggccggttcgtcctcgacgggaaagtctaccacctgcaacgaaacgacggcaggaacacgattcacggtggtggcacagcgttcagcaaaagcgtctggacggtgaaggagtatgtcggcggcggcgactccccatacgtcaccctgtactaccacagcttcgacggagagcaaggtttccccgggaacctcgacgcgtacgtgacgtaccgggtgtcgggcccgtacacgctgggcgtgcacatgagcgcgacggcgctggacagggcgacgccggtgaacctgctgctgcacgcgtactggaacctgggcgggcagggcagcggggacgtcctgggccacgagctccggctgcacgcgtcgcggtacgccgtgctggacgaggagctcctgccttcgtcggggcgcgtcgcgcccgtcgccggcacgccgctggacttccggacgcccacgcccatcggcgcgcgcatccgccaggtcacgggcgggaaggtcgtcgggtacgacgccaactacgtcgtcgacggggaagggatgcggcccgtggcgcaggtccgggacggcgcgtccggcagggcggtggagctgtgggcgaaccaggccaccgtgcagctctacaccgggaactggctcaaccacacccaggggaagggcggcggggtgtacgaccagtacgccgggttcacgctggagaccatggggtacgtggacgcagtgaaccaccccgagttcccgtctcagaccctgttgcccggacaggagtacaagcacgacatggtcttcaagttctcgttctag

SEQ ID NO: 21451 - DNA, 1602 bp, Zea mays
  Peptide Sequence Number=SeqID_64826
atggccgccaccgccatggccgccgccgccgccgcctcgcgggccttcctgcgcccgcaccgttgcctcctcctcccacacacccatccgcttcgccgccgtctctccaccaacgctactgcttccgctcccgccgccaccgccgcgtcgcccggcgtcgtggacgtgctcatgaagcgaggactcgtcgaggccatcacctcggaggcgctcgccgcagcgcgtccaggggagctcaaggtttactgcggcttcgaccctaccgccgagagcctgcatctcggtaacctcctcggcctggtcgcgctctcctggttccgccgatgcggccacaccgccgtcgcgctcatcggtggcgccactggccgcgttggcgatccctcgggaaagagttccgagcgcccggagctcggcatagctgccgtcgagggcaactccgacgccattaagtccctcgtcgcccagattctcggccgcgtcccggagcctgcccaccgttcccactccggtcaaaaagagttgtctttggacaattcagcgaattcgtcacagacaatgggttcttttttgatcctcgacaactacgactggtggaaggacatcacgctgctggatttcctgagagaggtgggccgttttgcacgcgtgggtacaatgatcgccaaggagagcgtcaagaagcgtcttgcgtcggaagacgggatgagctacaccgagtttacctaccagctgctgcagggctacgacttcctttacatgttcaagaatatgggtgtcaatgtgcagatcgggggcagcgatcagtgggggaacatcacagcgggaactgagttgatcagaaaaatcttgcaggttgaaggggcgcatggactcacattcccacttctgctgaagagcgacggtaccaaatttggaaagacggaggatggggcaatctggctctcttcgaagatgctttctccttacaagttctatcagtacttctttgcggtgccagacatcgatgtcatcaggtttatgaagatcctgacgttcctgagcttggatgagattctggagctagaagactcgatgaagaagcctggctatgtgccaaacactgttcagaagaggcttgcagaagaggtgacgcgatttgttcatggcgaggagggattggaggaggcattgaaggcaaccgaggccttgagacctggtgctcagacacaattggatgcacaaacaattgaggggatagcagatgatgtgccttcatgctctttagcttatgatcaagtgttcaagtctccacttattgatttggctgtttccacaggtttgctcactagtaagtcagcagttaagcggcttattaagcaaggtggtctgtacttgaataacgtgaggattgatagtgaggataagctggttgaggaaggtgatatagttgatgggaagggatttctcaccctgggaaaagaggggggtcccaaagggatttgggtttcgaaactagcccttagaggatcttttaccgccatcaatatcatatcaggtgtggaggatgagcaagagtgcatgctccaagcacagatgttcaaacgagctttgggttcagcatag

SEQ ID NO: 21452 - DNA, 162 bp, Zea mays
  Peptide Sequence Number=SeqID_64827
atggcgcgaggcaagagcggcaagggcaagcgtgacaagaagaaccagggcggcaagaggaagcaccctccgaatcctccgtcggaggacttagatgacttggagtactcgaaggtgttggagcttagatatgtcaatctagatcaagtcaagttgacttga

SEQ ID NO: 21453 - DNA, 291 bp, Zea mays
  Peptide Sequence Number=SeqID_64828
atggggccctctacagcggagagggtatatatctgggacattgagcgagtagggctcgagggctttgataatgagcttgttagagacatgtattctcatttgaatctaatcatcaatgaactcaactctattagcattaataagctaggtgatgcggacattgtgaggaagattatctccctactaccacaacaaagatacgggagcatcatcactattcttcacaacatggaggacttgagtaccccgaccattgtgattgggaaaattgtggcatttgtgatgtcgtga

SEQ ID NO: 21454 - DNA, 417 bp, Zea mays
  Peptide Sequence Number=SeqID_64829
atggatgccctgaactttgagtatacggattatgagagacttgacgaaggggctgggggggcgaaaatgtcacacccgggctttaagggacaaagccggacgcagcggcgctgggcaaacctcacggcggcactcgtcgacgagcagcgcgcgaggcgcctagggggtctaaccctagcggtactagctctatgcatcccggagaaggagacgtgcaagatggccgaggtcttaccgaagccactgacgagtcgaggttggtccacggtacaacgcgagttcggcgaagggctccactccggcgaggaattccctaaccttcaatgcaccaccggccccaattcgccacagtcgcgctccacgcaaccaagcaagttgcctagaccccgtgattaccccgaatcgatggcggactag

SEQ ID NO: 21455 - DNA, 339 bp, Zea mays
  Peptide Sequence Number=SeqID_64830
atggagcttaccgaggcaacggacacggcgagggctcaacgacaaccgcagaacgggcgcgagaccacggcgagcggtggcgaaactccatggacgcgcgcgcggtgtgaggcgagtgctgagggctgcgagtgggcgagtgaggaaagaggagggcgagcgggtgctaggcagctagaaaaggcccgaggtggggacgggcgcggcctcggcgtgcgtcgtggccgcggagtccatggcgacgcatgggtcgtgcgcgggtggttcggaggggaaaggtccgacagacgggacccaccggtcagcgagagcgggcgagtaaacgggcagccgggctga

SEQ ID NO: 21456 - DNA, 1014 bp, Zea mays
  Peptide Sequence Number=SeqID_64831
atgggcaaacaacttgaatccttgagcagagggttaggcactaagatttcaatccaaatttatgatggaaagcgaaggccagaaccccctattcaggccgcaaagtttgcatcagagggtgggatcatactcaggcaacatattccaatatttccacactggaaggagtacaagaagcaagagaacgagggtaaaattacagactatattggcaagcttgctggtcaattcaccatggatgtggacagtaaggcagtcaaagatgcatgtgttgatatgataaaaggagggcagcgccagatgaggtataggctaaaaaggaagtacttcaccggggttcctgcaaatcaagtgaggactacatcgcctgttccatgtatgactgatgaccaatggaaagatttggtacaaatgtggtctaccccaaaccacaagaacaattgtgtcaagaacaaacttaatcgtgagaaggtgcaatttccacagtgcataggatctcaatcctacattgcaaaatcctatgtagtgaggcaagaaaaatataaagatatggaacctagtgcaattgatcttttcaaggagatgcattgcagcaagaagaaaggatttagtgaggccgttcagaaagctataggtgatatggaagcaatggtggcaacaccagttgaagatggacagcatgtgctgtcttcgacagaagttgtttccaatgtgctaccgggttcaagtaaatttcttcacaatgctggccttttacctgcctccaagagaagcaatacaaggactatctcgacaaggatgcaagagcttcagactcaattggacactgagaggcaagaaaaaaatggatttcgagaagaaatggaaaccttaaaggcccagtcacaagcatctgaggcaaccattgctaatcaatcgactgagattgcagatttgaagaagtccttatcagaaaataacagtctccttcgacaaatattaagcatcaatcgtggccagatgactcctccttaa

SEQ ID NO: 21457 - DNA, 171 bp, Zea mays
  Peptide Sequence Number=SeqID_64832
atggccatgatgggttcaacatcggaaaagatgtacctctgccaggtaccaaactttgggtttgaaataattaaggtgaagaagcgacaaacttttgttgcttctgttctaaggtggtaccaaaggaagagcaccaggaatgaagttgtgggaggaaaggatcctccataa

SEQ ID NO: 21458 - DNA, 441 bp, Zea mays
  Peptide Sequence Number=SeqID_64833
atggccttccttttctggtttcaggcttctcttagagggagaccttcttggttgatgtctagcggtgcaagggcagcccctagcgctattgccttcttcggtggcatgacgaagtttagagaaagttttagaagttctaattcaccccctcataggagtcacctatttccttcaggctcggatgacttcgatgaggagaaggaggacggcggtggagcgaatgagggcggctacgatggtggcaatgaggcaggcgaggatgacaaggtcgacagtggcggtggcagaaacaagagaagtgtcggcagcggtggacgcaatagcagcggcaagggcagcaacagcggcaaaggcagtggcgacgacgacgacatggatagtggcggcggcaacgactacagcaagggcgacaacaccggtggcaaggcgccactggcttaa

SEQ ID NO: 21459 - DNA, 297 bp, Zea mays
  Peptide Sequence Number=SeqID_64834
atgcaggcggcatgcaaccgcgccaagtgggcgcacctctccgacttccagcgcgcccagcatggaagcccaggcccacgcgtcatgcaaccggtgcgccggatgctacgtgtgagcaactgcaccgccactcgcgccactgccacgcctcctcgactgcggaaccagtaccgtgactcgaggcaaccctacgcacgacccagcagcgccagcctagcgcgatgggaccgggaaagggggataccccgaaaaggacccttctccgtgaaggaaccaggctccgagcctccctactga

SEQ ID NO: 21460 - DNA, 948 bp, Zea mays
  Peptide Sequence Number=SeqID_64835
atgtcttcgtgctcccttatgcatcgtgtctttccaccttccgagccccggatgggggatgcccgcagtccttccgccttgtcgttgggggaacgcaactccgtgggagttggtacctttcagccatcgttcggcttcaaggattttcatcacgcagcccagttgcacccctccgccggcgggatggggaggggagtgtgccgagttggggtcggcccctgcgtgggcggtggcccgctccttcccttagtgatcggggggaagggcgttcgccgtccgtggcgctggcagctgccgcgtgcctggctctcggacacgagtggcttcgaagccgctcccgacaccgtcttccgccacggcagctggaagaggttcctctgccgacgagcatccgccctgaggtcatcgctgctgctgttcggccccccggagcagaagtcgtcgtcgtcgccgctgctggagcaggtgacggagtccctcggctcggtcggccttgctgtccgaggcttctcttgcttagttaaaggaacccctcggccgctcttcgatgagccgaagccaggggtagcggtgtcagcacgaacaaaggcagagttggctcgaaaagaagacctggtcggccggagcctggccgggtcgtccgttagcgggaccgacgccggagttgatctgccgaggcctcgggccgggctgatgtctttgggggacagctggccgaggcctcggggtgatcagccgagccacctgctcgagccggattcttggaggagacccgggcggcgatggcccgggcgtgatgatgaagtcatccttcagagtggagaccctcggaccgtgtcaccgtcggaggctaggtcggacctcgccgaaggtgtagttgacgtcgagggtgctgctgctcccttcaaccgtcaagatccgagcctgcaggatcggattatcttgtag

SEQ ID NO: 21461 - DNA, 162 bp, Zea mays
  Peptide Sequence Number=SeqID_64836
atggctcgtaaaagatcccaaaagaacaagaagacacctccgaaggaaaacaatgagggcacgctccgctataattcaccggactgtccggtgcaccggcggagcaatgactccttcgcgcaatggtcgactgcaaaagctgaagattcggaggaacagtga

SEQ ID NO: 21462 - DNA, 450 bp, Zea mays
  Peptide Sequence Number=SeqID_64837
atggcgctccctgttgacgtggcgggcccacgtccgaggtcgggcgacgtgggggctcctccgaagctgaggtcgaaggccagggcggagtccgagccctggggtcgggcgaagcggagttcgtcgtcttctggggctgagcccgagtccgagccctggggtcgggcggagcggacccgagtccgagccctggggtcgggcggagcggagttcgccgtcttccgggtcttagcccgagtccgagccctagggtcgggcggagcggagttcgccgtcttccggctcttagcccgagtccgagccctggggtcgggcggagcggagtttcctatggcgcctttggcaagacctgactgcctgtcagactcactttgtcgtgtggcactgcagtcggagtggcgcaggcggcgctgtccttctgtcagaccggtcagtggagcggcggagtga

SEQ ID NO: 21463 - DNA, 171 bp, Zea mays
  Peptide Sequence Number=SeqID_64838
atggtctcccattccggttatggtgggtacaagtgcggttactgcacgacgatagtcggggtcagttctttggaggacatggttgctggagtgacttggccatccatcttgccactgggttggactgtcgagtgggaccccgcctcgactgaagaggagcatgaggagtga

SEQ ID NO: 21464 - DNA, 387 bp, Zea mays
  Peptide Sequence Number=SeqID_64839
atggcccgcgcccgcgcctataaagcccccagggaccttgactgtacccctccgcacgcgctcgacctcaccggagcccaaccccaccggcgtttgcccgtgcagagcgtgtccacggccgcccgatccccctgccaccgtagaccggccaataggacccttcccaaccccgtccagccctcagagaagactgagcacacctcggtgaagctccccgagagaggaatcggagtttgcttcgccggagaggccagtccacggtcgccggactccatccgaccgccggcgagtgtagaccgggtaatcctctactccattcttcgattccttgtgcacacagcctctacgtcaccccgtgaagctcactgtgcctttggattgaactag

SEQ ID NO: 21465 - DNA, 144 bp, Zea mays
  Peptide Sequence Number=SeqID_64840
atgaagccctttcactgttcgacgtccttggtgagggctcgctcctgtagactcgggcccaacggaccgagagatgatgatcgtgcactgatgtggtgccaaccacaagatgcagttggtggacgacttgaagaatggacttaa

SEQ ID NO: 21466 - DNA, 117 bp, Zea mays
  Peptide Sequence Number=SeqID_64841
atggctgccaccggtgtgggtctgcgtagtggccctgcgctgccgtggggcatggatgattgcctgggtcgctcgattcgaaagcaagggccaagattagatcctccgcgttattaa

SEQ ID NO: 21467 - DNA, 383 bp, Zea mays
  Peptide Sequence Number=SeqID_64842
atggccataatctcaaagatttggggccaatccgcgcttgaactcgacctctctctgtgctgcctcgtgctcgacatcacccccaagtcgagccagtgcttcggctggctccgccagtggcccgtgaagctttccaagccctcggacccggcaggacttcaccggaagcccgagatcaacttcaccggacttcggtcgcccgccagcgcgcgtggaccaagctctccggtcggactcctcgccgccgacgatcatccccgcctgcgcacagagtacgtgctcatccccgagcaaggatctgtccaagaggaggaccatgagcaagcttctgaggctgctattgaggatctccccgcagccccagcaattgaaggcaagccccg

SEQ ID NO: 21468 - DNA, 513 bp, Zea mays
  Peptide Sequence Number=SeqID_64843
atggggaagcctgtcccatcactcctcatgctcctcctcagccgaggcaggtacaatggatcaagcagtctcattagctgcgagaagcagatgattcgaatcgagtttttatccttgcaagggctcaccgccttggcgtacaatgccccattgaccccaactggccgtcgtgcagttaccgcacttgtacccaccataaccggaatgggagacctcgtctcaggtcgcgtgaggggatatgtctgcgggcaggttcactcaggtactaggcttaccgatttaccatatttctcggttatgcataaaaccggggcttgccttccaaagcagtggcaggcaggtcctctggtgcagactcgggtgctggatctggggctacctcctgagcagctccttgctccagcacgaggatgtactctccgtcagcaagattacagtctatcgaaatgcaatgaacatgtatgtcatgattatgcaagatttaagaacattaagctaaagaaactaagttaa

SEQ ID NO: 21469 - DNA, 456 bp, Zea mays
  Peptide Sequence Number=SeqID_64844
atggtgaaagaagatgagaagaacttaaagaagagaaaatccagtcccgagccgaaggtggcagctttaaagaaaagaaaagctaaatccccaagcccgaaggtaactgaagaggaagaagtgactccctcaacaccttcagctgtcgaagtggcagaaattttaaagaacaggtcatggccccagtgcctgacaaagggaaaggaattgctgaagctgcttcagaagaaaaaggtttcgttcttcggaacctggtcggacaagaactatctgaggccgagaaggagctacatgaatatggcatttcctgtggctaacagccaggagccatactctttggtggaatcgatgaagaggccttgggatgtgttcgtgaccgtaccagggcgaaggatgatgatgccgaagattagtaatccgaagcagattccgaaggccactgaagctgatctttag

SEQ ID NO: 21470 - DNA, 297 bp, Zea mays
  Peptide Sequence Number=SeqID_64845
atggcatctgccttgtcttcggcgacttcgtcgccgcagagagaacaacgccgatcaccgagctgtaaaaccccgtgcaccccatcgcaaccgtccatcccaaatcaaacggttcggatctacggatatcggttgcgtctgcacgctctaaccctgggccctgcctatcagtgcctgcgccccctagcactgggcctgactggtctcattaagacaaatgaagttaagttatgtaatctattgagatatgcagttcttaaagaaccacaaatctttaggtgtaattgcctaccctag

SEQ ID NO: 21471 - DNA, 918 bp, Zea mays
  Peptide Sequence Number=SeqID_64846
atggataatgtcggcgcaaatcctttcgctgagcgccggcgcattccatccaagcaagtggtataccattccgagcactcactcagtttggatgtgctcggggtgaagtcacaaggccatggcaaactacggcaacacaaagcagaaaccttgaaggcaaaggggaacatagagctcgaagatgaaagggcaccgcgagtgggagagaagcaagacttggctgctacccgaggggtgaacccctttttaaaggcagatttccctgctcgcgccccgaagcgtcacgggcaagctggcctgaagcgcgaagaaggcgaatcatcgcacaaggagcgtgcaaccgccctgcggttatacgcccttccatcttcgccacaaccagcggtcaaggaggcgaacagccgcacaaggagcgtgcaaccgccccgcggttgtgcgccccctcgatttctctgcaaccggtggtccaacctctggcatgggggcctaggcccacatgtcatgcacccggcgcaccagtttctgggtgcagaaaagtcacgccgccactcgcgccaataccacacctcctcgaggccgtcgcagaagactgagaagataaattttcaaacccaatgcagcgactcgaggcaccccgcatatggcccaacaaagacattaagtgtggaggtcacgggccagtcaggcgtagagacatgcgtggcagtcggtgtggccttgggcgggccagtagtaattgcatcaatgggcgcgcaggagcagcgagccaatcgccagtcaaactttggccccacctacaggcttgcatcctcccctgaggtaggcccgggggccactgtcgatactctgaatcaggggtaccccttactacgctatgaagacgcggtgcccatacggtgttccctagccatgcggtga

SEQ ID NO: 21472 - DNA, 390 bp, Zea mays
  Peptide Sequence Number=SeqID_64847
atggcgtgcatgctgaggtggtcgccaccgctggggaggctacctggcgtagaggtggttgcctttgctggcgagccgctcggagccgaggtagtcatcgccgctggcgagccttcgatgcaaaggtggccgctgccgtcggtgctgaggtggtcgcctccgctggcgagccactcggagctagctgccaacgtgatcctgctggtgtggagtagtccattcctacagagtagagatggagctaggactccgcttgaaagcgggtgtaatacttttgctttttgtaagattcttccttggtacctggcccccctaggatgtaggctcgatttgtctaggctgcagaccagcatacctaagaaagagttggcgatggcctccaggaggtaa

SEQ ID NO: 21473 - DNA, 243 bp, Zea mays
  Peptide Sequence Number=SeqID_64848
atggggaagcctgtcccatcactcctcatgctcctgttcagccgaggcgaggtcccactcgacagtccaacccagtggcaagatggacgaccaagtcactccagcaaccatgtcctccaaagaaccttgcagtacaatggatcaagaagtctcattagctgcgagaagcagacgattcgaatcgagtttttatccttgcaaggatttaataacattatgctaaaggaagaaaaactaagttag

SEQ ID NO: 21474 - DNA, 414 bp, Zea mays
  Peptide Sequence Number=SeqID_64849
atgacttcccacgtacccactgacggaggggacgcactttcccacacggacggtctcgcacgtgagggttttcccctcatcttgtgggcggtactgcagggagcgtgttacactacacgtcccttgtacgcggtgcagttgttcgaggaacaccgggtaccacgttgtagggtgaggatgactctggagcctcatcccctgctgccaggatggcgttccctagactcggaatccttcggtttctgtgccgatgacactatagaggccacgaccatgcacgtgctgacaaccttctgtggatttcaccccttggagatgttgacccaccccatcggcttgttccccgctgagaaggaggatgacccaatgtggaaggatcgggttgatcacgccaaggacgtgtgggctctctaa

SEQ ID NO: 21475 - DNA, 288 bp, Zea mays
  Peptide Sequence Number=SeqID_64850
atgggtggcggacagatgaatgcgttcccgatgactggtggtctcttagttcgaattggtgacacgaaggagcgagcggtggtgatcaatttggccgagccgtgctggcggcctgaggtgaagaagaacctgggcgcggtgaattcgtgtccaccgtcgtggcaagctccccggcgacgatgggatagctatagggagttacggcgatgtggtggaaagactcggacacgcggcacaaggacgtgcgacggtgatcaccggcgttcttatccgattccgccgcggtaa

SEQ ID NO: 21476 - DNA, 132 bp, Zea mays
  Peptide Sequence Number=SeqID_64851
atgggctccgcgtatgcgctcgctccaccaaatgatgatgaggatggttatgatcatgcttatggtaatggtaaagaaggcgtcgaggtggatctccaggagttccaggacgtcgacgagttcgaggattag

SEQ ID NO: 21477 - DNA, 312 bp, Zea mays
  Peptide Sequence Number=SeqID_64852
atggggaagaaggcaccgaagctggacacagacttaacctgccccttctgcaaccacccgggcatcgtccagtgcaacatcttcttcaaggaacgtcgtattttcgtcgtggcgtcatgcagcgtcgacaaggagacatacgccactaagcaggggccgatctacacccgggccacccgtacgttctacaggagcccggattgcattgcacggggcagcaggaaggattcggacataatagagatgaagaagatgatatctaatagacagtgctctgggaagattattaagaatgaactgaagaatctgtaa

SEQ ID NO: 21478 - DNA, 543 bp, Zea mays
  Peptide Sequence Number=SeqID_64853
atggacgagctagggctaggcgacctcagtagggaattggacactgaccaaggagatgagggtgagcttgctaggaaccgagcagggaaggcgcgagtgcaggggctatgctcggctaccagagaggtagaaatgctgagcaccacagggatgggcgccgagcgccataggaagggaggcgaggtcgtcggcgtattgcaggaagggatccagggggagccgccatgggagggagcaagggccggaacagagaagactcggcatggggataaggccaatggccacataaggagacttccaacactgaggacgcaggaaaagcaacaggtgaagggcagctggatactctgggagacaaataacaatgataggataaaggagaactcaaatttctctacgccaaacattgaacaaaagacactgcaaaatatcctatatattaggcagtggagaaataaaaatgagatttttctcatttcatttttaacgaagatagacagagacagatatgatatgaaaatcgtgataaacaaagatgattag

SEQ ID NO: 21479 - DNA, 150 bp, Zea mays
  Peptide Sequence Number=SeqID_64854
atggcgatggagccaaagttcctcatccccttcacaccggtcgtccttgttcagccatggtcgcacggtggtgggcacaagaacaccaagaaaggccagtctgcaatgggaatggagagatggcgagagtatcgtgtatccacctggtaa

SEQ ID NO: 21480 - DNA, 267 bp, Zea mays
  Peptide Sequence Number=SeqID_64855
atggacaacgacaagagcgaggtctcgccggcggcgcgcgtccagtgcgagggcgtcgtgttcacggtgacgaagggcaacgaggtggccagggtgaccaagggcggcgaagcgcgcgtggtgctgagcagcgagagctacttcgacgcggacacgtgcacgaggcaccacttcgtggacgtgcaggggaaggccgaggcgatgctgttcttcgtgtctgtgcgcgaggatttgaaccgtatcgtctctgtccggaggttttcttag

SEQ ID NO: 21481 - DNA, 375 bp, Zea mays
  Peptide Sequence Number=SeqID_64856
atgaccggcacagctcaattgtggtattatcgcctcaagatgatagcaggagaactgcgtctcattatattaaggagaaaagggtctaagaaggagctgctgcaccgtactggaagcatggatgaataccaggtggtgcctgatcaagatatccctccagtgggtgaagtgttggccttgacagtggatgacatgccagcaatatcattgcatgctcttatagggcatagctgtgcatggcattcaaacaatgaaggtgcatgttcacattatgggttgccgcctcacagcattgctggactcaggatcaacccacagtttcatcaatcacaaagtgggccaggagttgcaactgccattgcagcaatgctctag

SEQ ID NO: 21482 - DNA, 813 bp, Zea mays
  Peptide Sequence Number=SeqID_64857
atgggctggcgcagaggagtttgggccgagagattgtatattaagagcctgagacttccaatactagaggaagctcaggtcagacgatgcaatccggtcgagccggaccaggttttagcggcggcggcggttccctcgggcgtgcgagtggcagcgatcctgggggccagcagcggtaccgccctgaggcgggtgaccgacgatggcgttccactaggaacgagcgacgacgacgctctcgaggtgggcgggcaagcggtgacggcgctcccgaagcgggcgggcggcggcggcggttccctcgggcgtgcaagtggcagcgttcctgggggccagcggcggtaccgccctgaggcgggtgaccgacgacggcgctccactaggaacgagcgacgacgacgctctcgaggtgggcgggcaagcggtgacggcgctcccgaagcgggcgggcggcggcggcgcaccctaggcccggtggcaacgccggttgcgcgaggcgcggtaggcgtcggcagtggcgacggtggccacaagggacgtgggtcgctcccgcggtcgcacgaggcgcgatcgtctctggcgatggcgaccacgcaaggcgtgggtggctctggcgtccttcgacgaccaactcttccaatccggtggctttggcgacgacctttgatctatcggcctcaggatcgtcctccggcgacgaactatccgatccatgtttatgccatcgatgattatgttttatgcctgctgcttacactatttatgcattccagtgttttttacgacgatgaatacgattttatgttgccataa

SEQ ID NO: 21483 - DNA, 210 bp, Zea mays
  Peptide Sequence Number=SeqID_64858
atgcacttgattcaattaagattcttagaggagttcatcatatatcttggtcaagattttgaatccatcttgaaagctcttggaaaggacctcgttgtaacacttagaaaagagagcattaaaaacacaagagagggtttcacaaatgatgatccttatatgtggatggcaaatgaatcatcattattgaaacccaaaaggatagactaa

SEQ ID NO: 21484 - DNA, 336 bp, Zea mays
  Peptide Sequence Number=SeqID_64859
atgaacaaaaacactggcattgaaagtgccattacaaacggaactccggttccccctccgcagggaccgggaaagggggataccccgaaaaggatccttccctgtgaaggaaccgggctccgagccccccttactgatcagaggttcgaaggctggccctccgaggggttcaacagccgcctcagatcgcgtgggccctacacccactactggtcagaggttcgaaggccggcccccgcctcagggtactcgggctccgtgcccattactgatcaggggttcgaaggctggcccccgaagggttcacagtcgcctcagacaccgagcgagggatga

SEQ ID NO: 21485 - DNA, 378 bp, Zea mays
  Peptide Sequence Number=SeqID_64860
atgtggctaaaattcactggaatgtccagtggtgcaccggactatccggtgagccaacagcgcccgcgccaacggtcggcagcgcgatcagcgggcgacgcgtggccaaagccaacggtcaccaggtcgcaccggactgtccggtgtgcaccggacaatgtacggtgtgccaacgagaccaagggctcaacagttggcttcgctatagaaggaaagaaatcgggcactgttcatgtccgatggtgcacaggactgtccaatcaatattgtaagggtgagagactccaacttgtgaagattcctcgcaaagggaaacatcagctaaggaagaaagccgtggtattcaagtggatcattgtatcgcttgaaaggggttga

SEQ ID NO: 21486 - DNA, 399 bp, Zea mays
  Peptide Sequence Number=SeqID_64861
atgtccggtgcaccagaggactccaactcaaactcgtcaccttcgggaaaatccagaggcaactccactataatttaccggactgtccggtgtacaccggacagtgtccggtgctccaaggaaaagcagcctcaggaactcgccggcttcgggaaactgcaacagttgctccgctataattcaccggacatgtccggtgtacaccggactgtccggtgtaactgcggggcaacaactacttcgcgccaacggtcacctgcaacagcaattaatgcgcgccagagcgcgcagaagtcaggcacgcgcgtagtggcgcaccggacacgctacggtacaccggacatccaggcgggcctagaagtcagagctacaacggtcagaacccaacggctttggtga

SEQ ID NO: 21487 - DNA, 297 bp, Zea mays
  Peptide Sequence Number=SeqID_64862
atgtccggtgcaccagaggacttcaactcaaactcgtcaccttcgggaaaatccagaggcaactccactataattcaccggactgtccggtgtacaccggacagtgtccggtgctccaaggaaaagcggcctcaggaactcgccggcttcgggaaactgcaacagttgctccgctataattcaccgtacaccggactgtccggtgtaactgcggggcaacggctacttcgcgccaacggtcacctgcaacagcaattaatgcacgccagagcgcgcagaagtcaggcacgcgcgtag

SEQ ID NO: 21488 - DNA, 510 bp, Zea mays
  Peptide Sequence Number=SeqID_64863
atggagggtaggggcatgagcataataaaggatggagctaaagcaatgattgtaaccgacaagggagagaatgcagccaaggtcaggataggtaaaacaccattctcaaatcgagatggaaaagatgatatttcaaaagaggcgctccactataattcaccggactgtccggtgtacaccggacagtgtccggtgacccaaggaagagcggctctggaactcgccagtctcgggaattcgctctgctataattcaccggactgtccggtgtacaccggactgtccggtgaatcagcagagcaacggctacttcgcgccaacggtcacctgcaggcgcattcaatgcgcgccagaagcgcgcagaagtcaggcacgcgcgagacggtgcaccggacaatctacagtacttgtccggtgtacaccggacagccaggcgggcccagaagtcagaagctccaacggtcgaatcccaacggcctggtgatgtggctggcgcaccggacatgtccg

SEQ ID NO: 21489 - DNA, 531 bp, Zea mays
  Peptide Sequence Number=SeqID_64864
atggtcgttgcgctaagcgagctcgcatgcagagggacaggacgcggggcaggccccgggcgctatgccaggatcatgccgacgtcggaccggggtggtcgcgggcaagccgcacgggctgccgtgccgggggcacgccgcgcaaggtcacgatcggacgcgctggtgcgcagggctgcaccgggggcacgctgcgcagggcgcgagcggccacgccgggagcacgaggctacaccacgggcggccgtgctgcagcgggagggagtacagggagcgcagcaggccggccatggccgtcgagaacgaaggggagggagggaaaaagaggagggagttagacggcaaggaggtctcacctccatggactcgagcgcgggtgcctgggatgggctccggcgaggtggacggcgaagacgggcggagcgacgcctgcagactgtgatggcggttccggcttgcctcctgctgcgcgcgacgggcgaggtggggaaggggcgattgggagtaggaaccggcgtcacgggcatgtga

SEQ ID NO: 21490 - DNA, 216 bp, Zea mays
  Peptide Sequence Number=SeqID_64865
atgtcatgggcgttcgacgtctactatatcatggactgtggcgtcatctcggcgccggaggtgacgcagaggaggaccgacagcaatgatcagttcgtcatccttcccaccgtcggggtagcttttgtgctggcatggggcgtgctctccaatgacgagaccatggaaatcgtgacatatatcgaagtctgtatgataccgatggttgcaatgtag

SEQ ID NO: 21491 - DNA, 309 bp, Zea mays
  Peptide Sequence Number=SeqID_64866
atgaggaccccctgcttgacgatggacaacgtggtgcaaccgcgctggaccgcgtccaaacggcggctgtgtcggagcttgtcatacacagcggctcatgcagccatgtggtcggccgtcggggctcggggcgtcgggcactcgggctcgggtggtcgcctggtcggccgtcggcacgaggagtcgaggaaggcctatgtaggactgcttccagaggtcgaactagcagtcgtcaagcttcttctcgtcgtcgatgagcgacgccaaagtgagcgcctcctgctagtggtgtttgttcggggtttctaa

SEQ ID NO: 21492 - DNA, 1182 bp, Zea mays
  Peptide Sequence Number=SeqID_64867
atgacagttaacaaagcacagggtcagactattcccaatgttggcgtgtacttgcccgaaccagtgttctctcatggccaactatatgttgctctatctagagcgacagcccgctcgaacataaagatccttgccatcccagccgtcgatgggaagaagaggccgaggaagggtgtaagaaagaatcccacactagattgtgggacatataccaagaacatcgtctataaggagtttttatattcttctacaaatctttgcatcctcctctactgcctgcagcacgagcttcatatgggagcatttaaagttggtaacataaccaatgagaatttctttgaaatcatcaatggtctacggccagcaaacactgcaggttgcagttcatcaaccgatgcacctaacatcccacatggagtgatggtcggttcctgttggcggctatcagatattcagatagtgtatgtgacacctgttttgcttccggtagaagctacggcagacccacttgataaacttgagaggaaaagggtcatagtttattcaacaaagttacctggtccgatttctctattccatagatgcagaatgatgggtgcatacgagactgatgatcctaaaaaaggggacagcctgtgtatgtattctgaaggcagggacgaaccacatggtgaggagatgttagagcagatcactgatagtagcctttaccaacacatgggatccacatgtcagaatggaggatgtgtgagagagaaaaaagatgacagttgctgtggtcccctttatttgaggggagatgggaggttttttggtgacaaaaaagaaaaaaagagcaatctgggaactgctggagcgtctccaccaatatataacagttttatgagcatgaaggatgatattgccgaggtgctcttggaattcaaggaatatgccacagaggttaatgttgattctgtgcggaaagctgttcgtgcggtttggagatgtgcaattaaattggagagagctgctaaaaggtgcatcagcgttttgctcgagctgattaagataaaagttaattatgttgttcaggaagctataattgttatcaaagacatcttcagacgctaccctaacacgtatgagtctatcattgctacgctttgtgaaagtcgctttgtgaaagtctggacactttag

SEQ ID NO: 21493 - DNA, 1437 bp, Zea mays
  Peptide Sequence Number=SeqID_64868
atgccctcgaggagccagtacgaccgccgcggcagcgatggcgacgaggacgagatcatttcagtcccatccgacctggaggaatcagagtcggaggcgaaccgcggggccgaggcggacgacgacgaatacgtgggggaaagcagtgacgcgagcggcggggacgaagcggaggaaggaggcagcagcgattgcggcgagggctgggacggggacgaccacggtggcaacgtcaggcggccacttcggggcctgcaacgcggcgtggcggctcccgataaggagatgaaatcgcagaacgtcgatgctcttgtcaggggcaacctggttgtaaggaggcaaccactcattccacgtattctttcagtttctgatgcagcagcaatagttcgtaagccattcaaacctccatgccaaaatggatatagtgacagtaatgagcagcttgctcgacgcctttcagctcgtaagagatttgtcccgtggggttcaacacagacatttgcaattaatattatacaccatcttccacagtcaccagttgttgcttctgatagttcatcagaaaaggaggaacctcttccacctggtattgagccattgattttgtggcaacgcgatgagtgtgagaaggaaaattgcaattctgcttctatcgaagttgaccacttgctcgtgcgttacctccgaccccatcaaagggaaggagttcagtttatgtttgattgtgtctctgggtcactgagtgctgatggtatttctggttgcattttagctgatgatatgggattggggaagactttacagtcgataacattactatatacccttctttgtcaaggctttgatgataagccaatggttaaaagggctgtcattgtaacccccacaagcttagttagcaactgggaatctgagataattaagtggttgaaaggcagagtgcaggtgctggccctctgtgaaagcacacgtgctgatgttctttctggaattgaaagtttcttaaaacccttgagccgtctccaggtacttatcatatcttatgagactttccgcatgcattcttcaaaatttgaaagacctggcagctgtgaccttctcatatgtgatgaggcccacaggctgaaaaatgatcagacactgacaaataaggctttggctgcccttccatgtacacggcgtattctcttgtccggtaccccaatgcagaatgatttggaagaattcttttcaatggtgaatttcacaaatccaggggttttgggggacgcttcatattttcgtcgttattatgaatttatcttgagacgaacaaatgctctgttatccaatcacttgcctccaaagattaaacgcttgatatctgaagaaacaaagcaatccaaaattctagcatatattaccgctcttaagaaattatgcaatcatccaaag

SEQ ID NO: 21494 - DNA, 474 bp, Zea mays
  Peptide Sequence Number=SeqID_64869
atggcggacgcgcccccaccaaccccgaccccgagatccattgccgaagaaacattctcgtcttccccgccccgctcacgtgaaactgccactgatttggcctcccccaacgccgtcgagacaaccaccgccttccccatcgttttcccacgcgatttgaactgccacgcaattgcttcctccctcctcactcctcctcatgcaaaccctactctcctctccctcgcacctacgtctgacatgacggtggagcccgacgaccttgtgcggccttctctgctccatgtcatttcagctaagagtgataaagagatggttctgatgatcatggttggaggttacacaaacttgttttgttctatgcaccatacaagtaatcagccaaatatagtatgtggtctggagttcatatttttgctacttttctggcgcgacgatgtggcggaggcgatggcaaggcctagaacagattag

SEQ ID NO: 21495 - DNA, 183 bp, Zea mays
  Peptide Sequence Number=SeqID_64870
atgaaggcaagaagatcttcgaggtaccgaatgaacgggagaaggtcatggaggccgaggaacccaaagccaaagtcacaaggctcaagatcaagctcatggcatagagcaaggtcactagaaggaggaggagtgtcaaagccagaacctggaaggaacccaaaagagctaagtttactttga

SEQ ID NO: 21496 - DNA, 201 bp, Zea mays
  Peptide Sequence Number=SeqID_64871
atggggccgagcggcgaggggaaggggagggaggagagggggagggaggagagggacgagggggggctcaccggtgacggtgacgcggcggccgagcggggcggccgatcggcgacggcgacggtcgccagacgaaggggcccgctatggcccggggaaactcggggcatttgcggctcgcggagggacaccccgggtagg

SEQ ID NO: 21497 - DNA, 1086 bp, Zea mays
  Peptide Sequence Number=SeqID_64872
atggagagtcatgatctccgggcagaatgggaatcacggcttgtgggtaaagtggttatgagattgatggttctggttatgattatggtgctgatggctcgacttagacacactgcacgaaagtcagtcatccccttcttaccttcccgccttgctgagcgtccgcttcgccgtcctgtggccggacagtccagccacttggagagactacaccaccgcctgcgtgaggagcagcggagctcttccctctcgctccaccaggagatagagtctgtgaggagctgctcccctgtgctttctctggagccgccccctgcaccaccactgggcgccccagcttctggagtagctgctggaggagacccagacgacggaggaggcgacgacagctcgagccacgacaccgacttctccgctaatcctgagccggaaggatgggttgctcgacccatcactcgcgacgctgctcgcgggtgtcacttccatgatgcgctcgacaccctgctacgtcgggcatttgaccggcatacttggtccgtcgagtatcgctgtgtggtctaccagcatagtcgcggggtctacccggaccgctgggaggcgacttgcttggtgcgctgcccggaggacagtctccagggtgcagaggcctgttcagagcactattctatctctgagcgggactcagctgaggcagccatgcaagatgctgcacggcgtgcgctttcgcactactgctcggttttcggtggggcagctgacggtcttgacctgaagtattacccccgccgttcatctggcagcacaggaggcgtgattgtctcacctgtcggtgagggcaatcctaggttgagcagcacagtcaacctagccgccgtgctaaacacggagctggaccatgcattagacgagctgagtagggctcgtgctgagatcgccctgctgcgggctgagcgcgcggaacgtcgttttctggatggtggttcccccgctcccgttgggactcagcacccgtaccgctcacctcagcgtggacaccagtcttatggcaatcccgcctgcaagaccaagataaacctagaaccatag

SEQ ID NO: 21498 - DNA, 1146 bp, Zea mays
  Peptide Sequence Number=SeqID_64873
atggcctccacagcgtccctgcagcgcttcctgcccgcctccccgcacgcgtcgtcccggcgccgcgccggccgcgcccgagcggccgtctccatcccgtcgtcgtccccgccggcgacacgggataatgaggtccccgcggagcggctggagccgagggtcgaggcgcgggagggagggtactggtccctcaaggagaggtaccggaccgggctgaacccgcacgagaaggtgaagctggagaaggagcccatggcgctgttcatggacggcggcgtcagggacctcgccaagatccccatggaggtgatcgacgccgccaagctcaccaaggacgacgtcgacgtccgcctcaagtggctcggcctcttccaccgccgcaagcaccagtacgggcgcttcatgatgcggctgaagctgcccaacggcgtgacgacgagcgagcagacgcggtacctggcgagcgtgatcgaggcgtacggcgccgacgggtgcgcggacgtgacgacccggcagaactggcagatccgcggggtgacgctcccggacgtcccggccatcctggacggcctccgcgccgtcggcctcaccagcctgcagagcggcatggacaacgtgcgcaaccccgtcggcaacccgctcgccggcgtcgacccccacgagatcgtcgacacgcgcccctacaccaacctgctctcctcctacatcacaagcaactcccaggggaaccccgccatcaccaaccttgtcagaaatctgacagtgacacgccctggtgctaacaggccgaggaaatggaacgtgtgcgtgatcggctcgcacgacctgtacgagcacccgcacatcaacgacctcgcctacatgccggccgtcaaggacggcaagttcggcttcaaccttctggtgggcgggttcatcagccccaagcggtgggccgaggccctgccgctcgacgcctgggtcgccggagacgacgtcgtccccgcgtgcaaggccatcctcgaggcgtacagggacctcgggttcaggggcaaccggcagaagacgcgcatgatgtggctcatcgacgaactcgtgggtctcctctcgtctcattcgttcaattcaaccaacgcttgccgccgcctgcccgtgccccaggcgtag

SEQ ID NO: 21499 - DNA, 2076 bp, Zea mays
  Peptide Sequence Number=SeqID_64874
atggggaggccaagcaacagccacgggggcgggggcgacgaggagcggctgcccctccgcggcgtgctggagacgtccccgtcccatcacgccgcggtgcaggccaaggacaaggaggcgaggcgcgggggcagcaggctctggcgcgcgtccgtgcgcgcggggctgctgctctgcctgctgaccgtcccggccgtcctgctgctgctgtggtggcaggccgactcctcgccgcagtgggtcttcgacttcgagccacccgaggaagacgacgaccaagcaacttattggctgaggccacccgtcaagtctccttcattatggggcgtgttcggctggctacaagccgacactgttgcagctgtttggactgctgcagctgcaatccatagagagaaaaatactgtagaagccgcagccgcagccggattgcagccgcagcaagccgcagcgaacaagctgatggaggtccacccatcgaaagggttttggtttcaaaaccgtagtgctccacttcgcctctggcattggcagcacccatatatacaagacgacatgtcagacgatctatctccgtcgccgcaaatagagtacgatcgtcttctgggcggccttctcgtcgagggttttgacgacaaatcatgcagaagcaggtaccgtttcgcacgctaccacagttcaccgagcataccttctccgtacctcatagagaggctaaggaaacaagaagctctgcagaagaagtgcggcccaggcaccagagcatacagggaagcttcgaagcagctgaaatccggtcagagcatgagcatcaacgccacagacgactgcaactacctgttccttatcatccacgccggcttagggaaccggatgctcgagatcacttcggcgttcctctacgcgctgctcacgaaccggatcttgctcctggaccgttacaaggagatcgcggatcttttctgcgagccctttcctggaacgtcgtggctggttccttcggacttccctctgaacgacgacgagttcggccagagcagcgctgagagctacggcaacatgctgcagaacaaggctttcggtggtggtacggaccgatctttggttggcaacagactccctccctatgtgtacctccacctggacggcaactatggtttccacgacaaactcttcttctgcgaggacgaccagcagttcctgcgaggtgttccgtggctggtcatgaggacggacatgtacttcgtgccgtccctgttcctcgttccagctttccaggacgagctcggcaggctgtttcctgagaaagacaccgtcttccatcacttggcgcgctatcttttccatccgacaaatggcgtctggtattcggttacaagatgcttcaggtcctacctggccaaagcggaaaaaagggtgggaattcagatcaggatatatgaaaccaaaggtatcttgcagagaaacggcccgttcccacacattctgaaccagatcctctcgtgtgctcaaaacgagaagctgcttccagaaatcagtatggcagagggagcagccgatgggactcggaataaccgaacagcagccgggagtgggactcggaacaaccggacgatcgctgttctaacgacttctctgagcgcttggtacagcgagcagatccaggagaagtacgacgagcagtcggctgttgatggcgtgtctgtcagagtgttccagccgagccacgaggagtaccagaggtcgaggaacaaggggcacaacatgaaggcgcttgctgagatctacctattgagcatgaccgacgtgctgatcaccagtggcttttccacgttcgggtacgctgctcaggggctcgccggcctgaagccgtggatcatgcttaagtcggagaaccacgtgacgccagacccaccgtgcgtccgcgccatgtccatcgagccgtgcttccatcaagctcccttctacgactgcaaggcgaggaaggacaccgatttgggcaaggtagtgccttacgtgaggcactgcgaggacgtgagctgggggctcaagattgtagatcaaactcatttgtag

SEQ ID NO: 21500 - DNA, 1422 bp, Zea mays
  Peptide Sequence Number=SeqID_64875
atgcgcggccctcgggggaaggatgtcttcgcccgagctccgggagtcttcggcgcggatgctgaaggttaccgggggctgcccgaggctaggccgaagaaggcgcgggggaccgcgaaggctgccgcccccggcggtagccagccgacgctggcggcgaggtcggtcagccctgggtccagcaaggtgccggacgttgtgaaggcagccggtgccggcggagccaagtctacctcggccggagccgcgaaggcccgagaattgcctccgccggggaagcgcattgccgatttcggcactgatattagtgtggaagattatttcactggatcgggcgaggggcaacttgttattgttccgcctgtggtggcgacaacggtgtctgtcacagtgcctggggcgaagggtggcgccctcagcgctggcggtgagatttcggcgctcgctgccgtcaaggacgaggcgggcgctgtatcccgccggctgaaggaggcgtcgcagcggctaagtcagtcggccgccgatagcaagtgccgcaaactggcggaaaaggtggccgcgctggagggcgagaggactgagctccggcgcgtgctggcggaggagaggagggaagctaatcaggccctcgccgaggcgcagtctgcgcaggcggaggccaatgtggcgcgggtggagggtagcctcgccaggcaacgcgccgaggaatgggaggagcggttcaacgctctgcaggcccgcatggaaagggccgaggcttctacgcgctcggaagctgagcggacgcgcaagcagcttatggactcataccacgagttgggcgcgcggaccgctgacttcgaagttcctgaccgagagtcaaaccttcgttgcctcgagtggctgcaagagaagttgctggcgctcccgaccattgtggagggatttatgtcctatgcctccctggtcacatgcgaaggggcgatgaacgcactgtcccgcgaaggatgccgtcactatgaggtcttcgaccgatctgatgaggatttcgagcgcgagatttacaaggttgaggaccctgtggtgaaggaatccgcgggagccctctttgactggatgtggggcccccacggtcgggaggtggtcagggagcggtccgacacggcgaggggtcaggcggcgcgtgacgagaaagtggacgacttcggggctttgaacaacgcacggcctaaggcggagtcgaacccggtggcggctgggcccgagggcgccccggcgccgcccccagaaaccgtcgaaggctccctcgatgcccccgcagccactgcggccggtggtggctcgacgccaaccgcagtgccgagggctgaggatcccccgaagacggcgacggagcaggcagcggaggatcccacggcggctgggtcatcgcaggtggcttag

SEQ ID NO: 21501 - DNA, 2808 bp, Zea mays
  Peptide Sequence Number=SeqID_64876
atggaggtcgttgagttggttccttgtgcctgcaataaatggggcaactggtgggatttttggttttatgttgccgagggcacagtcgaagaccatccggggcttcccgtggccgagatgtgttcacattattactctgcgtacccgcagtttgaagtagcggaggaggatgcagacgaaggggccctgcggtgcgcggctggcctaagtagcgggcgtgatctggttgaggagttcgtcgcatatggggtgtggcccttggcgcgtggctgggcgctgggcgaagtatgccctcgccagatgccttcccatggcaggatgctggtgcggagtccctccttcgcactggacttgcatggccgagatcccgacccattcgtgcgtgaggcggaggatggggcggcgcggattgttggtcgctacgtgccaaagacggagggccagcgtagctgggacatacgcggatccaatgatcgtttgaatagagtctttgagttgaaccatctgccgtatggcggttatcccgggcaggacgatgtcgaccgccgcgggaaaaaaccggcggccgagactgaagatgaccccgcactggcggccgccccgtccaccaagaagaggaagctaggtactgcgatgggaggactgggggtctccgatagttttgctatggagctgatggggacctgcgcggcccccgggggaaggatgtcttcgcccgagctccgagagtcttcgacacggatgctgaaggttaccgggggttggtggcctaagaacgttcctatcccccgcgcggccggcgaagacttttttacatctcgcatggttcgtgatatgagagtgtttccttatggacggaatattgctgctgttgtgtcggcagtgatggacaaggatcgtcaggaggctgcgcagaagcgtcgggcagtcgtcaggctgcccgaggctagaccgaagagggcgcgggggactgcaaagtctgccgccctcggcggcagccagttgacgctggcggcgaagactgccgcccctgggtccagcaaggtgccggaggtcgtgaaggctaccggagtcggtggaaccaagtccgcctcggccggagccgcgaagacccgagaattgccttcgccggcgaggagtgtcgccgacttcgccaccgatattagcgtggacgattatcttgttgggtcgggcgaagggcaacatgttgttgttccgcccgcagtggcggccgtggtgtctgccgcggtgtctggggcgaagggtatcgctctcagcgctggtggtgagattccagagctcgctgccgtcaaggacgaggcgggcgctgtgtcccgctggctgaaagaggcgtcgcagcggctaagtcaggcggctgacttcgctgatcgcgtggcgtcggggtccctgacggcagttgtgtctgccgaagtcgagagacttcgggcgcagcatgctgaggtcgtccgggagaagtcggccgccgatagcaagtgccgcaaactagcggagaaggtggccgcgctggagggcgagaggactgagctccggcaccagctggcggaggagaggagggaagctaatcaggccctcgccaaggcgcagtctgcgcaggcggaggccaatgtggcgtgggtggagggtagcctcgccaggcaacgcgccaaagaatgggaggagcggttcaacgctctacaggcccgcttggagagggccgaggcttctacgcgctcggaagttgagcggacgcgcaagcagcttatggactcataccacgagctgggcacgcggaccgctgacttcgaagtgcctgaccgagagtcaggccttcgctgtctcgagtggctgcaagaggagttgctggcgctcccgaccattgtggagggatttatgtcctatgcctccctggtcacctgcgaaggggcgatgaacacgctgtccagtgaagggtgccgtcactatgaggtcttcgaccgatctgatgagggattttcgagtgtgagattttacaaggttgaggaccctgtggtgaaaggaatcccgcgggagccctctttgaccggatgtggggcccccatggcggcgcgtgacgagaaagtggaggactttggggctttgaacaacgcgcgtcctgaggcggagtcgaacccggtggcggctgggcccgagggcgccccagcgccgcccccagaaaccgtcgaaggctccgtcgatgcccccgcagctactgcggccggtggtgggtcgccgccaaccgctgtgccgagggctgaggatcccccgaagacggcgacggggctggcagcagaggatcccacggcgactgggtcttcgcaggttcaagattttgggcctgcgcacgcaaccactactgctaattttttggcggcttcgaccgtgggtgctgggaatgaatcagatgagtctgtgtctaagttttctgactttggtgactctgggagttcggttgagtggacggaagagtcgtcggacgaggacttggattactttgcggccttggatgtggtggcggcggaggcttcgccgcgtgctgcggatgctgaagttgtgcctggtccaagtgctgggcgtaggcggcgaagggcggttgcgaagcgtagagtgagtgaggcggacggcggtcggctttgtgtgggcagcgctggcaagcaggaactgttgtcctcgccggccgttgcgagtgtaggtgagggggagctgcgaagtctttttgagggtgaggagctgaggataatgctatttaactatagggagatgggaatcattctgaaggttgaaccgatgtaa

SEQ ID NO: 21502 - DNA, 646 bp, Zea mays
  Peptide Sequence Number=SeqID_64877
atggcgcatctctgttcgttctcattctccctgtgcatcacggagctcccttgccgcgcccttgcttctccatcgctggctgcacgcccctggccggagctcccctctactcgctcgcgccctccctggctcacgcgcccaagctccatgggcggctccctgggcttggtctctggcttctctgcgacgcacggctgctcttcttctccaagcgtcggctcccagctcagctctccagagcgtgcgcgccacctgctccctccacgctcggcgccttgtccctgcgccgcgcccctctactacttgctctggtgctgcatgcgtgttctcccatggccggctgcagctccctgcgcgcctaactccagctcgctctccagccgttcctcccgtgccgtggtcttccctgctccagctcggcatcctctgttcctccactgcgagaacgccaggctgcaccagtttgttgggcgcctgcgtcgatctccagcccaccgtgcatgccatcgtcttcatgtttttggcaagtcccctgctcgccatcccctgctcgacttcccctgctcgacctcgtcgtcgaacttcgccttgccggtcgtcgttcttcgctcagcaaggtttcgttctaagctgcgccgcccttcaa

SEQ ID NO: 21503 - DNA, 387 bp, Zea mays
  Peptide Sequence Number=SeqID_64878
atggcgccggctggactttggcgcgacgcagggcacgcggagcgcgcgtcgggcgtgctctggcgagcccagagcgcgtcgaacacgtggccgttgctttctgcccttgttcttgcgcccgctgagcagccaaacgtgcgaatctcgccctatggcttgtgtaagatttcatccctgcacctagggctacctagttcatggagcttggtgagggggagcggagcggccgagcaaggggcaggggcagtggtggtcgccggggatggacagtggcgcagacggtccgactacactgcgcgaccaagaagctggggcacgacacgactcggatgggtggcagatggtccgaacggcggcgcggacgaaattctggcgagtagggcgtga

SEQ ID NO: 21504 - DNA, 129 bp, Zea mays
  Peptide Sequence Number=SeqID_64879
atggtcggcgtggttgttggagggagggctgacggatcgggtccacctgccagtgatgaagccgcgccacacggaccagccgagttgacaacccaccagacccgcatttttcatttgatcactaggtga

SEQ ID NO: 21505 - DNA, 1587 bp, Zea mays
  Peptide Sequence Number=SeqID_64880
atggcaccggcgtcagcctggagatcggttgttgaccccgtcgagtacaacatgatgctcaagcagaagttggagaaggaccttgctgccatcgccatgtgtaggtttctttatcctatttatttggtaatttcatttactgtacacgaagaaatagtcctcagcctgcaacttctgcagatgcctatacaggtgcgaatctttgcgcttgataatctctatgttcgagctcgagcacgtgtggacgccatagccggaagagttcccccgaaagcgataacgaccccgaagggagaagaagactgcgtgcgtgccagagagcgaggacgactgaaatcacatagaggtctgcgaggtagtaccatcgacgaggcttctccatcccctccggcgagctccccttccaaaaaaagtggtgagctcttgaacaccgaagctcctggcttgtacataaggcagaatcctgttccaaatgcctacaccttagcaatcaacggcaaaaaaccattcattgtcgttcacacaagccttgtggagctgcttactccaagggaattgcaggttgttttggctcatgagctgggtcacctcaagtgcgatcatggtgtttggctcacttttgccaatatactcacaatgggagcatacactgtccctggtttcggcatggttgctggctttctggaagagcagctatatagatggctacgagctgcagagctgacttgtgacagggcagctcttcttgtggtgcaagacccgaagccacgggatggtggcggccttcgcgcgggcagcatggctcaaggagtaccacgagaaggtgctggtggagatctacagatcaaatcttttttgagtgcatacactttatttcatcttggtttcatggttgggtacatgcgggtggccttcgcctacgtgtgcgggcagcgtacgaccagggccatcaatcctcatgcctacaccaatgagactgtgtttgttcagagatggtcgtccgcgtgctggaccgcgagggccagcacgacaccgtctgcgcgctgctcgacgaaatgccgctcccgcctggacgtccgcgcctacaccaccgtgctgcacgcgctctcccgcgcgggccggtacgagcgcacgctcgagctcttcgctgagctccggcgccagggggtggcgcccacgctcgtcacctacaacgtcgtgctggacgtgtacggccggatgggccgctcgtggccgcggatcgtcaccctcctcgatgagatgcgcgctgccggggtcgagaccgacggcttcaccgccagcatggtcatcgccgcatgttgccgcgacgggctggttgacgaggcggtggcgtcaaccatagaattgtacattgaataccaaaaggagcgggttcacatggtggatgatgcgagactaagcacagttctctctaaggaggggattgaagtctgcatggtaccttctgctgataggccagatgatgccaaatttgctgtaccacttctggagtctgactttgactttgccattgccaaactaaccattagattatcttcacttaacgatttcattagttgttattga

SEQ ID NO: 21506 - DNA, 270 bp, Zea mays
  Peptide Sequence Number=SeqID_64881
atggcgggcggaagagagcagtcggagctaaggaggggcgtctggccagcgaaggttttgctgactggatcaagagatagagaggggacaaatcgggtttgtctcactgccgtgcacagagagaagatcccgagtttgacgtgtccagatcacgtgtcccgatgccatcttctggctggaaagggatcacgacttgtgggtagagtgttaaaaactggtatatcagccgagctcacggttgagagcagccttgggatcctctttgattag

SEQ ID NO: 21507 - DNA, 372 bp, Zea mays
  Peptide Sequence Number=SeqID_64882
atgaggaatagggcaaggcctagcccactactcctcctgctcctctcatgctggagcagcatcccactcgaccgtccaacccggtggcaaggtggtaggccaagtcacaccatcaaccatatcctgaagcgtacctgcaaaaattatgccacaagcaaggctgagtatactaatactcatctagacttacccggttacaaggggtcaagcagtctcattagctgcgagaaccagacgattcaaatcgagtttttaaaccttgcaagggagatcctcgatggcaggctccggagctggctcctagacttcctcgtggacaactccttgcttagggatgagcacgtactctccgtcagcgaggttgcaatctaa

SEQ ID NO: 21508 - DNA, 360 bp, Zea mays
  Peptide Sequence Number=SeqID_64883
atggatgagtacatcagagccgacaatgactttcggcaaagaagggaagaagcctacagatactccaagatgactagggcttcggaggaagactccaccctaggcatgtcaagtcgattcataagcccagctcaagcgacgacggggggaatcatacccaaggacaaaagcacaactctcaaccatcaggggcacaacaaagttctttcaggccaccagctccaagaggcagaggggggagaagctttggaggaagatatggagaggaatcttcgtcggcagtattacgatgcggcaatcgtggcaaagtatgcattattgaatcaacagaaggcaaatctttttcttcgtgaagcatga

SEQ ID NO: 21509 - DNA, 393 bp, Zea mays
  Peptide Sequence Number=SeqID_64884
atggatgtctgggattttgccttcgctggtgagccagaggcggcgctcctcgcggacacggcggcgccgtcaccggaggcgaggcagatcggggttcttagggcgttaggggtctgtctggattgctggagaggggaaaataggggcgaggttaggacggtcacattgagggaagactcaggaggtcacaaacggagtccggggcacgatgaggacatgggtcgacggcggtggagctacggcaatgaaccggatgggtggccgatcgggaagttttctcggatgctcatgagtgaggacaaagtgcgcataatagacccatgttggtctgtggggacgatatatgatcatagagagctgccaggagtatgtaccgctggtgcagggatttga

SEQ ID NO: 21510 - DNA, 330 bp, Zea mays
  Peptide Sequence Number=SeqID_64885
atggcgtccgcgaccggagcgagctgggggaacgacgcgaggactgaagacgagctcatgcgtcgagcggggtccgacgatggagagcacaaatggagaggaaaggcaggagcttggcgcgtccttggagatgagagcaggggcgcgacggacagccggggcgagcacacccccgacggctgggcaaaagctgtgagggagataggagatgggagatttgcaagcacgagcttggagggacacggtggagcagggaattggggaagatgcagcccggcgaggatgaagaagaggagcacgatctggagcggctcgatgtgctctgcgtag

SEQ ID NO: 21511 - DNA, 405 bp, Zea mays
  Peptide Sequence Number=SeqID_64886
atggtccgacacctacgtgcggacggttcggtgctcagacagacagtccggctaactcagccggacaatccgcatatggacaaaggcgtcaccctccacacaaagcaaggaaagaggcgcaagggcaaagcacatatggtcgggccaggtcggctattgaaagctgaccctacttttgatcagttgctctccaagagtgctcgcaagaagaccgttctacgtgatcggtcaacgaagaaacctcgatcaccttctaaaatgaaacggccaaacaaaatggctcgaaaggcgacacaacaagcatcgcctattcatcctatgggaccagggtactttccacccatttacttatcgtcggtatattatcctgttcaaatatggaatggtacgacgatgaatccatga

SEQ ID NO: 21512 - DNA, 276 bp, Zea mays
  Peptide Sequence Number=SeqID_64887
atgacggctggctacattgttggctcactggtcggatcctttgccattgcatacctgtgtgacacatttatctctgacaagaaggcatttggagatttggatttgatctggatcagcctttgcgggcacataggtagcacccccaagactgtttctgagaaggagtggtggcaagccacagacaccaagttccaggcctggcctcgcactgctgggccaccggttgtcatgaaccccatcagccgccagaacttcatcgtcaagtccactgagtag

SEQ ID NO: 21513 - DNA, 546 bp, Zea mays
  Peptide Sequence Number=SeqID_64888
atggccacgagagcggcgctcgtcgccggccgccgtgcggccggtcaggacgggctcgcccttctctcctcgggctgcaggcgcgctctctctctcttgcgggcaccgctgcgtgtagccgtgtacgacctctcacggaagtccctctttggcaggcgcgaaggagctcgtccgagctccccccacaagagcagcagcgccaccgagcgggagggccacggcgacgcgacggcggcgcaggtggaggcggcgctgaaccgcaagaacgcggacgtggtcgacgtcgaccgctccggctccgcgacgctggtcccggccgacgcgcggcgcggcgcgggcgacgagtgggtgcccgaccaggagacgggcgtctttgtcccggccgacgaggagtcgtccgggcccggcgacgggggcgtggccgacgtcggcggcgcgcgcgggcaagccccgtcggtgctggaccaggcggtgttcgtccgcgaggagcacatggaggacgtcgagaggcccgccgtcggcgtggacgatgccggcgccgcctga

SEQ ID NO: 21514 - DNA, 141 bp, Zea mays
  Peptide Sequence Number=SeqID_64889
atggtcacctctgcgccgctcggggaggtggttcacaacaaggatgtttatggaaggataaccaagtggatgatagagctcttgggttttgagatcgactatgtgccatggatggccatcaagtcccagagacaatggtaa

SEQ ID NO: 21515 - DNA, 327 bp, Zea mays
  Peptide Sequence Number=SeqID_64890
atgacctccgatccagtcttggcgcttctcaacttcacgcgcccgttcgttgtggagtgcgacgcatcaacctacggctttggggcggagacagttacccaaatcctatcttgtctggttcaaaaatatgagaagaaagaggaatcaaatgagaaaagaaacttggagaggctagagatggcacaaatcaggctagaagctgctcttgagacatctaataagtggcaggtcactgatacgtccttattgcgttggcgtaggaagctgaagcgtgctgttgaagattgcgatgccacgctgcacaaatcatttgctctccatatttaa

SEQ ID NO: 21516 - DNA, 456 bp, Zea mays
  Peptide Sequence Number=SeqID_64891
atggaactaggagcagatggtggaagagaactacttactccagctccagttccagagaagagactgcttggaatcaccgtcgccgtctatgtatgtcaatgtgtcgcactcagatcaatatcacctcaaaaacatccctttgggaagctacacaattttaccagaggcgttgctgccatggaactaggagcagatggtggaagagaactacttactccagctccagttccagagaagagactgcttggaatcaccgtcgccgtctatgtatgtcaatgtgtcgcactcagatcaatatcacctcaaaaacatccctttgggaagctacacaagtgccatcagcagacacgggtgactgctgctgcaagctacaacctttggccctttgccctgtccaaatcaccaatcaaccatgtgtttctcaggccatcagcagacacttctccattggcctga

SEQ ID NO: 21517 - DNA, 462 bp, Zea mays
  Peptide Sequence Number=SeqID_64892
atgggccccaacctcgtattcggcccatcccctctttcctccccttccgcggcccaagtcttctgcccgcacgcgcctgcaaccctcgctgacaacccggacccgctcgccggtgggtctcgctgcgttgctgccgtgtgggcccatataaacgcgggaccccgtgacctcctcacccctcgaatcgagttctgccttggatttgcgccaccatgtccgcgggtgaagaagagtgctgccgcaggggaaattcacgtacgccgccgcgggacctcgcctgggttgccgctcgagcctcggatcggtgccagggagcttcgcggagctataaggatgctggaaggttggagattcgggctcgggaccatgtggaacaacggcaatccctcgccggagcacttttaccgggccgaaactgccgtgtgccgtggccagggtattcagctgcgcaatttctggtga

SEQ ID NO: 21518 - DNA, 135 bp, Zea mays
  Peptide Sequence Number=SeqID_64893
atgggcgtcctccggcaggccgaaatcactatccacggtgcaaccttccacgccgatttgtttgtgaagccccttgcaggttttgacatggataatcctttaattcctacaacttcaatatcctgctcgagatga

SEQ ID NO: 21519 - DNA, 459 bp, Zea mays
  Peptide Sequence Number=SeqID_64894
atggctctggactggattacttacattgtagctggagctaaggacctcatagtgcattttttgcctatgggaatgccatccgctgtacatcacgcacgttggtcggtgctcccctcggcgagcgagatgcgtgggccggcgtcggtgaaggcggggagccggccgccgtggctgggactgggggcggccgcatgggtgcaggtcgcgggcggcgccggctccacgttcgcgctctactcgcacgcgctcaaggtcgccctcggcgccgaccagagccggcttgcgctgctcggggtcgcctgtgacgtcggcgagaacctcggcctgctcccgggggtgctctgcaaccgcctccaccccgcgctgctcctcatcatcggcgctggcgcgtgcctgctcgggtacggcaccgcgtggctcctcgtctctggcgtcgcgcccgcgctgccttactggctg

SEQ ID NO: 21520 - DNA, 168 bp, Zea mays
  Peptide Sequence Number=SeqID_64895
atgagaaggatcgtgttggccataaaggatgatcaagtgctcaacatggaaaagagcaatgagaaaaggcaaaatgcatgggctcaaggaaaagattttctaaaggcgccagacatcttcaatgatgcaacatacatgatcactagaaatgaagttgacatgcattag

SEQ ID NO: 21521 - DNA, 207 bp, Zea mays
  Peptide Sequence Number=SeqID_64896
atgagctacgaagcacagccaccgaggtcaatgcacgctcgccattggccgctcaatgccgtggttgggcttcgtcgcctcttcatcaccgatcggggttgtcgattgggtgatggacgatgtagaacatatcagaagcgtattacttcattgataccttgtgggtcgtcggatgaggaaccgatggtcatcgggtcacgcaagtaa

SEQ ID NO: 21522 - DNA, 204 bp, Zea mays
  Peptide Sequence Number=SeqID_64897
atggcgatcaccggggatgtctccgccgcggtccagggtggcgccgctatgcgcggtcaactggaggatgaagggggtgtgtgtgccataggatctagtgggggaggattagaaggacccccataccggttcggctggatgaatctgagccctcggctcgagatccagcgatcagtcttgacctccactgttgtggccgagtga

SEQ ID NO: 21523 - DNA, 528 bp, Zea mays
  Peptide Sequence Number=SeqID_64898
atggccttgcgaattattgggcccgcaggcctttcgcgagaaatcagcattctgtcttttggggttgatgattcattgggtgcaccgaagagtaagaagggcagaagttcgtcgcaccactccgacgacaaacggaagcgcgagccgactcctccctcggaggacttcggcgattccgagtactcggaggaggagttctcctctgagtccgaagggtcgtcggtccacgcctctcccctggcatcgtctgatgactcagacgattcccaggggattgcagcgaaggtgtggacatacatccgggccgtcgagcgcgctgggctcgagggctcggatgagtcggaagtctcctcagacaagggggactcctctgactcgtctgaggaggggagcgatggcgacgacggcggtgagggcgacgggggcgacggcgatggcggtggcgacggcagcaagggcgacggcaagggcgacagcggcagcggcagcggcaagggcgacagtggcagcggcaaggccagtggctag

SEQ ID NO: 21524 - DNA, 228 bp, Zea mays
  Peptide Sequence Number=SeqID_64899
atggcggcgcacagtcacagacgaggagacagggagaggggagctctcgctttgctcggctacccggctcgggcctcaggtccaacgtccgagatctctgaacagaaagcgggatggactggaaggaagaaggatgatcctgtggccagtggccacccgagcaggagctggcgagctgctcacactgtgccaagggctgagaaagctgcgccaatcctggggttctag

SEQ ID NO: 21525 - DNA, 1056 bp, Zea mays
  Peptide Sequence Number=SeqID_64900
atgcagcacgtaatcctttgcctgcaaatctctctgctactctccagcttctcctattcgatgcaagcccagtacacctcgatctttagcttcggcgactcctacaccgacaccggcaacaagatcatcctctacggcccggcggcggcggatctgtggatcaacaagccgccgttcgggatgaccttcttcggccatccggccgggcgcctctccgacggcagactggtcatagatttcatcgcccaggcactggggctacctctccttccgccctcgctggcgaaggaccagagcttcaagcaaggcgcgaacttcgccgtggctggcgccacggcgctgaagacgagcactacgagcccagcgctctacccgcagttggccgtcgccggcggtgccgtgcctcctccgaacaacatctccctcgctgacgagctgggctggttcgatgccatgaaacccgcgctctgcggctcaccccaagcatgcaaggactacttcgcgaaggcgctgttcgtcgtgggcgagctgggctggaacgactacggggtcatggtgaagctcatcaacgacggcgccaccgcggtcgtggtgtcggggatctcgccgatgggctgcgcgccggggaacctggtgctgctggcgagccaggaccccgccgactacgagaccgacacggggtgcctcaagggaatgaacgagctatccagggaccacaacgcgcagctgagtcaggcgctgacgacgctgggcggcaggtaccccggcgcgctcgtcacctacgccgacctgtacggccccgtcatcgccttcgcggccgcgccggcgcgcttcggcttcgactccgtgctgagagactgttgcggcggtggcggcggcaagtacaacttcaacctgagcgccgcgtgcgggatgcccggcgtggccgcctgcccgaacccgtcggcgtacgtcaactgggacggcgtccacctcaccgaggcggcgtaccaccgcgtcgccgatggctggctcaggggaccctacgccaacccgcccattctcgccacagcgtag

SEQ ID NO: 21526 - DNA, 660 bp, Zea mays
  Peptide Sequence Number=SeqID_64901
atggtgacctccagcttgatggtgggggaaagcgagccgggctgcggcctctccccctccctctgcctcaaggattttcatcaccaaggcaggggaggggactgcaacgtgcccggctttcggacgcgagtggcttcggagccgctcgcggcgctggcgtctgccgcggcagctggaagaggttcttccgccagcgtgatagccaaggcaggccacggaccgacctccaactctacggccttctgcccgtccttgtcttacgagttttggcatgggcgggggcctcctggcagcagcatccgccctgaggtcagtgctgccgctgttcggccccccggagcagaagtcgtcgtcgtcgccgctgctggagcaggtgacggcgcgccgttcgtcggtcttccgttgctccgcaggccttcccccatggagtggggttactcgcctgttggttatctgaaccgcttcaccaagcatgagtcgccccgtgtcaagatgacgagtgagcacgaacagaggcggagttggctcgaaaatgaaaacttggttggccgaagcctaaccgtgtcgtccgtcagcggggccgatgccggagttgatcagccgaggcctcggatcgggctggcgcccttggaagatggttggccgaggccccaggagtaa

SEQ ID NO: 21527 - DNA, 996 bp, Zea mays
  Peptide Sequence Number=SeqID_64902
atgtccggcgacacagcgccgcacgtcgtggaggacttcttcggggccatccagctccttagcgacggcaccgtcgtccgcggcgacgaggcggcgctgctgccgccgaagcccttcccggacgtcccgggggttcagtggaaggacgccgtgtacgacgcggcgcgcggcctcaaggtccgcgtgtacaggccaacggcggacgccggggacagcaagctcccggtgctggtgcacttccacggaggcggctactgcgtcggctcctacgacgagctcggcggggccgactacctgcgccgacgcctcgcggccgacctccccgcgctcgtcctctccgtgcagtaccggctcgcccccgagcaccgcctcccggcggcgatcgaggacggcgcgacgttcctggcctggctgcgcgggcaagcggcgctcgccggcgcgggcggcgccggcgccggcgtcgagcagtggctcgcggagtcggccgacttcgcgcggacgttcctgtcgggcgtctccgccggcgccaacctggcccaccacctcgcggtccgggccggctcggggcaggtcgacctggcgccggcgcgcctcgcggggctcgtcctcctgtccctgttcctcggcggcgtcgagcgcacggcgaccgagtcggccccgccggacggcgtctcgctgacggtcgccatgtccgaccagctctggcgcatggcgctcccggtcggggcgagcatggaccacccgctggccaacccgttcggccccggcagccccggcctggagcccgtggcgctgccgcccgtgctcgtcgaggcgcccggggtcgacgtgctccgcgaccgcgtcctgctctacgcggcgaggctcagggagatgggcaaggacgtggagctcgccgagttcccgggggagcagcacggcttctcggtccttaggtggggccaggcgaacgaggagctgatgcagatcttgaagcggtttctacaccggaagtga

SEQ ID NO: 21528 - DNA, 1230 bp, Zea mays
  Peptide Sequence Number=SeqID_64903
atggccctaaccctcgtggcgggacacccgaatctctaccctaagggggtccggtgctgccacgtgctggccaacatcggagaaaacgaggcctcccccgaatgccttccagacccccagccaagagcggaatacaagatacaccttcaattcttgaaaccttggatcatcggtgaactgccgtttcacgcagtcgagtcgagcaccatgtccagtgctccggcaccacgcgtcgtcgaggactaccgcggcgtcatccagcttctcagcgacggcaccgtcgtccgctccgaccccgccgtgctgcgaccgtccggcgagcacttccctgacgtcccgggcgtccagtgggaggacgtcgtgtatgacgccgcgcacggcctcagcctacgcgtgtaccgtccggccgcggccaccgccaccgccggtgacgccgccagggaggaggagaagaagaagaagctgccggtgctcatgtacttccacagcggcgggttctgtctggggacgttctcgcagcccaacttccacgccgggagcctccgcctcgcgtcggagctgcccgccgtcgtgatctccgccgactaccgcctcgggcccgagcaccgcctccccgccgccatcgacgacgccgcggccgccctgtcctggctacgcgagcagcgccatccgtggctcgccgagtcggccgacttcacccgcgtgttcgtcgccggcgagtcgtccggcgccaacatgtcgcaccacgtcgcggtgaggcacgggtcgtccggcggccagctcgccctcgccctcgcgccgctgcgcgtcgccgggtacctcctgctgacgccgttcttcggcggggccgtgcgcaccgcggccgaggaggcctcgccgccgcccggtgcgccgttcacgcccgaaatggccgacaagatgtggcgcctgtcgctcccggccggcgcgaccatggaccaccccgccacgaacccgttcggccccgacagccgcgcgctaggccccgtggcgttcccacgggtgctcgtggtgtccgccggccgcgacttcctccacgagcgcgtgctgcgctacgcggcgaggctccgggagatggggaagcccgtggaggtctacgtcttggaggggcaggagcacgccttcttctcccgccagccttggagcgagggcaccgacgaactcatccgagtcgtgcggcgctttgtttacacagagaacggcgtggagtga

SEQ ID NO: 21529 - DNA, 291 bp, Zea mays
  Peptide Sequence Number=SeqID_64904
atggctgcatgcccacggcggggagggcaccacggatttcgggaagacgaagacccagtatgcgggcccggttttggtttaatgcacaaacatagaaatctcagcatgatgcataagttcatgtttttatctgctcggctcggcctgagaggaggcaagctaggcctgatgtatcttcggttgagaggaggaaagcttggcagcgcgacgctcaacaaaggtggtgagctcggtggcctcgaacttggagcgatcgaagtccgccgagagagaagcatacagttggcctga

SEQ ID NO: 21530 - DNA, 726 bp, Zea mays
  Peptide Sequence Number=SeqID_64905
atggaggcgcaggcccacacgtcatgtaaccaacgcgccggttactacgtgcaaaaaactgcaccgccactcgccactaccgtgcctcctcgactacggaaccagtaccgcgactcgaggcaacccagcgcatcacccaacggtgcaaaccgagcacatcagccacgggacgggcggcacctttggcgggcgaagcaggcgacgcttcacctccgccataatgaccgcgtcaaaaaaggggttcgtaggctggcccccgaagggttcgacagccgcctcagacgcagagcgagggatgaccctggagtgaggctgacagcagccaagtccggcctcgggcgccataggaagctccgcctcgcccgacctcagggctcggactcgggctcggccccggaagacgacgaactccgcctcgcccgaccccagggctcggactcgggcttggccccggaagacgacgaactccgcctcgcccgaccccagggctcggactcgggctcggccccggaagacgacgaactctgcctcgcccgaccccagggctcggactcggtctcggccccagacgacggtctccgcctcgcccgacccggggctcggactcgacctcgaccttggaagacagactcgaccccgacctcggaggagcctcctcctcgcctgacccagggctcggaccgaccacgtcacaggaggggccatcattaccctacccctagctag

SEQ ID NO: 21531 - DNA, 735 bp, Zea mays
  Peptide Sequence Number=SeqID_64906
atggactctcccactcgccttaccaggtctggtgctgagtcgcttccctcattcaaagatgtggtctccaaactacaggtgaatcgtgttggttcatccaagcctcccaggccactctgctctgcctctgaggcaggggcagggccgacggatcttcaagcggaggatggtggtggttggatgctggtggtgtccaaaagttcaaggaagcaggctcaaaggaaacagaggatagcacacttggtggagttgaatgggcgatgcttgaaatggttggcgagaggtcactttgtaagattttgcaagcaggggacgaggtgtttttgctgcaaagcgcttggtcacaggtcctacaatttcccagaaggagatagtttgcaggcgactcggcatgctgtgagggtccttgtctgggagtggttgaccccggagttttttcgagagcctgcctgtcatggctttgttctcagaacttcggtgtggctgcgactcaaggatcatgtaggaagacgagtgttgaagcccaatgctgtttggagactcaaggatcacgcaggaaggcgaatgtcgaagcccaatgctatatggaaaagaatttctccttctggtgttgaaataggaggttcatggtgtgttgtgtcggaggttgcagcaccctcgaatggcttgcaccagcagggtcagaatcctgtgagtgctgaaccaagaggggatgatctctctccccggccatga

SEQ ID NO: 21532 - DNA, 90 bp, Zea mays
  Peptide Sequence Number=SeqID_64907
atggcgtggctcggcatgggtgtggccagggcgcggccccagcgcacggccctgccccgattatgtttagacaagtattttaatccatag

SEQ ID NO: 21533 - DNA, 187 bp, Zea mays
  Peptide Sequence Number=SeqID_64908
atgtcgtggctgtcggaggtgcgacgggacctgagggaagggacagctgtgggagcggtcgaattcttgctggacgtcgccctgctttccgaaaaagagctgggggtcgccgtcgtcccagaagcttgtgaagcgcccatcatggcccattctggcggggctgggccggatgggaccgccgggtctg

SEQ ID NO: 21534 - DNA, 564 bp, Zea mays
  Peptide Sequence Number=SeqID_64909
atgcgcgcaacgaatcgggaaatggtgaaggggtttacccggtctacgtgcgccggcgagttcttgaactccggtgagcgcgatttggcttctccggtgacgcgggctctcggtttaagcttgagcaaggctcacggcttcaccaggaagcgatctgggggcttgactcgaacggagggggactggagaggggttggccacggcggtggctctcgggcggcactggcgggtcgcggggaggtcgccggaggcaatggctggctcgggcgagttcggcgaggcacggaggaggtaacagggaaggcaaccgagcgctggggcgggttttataggcgcggacgcggccggggcgccggctcaaccgtttggcgcgacgcgggcacgcggggcgcgcgcgcgggcgtgctctggcgagctcagagcgcgtcgaacacgtggcgcgttgcttctgcccgtgttcttcgctctgctgagcggccaggcgtacgaatcttgccctaccgcctgtgggagatctcttccctgcacctagagctacctagttcatgtgagttccaagagtag

SEQ ID NO: 21535 - DNA, 249 bp, Zea mays
  Peptide Sequence Number=SeqID_64910
atggcgggtggaaagcagctcgccggagctaaggaggggtgtctggctggtggtggatttgagttagggatcaaggtgaacacgcttgatctttggctcaagggctcaattagggtttttgttggggttgcacattttgcctttttgaaaaacccatttgttttgaacaagacacttttaagtataagcttagtggattctttattcttaagtcaatttgatgttcctgctcaattttggttcacataa

SEQ ID NO: 21536 - DNA, 516 bp, Zea mays
  Peptide Sequence Number=SeqID_64911
atggcctcagggcggacgctgcggaaacaaggccctcacccacgtccccactcgaggggcgaggacaagctgtcaaagccaaagggccggagagccagacacgcggcagctgccagcgccacgaacggcgaacgcccttccccccgatcactgagggaaggagcgggccgctgcccgcgcggagaccagccccaactcggcgcactcccctccccagcactgatgatgaacatccttgaagctgagggaggggcagaggccgcagcccggcttgcttctccccaccctggaactggtgccgccaccgtcgacccgggtccccgtcgcgtccccgtcgccgccgaggagtccccggagcccgccttgagcctgtcagcccgccccgcgcgcgcgctgtccgcccggccccgcctgtcagcctgcccacgccccgcgctgcctgcccggccccgcctgtcagccgcccaggccgccgcgcgcccgcccgcaggatctaatcctgatcgttcgctttag

SEQ ID NO: 21537 - DNA, 351 bp, Zea mays
  Peptide Sequence Number=SeqID_64912
atggccaacacacaatgggagtggagagatggtgagagtagcgtgtaccctccgtgtacaatggatcaagcagtctcattagctgcgagaagcagacgattcgaatcgaattttaaccttgcaaggaattggacagattcagttattgaatttatgaaaagtataacttctaaacgatcaggtttatggctgtcagattttaacacaagtaagatcagaaattggacagattcaggtgctggacttgtgaaaagcataactcctaaacgatcagacttatggctgtcaaattttagcacaagcaagataataaacttatctacaacttttctatatgccttttctacataa

SEQ ID NO: 21538 - DNA, 126 bp, Zea mays
  Peptide Sequence Number=SeqID_64913
atggcgggtgctggggatgtcgtggtccgcgtcccctcgctttcccttgccgccggcgagcctctggccggccgttttgctctccccgtggaggtacctgaagctctggtgctccaaatgggttga

SEQ ID NO: 21539 - DNA, 702 bp, Zea mays
  Peptide Sequence Number=SeqID_64914
atgacatgcgggcccaggccttcacgctggcccaccgaatgcgatgaagctgaaagggtacacaaccgtggtgcggttgcatgcctcttgcatgtcgggatgatcaccagccttgtggtggggagaagcaagccgggctgtggcctctgccccgccctcagcttcaaggatgttcatcatccttgttggggaggggggcgcaccgagttggggcctgcctccgcgtgggctggtgacccgcttcttcctccggcattcgagggaggagggcatcctccagctctgcggaggaggcgtcctccagccatgcgggggaaggcgaactgctgctgccaggacagggtgcagctgtccttcttccacccgggcgacggtcgccggcggcaccggggggttgcccaacacgtcatacgccgcgagggcggtactcgtgttctgggacggtcccgttctcgttctcggggcgagagcgggagtgaggacctgtcggtgcgctttggggcggccgccgctcgctggtgcggtgttggtgggcaggtggctgctgtcgtcggtgctgaggtggtggtcgccataggtgaggctgcctcagccgaagcggttgctttcgccgacgagaccgtcagtgccacctgcgctccgaacctccagctctttggccttaatggctggttctcgtccctcgtgaggggacgtgaatga

SEQ ID NO: 21540 - DNA, 771 bp, Zea mays
  Peptide Sequence Number=SeqID_64915
atggggtcgggcgaggcagagtcctcctcccgaggccgaggcctaaggtcgggcgaggcggagcttcctgtcgcgcccgaggctgaacttgctgttgtcagccttgcccgggtggctggcacagcagtcggagcagggataaggtgtcaggcgatcctcgcattgaatgcgcctgcgatacggtcggttggagaagcgatttggccaaggttgcttctcgacgaagcctgcccgagctgggcctcgggcgagccgaggatgccatcacggactcgcgcacatgatggtgcgggcacctcccgcggtagggaggatactcctaacccgccactagtaccaccgactttggctgaggctatcgctgccctggtcaatgccactgcagataatacacgcttcctgcgtgagatggcgggcaatcagtttcaacagcatggaggcagagctcctccccaaggactgcatgatactacatattcagaattctctgagactcgacccccactcttcatcaaagcagaagaacctctagaagcttatgagtggtatgctattgaccaagtaaatacagatctgaagaaaaagaattgttttatgaggggacttaatgacaggcttcagcggaaaatggcaacatgcttgcaccttacctacagtagagcagtcagtacatcactggaagtggaatccaaaaatgcaggacacgaaaatcaaaggggtttggaggtgaaaggtcaaatcaagggcctgagaagagaactaggttggtga

SEQ ID NO: 21541 - DNA, 933 bp, Zea mays
  Peptide Sequence Number=SeqID_64916
atgtcgcgtcttctcaactgcggaaccagtgccacaactcgaggcatccctgcgcatgagccaacagtgccaattgagggcaacgatcacgggagagccctctcccgcggcatgaagacggtgtgcccgtgttccgtccctcgaatggcttgcacatgcgcaacggccgccccgcgaatcgcctgtcccgtcgcattaactcctcggcaggcaagcgacacctttggcagggaccgggaaaggggatatttcgaaagggatcattctccacgaaggaagcgaggcccgagccctactactgatcaggggttcgaaggctggcccctcggaagggttcgacagccgccccagagcactagggctccacgcccactactgatcaggggttccaaggctggcccctcggaaggattcgacagctgccccagagcacgcagagtgagggatgactctgggtacgtccattacatggccgaggctcggcctacgctcccgaggtaccctaggacatttccgagaccagcaggagcaatttgtaacggaatcccactagagggaggcatcgagccctcggaccctatcgaacgggtccgggtccggcaaatcacctgcagttcaggtcaaggcttcgtctacccaagggacgtgatctggcctcgcccgagcccagcctcgggcgggaactgtagtcccagacgaagttacgtctcgcccgagggcctcctcaggcagtgggtgcaccctttgctcgcccgaggcccagctcgggcaggcttcgtcgagaagcaaccttggccaaatcgcctctccaaccgaccatatcgcaggcgcattcaatgcgaggatcacctgacaccttatcctgacacgcgcgcctcagtcggcaaggtcgaagtgaccgcagtcacttcgccctttcactgtacgatctga

SEQ ID NO: 21542 - DNA, 1179 bp, Zea mays
  Peptide Sequence Number=SeqID_64917
atggatggatgtatgtatgtttgcactcgcatagagaatgatccggttgaagagcccgaggaactcacaggagaagcccctgagcagcagtctgttggtggaggcaagtgtcccttgacctatctctgtcctattcattctttaattcacctcccgcattacacatttatgcctaaggatgtggcaatgagattgatggttctggttatgactatggtgctgatggctcgacttagacacacttcacgaaagtccgtcatccccttcttaccctcccgccttgctgagcgtccgcttcgccgtcccgtggccggacagtccagccacttggagagactgcaccaccgcctgcatgaggagcaggaacgtcgacgacaggagcagcagggctcttctttctcgctccagcaggagatagagtctgtgaggagctgctcccctgtgcttcctctggaggcgccccctacaccaccactgggtgccccagcctctggagtagctgctggaggagacctagatgatggaggtggcgacgacagctcgagccacgacaccgacttttctgctgaccaggagccggaaggatgggttgctcgacccaccactcgcgacgctgctcacgggtgtcacttccatgatgcgctcgacaccctgctacgtcgggcacttaaccggcgtacttggtccatcaagtatcgttgtgtggtctaccagcatactcgcggggtctacccggaccgctgggaggcgacctgcttggtgcaccgtccggagaacagtctccacggtgctgagatgttgcacgacatgcgcttttcgcactactgctcggttctcggtggggtagctgacggtctcaacctgaagtattacccccaccgtccatctggcagcacaagaggcatgattgtctcacctgttggtgagggcaatcctaggttgagcagcacagtcatcctagccgccgtgctaaacacggagctggaccatgtgctagaggagctgagtagggctcgtgctaagatcgccctgctgcgggctgagcgcgcggagcgtcgtcacctagacgatgattcccccgctcccgtcgggactcagcacccataccgctcacctcggcgtggatgccagtcttatggcaatcccgactgcaagaccaagataaatctagaaccatag

SEQ ID NO: 21543 - DNA, 534 bp, Zea mays
  Peptide Sequence Number=SeqID_64918
atggagatgtccaagaaagtgcttgaacttggatctggttatggattggctggacttgttattgcagccagtacaaatgctgacgaggttgttatttctgatggcaacccacaaaagaacatatccatcaatgcagagacttttggtgagaccaaggttaaatctttgatactgcattgggacaaagagcaagcttcagaaatgttgaatacttttgacatcattgttgcaagtgactgcacatttttcaagcaattccataagggccttgcccgaacagtcaaatccttgctgaagcattcggcaacctcacaggccatcttcctgagccccaaaagaggtgattctctagacaaattcctgggaattattaaagagaatggtctcagttgtgagttgatagagaattatgatcctactgtctggaatctgcacaaaaaattggtggctggtgaggatagaacctggcctaattatgacaaggagcattgctaccctcttctggttagaattggctattttagtgagttctaa

SEQ ID NO: 21544 - DNA, 1416 bp, Zea mays
  Peptide Sequence Number=SeqID_64919
atgaagcggatgcgaatgaacgacaaaacaaagcggacgcaaatgttgcatggggcggcacgggatccactgggcgctgacgatggggatggagaggaagagtccatcggaggctcggagctcgagatgcgtcaccgcaagcccttccctgacagcggcggcgacatggtgctcgaggcgacgatgatctgcatagacaactcggagtggatgcggaacggcgactacgccccgtcgcggttccaggcgcaggccgatgccgtcaacctcatatgcggtgccaagacccagtcgaacccggagaacacagtaggcgtgatgacgatggccgggaagggcgtccgcgtgcttgtcactcccaccagcgacctcgggaagattctcgcctgtatgcacgggttggaagttggtgctgaggcaaacttggctgcggcaatccaggttgctcagcttgcgctaaagcatcgccagaacaagaggcagcagcagaggattatagcattcatcggaagtcctgtgaagtacgacaagaaaattttggagacaatcgggaagaagctgaaaaagaacaatgttgctcttgacattgttgactttggtgaatctgatgatgaaaagcctgagaaactggaagcattgatcgctgctgttaacagcagtgatagcagtcacattgttcatgtccctcctggtgaaaatgctctctctgatgtcctcctaagcactcctatatttactggtgaagaaggtggaagtggttttgctgcttccgcagcagctgccgtagctactggagcatctggatttgaatttggtgtggacccaaatgtagatccagagttggcactcgccctgcggttgtctatggaagaagaacgagcaaggcaagaggctattgcaaaaaaggctgcagaagatacatctaataccgaaaatatcaatgcctcaagctcaaacagcgattctgttatggctgaagcagaacttgcctcaaatgctgctgctggtgacaagcaagaacagccaaaggatgatgacgatctactacagcaggcacttgcaatgtcaatggagggcggtgcttcaggatctgcagctgtgactgactccgctatggcagaagctggtgcagttgaccctgacttagcgttggctcttcaaatgtctgtccaggatgcaaacatgtccagtgacactgatatgagtaaggtgtttgaagacagaacgtttgtgtcatctatccttaattcgcttcctggtgttgatcccaatgatccatctgttaaagatttgctggcatcattgcacagccagggagagggcataaggcccacgtttagccccagctctgagctccaccttatctggactttgtatgctccaatgaaggatcttgatatgctgtcttctatgtag

SEQ ID NO: 21545 - DNA, 210 bp, Zea mays
  Peptide Sequence Number=SeqID_64920
atgagcgtgccaaccagacgcgacagcgtggtctcgccggaccacgccgaccgttccagcgccccctcaggcgggaggcgtgtgggcgggcggtttgcggcggacatggctatcgcgaaggtttgtggaggcggggtttccggaggtctggaggccgcggagcacagggggtcgtcacgacgctatcgcgtttggaggcagaacacgtga

SEQ ID NO: 21546 - DNA, 759 bp, Zea mays
  Peptide Sequence Number=SeqID_64921
atggaaaacgttctcctggatcgatcatctagaagcctcgagtacccgagaagggcgccccttggtcgcagccggcgggggccagctggtggcgctaggccggcggtgccgggcggctcgcatagtagctccttcccgatggtccagccattcaatcacctgcggacgaaaggtggcgcgtgggcgtccgctcccgcgcttattccatacgcgaggccatccgttcctctcctaccgtccaaccaaccgccgctcctgccgctcccacccaccgccatggagtacgtcacttttcccggtctaccagcagctgctcaacccccacccccgccggcgccacgcgccggcagggcagcagcggcaaccgctacagtttccgttccggcagcagcaccagctgctcctgcgccgcgacagagggacaggaggaggaggtcggcaaggccgccgccggcggcgatggagaggtctacagcgcagaagaagaagaagccgctggagcgggcgacgcctctgccgcccgcgccagtggtgacggaggcactggacgacctcgagcaggaggtggccaggaacttcgtcgaggacctgctgcacgtgctggcgccgccgccaagcagcctgccgctgcccaggttctccgtcgtcgtgaaagcgtcccccgccaaggacgccagactggtggcgcgggcggccgcgccggcctgcaacgtggaggccgccaccgccgacagcatccgcggccttctccgtctgtag

SEQ ID NO: 21547 - DNA, 471 bp, Zea mays
  Peptide Sequence Number=SeqID_64922
atgtgtgccacagcgagtgatcagagttttactttcagttgtgttgatttggaggtgttgcaggagcacgtcgtcacagtgttttcagtggagacctgctacaggtcaatatcagtgcttgtcttctggtggccatgttttccagtaaaaatttatgcaagctctttaggtattgcaaaaggcattgacaatgtcattctttcagttatctgcaccgccactggtgtcctcattgcagcacttggagatttttcctttgacctatatggacactgcatggctctaacatcagtcttcttccagactatgtatttgattctggtggagaaatcaggtgctgaggatggtctttcctcagtggacttgatgttttacaacaacatattgtcacttccatttctgtttttcctcattatagcaacaggagaattcccccattctcttacaatattacctgcaaaaggtcagtga

SEQ ID NO: 21548 - DNA, 1242 bp, Zea mays
  Peptide Sequence Number=SeqID_64923
atgttttggaaggatagcggcagccggagcagcagtggcagcggtcgggatcagaacggcgtcggccccttcggccaagtgcgcgtcctcattgtcggtgattcaggtgttgggaaatcttcattggtgcatctcattttgaaaagttctgccattgctcgaccatctcaaacagtaggatgcactgtgggcattaaacatgttacttacggaagtgcaggcggttcatctaataacatcagtgacgctgaaaggaacttctttgttgagctttgggatgtctcaggacacgaacggtacaaggcatgccggtcgattttctatacacaaataaatggcgtcatatttgtttacgatctctctcagaggaagaccaagacgaatttgaataaatgggcagttgaagttgctgaaactggcaccttttcagctccattgggatctggtggaccaggaggacttccagtgccctatctggtaattgctaataaagtggatatcgttccaagggatggggcaagagcaagcagggggaatcttgttgatcttgctcgccaatgggctgagaagcagggccttcttcggtgcagcgaagaacttccactcacagagagctttcctgggaactccggtcttgtgtcggctgctaaacaagcaagatatgacaaagaagccgtgatcaagtttttccgcttgcttattagaagaagatacttctcaaacgaacctcctgccccaagtccctggtcccttgctccaagagaagataccatccttcctatggagactcttggagatggcgcagatagcttccaaaggaaaagccttagtggtgagggttttttgtacaacggactggtcccactcccagcgcagaggaacctgacgccgccaccgactctgaatccgcagcagcccgtgtcgcccttggataactacagatatcatcgattctcctcctcgtcgcttccggacatcactaggaagtggttctttctccttttcgtttcctttccatcctccacctgcattcatttagaatacgtgttgactgggatggaggcaatacatgatacgccagtataccttcaaaggcaaatcttgatgaatgatgcggagaactacaccttcaaaaccacagcaaagatttggatacaggctcgcacgatccttaaagcaccctgggccaggctcaccagatacgagcagattgatcgcatctccagagccaggcttcagtga

SEQ ID NO: 21549 - DNA, 381 bp, Zea mays
  Peptide Sequence Number=SeqID_64924
atgacgcaaatgatcaaaagaaccccgactacaagggatgatagaactgctaaacaacttcgacatcacatcacgtctggaatggccaaggcggcgatgccaagtgatggacgaggtagaagcggtcaacgcatgcgaggtggaggtcgaggaagaggaggaagacaggcgaagggtgtacaatggctcggagctgtcacaacgcgcgagaagagttctggcagcaaaatccttcacagacaagtcaaaagggtcaaactccatagaacaagagttatcaatggtaaattgacgaacggagagaagactctgaataatgttaggggcaacaagaatgtttctgaggcgaaagtggccgggaaggaccccatcacctgctga

SEQ ID NO: 21550 - DNA, 324 bp, Zea mays
  Peptide Sequence Number=SeqID_64925
atggaaggggcaaaaagcgaaggaggtggagaacactggtttcaaactttggtactcaggaacagtggcaaacaaaaatggagtaggttgggtctcaatgagagcgagaagaggaagttctggaaagacttagatggcatggttaaaaatgcgggttatgagctggctcatggaggttctaggtatggtagtaggaaccaagaagaggatattttggactttgttgtagcctacaacctagtgatagccaacactttctttagaaagagagattcacatttggtgacctttagcagtggcagagagtgttgtgccccaacataa

SEQ ID NO: 21551 - DNA, 462 bp, Zea mays
  Peptide Sequence Number=SeqID_64926
atgaaagatggatcagacactgatggggacagatggacagatcaggaaactttgctattgttggagggcatagaaaagttcaatgataactggaatcatatcgcaggtcatgttgggacaaaatcaaaagcacaatgtattcaccatttcattcgtctcccggtggcagatggtttgttagagaacattgaagtgccagaagcatcccttccatctggaatgcaaagctgtggatttttgcattcagattccaatggcagtacttcagttcatcataagcagagggtaaatgttagatacactacaacaagcgatgaggcaaccacgcctcaggaagtccttttcttttttcctgattgcagtgattaccgaaggatggatgagcatgatcagtatgagtcagttggtttagatgattcactagaggatgagaggaatcttgatgaaaccatggttgattga

SEQ ID NO: 21552 - DNA, 1032 bp, Zea mays
  Peptide Sequence Number=SeqID_64927
atggcgtctccgccccactcagtcgagtacaaggcccccctcccgcacatccaccgcatcttcgccaacggcacatccgccaccgagggcctggtccccgtcttccccacgctcaccttccccaaccactactccattgtcaccggcctctacccctcctcccacgacatcatcaacaactacttccccgatcccatctcgggggactacttcaccatgaaaaaccacgatcccaagtggtggctcggggagccgctctgggccaccgctgccgcccagggggtcctgtctgccacattcttctggtcgggttcggaggttacgaagggttcctggaactgccccgacaaatactgccgccactacaatggctcggtgccatttgaggagagggtcgacaccatccttggctattttgatctcccgcctaaccaaatgccacagttcctgacgctgggaatgtttgaggatgtgaacattatattggtaggtgaccatggtatggttgggacctgcgataggaagcttgtgtttctcgaagagttggctccatggatcgagttgaagtcagattgggttctgttaatgacgccattgctggcaatcaggtcgccagatggtgtgtcgccaactgagattgtggccaagatgaatgaggggcttggatctgggaaggtgaagaatggggaatatttgaagatgtacttaaaagaggagttgcctactcgcctgcattattcagagagttacaggatcccgccaatcatcgggctggttggggaagggtataagatcgagatgaagcgctccaagagaaatgagtgtggaggagcccatgggtacgacaatgccttcttctcaatgaggaccatatttgtcgcacatggacctcgttttcagggtggtagaactgtgccctcatttgagaatgtggagatatacaatgtcatggcttccattctcaatttgaagcctactccaaacaatggttcagcttctttccctggcacgattccgttgccgaacaaatga

SEQ ID NO: 21553 - DNA, 222 bp, Zea mays
  Peptide Sequence Number=SeqID_64928
atgtgcagagttggggctggggccggtcagcttgtcggtggtgggctagagctcgccggtgggcgggtgagggagagggaggcggcggcgggtaagggagcgggaggcggcggatcgcgggcactcggcaaagacgtctttgccgagtgccaattgacaggcactcgacaaaggcatatttcccgagtgccaacggacaagcactcggcaaagaggatgtga

SEQ ID NO: 21554 - DNA, 189 bp, Zea mays
  Peptide Sequence Number=SeqID_64929
atggctaacgaagttattaaaaagaatgggaaagaatctcacgacgcccgagaggaggcaaaacgagctaaagaagctactgaacgcaccatgattatagccggcctttcaccaccaccagagccgtacaaccccgaagttgacccggttatgaaagaagctttggatgtaatgaaaattgctaactaa

SEQ ID NO: 21555 - DNA, 870 bp, Zea mays
  Peptide Sequence Number=SeqID_64930
atgacttctcacggatcctcggacggagggaatgcacagtcccacatagacggacttgcacaagagggtttcccccgtatcttgtgggaggtacttcagggagctagttacacgacgcctccccagtacgcggtgcagctgttcgagaagcaccgagtgccccgctgtagggtgaggatgaccctagagcctcatcccctacagccaggatggcgttcgttggattccgagtctttcggataccgggctgaggatactatcgaggcgattgctcttcacggactgaccaccttctgtggtttccaccccttggagctgtccactcacccaattggtttgttcctcgcggagaaggaggacgacccaatgtggaaggaccgagtggagcatgccaaggatatatgggctatctacccaggtcaggctgctcacttgacggtgcggtgcatgaatgccctgtatcgtctacaagtgatgcgaggagaggcaatgtctcatctgatggcattgttggaggctaccaagatcaccttggataacagagaggaacttgtggtagacttgtccactgagatggtggaaaaagacctgcaagtggaacagatgtcaaatgagatccaagagcttaaggagctagtgggaaccagggagaacaccatcaaggttctcgaggatcagctaatcaacactcagcagcagcttgcggaggctaaccagcatctggatatgcaccaccaggagatccaggacatggaggccaacaaggatgtcgacatcgagggaggagaggagcctgcctccagcttggacactgctggctcagggataccaccttcccccgagtcgagcgttgcctcgtttgctcactag

SEQ ID NO: 21556 - DNA, 543 bp, Zea mays
  Peptide Sequence Number=SeqID_64931
atggcgaggcactccgtccccacacacatcaaccgtccccatcgattccctggcaacaaaaaggggctcaccgccttggcgtacaatgcctcactgaccccgactgccgtcgtgcaccttgggcgccataggaagctccgcctcgcccaaccccagggcttggactcaacctcgacgctggacgacggactccgcctcgcccgaccccagggctcggacacagcctcggcctcggaagacggcctccgcctcgcccgacccagggctcaggctcaacctcgacgctggacgacggactccgcctcgcccgaccccagggctcagacacagcctcggcctcggaagacggtatccgcctcgcccgacccagggctcggacacagcctcggcctcggaagacggtctccgcctcgcccgacccagggctcggactcaaccttggaagacggactcgacctcgacctcggaggagcctccgcctcgcccgacctagggctcggaccgaccacgtcacagggggggccatcattaccctacccctag

SEQ ID NO: 21557 - DNA, 408 bp, Zea mays
  Peptide Sequence Number=SeqID_64932
atggtcggttggcgtggcgatctggccaaggttgcttctctgcgaagactgggcctcgggcgagccgaaggggatagaacaagagcagaaacaaacctccacgtgttcgacgtgcactgcgctcgccagagcacgcccgacgcccgcccccgcatgccccacgtcgcgccaagccgggcaggcaccgtggcccgcgcccacgcctataaagccaccagaggcttcggccgtacacccccgcacgtgctcgacctcaccggagcactagatcaccggcgttgccacgcgcacggcatgcccgcggccacccgatcccccgccaccgtagaccggccagcagagcctctcccaaccccgtccgacccttggagtagaccctgcgtgcctcggtcgccggacttcgcctga

SEQ ID NO: 21558 - DNA, 420 bp, Zea mays
  Peptide Sequence Number=SeqID_64933
atgacatggctgcagcaggactcgatggtctgcgtgtgggcaaagcttcgacgtggtgctgcacagcacggcggcgagcagcgaagagaccaaagctccggcgatggaacatgcagctcggacgcagggaactcggcagcgggtactggcacgcgacggtgtcgaacagtggagacgatagcacaaactacatgcggtagtagcagccagcacgagcgatgggaaatggaggccacggcgagctctagaggtttggcgctggtatttataggtcggggaagagggagctcgagcagcgccgacatgccattaatgacaactctaactcccgcgagaaacgatcgagagaaaaaaaacggttgcgtcaatggggagaggaacgggctcggcgcaggcttgaattgctttgaaggccattag

SEQ ID NO: 21559 - DNA, 411 bp, Zea mays
  Peptide Sequence Number=SeqID_64934
atggtctgtgtgtgggcaaagcttcgacgtggtgctgcacagcacggcggcgagcagcgaagagaccaaagctccggcgatggaacatgcagctcggacgcagggaactcggcagcgggtactggcacgcgacggtgtcgaacagtggagacgatagcacaaactacatgcggtagtagcagccagcacgagcgatgggaaatggaggccacggcgagctctagaggtttggcgctggttccaaaggttcaactgttggaacttgctctcagcagcaaggaggccaacaagggtgaacagtggcgacaacagggttacgtgctctggggcaatagctctgttaatctcgcctctcacgggcactgtgcgggggtatttataggtatccaagtgcccagcgccttgtgttaa

SEQ ID NO: 21560 - DNA, 3066 bp, Zea mays
  Peptide Sequence Number=SeqID_64935
atgccgccggccgccgcctcgtctgaggagacgttgagtaacgtgatggtggaggagttgcgcgccggcgactctgttgatttcggtgtgtcacggatgacgtcagcccgcgttgaagatatgcagcggttgggctactttggcggcggagttgctcgtgctccggggacggaggaagtccccgagccggaggaagaggatggtgggggacggagttcccagttcgggtcatgcacattcacgccgaagaccggcaagaccacaatgccagtagtggagttggttccgtgcgcccgcaacaagtggggcaattggaatgaattttggttttacgttgctgagggtactgtcgaagaccatgagggactccccgtgtctgagatgtgctctcattattactctgcgtatccgccttttgaagtggcagaagaggatgcagacgaaggggcccttcggtgcgccgccggtcatagcagtgggcgtgatttagttgaagagttcgtggcttacagggtctggcccttggcgcacggctgggcgctgggcgaagtgtgccctcgccagatgccctttcacggaggaagggtggtgcgaagtcctgccttcgcactgaatttgcgaaaccgtgacccggccgcctttgtgcgtgatgcggaggacttggcggtacggctcgtgggacgttacgtgccgaggacggaaggccagcgcagctttgatatccgcgggtcaaatgaccgtttgaacagggtcttcgaactaaatcaactgccgtacgacggctaccctggtcaagacgaagcggaccgccgtgggaagaaaccggcggtggagactggaggcgaccctgcgctggcggccgccccctcctcaaaaaagagaaaattaggtactgcgatgggaggacttggggtgtctgatagttttgctagagagttaatgaggacgtgtgcggccccgggggaaaggatgtcttcgcccgagctccgggagtcttcggctcggatgctgaggagatggacaaggatcgccaaggggcggcgcaaaaacgccaggcgactgtcagggttcacgaagctcggccgaaaaggcagcggggaactgcgaaggctgcggcctccggcggaggcaagccaccgctggcggcgaaggcgggcgccttctgcacctagcaaggcgccggaggcaacggcgggcgccgggggctccaagctgacgaaggtggtgccgccggccagcggagtgacggaggcttcgaaggcggcccgaacgttgccgccgccgggcaaacgcgttgccgacttcggcaccgagattaatgtggacgattatcttggggggtcggacgagggccagcttgccatagttgcccctgccgtggcgatcgcgacggctgcgctagcgccgaaggcaaggggcgagacccttggcgccggaggcgaggtgtcggccctcgcgatggtcagggacgaggcgggcgtggcgacccgccggctgaagggagtgacggaggcgctaagtcaggcgacggaggcgctgagtcaggtggctgacttcaccagccgtactgcgtcgggggcccttacggcagccttgtctgccgaagtcgagagacttcggacgcaacatgctgatgctgtccgtgaaaaatcggcctccgacagcaagtgccgcaaattggcggacagggtggccgccctggagaaggagaaggctgacctccggcgccagctggcgggggagaggagggaggccaacgaagccatcgccaaagagcaggctgcgcaggcggaggccaggctggcgcgggcggagggcaatattgccaaggagctcgccggagagctgcaggggcggcttactgccttggagagccgcgcggagggggccgaggccgcgatgcgagcggaggccgaacggacgcgcacgcagctcatggctgcatatcgcgagctgggtgcgcggaccggtgacttcgaggtgccggagcgagaggccgggcttcgctgtctggaatgggtgcaggaggagctgcaggagctccccactgtcttggaggggttaatgtcgttcacctccctggtcacctgcgaggcggcgatgaacgcactctctcgcgaagggtgccggcactttgaggccctcgaccaggcagatgaagattttgggcgagatatctttgaggtcgaagaccccgtggtaaaggaatccgccagggccctctatggccggatgtggggttcgttcggtcgtgaggtggtcagggagcgggccgaggctgcgagggctcaggcggagcgcggcgagcgggtggacgacttcggggcactgaacagcgcgctgcctgacccggagacgacccccgcggaggccgcgactgaagtcgccctgggaccgaccccggagactgcgaaagacgcaccaggcacccccgcatctgctgcggccggcgaagacctgcccccaaaggtggccggaggcgcgcctgatgcccccgcagctgctgtgccgagcgctgaagatcccgcggcggtggtggcggaagcatcggcggaggcctcagcggaggctcccgcagcggcagggccttcgcaggttcaagattttgggcctgcgcacgcaaccgctactactgattttttggcggcttcgaccgcggaagatggaaatgaatgtggtgggtctgtatctgagctttttgattttattgactctgggagctcggttgagtggactgaggagtcgtcggaggaggacttggattattttgcggccttggacgtggctgcggcggaggctgcgccacacgctgcggacgcgccagacgtgccaggtcctagcaccgggcgccgacggcgaagggcggttgcaaagcgtagggttagtgcggaggaaggggctcggcttcgcgtgagtagggctggtcggcaggagctgctgtctttgccggccgccgcgggtgcaggggaaggggagctgcgaagtctttttgcgggtgaggagcttaggataatgttatttaattatagggagatgggaattattcctaaggttgagccaatgtag

SEQ ID NO: 21561 - DNA, 984 bp, Zea mays
  Peptide Sequence Number=SeqID_64936
atggctcgtcttagacacactgcacgtaagtcggtgattcctttcctgccgtctcgacttgcggagcgtcctctgcaccgcaccgtgtccggtcagtcgagtcacctggagaggctgcaccactgcctgcgtgaggagcaggagcgccggcgccagcacagagagcagcagggctcttcctcctcaccccagcaggaggtggagaccgtgaggccccgtccctctgttgcccagctggaggtgccccttgttccaccgcaggacgtcccggctgttggaggagttgttggaggagctacgggaggagaccccgacgacgacgactcagcccacagcacggagtcctctgagccgcaggaggcggaaggatgggtcgcccgacccatcacccgtgacgccgctcgcggttgtcacttccacgacgcactcgataccttgctgcgccaggctttcgaccggcacacctggtcgatcgagtatcgttgtgtagtctaccaacacagtcgcgggaggtacccggaccgctgggaggctacctgcctagttcgccgtccggaggatgacctccggggtgcggaggccgtttcggagcactattccatctccgagagggacactgcagaggcggctatgcaggatgcagcacgacgtgcactctctcagtactgttctttgttcggtggcgtggccgacggtcttaaccttcggtactacccctgccgccctactggcagcacagagaggttgagcagcacagtcaacctagtcgcagtgcttaacacggagctggatcactctctggacgagctaagcagggctcgaacggagattgcggagttgcgtgctgagttggcagagcgccatcaccaggagggtggttcccccgctcctgttgagactcagcacccataccgctcgccgccacgtggtcaccacacttatggttcccctgtctgtaagaccaggatagatttggatccttag

SEQ ID NO: 21562 - DNA, 711 bp, Zea mays
  Peptide Sequence Number=SeqID_64937
atggctgaaaggacaggcggcacctttggcaggcgaagcaggcgacgcttcacctccgccataatgaccgcgtcaaaaaagggaccgggaaaggggatactccgaaagggatccttctccgcgaaggaagcgggccccgagccccctactgatcagaggttcgaaggctggcccctcggaagggttaaacagccgcctcagagcactcgggcttcgagccccctactgatcagaggtttgaaggctggcccctcggaagggttcgacaaccgcctcaaagaactcgggctccgcgcccaccactggttagaggttcgaaggctggcccctcggagtggttcgacagccgcctcaagccactcgggctccacgcccactactgatcaggggttcgtaggctggcccccgaagggttcaacagccgcctcagagcacgcagagcgagggatgactctgggtacgtccgatacatggtcgaggctcgggctacgctcccgaggtaccctaggacatttccgagaccagcaggagcgattctgtaacggaatcccatcagagggaggcatcgagccctcggaccctatcgaacgggaccgagtccggcaaatcacctgcaggttgcagggtagtgaccaagtcttcataaccgcgaaggtagaagccatcctttctcgagttaaattaaggacaacctctaaccacaagatctaa

SEQ ID NO: 21563 - DNA, 345 bp, Zea mays
  Peptide Sequence Number=SeqID_64938
atggccggaaggagggatggccgcgtggcagccggagctagtgccctccaccgcggcagtcttatccggagcaaagaggtcttcgcggggagatgtttgccgcccgatcacctcgaccccggcgcaaatcgcggcgcggataggtcgtcggcggtgagaacttgcgctggcggtctaatcaccaatagagcactgtaccatgggagagttgcattcagacagcctgacagtcaattttggagcccaattctctctcaatttctaatgacaacccatgtcaagctctgcaaaaaaattgtagagcaatgtaccatataccatgttgcaatatggtgttgccactaa

SEQ ID NO: 21564 - DNA, 939 bp, Zea mays
  Peptide Sequence Number=SeqID_64939
atggcctcctcgggcgaagcaaaccactgggccatcaagaattgctcgccggtgctggggtggtcgtcactatgtcgcaaggaaaagatggtcatgtcaccatcgcaccgatcctggcaagagatgccttcctcgcactcggggagccaggacgttgtgtgccggcgaggcctcgtcgtgggggagtgcaccgtcaccctgctgactgtgaagaagaaggcgacgctgaggctggcgaggcaggagcttgaggatctctacctgggcgtgcccgacgactccgtcgatctcaccttcagggacttcgccttccaccctgcacccgccgccgctaaaacttccccggcggcagccgccgccgccaccaccaccagcaacttcttgccaaataatactgcggcaatagcagatcatgtaagtgtcgacggcgacgcggatgacgagcgcaaggcgacggcgggcgccttggccagatcgtccaccaccaacatcttcacctacagacctttggaggatcacgaagatgtcgccgccggcggcggcggcggtcttgctgccgccgtcggcagaggaggcctgcttcagctatcgccaattcctgcttctcctccaactccaacggcgcgcctcgcccatagcgacgacgacgacgaggactatgccgatcatcatcatcatcagtaccaccaccacccagctgctgctgctaatgcaggcaccactagtagtagcagatcaggtgctgccggcggccgcccgtctcggcgatcacacgtggctgatgatgccgtcggaggccgtgaacggcacgcggcttacagcagcaaccacaggcggccgggcataccgcactccagcatctgcgccctctgcaacaactacgtctacgtcttccgccatcgttgtctgtttgagatcgatagcggacatgtcaattag

SEQ ID NO: 21565 - DNA, 315 bp, Zea mays
  Peptide Sequence Number=SeqID_64940
atgtacgaggcgaaggagcgtgatgttcttgcatatataggcctggccaaaatcgaagtcctatccccaggcgcaattcacgggattcgatggcgcttgcgtcttgataacagaacccggaacggccggtcaaaaatcccgctgcagcgcccgccagcttcgcgcacagagttctggccggtgtcctccccgctcgacaccaagctagtgtggctggactgcggcgacaagcgtggtggcaaggacgcaaaggcgccaacaacaggcttcatcacagtgacacagcctggcgtggaggcgctggtggtggcctag

SEQ ID NO: 21566 - DNA, 270 bp, Zea mays
  Peptide Sequence Number=SeqID_64941
atggccggaaggagggatggccgcgtggcagccggagctagtgccctccaccgcggcagtcttatccggagcaaagaggtcttcgcggggagatgtttgccgcccgatcacctcgaccccggcgcaaatcgcggcgcggataggtcgtcggcgagccgaagtgaccgcagtcactttgccgctccactgaccgacctgacaggaaaacagcgccgcctgccccactccgactgttgtgccactcgacagagtgaggctgacagcagctaa

SEQ ID NO: 21567 - DNA, 2304 bp, Zea mays
  Peptide Sequence Number=SeqID_64942
atggcttcttctccacgcacagccatgttcttcctcgcgctgtccctggcgctactgggcgacgaccttcgccgctgctctgcctctcaggtgtacgtggtctacatgggcaaagcgccgcagggcgacagggcaccccgtcgacgacgacacgccgggctgcaccgccagatgctgacggctgttcacgacggcagctcggagaaggcgcaggcatcacacgtctacacttacagcgccggcttccagggcttcgcggccaaactgaacgaaaagcaggccatcagattagccgagatgcctggcgtcgtctcggtgttcccaaacacaaagaggcgactgcgcaccacccattcctgggatttcatgggcttgtccaccagtgcagagggtcaggtccctggactgtccaccgagaaccaggagaacgtcattgttggattcatcgatacaggaatctggccagaatcccctagtttcagtgaccacgggatgcctccggttcccaaaagatggagagggcaatgccaaggaggagacgcgaactcaccgtcaaatttcacctgcaacaggaaggtaataggaggcagatattacctcagcggataccaaacagaagagggtggcgccatcaagttcgtatctccaagggacagctcggggcatggcagccacactgcctcgatagcggccggaaggtttgtcagggacatgagctacggaggtggtctgggcaccggaggagggcggggaggagcccccatggcaaggattgcagcctacaaggcctgctgggaaactggctgctacgatgttgacattctcgcggcgttcgacgatgccatcagagacggcgtcgacattatatctgtgtcgctaggcccagactacccccagggcgactacctcagcgacgccatatccatcgggtcgttccacgcgacgagcaacgggatactggtcgtttcctcggcggggaacgccgggagacagggctcggcgactaacctcgcgccgtggatgctcacggtggctgcaggaacgactgacagatcgttctcttcgtatgtcagcctggcaaacggtacctccgtaatgggtgagagcctgagtacgtaccgcatggaaactcccgtcagaaccatcgcagcttcggaagtcaacgcaggctatttcaccccttaccagtccagcttgtgcctggatagctctttgaacaggaccaaggccaagggaaagatccttatctgccgccgtaaccaaggctcctccgagtcacgtctatcgacgagcatggttgtgaaggaagctggtgcggctgggatgatcctcatcgatgagatggaggatcatgtcgctaatcgctttgctgtgcctggagtaactgttgggaaagccatgggtgataaaattgtttcttatgtcaagagcacaaggcgtgcctgcacactgatcttgccggcaaagacggtcttagggctgcgagacgccccgcgagtagcggcgttctcttcgagaggtccgagctcactgacacctgagattctgaagccagatgttgctgctcctgggctgaacatcttggcggcgtggtctcctgccaagaacggtatgcgcttcaacgttctatctggaacttccatggcatgtccgcacgttacaggaatagcagctctcgtgaagagcgtgtatccgtcatggtctccttcaggcatcaaatcggcaatcatgacaacagcaaccgtactggacaccaaaaggaaaaccatagcaagggaccccaatgggggggctgcaacgccgtttgactttggctcgggttttatggaccccgtcaaagctctcagcccagggatcatcttcgatacacatcctgaagactacaagtcattcttatgtgccataataagccgcgatgaccactccgtgcatctaatcaccggagacaacagtagctgcacccacagagcctcctcttctgccactgctctgaactacccgtcgatcaccgttccgtatctgaagcagagctattcggtgacgcgaacaatgactaatgtgggcaatccaaggagtacttaccatgctgtggtgtcagctccgccaggaaccagcgtgagagtgacaccagaagtcataaatttcaagagctatggtgaaaagaggatgttcgcagttagcttacacgtggatgtgcctcctcgaggttacgtttttggctctttgtcttggcatggaaatggaagtgatgctcgcgtgacgatgccgctggtagtgaaactacagacttctggcaaggcctga

SEQ ID NO: 21568 - DNA, 1344 bp, Zea mays
  Peptide Sequence Number=SeqID_64943
atggcggcccgccctttcacccgctggtctgggcgaaagtggagggatgctcgtaaccgctgggcagttgcacgcaccgcgcgcggcgtccttccgccttatcgttggaggaacgcaacttcgcggaagttggtacctttcagccatcgtttggcttcaaggattttcatcagccagcccggccgcatcccctcgccggtggtcacccaagacggtgaccaccagctcctgggtggggagaagcaagccgggctgcggcctctgccctccctcagcttcaaggatgttcatcatcagtgctggggaggggagtgcgccgagttggaatcggtctccgcgcgggcaacggcccgctccttccctcagcgatcggggggaagggcgttcgccgttcgtggtgctggcagctgccgcgtgtccggctctccggcccgagcggcttcggcgccgcttccggtgccaccttccgccatggcagccggaagaggtttctccgccgacgagatagtcggtgccgcccgcggactgaccttcaactctacggccttctgctcgtcctcgcccctcgagtggggacgtgggcgtgggccttacggcagcagcatccgccctgaggtcatcgctgctgctgttcggccgctcggagcagaagtcgtcgggccttctgttgctccgcaggccctccaatcgtggggggttgagtccctcggctcggtcggccttgccgcccgaggcttctcttgcttagttaaaggaaaccctcggccactctttgatgagccgaagccggaggcagcggtgtcagcacggacagaggcggagttggctcgaaaagaagacttcgtcggccggagcctggccgggccgtccactggcgggaccgacgccggagtcgagttgctgaggccacgagccgggctgatgtcctcgggggacagctggctgaggcttcggggtggccggccgagctgtctgctcgagccggattcctggagaagaccctggcggcgatggcccgggcgcgatgctgacgtcgtccttcggagtggagatcctccgaccgcgttgtcgtccgaggctcggtcggactttgccgaaggtgtagttgacgtcgagggtgctgctgctccccctccgtcaaggcgtgaagacttgttcggtccgcggaatcacttatccgagcgtgagttacttatcgcagaaggcgttgctgtagacctcgccttgactgttggccagcttgtacgtcccgggcttcagaactttggcgatgacgaacggcccttcccagggaggcgtgagcatgtgccgccctcgggcgtcttgccgcagccgaagcactaa

SEQ ID NO: 21569 - DNA, 654 bp, Zea mays
  Peptide Sequence Number=SeqID_64944
atggccccagggcaaacgctaccgctggaaggccctcgttcacgtcccctcatgggggacgagaaccagccattaaagccaaagagttggaggcccggagtgcaagtggcactgactgtctcatcagccggggcaaccgctttagcagaagcaacctcctctggcgaccaccacctcagcaccgacgacagcggccacctgcccaccaacaccgcaccatcgagcggcggccgccccaaagcgcaccggcagccgaaatccgcgcgtgatggtgtttccgccctcctcgcggactctaccttcctggagcataaaacccgccgtgatcccttgccccgcctaacccaagcccctagccagctccatcgcgtgggaaccgcgggtatcgatggtgaaaccacatggggagattcaccaccggtgtgttccgcgcgtacgccgccgcggaacctcgcctgggatgtcgttcgggcctcggggactcgactagggtggagcatggtgcgcatggatggtgctgtgggcacccttcaagcatatggagccggggtaagtcacaattcctcgtcggtgtactacaccgcctcaaattcgcacttcaccgtggccaaggcgtatgaatggacgattcgtggtttgtcatccaccctctag

SEQ ID NO: 21570 - DNA, 504 bp, Zea mays
  Peptide Sequence Number=SeqID_64945
atggggagcaccagcgttgctttcgtcttgccgttgttggaagagcgcgacttcgtgggggttggcgcccttcagccatcgctcggcttcaaggattttcatcatgcagcccggctgcattccctcaccaatgaagcaagccgggctgcggcctctgccccgccctcagcttcaaggatcttcatcatccttgttgtggcggagggcgagttgagccggggaggggggcgcaccgagttgggccctgcctccgcgtgggctggcgacccgcttcttcctccggcattcaggggagaagggcatactccagctctgcggaggaggcgtcctccagccatgcgggggaaggcgaactgctacttcgtggatagggtgcaactgtccgtcctccacccgggcgacggccgtgccgcgcgcaggccggctacgtccaggtcctccctgcgctgtcggctgcacaacacgtcgcacgccgcgagggtggttgtcacacccgggttttag

SEQ ID NO: 21571 - DNA, 729 bp, Zea mays
  Peptide Sequence Number=SeqID_64946
atgtcgtggcttgcccgcgctgtggtagggctcgcctaccagcctgtggacggccgaggacgcgcctggagccaccaggggccgcccgccagccgcactagcgacctgtgcaggagcataggccccagtaaccgcgccatgccgaggagcttgccgggctatgccttgcagccccctcccccgcgacttcgttggaggccggaccgagcacgcgccggggccgggcggcctcgcttcacccgccgctctggccagtccgcgcccttgccagggctcttagacgaagccgctcgcccgctccaaggccgagccgtgggccggcctgcagccggccgcatccgccgctgttgggaccggtgcagcgcccgtcgggggctcgccccatgggcgccccgcgcccgtgaggccgtgaccgcgccgctgagccggcgtctaggggctcgtgcccgcggccgggtcgtgtccgagcgcgcccgcgtcggagcgctcgggcagtcaccagggacgtgccacagggcctccagggggctaggccgcccatgccctacctgcgtcgggccgggttggccgcgccgaggccggcttcgccgagcgcgtgcctcgaaccgcgtctgcgacggtttggtgtcggccggtcgtgctccagtccagacgtcgttgccggagatcggacaacgtcatcggcgccacaaatttcttcacgcaaatgaacgcgaagatgagcagtag

SEQ ID NO: 21572 - DNA, 654 bp, Zea mays
  Peptide Sequence Number=SeqID_64947
atgggatcaggcctctcaagcagccaccaccggagcagcggcgcgtcgtcgtcgcttcaccagccaccggcggcggccccggccctggtcgtcgcggccgacggctcgctgcgggagttcgtcacgccggcggcggcgccgctccttctccccgtctccgtctccgacgtgctgggcgcgaatgcggacgacgacggcggccggtacttcgtgtgcagctccagcgcgctctacttcgagaccgacgtcccggcgctcggcgccagcgagctgctccggccggggcaggtctacttcgtcctccccgcggccatgctcggcaggccgctctcgggcgccgacatggccgcgctggccgtgcgcgccagccaggcgctggcggcgggagcgaggccgccgcgtggcgggcgacgccctcgcgggtccaccagggcgcgcgtcgtgccggcggcggcggcgcaccacgcgcacgcgcacggcgacgaggaggctgtcaacgagaagctcaaccagaggactcttggcggcttcgagacggctcctccacgtggtccggccaggaagcccgctgtcgcggcgcgaccggccccgcctgtgactgtgactgtgactgagaggagggcgctcagcaccatcgaagagggtgccgagtga

SEQ ID NO: 21573 - DNA, 3078 bp, Zea mays
  Peptide Sequence Number=SeqID_64948
atggaagttcatgttggatcaattgatgaggaggaggacgagcagggaattgcacatatgattgaacatgttgcgtttcttggcagtaaaaaacgtgaaaaaattttggggaccggtgcgaggtctaatgcatataccgacttccatcatacggtgttccatatccactctccaactaaaacaaaggaatatggtgaagacttacttccttttgtgctggatgcattgagtgagttgttgcaacatctgcactcagaaaacaaactgagcaacagatttcctattggacttgaagagcaaatacataaatgggatcctgataagatccgcagatttcacgagcgttggtactaccctgcaaatgccactttatatctggtgggggaaattgatgatattcctagagctgtgcgggaaatagaggcggtatttgaacacactctttcagaaaatgaaggaaatcctgtaccgagcgctaatccatttggtgctatggcaagcctttttgcaccaaagctcccaggtggttttacttcaaacctaactggtgaaaaatcacctgccacagataaaataaagcctgcaaaaagggaaagacaagcagttaggccacctgtagagcataagtggtcccttcctggagttgctcaggatgccaaacccccagcaatttttcaacacgagttgattcagagtttctctatcaacatgttctgcaagatacctgttagcaaagttcagagctacaaggacctgcgcagtgtactcatgaaaaggatatttttgtctgccctacattttcgaatcaatacaagatacaagagctcaaaccctccttttacttcagttgagctggaccacagtgactctggaagggaagggtgcacggtcactactctcacagtaaccgctgaaccccaaaattggagaagtgcaatcaaagtcgctgttcatgaggtgcgaagactgaaagaatttggtgttacaatgggagaaatgacccgttacatggatgcactgataaaagatagtgagcagctggctatgatgattgacagtgttccctcagttgacaacttggacttcatcatggagagtgatgcacttggccacactgtcatggatcagttgcagggacatgaaagtttgcttgcagttgctgaaactgtcacccttgaagaggtcaacactgttggcgcggaagtattggagttcatttcagattttggaaaactcaatgctccccttcctgctgctattgtggcatgtgtcccccaaaaggtgcatgttgatggcgcaggtgaaactgaattcgagatatatccagaagaaatcactgaggctatcaaggcaggtcttgaggaacctatttaccgagagcccgagcttgaggtgccaaaggaattgattactcaatcagagctcgatgacctgaaatctcaatgcaatccttcatttgttcctttaaccaaagaggagaatgcggtgaaagtgtttgacagtgaaactggtatagcacaacgccgtctttctaatggaatttccatcaactacaagataacacaaaatgaagctagggttggtgtcatgcggctcatagtagggggagggagagcaacggaagattctgaatcaaagggatctgtcattgttggtgttcgtaccctgagtgaaggtggctgcgttggtaacttttctagggaacaggttgaacttttctgcgtcaataaccttatcaactgttcactggaatcgaatgaggaattcatatttatggaatttagatttgctttaagagacaatggcatgcgagctgctttccaacttcttcatatggtccttgagcataatgtatggctagaagatgcatttaatagagcaactcagttgtatttgtcttactatcgctctatccccaaaagtttggagcgttctacagctcataagcttatgttagccatgctaaaccatgatgaaaggttcgtagagccgtcaccacattcactgcagaagttgactcttcagtcagttaaaaatgctgtcatgaaccagtttgtgggtggcaacatggaggtcagtattgttggtgatttcactgaagaagaagtagaatcttgtgttcttgattatcttgggaccgtgagggcttcgagttctctaaacacagaggagcgtattgagaagatttccttccgaccatttccatcagatgttcatttccagcaagtatacataaaggacacagatgagagagcctgtgcgtatattgcaggccctgctcctaaccgttgggggttcactactgaaggaaatgacctatttaatgtcattcggatatctgatgctgatgcagaagtatctgaaccagtgagcttggatctaacagggaagagacacgttgatgttcgcagccacccccttttctttggcatcactttgagtctgcttgctgaaattattaattctagattattacaatgcttcttcaaatatgtcaaatgcaatagattgcatatcatctatgcacctttgataggcgggctatttacaacagttcgagattccatgggattaacatatgatgtttcttttgaattaaacctttttgacaaattgggtcttggttggtatgtaatcgcggtcacttcaactcccagcaaggtccataaagctgttgatgcctgcaaaggtgttctgagaggattacatagtagtcgaattgtggaaagggagcttgaccgggcaaagaggacgctgttgatgaaacatgaggctgagacaaagacaaacgcgtactggcttggtttgctagcccatctacaatcttcatctgtaccaagaaaggatgtatcatgcatcagggaattgacgacattatatgaaagtgccacaattgaggatctgtatcttgcatatgagcatctgaaagttgatgattcttctttgtttgcttgcattggaattgctggcgctgaatctggtgaagatacaaatgatgatgagcttgatgtggatcttcatggcatggctcccatgggaggccggggtctttcaacaatgaccagaccaaccacatga

SEQ ID NO: 21574 - DNA, 882 bp, Zea mays
  Peptide Sequence Number=SeqID_64949
atggcctcggcctcattccagcccgtcgcggcgtcggcggcctccgcgccgccgcgcccggccccgcgccaccccttcgcagccgctgccgccgcgcgccgctcctctctctcgttacgccccgccgcgcaccgtcccgttatcccgctccgctcctccgccgtcgcggctaacaccctccgcgccacgcaccgccgtgccgtctcggcgaggtcgaggagacgcgcgcaagggctcggcgcggcgcccgcgttggctgcgtcgacctggggcggcggtgacaagggaggttgcctctcttgcttccccaagagtaggcggggcaggtcggggctcgcgccttgcgcgctcccgcacgcgtcgggactatcgtttcgcagccggttgagcgggtcgaaggtggtcaggcctagccatatattgcacgccgctggtcctgatgaaccacatgttgcaagtccaacatggtccgatacttcccttgatacaactgacatggatcatgctattagtaaggaggagcttgaagatgtcctcaacactccgcttcccgagcatccgaagctaattcgtggtcaattgaagaatggcctccggtatcttatcttaccaaataaagttccagcaaacagtcacaacgggggcactacacacgatgagactggagtagaggccgaaggtaggagccgacgggttgaaatccccccgcagtcgcagagtcgtgagggtgcgaatgttgcggctggagaagagaccggtgtggattctgagaaggcgatagcccccggatgccgagttagccgaagtcgaggtggccgaggtcggaagacgcagagcaggaaactgttcttcgggagggggtcgacgttcgagcatcaatga

SEQ ID NO: 21575 - DNA, 999 bp, Zea mays
  Peptide Sequence Number=SeqID_64950
atgggagacgacgagacagagggagcggaggaacagtggagaatggttttccaacaaaaggtccaactgtttaacagcgcgaaaaattacccagtggcggggatccaacggatcagtctttctgctcaaaatgtgggttttattcttcaatcaatcattgtaggttttgcggatgctttcaaagtgattcaattgtcctcaaggggttttcaatcctctgtcttctccaagaatgtgggtttctcgatctataagctgagatcggtggattgcgaatttttcaaagcatactttcatccctggaataatgatgaccctaattgggaatttaaaaagctctcttatgctgatgcggttcattttaatattctaactggggctaattctattcctatcaagattaagaatggctttggctcatctaaagaagtggcttcacctcgtgagtcagagccaaagccgttttttgagaagccagagccctgccaaaggggcccttgtcggcataatgcggttcatcatctttctcagacgagatttaattttcgatcatctaatgaggcaaagtcttccaatcaggctaaatttacggatcctctaaattcaaatattcgaatagctaatgggcctaattcttcaggcaagttggttggttcccctcaacgtttcatgcagagtaccaggttgatttggaggcccaagaaaaatcttagcccacaaatgagtggcgcggaacagtgtcgatggtcggggattttctctttgcgtaaacagcagggtcaacctatttttggaaagcaatgtgggcattatcaatcaagcggtaattggtttctctcaaaaagagtccataatatggatatttccttcattaccacattttcagacaagttcaaaaatgtcaagtgggaatctcctccggaaacttggtttcgctccaagttgaagcatatgactagtgggccaccgatattcacttcccttaaagaactattctag

SEQ ID NO: 21576 - DNA, 234 bp, Zea mays
  Peptide Sequence Number=SeqID_64951
atggaggtggaatatgatatgctagaagatcaagatattcaagtccctatagttttggctccacctgctgtccctcctgaggttaacattgaggctgagcacgatcaagatagaggcatggttgaaatggaaccaggagtcaacatgcaggatcctaacaatatagggccccaggttgttgatcatctacatgttgcctccatgcagtggcaggggtccacttcatggatatga

SEQ ID NO: 21577 - DNA, 1314 bp, Zea mays
  Peptide Sequence Number=SeqID_64952
atgtcgcaacagcaaggtgtggaggagccgccgccggcaccgctgccggcggcggaaggcgaggcacaaccggccgccgatatccccatgagcgaggccgcggaggtggaggatgaggaggaggaacccgtcgtgggggagggggaggacggtgcagacggggccgccgacgccgtcgattccgtcaatgcttcagcgaaacccgaagcagagggcgcggaggaggaggggggcagcgacaggaaggagcggaatggtggcccgacggcggatttggttggcgaggttgtgaagttggagaatggggacgggcctgtgacggtgggcggctcggtggacgagggtcgaggtggagatggcggtgacgacaaaggcctggctggtcagaatcagcctgctgtgaaccagcttttgctggcgccggctgaggaggatctggcattgtccaagatctcagataattccttcatgttcgattacaccactggtggcgatgactcggggactgaggaggagcaggctgccttcatgaaggagctcgagcgtttccacagggagaaaatgttggagttcaagcctccgaagttttatggcgaaggattgaattgcctcaagacatgcacaactgtttcatggactttccgtaacttctatgagaaggcactccttgaatacgagaaacacaaaatcgaaacaggagagttccaagtagcttcatctgctctaccagaccggtttggttctgagagtcaggtgggtggaagccatgtatctggttctggaagagccagaagagaatctgcaactcgtgcaatgcaaggttggcattctcagcgcctactagggaatggtgaaatcgctgaccctataattaaggataaagggcatattgtcttaaagaaggataaaactcctaaaagcagtggttctgccaagaggaaaaggacactatccctggaagatgacagggtgataccttataaatctgatcagctacacagaaatgactcgatggttattgacatgggcccccctgctgattgggtgaaaataaatgttaggaaaactaaagattgctatgaagtctatgcgttggttcctggccttctgagggaagaggtacatgttcagtccgacccagctggtcgtttgatagttactggagagcctgagcaattggataacccatggggtgtcactccattcaagaaggtcattagtttgccttcccgcattgaccctcaccaaacctccgcagttgtcaccctccatgggcagctatttgtgcgtgcaccatttgaacaatcaaaataa

SEQ ID NO: 21578 - DNA, 477 bp, Zea mays
  Peptide Sequence Number=SeqID_64953
atggattcttcatgtggacggcaaccgagtccgcgctcggctcccagtcgggaacggagggccccggcggatgggctctccaccatcgcggcggttgcgcgtaccccctctccgcctcccgccgatgcaacaagcgggcggcgcgaatcccgggggaacgggccggcgcggaggtcttcgtctcccgcggcgaagcggacgcaggagcagcgccgcgcgggcgccgcctctgcgactgcgacacagcgtaagccgcctgtccccaccaggccctgtggccgcgcgtcgccgcggcgtgggcagcaggcgcctcccgagccggcgcagccacgcgagcctgaggatagtgcatctccgccgccggtgcaaccagaggagaatgccgggtccacgaccaccgcggttgccggcgacggtgaggggaaggagtcgctggacaaccctttggtggccatggagtgcttcatcttcctgtag

SEQ ID NO: 21579 - DNA, 477 bp, Zea mays
  Peptide Sequence Number=SeqID_64954
atggcattggcatccaccgatgtcgcggaaccccaggatcgaaaagggtcgccaccggaaagctgcggcgcaagcgcaacgaggaaattgccgggcctgatgggctcggcgtcactggcgcatgtcggcacgcgagtgcccttttcccccacaccgtctggatcgcggaactgccactgctgggggctgggcgtctgcctggctcgccgcacctgcacggccgcaccgcacccggccacccagcctgcaacacctgcaaaggcgcaacgcaaaggctgggggcgtggggcgagtggcgggcaaaagcgcagcggcctcgcttcgctgcctgcacgccggccgcatcggggccggcgatgcgtcgtctccttggcccactgcttcggtcctggtgatcgtcggctccggccggtgcgatctgctccgcctgccgcgcgcgcggtggaagctgccgaccggatgaaaacgtctcggtag

SEQ ID NO: 21580 - DNA, 375 bp, Zea mays
  Peptide Sequence Number=SeqID_64955
atgaatttgtcaaagaaaaaggcgggcggccacgagctaatcgtcactgcagaaatgccagatggtttccagccagtctcccttgttgctcgcctcccctacctaacctctactgcctcgctgcctttgcttttgcgcatatgcgacgagcagacggaggccctcgccgtgacgctgcctaccgaggagcaaatggcggccaccctgaagctcaggatcctcatcgtggcggccgccgtcgccgcgtccctggtcggcacggcctcagcggccgagggaccggcgcccgctccgacgtccgccgccgcgtccatggccgcgccggccgttgccgctgcgtccttcaccgcgcttgtcttcggctacctcttctga

SEQ ID NO: 21581 - DNA, 162 bp, Zea mays
  Peptide Sequence Number=SeqID_64956
atggccgccccgcgaaccgcacgcctcgtcgcattaactccgcggcacgacaggcggcgcccctggcaggagaagcaagcgacgcttcgccttcgccataatgaccgcgtcaaaaaagggactgggaaagggggataccccgaaaaggatccttccccgtga

SEQ ID NO: 21582 - DNA, 288 bp, Zea mays
  Peptide Sequence Number=SeqID_64957
atgggttgctgcatcagcaagaagtgcgacgagccgccgggcacggcggctggggaagtttcccggcgtcggtcggaggcgcgcgacccgccgccgcccccgccggaggaggagacggtgaaggaggtcctctcggagaccccgaaggccaagccgaggcccagtccgaggcgcgtggctgcgtcggcggggaaagaagcaggggagatgggggccaatgcgaagcttggcactgctagggcgaaggattgtggtggtggtggcggcggcggcaaggcgcgtcggccg

SEQ ID NO: 21583 - DNA, 210 bp, Zea mays
  Peptide Sequence Number=SeqID_64958
atgccactatgtcgaagctttatggatgatagcttcagcattgcttttgagaggatctgccgaaggttagacagagatcattgtgtcatcgttctaatggccttgctcgagataaacttgaagaagagagttttgactagttcgaagagaactcctacgtccaatatagtgatgaagactttgttgctagctttgggtgttacaaggtag

SEQ ID NO: 21584 - DNA, 765 bp, Zea mays
  Peptide Sequence Number=SeqID_64959
atggcggggaagcacgggcgcaacggcttcgacgacgacaacgtcaaccctttcgcgaacactcgtgggaggggctgcttaactacagatctgtgccgctgtgcgtgcccatgtcagggaggaagtgttccacctgccaccaattctcgtctctcacctctatcacatgaaccggctgatttctacaatgtggacattcctctcgactcatcaaaggatctgaagaaaaaggagaaagaactccaggctatggaggctgagctaaacaaaagagaacgggaattgaaaaggaaggaagaggcggcatcccgagctggcgttgtgatagaagagaaaaactggcctccctttttccccctcatccaccacgacatttccaatgaaatacctatccatctacaaaggatgcagtaccttgcattctcatcattcttgggtgagcttttaagtgttcaaaatgtgttgcaactacaacagcatggattaaaggggaagattcatataatattctgtgtgtgggcagctgtggctcctccattccctttcaaaggaaaatctttggctgggattttaccagcaattgatgtcataagcaagaatgctattgtcgggatattttacttcgttggatttggcttgttctgccttgaatcacttctgagcatcggtgtcattcagcaagtctacatgtatttccgtggaagtggaaaagctgcagagatgaaacgtgaggcagcacgtagtgctctaagttcagccttctga

SEQ ID NO: 21585 - DNA, 462 bp, Zea mays
  Peptide Sequence Number=SeqID_64960
atgacgcgcccgctacgccgtctccaccgccgcctgctcgccggaacgtgccgccgcgctccaccgccgcctgctcgccccgcgcgcccgcctgctcgccgcgcgcccgcctgctcggccgacgcccgcctgctcggccccccgccgcccggtcgccgcgcgccctcttgctcggccgcgcgcccgcttgctcggccgcgcgcccgcctgctctccgcgcgcccgcctgctcgccgcgcgcccgactgctcgctccaccgacgctcgctcaccgcgcgcccgcctgctcggccggcgcccgctcgctccaccgccgcctgctcgtccgccggcgtgcccgtctgctcggccgcctccccgccgccgggtgctcagccgccccacatcccgtcgtctccgttccgccccgcccgctactcgcccgttccggctccgccagtctacgaaccggaagcaagataa

SEQ ID NO: 21586 - DNA, 2673 bp, Zea mays
  Peptide Sequence Number=SeqID_64961
atggctgacgagttcacgcctcgcccgagggcctcctcaggcagcgggcgccccctcggctctcccgaggcccaactcgagcaggcttcgttcctcgggcgcaacaggaagctccgcctcgcccgacctcatgctccggcctcgggcgcaacaggaagctccgcctcgcccgacctcatgctccggcctcgggaggagcctgctcaggctacaaggaacaagaccggcgtcccatctggcttaccccgacgacgggtaatgatggtgccccgcgtgcaccatgacgccggtggctctcagccccttacgacagcaaggagacgtcagcaggatcctcgccgcgctgacagctgtgctcctacaagactcaggcgctcctccgacggccacgccatcacatgtacagggcccaagctctccaccaacggccacgttggcatccgccgcaccacctccctctccatcgccagtaccccagcctcgcctccgtcgcctatggggcgacagcctaagccgcccgcgtccccatccccaccgccgtgcccgccctcggactcggacccggacccaggcagcggcttcgaccccatcgaggagtggctcgtggacttcgacccggccatgtcgagcgagctagaggcaaagggccccgaactcgctgagcaagcggcggcggttccgcttacgctggagacggcggcgcaaaagagcttcgagctcgagtttggtgtgaaggaccagaaggtcgaggtggtgagcagcgaattggacgggctgcttgccccggatcagcttctggtgtctgggatcggcgatttggccgtgagagaggatattccagaggaagcggttgctatgaagatggctgccacaccgcctgcagctgctgatactgatatgaataccactgtatccgttgaagtggaatcggaaggtggcaaagaagggcaggaggcaccggccgcacctgctgatgctgagatgatgaataccatggtgtccgtggaagtggaagctcaaggtggcaaggaagggcaggagagcagcgatgaagagtcggaatcagagagtagcgaggatgatgacgagctgtcatccagcgaggattcctcaagcagcgaggacgagaaagagcagggggtcaacaaggatgaggaatcaagtgaagcctcaagcagcgaagaggaagggctggaagttaggaggcatggtggtaaggctgataacctgcagagcctcctcgaggaaggcgagttgatgatggggagcgatgtggagaatgaggaacaaaagggaggcaccaagtccaaatatgaagcagagataatgggtgaaagagtaattgttgaaggttcagtccaacacaaccccctgaatgagggttcaattctctggataacagaaagtaggatgccgcttggtatagttgatgagttgtttggacctgttaagaacccgtactaccttgtgcggtacaactctgaggaagaggtacctgctgggatcagtgcaggaaccgatgtctgttttgtagcggagtttgcagaccacatcctgaatatgaaggagctctatgcaaaaggctatgatgaatctgattctgtagacaaagatgcagaagatttacctgatttctctgatgatgaaaaggaggctgagtacaaacggtcattacgtcaagcaaaaaggcagactgatagacagcacgagcctatgaagacttcttgttacatgaagggatcacagcctagaggtagcggaatacggaagcccatgccgccaaggaacctggatacatcaacacgaggtcatcagccacaacctcattttcgccgctcagatatggctcctgcaggtactgaaaatacagcacgttcattgggtcctcaaaatgcacctatgattgctccaacaatgttgcagcctggcccaatgaaccctgctgtgccaccacctgttcctcttgcaaatcagatgggtggctgcttcatgaacctggcacagcagcagctcttaccgcagcagcctaatatggtttggcctggtggatttccacagcctcctcttcccaacatgggggtagatggagctgcactcgccgccaacatcatgcagaacctcctcgcaggagccagccaattccagcatcagtttcagaacctgaacttcagtggcgcaggagccaaccagttcccgcagcagtttcagaaccagaacttcagtggcggcacaggagccaaccagttcccgcagcagtttcagaaccagaacttgagtggcccagggaccaaccaattccagcagcagtttccgaaccagaacttcagtggcttcccaaaccaaatgcccatgccctttcttcagaccatgcaccagaccggaatgcctgcaaatccaatgccgttcggtggcagaccaccagcgaaccctccatctggtccagcgtctattgcccctatggggcaaggcaactttggtcagcctccaaatccacaaggatttacgattccggcgccacccggtgaagatgggaaacaaggctcgcctccgcagttcagttccaggcagtttcatcaagggagctcgtcatcctttggccggggaaggacgcagcaccgcggtggccggcattcctatggcagaggtggcagaggcggccggcaccccagatag

SEQ ID NO: 21587 - DNA, 906 bp, Zea mays
  Peptide Sequence Number=SeqID_64962
atgccgtggagtattgtgtttggtgattatgatattaacagcatttatgatgatgccatgtggccttttttgtttgagaagattaacaagaccaggtttgttttctctggtgaaagtgtgccagcaaaagagcgtgttctgttatttgctaaccacaggaccgaggttgactggatgtacttatgggattttgcattgaggaaaggccgcttgcagtgcatcaagtatatccttaagaaaagtttgatgaagttacctgttttcaactgggcatttcacattattgagtttattccggtagagagaaagtgggagattgatgaagcaataatccgaagcaggctttctgaatttaagaacccaaaggatcccctttggctggcagttttcccagaaggcactgattatactgagaagaagtgtatcaaaagtcaagaatatgcagcagagcatgtgtacgacatcacgatcgcctacaaacaccggccgccgacatttctggacaacgtctacggcgtgggtccttcggaagtccacatccacatcagcagcatccaggtctccgacataccggcgtccgaagacggggtggctggctggctggtggagcggttcaggctcaaggacgagctgctgtccggcttctccgcgctgggccacttccccgacgaagggaccgccgagggggacctgtcgacggccgagtgcctcgcgaacttcgcggccgtggtcgccgtcacgggcctgctcgcgtacctgaccctgttctcgtccgtgtggttcaagctcttcgtggcgttcagctgctcgtctctcacgctcgctacgtgctactctgtacatctgccccagatggtaggttttggctcaggtacccctgcgagcatccacgcgaaggaggcttga

SEQ ID NO: 21588 - DNA, 405 bp, Zea mays
  Peptide Sequence Number=SeqID_64963
atggctaggaacatcttccccaaacgcgcggcggcccgagcggcgctgcccgcggcgtcgcggcggcgacatggcggcgatgagccatacggccaattgagcccccaaaccacacaccagacgccccaacgcgaagaggagaacaaggcgaatcctatggttagcggctcacctccaatcggcggtcaaggcgagctggccacggtatgcggcggctccacggtgaagaccgaacaccggcgagcaattgctcgatcctcgcttgctccatcggcttccttgatccatagacacgcacccagggtcctgatgactccccaggccacaaataaaagccctagcaatccagcagatgagctacccgcgatggcgcgcagatctgcagcgcttggtgacttccggtga

SEQ ID NO: 21589 - DNA, 426 bp, Zea mays
  Peptide Sequence Number=SeqID_64964
atggacaagaacaacaagcgcaagcgtgagccgactcctccatcagaggactttggcgactcagaatactcagaggaggagttctcctctgagtctgaggggtctctggctcccgtctctcccccagcgtcgtccgatgactcggacgactctcaggggattgccgcggaggtctggacttacatccgggccgtcgagcgctccgggctcgagggctcggatgagtcggagtactcctcggacgaggaggactcgtccgaggagggcggcgagggtgacgacgacgacgacggaggcgacggcagcgacgacggtgacagcggcaacaggggcggcaacggcggcggcaggagcggcgacggcggcagcaacaggggcagtggcggcggcggcagcagcaagggcagcaacaaggccagtggctaa

SEQ ID NO: 21590 - DNA, 585 bp, Zea mays
  Peptide Sequence Number=SeqID_64965
atgaagatggtttcccccaagttgctgagagcatgcacagttcgcctcggaatcaggagccaaccagagtatgatggtcatgaattcgtcaagcatggcacaaagaagtgtgtcgtgactgtatacattggatccagtctgcaccatgtggaatggagtgtcactgttgctgggcacagattcaaagacacctgccaagtcgtcgcccgcaaggcattgagggccctgtgtcagatctatgaagaagaagtggccgacaccccgctcagatttttccgccatttcagagagtccgttccgtttggttggccaggatgcgtgccttggaagatgattgcccgagcagaagatgcagagaagctcaaccgtcagctccatgttgatctcacctcagctcaagcccgtgcaactgccttggaaagtcgtgaagtcattgctgttcaagccctgaagcaagccaaggatgagcatatccagaagttgatggaggcctacttggtaacccataaccaacatagagccctgcggatccaagagcccgcttcatccaacccagttcaacccatgagagctgaagatccctag

SEQ ID NO: 21591 - DNA, 132 bp, Zea mays
  Peptide Sequence Number=SeqID_64966
atgggaggagaggagccggcggccaggaaggaagcgctctgcgcacgtacaggaaaaacagagggaagagacgtgggggaaaatggagaggggcgctggcttcttgctgctggagagaatagagcgaaatag

SEQ ID NO: 21592 - DNA, 486 bp, Zea mays
  Peptide Sequence Number=SeqID_64967
atgatgaccgcgtcaaaaaagggttcggcaaccgcccagagcactcgggctcctagccctttactgatcaggggttcgaaggctggcccctcgaaagggttcgacagccgccccagagcacgcagagtcagggatgaccttgggtacgtccgttacatggccgaggctcgggctacgctcccgaggtaccctaggacatttccgagaccagcgggaacaatttgtaatggaatcccaccggagggaggcaccgagccctcggaccctatcaaatgggtccgggtccagcaaatcacctgcagcctcgggcgcaacagggagctccgcctcgcccgaccccaggcctcggcctcagcctcggcctcgagaggagtcacatcctcgcccgacctcggcctcggcctcaggagaaggctcaagcatttctccgacggccacgctagcacgtgtacagggctcaaggcatttctccgccagccacgttag

SEQ ID NO: 21593 - DNA, 573 bp, Zea mays
  Peptide Sequence Number=SeqID_64968
atgcctgtgcggctatccttagccgcgcagagaacagccccaggggtatctcgtgagcagttaaggtggcattctcggagacaacgccatcgggcccagaaggcgcaggacccctatgcgcacaacccggacccccgaagtaaagtagcccggagccattggatagggttcggaccccaccaagctctatccggagcgcctccgctcggccgagggtctaatgctgctacatggcttattgtccgtgacgtaggccagcgggcggagcatgacgtaagggctctgggtggcgcggcctccgcatttattgcggaaaggacacgccgcctatccacccttctgacaggtgatgtgcccccatggtatttattgcgtcctgtccattccgctggcaggcggcgccagggcaccctgcagacggcgcacctgtctagtccggtgccgaaacagtgcgcccgtgctgcgcggtgcattgtactcatcccttatacgagaagcttccccctgcacaccgaggctacgcagatctcgggtgtcagggcgcaagaagattgctccagcagaaaatattag

SEQ ID NO: 21594 - DNA, 402 bp, Zea mays
  Peptide Sequence Number=SeqID_64969
atggcgatgatgaagaagaagggcggcgccgcaacaacagcggtggcagcagtggcgttggtcctgctggcggcggcggcggttagggcggacgtgaactgcgcggacgtggacgcaagcctgcgcccctgcgtcggctacgtgacgggcaaggaggcggccccggccgccgagtgctgcgccggcgtgaagcggatcagggccatgccgtccggcccggcggagcggcggcaggcgtgcgagtgcgtcaagcaggcggcggccaattaccagccgctcaacgccgacgccatccgcgacctccccgcgcagtgcggcgcgccgctgccgttcccgctcaccctcaacttcgactgcaccaccatgtcactgagtgcaaaaaattcttacacaagtttctag

SEQ ID NO: 21595 - DNA, 1737 bp, Zea mays
  Peptide Sequence Number=SeqID_64970
atggccgcgctgcggttatcaagagcaccggccacggccggcctggccgccgcgggcgttccgcaccgcctcgcgaccccagagcatccgctgccggtgcgggttctacccaacagggcccacctcaacgcgctgctcacgtcctacggccgccgcggccgcatccaggacgcccagcagctgttcgaccggatgccccgccgcgacgtcatctcctggacggccctcctcaccgcctacgccgaaggcggcgacttcgcctccgcgcgcctcgtcttcgacgacatgccccgccgcaacgccgtctcctggaacgcgctgctctccctctacctcggcgcggggcggcccgcggctgcgcacgcgctgttctgcaagacgcccgccaagaacgccgtgtcctacggcgtcatcataacgggcctcgccagggcgggcatgctgcgggaggctcaggcggtttatggggagatgccaccgcggttgagggaccccgtggggtccaacgcgatgattttagggtacctcagggccggggagattgacatggcgctgagggtgttcgatacaatggctgcaagggacgtcatttcttggagttctatggttgatgggctatgtaagtatgggactgtgtccgaggccaggaggctgtttgaggcaatgccggagcggaacgtggtgtcctggacctcgatggtccgaggatatgtgaaatgcgggatgtacagagaaggtctcttgctgttcctggacatgagaagggaaggtgttcaggttaatgcgattacactctctgttgtactagatggttgtgctcaggccagtcttgtcggcgaagggatccaggttcactgcttgatgacgagaatgggctttgtaactgatatatttttggatggttcactgataataatgtattctagatttggctggatggttgatgctagaagggtttttgctttcatgaagcagaaagacatagtatcttggaactcattgatcactggttatgttcagaataacatgattgaagatgctcatgtgctgttcaagttgatgccagagagggatgctatttcttggacgtcagtggtggttgggtttgctaatagaggttggatgagagagtctgttgaactctttgagcaaatgcctgtaaaagacgatattgcctggactgcagttatttctagctttattgcaaatggaaaccatggattgcaagctcatgcttatgcagtcaacatgggatggatatttgactcagctgtccatgcttctttggtgacaatgtatgcaaaatgtgcatttgcacaacatggcttggctgaagatgcactcaaactttttaacagaatgcaatatgatggccaaaggcctaatcatgtgacattcttgggaatactgactgcatgtgctcgagctggcttccttgatgaagcattggaaatgattaattcgatgccccagaaagattatcctgatgcatgggcagctttgcttagctctagtagcctccattctaatcttgatttagcaaaactagcagcacagaggcttcttgagatagatccttatgacacaacagcttacagggtcctgacaaacatgttctcctcagcagggttgaagggagatgaagagatggtaaaagttgcacaattgtccaacatggctagtaagaggcctgggtatagcctcatcatacaggataagactacagaaaataactag

SEQ ID NO: 21596 - DNA, 591 bp, Zea mays
  Peptide Sequence Number=SeqID_64971
atggtgctttgtcaggctactgttgaaggcctgcagcagggttattgtgtcatttctagcgataaaaggatagagtgttttgatatccatggaaaacagaagcaactgaagcgaactactacattctttagcttttgcaaggcaggaaagggcatcttattgtgtactaatgtggctgcccgtggacttgatactcctgacgtggtctatgacatgtctgatagtcaaatgaagctaaatgattttatttcaagccttgttcttgaggtatttgtgaaatatgagtgttgttttggtctcaaaataaatccacaaaagattttagcatctgtaagcactgttgcacattatccaattatatcagggtggtctagaactgttttgtgttgtttatttttagttgaggatcatagtgcggtggtcatgggattgggatctgctccgtatttgcagggtttagttccattgcctggacccatcaatgaatcatggtgccaaggtcttgatggttcgacttcaaggactattgttagcatcccttgtggtccatctgcattagcagtgaagaaagtcgcatggggacttgcttga

SEQ ID NO: 21597 - DNA, 303 bp, Zea mays
  Peptide Sequence Number=SeqID_64972
atggccgacgacgcctgggcgctcggcctcaccgcctgggaggacgctgccaccttcgcgggggacccctgggcgctgctcgccgccgccacctcccgcgcctccgacgccgccaagtgcccctccgcggtctcccagcgcgcgcggggccgggtcgtcttcctcccctgcggcctatgtcgagaaattcaatgcaacaaagcctgtccaatattcccacggctggaagttctgccaatagctaagcgaagcaaaggattgctggatgctgtcctcgcttcatcataccccagccaggtttag

SEQ ID NO: 21598 - DNA, 471 bp, Zea mays
  Peptide Sequence Number=SeqID_64973
atgaatgaaaagttgactacaagcagcataaaagatctactaacatctagagtctgtgtagcagaaaaaagaacagtctgcctcaaagttttgctcaagtatgcgatcggcttcatcaatgacaaggcactgcataattacatagatgcacaaaagttgattacctccggaggcaagagtctagcaattgttaacgaagaaaaaagcaaattaccttcccccatccacatcggggagaccacgacgctgagaaatgggatggaatttggcgacgtcccaaacaaaaaggagaaggaatcaaacagcatcaatcggagggccattaccttctatggcggcgacggaggtccagacatggctatcgcacctccagcaagacgctctgcccggcagcgtgcacctccagctgggaatggaagacgaagggggaaggggtggtgcgtgcgtgcgtcgtcgctgacctcggtttga

SEQ ID NO: 21599 - DNA, 1116 bp, Zea mays
  Peptide Sequence Number=SeqID_64974
atggattcttacctcgatgtcataattattggtgccgaggttacatgtcttggcatcaataacgatggtgtcgaggttctggacctcgcccggaggtccggtctgtgtatccaggggtccggcacttccccgtggaggtccggacccactgttgacaccttggagtatatcgtctcctctggccacgtggaaccggcgcccaaggaggctgactcgtgggcccgggcccgcacgtcagagactgggtcgttggcttcggcggaggtgaagaggcgcactaccgcgggcggtggcccactcctcacacggcggttcgccttcttcgcacacggagaccgacgcccaaggggaatgactcgtgggcccggcccccgtgtaagagtctggtccgctgcttttggtggagatggagaggcgcggcggttcgctccccacgtggcggttcaccttcttcgcacacgaagaccgacgcccaagggggatgactcgtgggcctgggccctcgtgccagagactgggtcaccttggcgcgcgtcgggcgagatcttctgcggcgtctcggggcccgccatggccttgctagaccctcccgagcgcctccagctcgaggtggcactcaacttggtgcgcaacctgctcggatggggtgtgccggcgttcaccggaaggatccgtgtcggcgcctctcctcacggcgatctcaccaccggagagtttgtgctcttcgtctccaacctccccagcgggttggcgctgtcgatctcgtctttcttcgtgctgctgctggaggagctcggcctccaacctcagcacttcacgccctgcttcatccttcaggcggccatcatcgcctacctctgcaagatgtccgtgggggcgacgcttcttcctcctgcattcggtttcaaggatgttcatcagccttgcggaggtggaaagcgagatgagctgcggctccatctttcgcgtgagcttcaccagtgcctcatggcttcggtgccgcctccaacggtgatcgctggcccgactgctgaagacgccgcccaggaggtcgtacaagacgtcgtggagatggcagccgcacgcttccagcgtgaccctactgatgtcgagtag

SEQ ID NO: 21600 - DNA, 1593 bp, Zea mays
  Peptide Sequence Number=SeqID_64975
atggactcaacgacgacggcgccgctgctgcagccgtccgccgcctcgagcaaggaggggccggggccggcgccggctcagcacggtgagggcagccgggagctggaggcgatcctggccgacgcgtccaagccgtgggcttggcgggcctgggaaggcgcccgcctggagctgccgctgctgctgcgggtggcgctgccggcggtggccgtctacatgatcaacttcgtcatgtccatgtccacgcagatcttctgcggccagctcggcaacctcgagctcgccgcctcctcgctcggcaacaccggcatccagcccttggcctacggcctcatgaacttcagatactattcatacagcgataatgctgtgagcctgagcgtccacctgggcatgggcagcgcggtggagacgctgtgcgggcaggcgtacggcgcgcacaagcaccgcatgctgggggtgtacctgcagcgctcgacggtgctgctcatggccaccgccgtgccgctgaccgtcgtctacgccttctcggagcgcatcctggtcctcctcggcgagtcggagcgcatctccagggccgccgccgtcttcgtctacgggctcatcccgcagatcttcgcgtacgcggccaacttccccatccagaagttcctgcaggcgcagagcatcgtggcgcccagcgcttacatctccgtggccacgctggcgctgcacctggggctcagctgggtcgccgtctacaggctgggcctgggcctgctggggggctcgctcgtgctcagcttcagctggtgggtcatcgtcgcggcccagttcgggtacatcgtcaccagcgcccggtgcagggacacctggacgggattcaccacgcaggccttctcgggcctcggcaccttcttcaagctctcggcagcgtccgccgtcatgctgtgcttggagacttggtacttccagatcatcgtgctcatcgccggcctgctcaagaacccggagctctccctcgactccctctccatatgcatgaacgtgaacgcatgggtgttcatgatctccgtcgggttcaacgccgcggcgagcgtgcgggtcgggaacgagctcggcgcaggcaacccgagggcggcggcgttctcggtgttcatggtgacgtcgctgtcgttcatcgcggcgacggtgtgtgccgtcgtcgtgctgtgcctccgcgaccagctgagctacttcttcactggcggcgaggccgtggcgcgcgccgtgtccgacctctgcccgctcctcgccgccacgctcgtcctcaacggcatacagccagtcctctccggcgtcgccgtgggctgcgggtggcaggcgtttgtggcgtacgtgaacgtgggttgctactacgtcgtcggcgtgccgctcggcgtcttcctcggcttctacctcgacctcggcgccaagggcgtttggagcggcatggtcatcgggggaaccttgacgcagacgctcatcctgctctgggtcaccgtcagaaccgactggaacaaggaggtggagaacgccaaggcgaggctggacaagtgggacgacaagaagcagcccctcctagtcgaagattga

SEQ ID NO: 21601 - DNA, 78 bp, Zea mays
  Peptide Sequence Number=SeqID_64976
atggcggggcaggggagggccggagcggacagggggcggccggacaccatacgggcagattctctcggaccatcttga

SEQ ID NO: 21602 - DNA, 324 bp, Zea mays
  Peptide Sequence Number=SeqID_64977
atgctgccggcgagtgcagcaacgccgccacctgcctacgacaggctggacaagaaggacgcagaggaggcgcggcacgtccgggcgcagttcctgatccacaaggtgctcaacgatccgacgccgtcgtcgtcgtcgagggcggcaagggtcggcgtccggctgaagaagctcaggctcgccatccgtggcgtgagggcgcgcgcccgccgcgccgtgcagaggcacctcaggaacctcaggaggctcatcgcgcgtggaggaggaggaggacggggatcgtcgtcagtgaggccggcagcggcagggcctcctccctcttga

SEQ ID NO: 21603 - DNA, 114 bp, Zea mays
  Peptide Sequence Number=SeqID_64978
atggaagggaaccaatcacaccccttcagaaccgactggaacaaggaggtggagaacgccagggcaaggctggacaagtgggacgacaagcagcagcctttcctagaaggttga

SEQ ID NO: 21604 - DNA, 393 bp, Zea mays
  Peptide Sequence Number=SeqID_64979
atggcggcactcgggctgggtcggcgagctcactaccggcgggaatgggaggcaaaacacccaggtgctccatgcgcgccatggggcatataccctagccgcggccgagcgaccgagagagcagagagaaggaaaaaaaatggagcagcggcctggagggagcagaacgccgagggggatggagagaaggggaggaggggtgcgcgcccagggaaggctggggaagaacgccctgctggatgggtgtcgggcaccatggcaaggagcccgagctctggcgtgcgtggagcctgcggctggaaaaatggcagaggaggaagagaagagatgttggcggctaggggtggaaatggaaattttccaatttgcaagggagagagctcctatttatag

SEQ ID NO: 21605 - DNA, 279 bp, Zea mays
  Peptide Sequence Number=SeqID_64980
atggagagtcatgatctccgggcagaaagggaatcacagcttgtgggtgacaatgagattgatggttctggttatgactatggtactggtaagtggtattctttccgtttggaaaggccaaacaagatacttgctgagtatgttgatgtgtactcacccttgctctacacaccaaacccccccatccccaggttgtcagcattgcaacccactgctcaggagaagatgaagccgtgggaaggagacttccaggagttccaagactacgacgagttctag

SEQ ID NO: 21606 - DNA, 654 bp, Zea mays
  Peptide Sequence Number=SeqID_64981
atgggtctcatgtcttttgcctcgctcatcacctgtgaaggcactgcgaatgccttttcctgcgaggggtgcaggcacatcgaagtgttcgaccgatccaacgaggacttcgatcgtgagatcttccaggttgaagacgaggtgttaaagcggtccgctggggcgctttacgacaggatgtggggcccgcacggccgcgatactgttcgggagaggtcagaccgggcgcttgagcagatggcgaatgatgaagaagtcaacgactttggaggcccggagagctcggttacccagggccttttttgtgtggtactgaaagtcggttgctgcgcaaggtttccgatgtctagacctgcgcaagcaacccctactgatactaattttgtggtgatcgcaaacgcagtgcctgctaatgatagtttgtctggttttgaatctgggtcttggtcatctgatggtggtgagtttgggagcccgttttcctggactgagtcttcggatgaagatttggattattttcctgtgttagatgtggctgcggtggagtcctcgccgcggccggaggtgtgcgaagcgtttgatcccccggctggtgtgaggaccgaacgtcgacgacaaaaagtagtgtcgaagcatagcgttggcgagatgtag

SEQ ID NO: 21607 - DNA, 930 bp, Zea mays
  Peptide Sequence Number=SeqID_64982
atgaactcgagactcccgaaacggagcttcgtcccgggttggagaggtgctggaaattccccatttggatttgacgggaagctgttcgtcaacacgcagcaggcccctacctggcgcgccaactgtcggcgtttcgaccccggggggggcggatgcgcttgcagtagggggttacaagcgttcgcgagggagagagagggagagggcgtgagactgtgcgtcagcccgttctcccgtgcggccaacctttcgtacaagggcactggaccttccttttatagacgtaaggagagggtccagtccgagcccaaggtcgggcgaggcagtggctcctttgaggtcgaggctgagtccgtgccctggggtcgggcgaggcggagaccgtcgtccgaggtcgaggtggagtccgagccctggggtcgggcgaggcggagaccgtcgtccgaggtcgaggtggagtccgagcactcggtcgggcgagagactgtcttccagagtcgaggtggagtccaagccctggggtcgcgcaaggcggagattcctatggcgcccgaggctggacttggctgctgtcagcctcaccctggtgggtggcacagaagtcggagcagcgcaggcggcgctgttttcctgtcaggtcagtcagtggaggggcgaagtgactgcggtcacttcggccttgtcgactggaaagcgcgcgtcaggataaggtgtcaggcgatccttgcattgaatgctcctgcgatccggtcggctggcgaggcgatcttgccaaggttgcttctccgtgaagcttgcccgagctgggcctcgggcgagtcgaaggtgcgcccgttgcttgagaagaccctcgggcgaggcgcgaatcagccttggtctaccgttcctgcccgaggctgggctcgggcgaggcgagatcatgtcccttga

SEQ ID NO: 21608 - DNA, 189 bp, Zea mays
  Peptide Sequence Number=SeqID_64983
atgctggacggggtcgcaagacgagatgacctcgtcataggtcttcgtccggtggcgtatgaggcgaaagcgaggactgcgaaggcctcgagcgaagagtggcgtcttcgccttcgccccaacaaagagcttccaatcgccttttgttttctgcgatggttgcaagtcattgttccccgtactcgttaa

SEQ ID NO: 21609 - DNA, 321 bp, Zea mays
  Peptide Sequence Number=SeqID_64984
atggccgcgcagcagggggctggctgggcgcgtgccaaggctgggcccgccagccgcgcacgtgtagtgccgaggggcagggcaccccaccctgggcagggccggagtccgctgccgtcgacccatgacttcaccgcctccctgccatcctccaggcgctcctggggtttgcgcttgtgcgggaccttttcgccgagctccgccaaggccgtccccctcgtcttcggcgagccctcgccgcaggaacgagtggcgcctccacgcccatgtctagcctccggcttttggatctcgagcgtcggtccgaaatctggcggttag

SEQ ID NO: 21610 - DNA, 501 bp, Zea mays
  Peptide Sequence Number=SeqID_64985
atgtgtagtcggcatatgtttttagcgacggatagtaagacgctaaaagggcttttagcgactgacattaatttgatgcttcatgctcaatttggctcaaatgaaatgtgtgacactggggtgtcacagcatcgaagaaagggagcagacaatgatgaaataaatgaggcattatccccgaacatggatggaaaagagaaggcttcaaagggtaggttcaaggatggaaaggagaaggctccaaaggctaggttcaaagttagcggtcatatagtcattaaggctttggtaccacttatgtcacacccggttttggaaggtaaaccgaatgcgaaccatgtccttacggagacgtactcaggaaacaacgtaaagcaatatcatgaagctaaccataataacccaaaaggtcagagaacacttgccttcaccaaacagatgctcagggtcttcaactttgcagaactcgaagaagctgacaacttggtcgccgaagcttga

SEQ ID NO: 21611 - DNA, 303 bp, Zea mays
  Peptide Sequence Number=SeqID_64986
atggagggactaccagatctaggtaacgatggttgggggcggacgcagtggctaggagatcttgggggcgggatcaaggcggtgctaggagaggaaggcggagaaggtagagtttgccatttatttcactttgtgcttaaagttaaagaaaatagaaaagactgcaacctcgctgacggggagtacgtcctcgtgccggagcaaggagctgctcaggaggtagccccagatccagcaccagagcctgcacgagaggacctgcctgccactgctttggaaggcaagccccggttttatgcataa

SEQ ID NO: 21612 - DNA, 447 bp, Zea mays
  Peptide Sequence Number=SeqID_64987
atggctgctgccatgccttgcccatgtctgcgtgcgtcgcagctggccggcgagcctcgtcggcatcgtgtccggccccctggcgcacgacccctgctcccctggcacgcggcctcggctccccctggtctaggtatgggcatcgtcctacggctttttcctgaggacggaggtataggttttggtacgtcagatggtctctatgcagtggtcgcatctgttatggctcctatattctcgctcagggatctaggtatgggcatcgttccacgactttttcctgagggaggagaccccctaggaagtgatcaatggggagtagcgctcctcgggcataaagggaatcacggctcatgggtaaagtgtgcaacctctgtagagtgttctgaaactaatatatcagtcgtgctcatggttatgagcggccttgggatcctcattgattag

SEQ ID NO: 21613 - DNA, 204 bp, Zea mays
  Peptide Sequence Number=SeqID_64988
atgggcaccgccttgtcaacaatcgttgggagaatgggtttgggcatgtatttacccacactcacctcctgcccaatggtaggagttattctcaaggtcctcttcctcttccaccgctacctgtcgccaatacggtcacaccagtgctgcctgcccagaaatcagtaccccaaaggtctagttatggaatatcgtttgtcctaa

SEQ ID NO: 21614 - DNA, 273 bp, Zea mays
  Peptide Sequence Number=SeqID_64989
atgggtgtgattaagtcagggatcagtccattcgagggactcgatcacgcctcgcccgagcctagcctcggacaagggcagccgaccccggaggatctccgcctcgcccgaggcccccctccagcggcgaacatatttccgcccagatgggtcgagcgcgtgggcgagcgcgacggggggagaggcgaggcggccggagccgagcgtgagagaggtggaagtcccgcggccttcgtgttcgtcccgcgcccaggtcaggtgcgcttgcagtag

SEQ ID NO: 21615 - DNA, 1071 bp, Zea mays
  Peptide Sequence Number=SeqID_64990
atggggtgcaccagcgtcgctttgctcttgctgtcattggaggagcgcggcctcgtggagatcggcgctcttcagccatcgctcggcttcaaggattttggtcgtgcagcccggctacattccctcactaatggggagaaggcgctcaccggccttacggaggggacgaacttcagcaacgcggggccggtcggctgcaagcgtcgtcagctccagcgtgcctggctcgctggctcagctggctctgtcgcggcctccgacgctgcctcctgccgcttgatccgggcgtggccgtctgtccatcgcgcgggcgactgttgcgtcgtgcacaccgggggatcgtccaagacgtcgtatgccgcatgggcggcgttcgtgttcttggattgtcttgtcctcactccggcacgatgcctccgcgcggtggtggccgctgtcgtcggtgctgaggtggtggcagccagagaaggtttctccgccgacgagaccatcgacgccatctgtggccggacccccggctctttggctttgatggcttgtcctcgcccctcgagcggagacgtgggcgagggcctcgtcacagcaacgtttgccctgaggccctctggtgtggaggttgttcatacccgcgggagcgaaactggagtcccgtttgtaagggaatatactgggtttttgccggagcaaaataaagttgtgtttctttctcatttcgagcactgggacttgcctgttggccagccgaaccacttaaccgagtgtgagttgccttgcgcggaaggtgacgactgctctgcgatgagccagagccagaggcagcggtgttggcgtggacagaggcggagtcggctcgaaaagagacttcgtcggcccgggagctggtggcttcccaggccgaggaagatgtggcagcagcagctggagcttggccaagacatccgctggcgcggttctagcgtcctcccttgggtggaggtcctttcgcccgggtcgccgtccgaggccgggccaggttccgccgagggtggaaacaacgccgagggtgctgctgctccccctgccgatgcctga

SEQ ID NO: 21616 - DNA, 1275 bp, Zea mays
  Peptide Sequence Number=SeqID_64991
atgggtcagtcagccgcgggggaaggcacgacggttggcatggccaaaagtgggccatcagtaactgcagcggcagacgagcggaagcagcagtcaaatcgccaggaccggaaaaggggatgttgtggaaaggatccttctcggcgaaggaagcgggccccgagccctcctactgatcaggggttcgaaggctggcccctcggaagggtttcgatagccgccccagagcactcgggcttcaagcccattactgatcaggggttcgaaggctggcccctcggaagggctgacccctcggaagggttcgacagtcgccccagaacacgcatagtgagggatgactctgggtacgtccgatacatggccgaggctcaggctacactctcgaggtaccctaggacattttcgagaccggcgggaacgatttgtaacggaatcccaccggagggaggcatcgagccctcggaccctgtcgaaggggtctgggtccggcgaatcacccgcaggtacttttggagcatgcctctgggccaccagccgacccctaacgaacggggcacgggcgtccactcggattacccgttagcagctcactggaaacaccatgttcgacgccctccgagggcaacatggcgctttcccccctcctccttatggaaaggcgacgcaggggcgggacgcctgacgccgcatcctgacacacgcgcctcagtcggccaggccgaagcgaagactgacaacaagtcacgatcaaccaccgagttcggcctcgggcgcaataggaagctccgcctcgcccgacctcaggctccggcctcgggaggaggtctccgcctcgcccgacccccgaactcggcctcgacctcggtctcgggaggaatcgcgtcctcgcccgacccggcctcggcctcaagagaagctacaaagaacaagatcgacgtcccatctggcttaccccgacgacgggtaatgatggtgccccgcgtgcaccatgacgccggtgactctcagccccttacggcagcaaggagacgtcagcaggatccttgccgcactgccagctgtgctcctacaggactcaagcactcctccgacggccacgctatcacgtgtacagggctcaagctctcccccgacggccacgttggcatggccatcctgaaggagggttcgcgcgggggaaaggagcgaacgaatgggctccctctctccctctctccctctcgcgacgtgcttgtaacccctactacgagcggcacccctggtgcaggataa

SEQ ID NO: 21617 - DNA, 921 bp, Zea mays
  Peptide Sequence Number=SeqID_64992
atgaggcagtggaagtccctggtcccggcgctgcacctgcacggccccgtcgcgtcctgcttcccgcacccgccgccgccgtcgccgcccaggggggacgacgaggagacggacctgctgccggcgccaccgtcgcaggccggtgcggctctggcagtgcggctggtggggtgcgacgggcgcgtgcccgcgtacgccccgcccgtgacgacgcgggagctgatgcaggagcacctgcggcacctggtgtgccgcgccgacgcgctgctcatcggggagaggatcccggccgtggcggcggccgaggagctgcagcccggggaggcctacttcctgctgcccgcgcacctgttctgctccgtcctctccttcgtctccctcacgtcctcgctgctgctgctgctctccaccaccgcttcctccgcgtctggcaagaagcccgccgccggccgcccgttcgagctccaccgcatggcgtcgggcacgctgcagatcaagttctcctcggcgctagtgcgcttccccggccacggcgcgacagcccctcgccacaggccacctcgcttcctcgccttcctcgcagccccggaccgaccctgccagcggctcgctctccttatacgctgtcgactccccgtccatgtccgagcaggcgcctgcgctgctcacccctccctcctgaggctctacagcgtcgcccggatccgcgccgccactgcgtcctctgactgcgccgtcaccgagcagtgcctcctcacgcttctcttgtcaccggcgtcacccatcccctgccaggtccgacgcaggcccctgcccggctggacccaccccgtcgcccacccccttcatcgccttcgctggatccgtcgctgccgcggccttcccgaccggatccccgttgctacgaccttcccggcttga

SEQ ID NO: 21618 - DNA, 162 bp, Zea mays
  Peptide Sequence Number=SeqID_64993
atggagcgggtgcgtcgccatcggcatggctccaacgggtgtcctcgacagtggatgaaccgattaggattaggtcataaaaccctaaccctaaacagttgtgagagctctctctggtttgaggccgagacacactgtgtctcctacagtggccaaacctaa

SEQ ID NO: 21619 - DNA, 1008 bp, Zea mays
  Peptide Sequence Number=SeqID_64994
atggcgctccagccgcgaaagtgggcagcctactggatcttggcatctcaccgtcgccgctcacttccgctccatctgctgtcggaggcgcttaggatgccccagcccgttgcttttgtcttcgtgcagccgtccgatggtcaacccacgccgagcaacgtctcgaacaagaagatgaagcatggtggcgaggtgttgttcttggatggcgccggggaggtcaccgtcaccatcggtcgcaactcgcaacaacctctctccacagcccctccacccgttggtaccaatgttggcgacattggatcgtgggatgttggtaccaaagacagactcgttgtaaggaacttcaaagtctgggacctcagtaaatgtacaataattctccagctttctgagaatatgagcctgaagctggataagcttttgagtagctccactgacaacttttgggcatctggcttggacgagatggaggaggtggacgagcatgaagggcaacatggcatcattagtaggaagcagcttaaagagatgtctattatgctacatgttaaagaagctaaatctcctattatgctatctgttaaatttaaagagagaagatgtccaagggacgaggagcgagccatgatcgccgccaggcatgaggagcaagccatccttgttgagtgcaaggcagggtctccacctccatgtgggaaacggaaggaccgggccaagctccgtctgttgggctcccacgtgcaccttcttgaccgtgcgccaccgtcgccaaggccgccacctgtggccgcagggagctccatcagttcaaaaaaattgagcacggtgggcttcggccactcgaaagaaagggccccgcagcgcctgccgccggcgatcgcatccccatggagcgggtgcgccgccgtcggcatggctccaatgggtgtcctcgacagtgggaatgtaagaaatgaatattatgtgttgggggccttcggcttccgaaggtcctcaaaagcatga

SEQ ID NO: 21620 - DNA, 792 bp, Zea mays
  Peptide Sequence Number=SeqID_64995
atgctcaccgcctccttcctccgcttcctcctcctgcttctcctccccctcaccgccctctacttcttctacatgctgcacctcctcctcacctcggcatcgtcggccgcctccaactgcgcgcctgacaccgtctcggtctcccggatgtctgccaacctcacgcacgaagtgtttgacatcgcggcgttgtcgcggtcgcggttatgggacaagcgtaaggagtacatcaaggtgtggtggcgcccgcgcggcgccatgcggggctacgtgtggctggaccgcgaggtgcgcgagtccaacatgtccacagcgtgcacggggctcccggccatcaggatctcgtctgacacgtctgccttcccctacacgcaccgccgcggccaccgctccgccatccgcatctctctaaaatttctgccgtacatgaaaaagtatgaatatcagcaagctttccttcatggcgctgttgctaaagcttctgagaaggatgttaaagaacacaaagagaagattggtgatcaaaatttggagataaaggcacttcgcaataaagctgctgagtggcaattgaaagtactcgagaacgagggcattctgaacacaaaggagaaagaaagggatcaaagagttgtagagaacaatctgaagatgaacacgttgaaatctgaagtcgaatcggagcacaagtgccttgcggagaaagaaataaaaataaaggaaaagcttgaaaaggatccttttgaaattgcactgcatgagttgccaaatccagtttaccttggagcctga

SEQ ID NO: 21621 - DNA, 708 bp, Zea mays
  Peptide Sequence Number=SeqID_64996
atggcgccgcgcgggcgccaccacaccttgatgtactccttacgcttgtcccataaccgcgaccgcgacaacgccgcgatgtcaaacacttcgtgctgcagcgttgtcgacgtggacccagccacggcggaagggggcagctacttctccgccaccaccgtgaggttggcagacatccgggagaccgagacggtgtcaggcgcgcagttggaggcggccgacgatgccgagcatgtagaagaagtagagggcggtgagggggaggagaagcaggaggaggaagcggaggaaggaggcggtgagcatctccttcccgcccctcccttcatcatccccgtcaccgtggctgctgctcctcacgagctcaccctcaccgtgtcgaacgagcccctcggcaccgccgtccactgcttagccggccgagccgcgaggcgcccgatttcgccggcggaatcagaatcggtggggtttcgcgggggcgagaggctcacacgggctgcgcattccctccgcgtgttactccgcgccgccgcctgctgccctctctctcctcagctcgggttctctcctatcggtcggcgctttgggtgggagagcggtgcggtgggtgggtcggcgagcggttctctccagagagtgctccgctcgcgcacgtcgcacgaccgacgctgcggctcgtatgcctcgtcggtgcgcaagcagagctag

SEQ ID NO: 21622 - DNA, 745 bp, Zea mays
  Peptide Sequence Number=SeqID_64997
ccggcctccacgcaacaccccatccctcgagcgacgccaagacggagaggggaacaattggggacagggaagccatggccaccagcacgatgaagttgtcgccgtcgaagaaggcaagaagaagaacaagtccttgccgtcggccgctgcaccgacccctccgccactagagggcgctgtggatccgaaggcctgccccctgctgcctggaaccttaaccctagccactgccattagtagcaggctagcagcggcgaggcctcgacatgcctgtccgcttgcttcaccacaagctcgtcggggaccgcatccttgcccaggcttcctctcctccatccccaagatcgccaccaactcgggcatcctgatgagctacatcgccgacttcgcgtttgccggtctccccacaccactaagctggcgcctcaggctagagcgcccactgctgcactatgtgtgcgccgcacagtgcaaaaagggcgaggacttcttcttactcagaacggactgccctcgttccgccatctctgtctcctccccggcctcctggcaccccaccttcgtcgtatttgatgtggttggcaaggcagtgatgctcggtgaaatcataaactacgtgcagtccctacaacgacaagtcgagtttatgtccatgaaactgcccaccgtgaatccccaggtggacttaaacagcctgcctaacgtcctccctaaagatgcgcagaagcaggagctcgcacggcag

SEQ ID NO: 21623 - DNA, 879 bp, Zea mays
  Peptide Sequence Number=SeqID_64998
atggcccggcgggcaccatccctggggacaatgttggaggttgtgatgatgcttaggttgctggcggtcccagatgatggtcttcagccgcatgattctgccgggcaagagataactcgggtagtttctcgtgcctcgtcgaccttagagggcggtcttcctcgcgaagacactgatccaagtcacccggctcctatggacgtggccgagggatcttcagccctagaggtggctgtcacagaggacccaacccccgagggtggtgttgggagtgacccagcccctaagggtattggggcaggttccccttctgctgcttccatggacgtccacgttggatcatcgtccgtccaatctgaggagtctgtggtgacacatctatctacggctctcgctggtctggttactttagaggtcattgaaccagatgctaggagtccaccgcctgctgatggggctgaagttcctccaagtcatgcctttgatatcattcccgctgatctcccctcatcaagcaatgtatcaactcttcctgctttgggtcttcccttgttcctctccaatcttcagtggaaccttctactgcttcaaaaacaaatagataatatgagggcgtcaaatattgatttggctcggcggtgctctgatattgaagagaagtattcccagagccaggccgatttaagccaaacttctgctttcttggatggtgctcgctccttgaactcctctctgaatgcacaactcaactccgagaagattgtgcatgaggtcaactttcttggctgcttctgttctgtttcccttgcttcaatgcttagtgttgttcttgcttgcaggaggaaaaacgagcactcattgcttcgcgtgataatctga

SEQ ID NO: 21624 - DNA, 144 bp, Zea mays
  Peptide Sequence Number=SeqID_64999
atggggatctcagcgcggcagggagaaggggcgaacaccacagagctctgcgcggcacttggagaagctgagccggtcgaccggacgtgggacaagaatcgaagatatttcggattaagatttttagatcggagcgagatataa

SEQ ID NO: 21625 - DNA, 855 bp, Zea mays
  Peptide Sequence Number=SeqID_65000
atggtgacctccagcttgatggtgggggaaagcgagtcgggctgcggcctctgcccctccctcagcctcaaggattttcatcaccagggctggggaggagaggaagggcggccgtcgtccgtggcgccggcagctgcaccgtgcctggctctcggacgcgagtggcttcggagccgctcgcagcgccggcgtctgccacggcagctggaagaggttcttccgccggcgctgatagccaaggccggccacgggctgacctccaactctacggccttctgcccgtccttgcctcacgagtttgggcatgggcgggggcctcctggcagcagcatccgccctgaggtcagtgctgccgctgttcggccccccggagcagaagtcgtcgtcgtcgccgctgctggagcgggtgacggcatgccgttcgccggtcttccgttgctccgcaggcccactcctatcgagtggggctactcatctgttgattatctgaaccgcttcaccaagcatgagtcgccccgtgtcaaggtgacgagtgagccgggttgtccgttggcgggaccgacgtcggagttgatcagccgaggcctcaggtcgggctggcgcccttgggagatggtcggccgaggccccaggggcaaccggccgagccgcctgctcgggccggattcccggagaagtccctggcagcgattgcccgggcgtgatgatgacgtcgtccttcggagcagagatcctcggaccgcgtcgccgtccgaggctaggtcgggcctcgccaaaggtgtcgtcgatgccgagggtgttgctgcccccttccagcgtcaagacccgagcctgcagggtcagagtgtcttgtag

SEQ ID NO: 21626 - DNA, 1548 bp, Zea mays
  Peptide Sequence Number=SeqID_65001
atgacggtggcaggcgcgcgggagcagcggtcacgtcgtcatccaagctcacgtcccatccgggggcagcaagagaaccccctctcacggcgtgaagacaacgcgcccgagcagcaggcgacgcttcgccttcgccgaaataaccgcgccaaaaaaaaggctccgagcctccttactgatcagaggttcgaaggctggccccccgaagggttcaacagccgcctcagatcgcgtgggccctacacccactactggtcagaggttcgaaggccggccccccgaagggttccacggccgcctcaggctactcgggctccgcgcccattactgatcaggggttcgaaggctggcccccgaagggttcacagccgcctcagacgccgagcgagggatgaccaggggtacgttcgatacataaccaaggctcgggctgcgctcccgagctcaccggagacaccatgttcgacgcccatcgagggtaacatggcgctctcccccctcctccttgcggaaaggcgacgcaggggcaggctcgggggctgctctcgcaaacccggctccggccaaaccgttgacagcgtcaacataccagcccgagaacttgggccccgaccgtacacccgggctacggccagctcgcatgagggaacaaccagaccagccgaagcattacacaaggcattaagacctcgaaggagtgaaaccactcctccgaggcctcgggggctacacccggcgggtgcgctcgcgcgcacccaccggaacaaaatgcaaccgagaaaggctggtccccttgcaaaaaagtgcgacgaaagcctccaagcgagtgcaaacactcccttcgaggctcgggggctactgtcggggaccataactaggggtaccctcaagactcctaattctcagctgggctcggactcgggctcagccccagaagacggcgaactccgctccgcccgacccagggctcggactcgggctcagccccggaagacggcaaactccgctccacccgacccagggctcggactcgggctaagacccggaagacgacgaactccgcttcgcccgaccccagggctcggactcgggctcagccccggaagacggcgaactctgctccgcccgacccagggctcggactcgggctcagccccggaagacggcgaactccgcttcgcccgaccccagggctcgggctcgggctcagccccagaagacgacgaactccgcttcgcccgaccccagggctcagacaccgccctggcctctgccgacgacccccgcctcgcccgacccaggggctcggactcggcctcggccatggaagacagactcgacctcggcttcggaggagcctccacgtcgcccaacctagggcgcaggccagccacgtcaacaggaagcgccatcatcaccctaccccgagctgactcgggtcgcagagaacaagaccggctccgccgctcctccgacggccacgacatcacactagttgggttccaagatctctccggctgccacattggcatgtactcagggcactag

SEQ ID NO: 21627 - DNA, 1065 bp, Zea mays
  Peptide Sequence Number=SeqID_65002
gttgagaaagctcatagtggagatgttcattgtgttgattggaatccccttgatgttaactatatcttaactgggtatgatggcattaaggctcgattcagcataatcgttgaaacaaatttgatctctatcagttccttatacgttcaagtaatgaatgtttcaattgatatttcaggtctgccgataactctgtccgaatgtgggatcgtcgaaatctgggttcaggaggagctgtggtcacctgatagagcatctgtttttggaagttctgcagaagatggtttcttaaacgtgtgggatcatgagaagatttggcgcatgagtgatttgatctaccgcccagaggatgaagttcttgcagagttggagaatttcaaggctcacttggccagctgcttccaagtctgtcattcccttggaggaggcactggatctggaatgggcatgcttctcatttcaaagatcggagaggagtaccctgatcggatgatgctgacattttctgtctttccctcgcccaaggtgtcagacactgttgttgagccatacaatgcaaccatgtctgtccatcggctggttgagaacgctgatgaatgcatggttcttgacaacgaagcactttatgacatttgcttccgaactctgaagctgacgacccctagctttggagacttgaaccacttgatcagtgcaacgatgagtggtgtcacttgctgcctctgcttcctaggacaactgaactctgacctgcacaagcttgtagtcaacctgatctcgttccctcggctctacttcttcatgatcggctttgcgccactcaccttgcgtggctcgcagcagtaccgtgcgctcaccgtctctgagctaacccagcagatgtgggatgccaagaacatgatgtgtgttgctgacccacgccatggtcgctgtctcacagcctctgccatgttccgtggcaagatgagcactaaggaggttgatgagcaaatgattaatgtccagaacaagaactcgtcctactttgtggagtggatccccaacaacgtcaagtccagcttatga

SEQ ID NO: 21628 - DNA, 879 bp, Zea mays
  Peptide Sequence Number=SeqID_65003
atgccgccggcggcgcgagaaggacgcgccgacgccggcacgaagttccgcgcccgagggctgttcggcggcggcggaggaggagacaggctccgggccgtgatgaggatggtgaagctcaactcggccatccagaaccggagcgtcagggagctgctggagctgctcggcgacgagtgcctctacttcctcgggaacctccggtccgtcgacgttccgcggctgggcaaggacatgttcctgctcctccacgcgctgatggtccggcaccacgtgtcgttcgtgctcaagccgtcgccggacgacgaggcaggcttcgacctgggcgtcaagtggtctctagagtggaaggggaagaagctgccctgggacctcgactgcaacgtctccaccacccacgtctaccgcggcctcctgctcatcaggtaccttctgctagctgctttcgcatgcttgcacgtgcagcaaaagaacgaccggctaaataaccgccttgtctccccgtcgccgtcgcaccgcacgcagccaagtgaacaagacctgcgtgccgctgctccagaggattcttgggatcatgcagcaggcaagcaagcacacgatgcgatcaatggcaaacagatagcgaaacaaggtctaaaacagtttgagattcctttatcttttgcgactgcagaacctggacgcggtagtcctggccgtcgtgcacaaggtgctgccagaaggcaccctcgacgagaagcagaggagcacgatggttttctgcgccgtcatcggcctcctcgtcatgctgctgttctacgcattgctcaagaacttgtagcttcgtcgtcgccgtcgccaccagcagcaccaccaggagggcaaggagcaagtatctag

SEQ ID NO: 21629 - DNA, 528 bp, Zea mays
  Peptide Sequence Number=SeqID_65004
atgcctatgtctccaccaccgtcgctcagctgcttgcctctgtgttggctcgccggacctactgtttgcgctgtgcttaaggtcctactcaccggtcttctcgtcgacagcgccagtcgtgtctcccaccacgccgacactttttctccatcgctcgactccgtgctcagcgctctcaccatcaccgcgtctctcctcgccggtgcactgagctccacccacctcggcgaaggccaccgtccccttcttcactgtgcactcggcatcaacttcctggtgcacaccgacacaacgctctggtcgcgcgccctccatcgcacgctcagacacttgcccctgttcgtcacctcgggacttcgccgtcacccgtacttcgctggttgtcaacttcgctggctgtgttcgacctccagccacgtcaccatcgtgcccttcatccgttcgaaggtgaggcctcccagcttcgatcttcaggagtgcagcagcttttattggtggccgatgtcattcagtggttgtgatctctag

SEQ ID NO: 21630 - DNA, 498 bp, Zea mays
  Peptide Sequence Number=SeqID_65005
atggcgaatgcaagaacgtggagagggcgacacacgaaaccactgctagagatcaacatcatcggttgggagaagactctgagcgtccctagcaatgcggaagatatgtatcaaaggttcatctacaactatactaaattgactgtccggaataccgtagattattccggacaggagaagctttttggaaaaataggccaagcgcggaccgtccgggcccttgtggcggaccgtccgcgacacaaggatgaccctcggacagaaccaatgcaaaaatctgagtctgcactatggaccgtccggaggataagcgcggaccgtctgagacctcgcgcggaccgtccggcctcaggcgcggaccgtctggtaggtgaggaaccgaaaaacccgaagccgttactgctgaccgttgcattttcagccgttgatctacaggcgcagaccgtccggaccaggagggcggaccgtccgcggtcggcagaatggagcaacggctag

SEQ ID NO: 21631 - DNA, 1599 bp, Zea mays
  Peptide Sequence Number=SeqID_65006
atggaggcggctgtagacggcggggttggtgtaggcctcgggcccgtcatctgggttgtagcggcggagatcggcgagcgcttcgctttctacgcagtggcctcaactctgatcacctatctaacgggacccctgcaagagggaatcgcggccgcggctgccgccacaaacgtgtggaacggcacggcgctgatgctgcccctgctgggcggcgccattgctgacctgtggctgggaagatacctcaccattgtcttagcgtcactcctatacatcctgggtttaggcctgctggccgtgtcaaccgtggttggggggcagcactgcgacgctgccgcccacaccgccggtgagaagtgcccgccgccgcccgccgcccaggtggtcctgttctacgtgtcgctctacgtggtggccgtgggcgagggcgggcacaagccgtgcgcgcacgcgttcggcgccgaccagttcagcggcagcgacccgggcgagtccgtctccaggggcgccttcttcaactggtggtacttcggcgtgtgcgccggcaccgtcgccacgctcctggtcgtcagctacgtgcaggagaacctcggctggggcctcggcttcgccgtcccgtgcgccgtcatggcgtgcgccctcgccgtgttcctgctcggtacgaggacgtaccggcacaccggcgacacggtcgggacgcggaacggcctgttcgctcacgccgccgaggctttcgctggctgctggcgtcggcagcgacgtagcagcagcagcagcagagtcgatgaggaagcgcaggtggcgacgacgaacacagccgtcctcctggtcagcgaaaccaaggacgtcctccgtctgttgccgatatgggcgacaacgctggtgtacgccgtggtgtactcgcagtccatgacgttcttcacaaagcaggcggcgacgctggaccggcgcgtgggcgagctggccaaggtgccggcggcggcgctgctggccttcatcagcgtgaccatcatggcgctgatcccggtctacgaccgcgtggtggtcccgctggcgcggcggtacaccggcaggccgtcggggatcacgatgctgcagcgcatcggcgcggggatgctcctgtccgtcgcgtccacggtgaccgcggcgctcgtcgaggcgcgccggctccgggtcgcgcgggccgccgccggcctgctggccgacacgcccggcaaggcggcggcgcagcagcagctgccgatgagcctgtggtggatggtgccgcagtacgtggtgttcggcgccgccgacgtgttcgccatggtcggcctgcaggagttcttctatgaccaggtgcccgacaggctgcgcagcgtcgggctggcgctgtacatcagtgtcttcggcgtcgggagcttcgtcagcagcgcgctcgtgtcgggcatccaccgggcgacggcggccaggggccagagctggttctcggataacatgaacggcggccacctcgactacttctactggctgctcgccgcgctcagcgccctccagttcttcgcctatgtcttcgttgcgtggaggtacaaatataaggacgctggagccgagcacacgtga

SEQ ID NO: 21632 - DNA, 435 bp, Zea mays
  Peptide Sequence Number=SeqID_65007
atgggcaagaacaacaagcgcaagcgcgagccgactcctccatcggaggatttcggtgactcggaatactcggaggaggagttctcctccgagtccgaggggtctccggctcccgtctctcccccggcgtcgtccgatgactcggacgactcccaggggatagccgcggaggtctggacgtacatccgggccgtcgagcgctccgggctcgagggctcggatgagtcggagtgctcctcggatgaggaggactcggacggcggcgacgaggatgaggacgacggcgatgacgacgatgacgacgacgacgacgacggtgacggcggcggcagtggcaggggcggcggcgacggcagcaggggcagcaccaagggcgacagcagcgaaggcagcaccaagggcggcggcagcggcaggggcagggccagtggctag

SEQ ID NO: 21633 - DNA, 213 bp, Zea mays
  Peptide Sequence Number=SeqID_65008
atggcttggctttctcctcctgctctctcaccccccagatcagatctttccctgccttcttttgatggaggacgggaggaggaaaggaaggtgaggtatgcgtatgcgttgtgctggcgcggtgtttgtgccgcagccacagcagcttgcctccgcctggacaggctggctttattcatgcatgagggggacaccaacgagattacagtttaa

SEQ ID NO: 21634 - DNA, 441 bp, Zea mays
  Peptide Sequence Number=SeqID_65009
atggggaatcatggtggaggaccaaggtccggattggcgggcgacatggcaccgatgagtcttcctcagctgaccagcggttggggcggagggcggaggcgggaggcgccggggatcggggcctgtgggctcgaggtcgcggccgcggcggtgggggctcgaggcaggagctgcggcggcgggggctcggggttggggccacggcaactggtgaagaagaacccacatttgcatgagtgccatagtacaaggagaaaaggtcagacaaggaagagaatcaagaaacaaaaaaagaggtggcaggacatgggaagaaaaataagagagagccagaagtcatcggatctcctgcaatgggaactagaagcaaagccagttgcagtggcagtcctgccatgggaactagaagcaaaagaaagctcaatgtctaattggaactag

SEQ ID NO: 21635 - DNA, 324 bp, Zea mays
  Peptide Sequence Number=SeqID_65010
atgtcgccttttccgtttcccaagagcgacgagttcgccgcggatgactcaccggacagtccggtgaaccatcggacaatccgccgccgcccctacccgccccctgccctagcgccggccgccgccctcgccgtcggccgcccctcgccgaggatccggggtgtagttcgcttcgccgtcgtgccgtcaatggggctcggtgtatgcggctcgctctgccaaggtgacaatgagattgatggttctgattacgattatggtattggcgaagatgaagctgtggaaggagacttcccggagttccaagactacgacgagttctag

SEQ ID NO: 21636 - DNA, 483 bp, Zea mays
  Peptide Sequence Number=SeqID_65011
atggtggatagggcaacggatgtgtcggggaccataattaggggtaccctcaagtctcctaattctcagctggtaacccccaacagcataaagctgcaaaggcctgatggtcgacagagccgaagtgaccgcagtcacttcgccgctccactgaccggcctgacagaaggacagcgccgcctgcgccgctccgactgctgtgccgctcgacagagtgaggctgacaggcagtcaggcccgacctcaggcaccataggaagctccgcttcgcccgacccagggctcggactcgggctcagccccgaaagacgacaaactccgctctgcccaacccagggctcggactcgggctcagccccggaagacggcgaactccgctctgcccgacccagggctcggactcgggctcagccccggaagacggcgaactccgctccgcccgacccagggctcggacttgggctcagccccagaagacgatga

SEQ ID NO: 21637 - DNA, 360 bp, Zea mays
  Peptide Sequence Number=SeqID_65012
atggagcaccgtcccgggctgaaaaggttgctggagactgcccatctagagcttgacgagaagctgttcgtcaacacgcagcaggcccctacctggcgcgccaactgtcggtgtttcgagaccgggggggtaatgatggcgcctcctgtcgacgtggtcggtccgcgccctaggttgggcgatgtggaggctcctccgaggtcgaggtcgagtctgtcttccgtggccgtggtcgagtccgagcccctgggtcgggcgaggcggagaccgtcggctgaggctagggctgagtccgagccctggggtcgggcgcagcggagttcgtcgtcttctggggctgagcccaagtccgagccctag

SEQ ID NO: 21638 - DNA, 426 bp, Zea mays
  Peptide Sequence Number=SeqID_65013
atgggcaagaacaacaagcgcaagcgtgagccgactcctccatcagaggacttcggtgattcggagtactcagaggaggagttctcctctgagtctgaggggtctccggctcccatccctctgcgtgagtcgtctgatgattcagacgactcccaggggcttgcggcggaggtctggacttacatccgggccgtcgagcgctccgggctcgagggctcggatgagtcagagtactcctcggacgaggaggactcgtccgagggcgttggcagcgatggcgacgacgacgacgacgatgacggaggcggtggcggcaatgacggtgacggcggcggcaggggcggcagcaaggatggcgacggcggcagcggcagcggcagcggcaggggcagcagcagcagaggcagcaacagggccagtggctag

SEQ ID NO: 21639 - DNA, 567 bp, Zea mays
  Peptide Sequence Number=SeqID_65014
atgtcggacgaccttgttgttcctgtccactttgaagttggccaagaactttgctttcgcctcctggatcatccgctccttgtgctcctcaaactggagctgctcgtcagccggcaaggggccggacggtccgcggcctggtgcgaggcgcggtggtgctctctgcgcaagggcggactgtccgcggcctggggccggacggtccgcggcctgggacggcgggagatcgccgacggcgcctggatctcgctcccgggagggaccccgtcggggagtagagatcctaggtgcggtttcctgagggtgatcctgcagagtttaattgaggagctactctcccgtgctgcaaagaaagctggtaagcttattcctcgcgcccgcctgctcgccgccgcactggcgatcacggtggccgcgctgcagcagacgacggagcacgcagacaccaaggagcggccgctgctgcggttcgggctaggaacacgcggacgccaaggggcggccgccgctgtggctcacctgtttggctgctcggctggcagcttttctagcctcgcgttgtcgtga

SEQ ID NO: 21640 - DNA, 2099 bp, Zea mays
  Peptide Sequence Number=SeqID_65015
atgaccgctgtccgcgccgacgacgcccgcgacgcgcgcggagaggaaacgacctatgacgccgttgaagtattcatccgcacgtgcgtgggaacgccaaccgtggtgcacgttctgccgcatccaaagcgtccaacccgcatccaacgcccctgccgcatcccgcgtccctcccgcgctcgtccctgccgcagccctcgcgatccccttccacgcatggcgttcctgccgcagccccgcgatcccgcctgtcaagcatggcgtcgccgcggtcgttgcccccgccgtctctctcgccccgcaggcgttccactctgcatggaaggtgagccgctggccccgaaatcgacggaatcacagcccgtgcatccccatctctcgcgctctacatggaaggcaaggcctcgccaaagccgctcgatctgctccctgaaagccggcgccccgctctcccctgctctcgcgctctacatggaaggagttgctggagcccaaatcgacggaatcactgttcgcggacggcggcctcgatccgctctctcccctgctctcgcgctctacatggaaggaggtgacagcgcccaaatcgacacgagtgaatgtcgcccacctccctccgactccaaacgcggggcttcaccagaccaagaacgcgccaagcccgacgctcccaggaccacaccgtccaagccctcgagcgaatccgcgatgcgcaagtcgtggcgcagcctcgcgtccgccctgctcgccgccgcactggcgatcacggtggccgcgcttcggccggtgacggagcacgcagacgccaaggggccgccgccgctgtggttcgggctaggagcgttcaaagacgccacgtccgaccgcgtcatggccgccgtcctcgacgccgagaacccagacttggtggtgtacctcagtgacctggtgacggcttacaacctcttggtcccgaacgcgagcccgaggccagggcgtgtcgtgggcgacggtgttcggcaaccacgacgacatggccgtcgagaggccgcccgtgtggttctcccccgacggcgtcccgccgctgcgctggccgccgggtccaggatcagggtgcggcttacaggggactccccagacggacctcgtggcggcggagaccggtgcgaatcggttgctgtcctactcgtccagcgggcccagggagttgtggccctgcgcggagcatctcggagaagaaccgaccatgcgccgtgccgctccgccgggaggacggcgttcagtgggcgcacgaccgcgccggggaggacaaggtccacgtggttgtcaccgaggatcagcgctggcttttcgtcggcatctatgacggcttcaacggcccccgaggccccggacttcctgatcgctaatctctaccgcttcctgctgcgcgagctccgtgggatcttctacaaagaggccgatccgaaatccaagcgactgtggcagttcctggcggatggtgaggatgaggatagcgaactcgacttctcgggctccggccggttcgcgctatcgcttgccaggctcaaggaacagaggcatcccttgtgggcccttgtggccgccgctggcgatggtcaaagcggcagggagtgtggagttaagaggttgacggccgcgccggcggtgagggatcacagggcggtactgagcgcactggcccgggcgctagctacgacggagtcggcgtacctggacaggaccagtcagtcaatgggatcccacctagagctggcacgatgggatgacgaagattggttgattggaagcatgtgggtggaggacattggtgtgggcttggagaccgagacaaggatccctgggtatttggcaattgggctcgaggcattgcagctgtcgactgatcatagcacgagcattgaagaggaagtgcagaggatcagacgcgaacatctagatgatgatcagtgtgttgttaatgatagagtgaaaggtcgtctaacagttacccgtgcatttggtgctgggtatctcaaacagggacggcgggagatcgccgacggcgcctggatctcgctcccgggagggaccccgtcggggagtagagatcctaggtg

SEQ ID NO: 21641 - DNA, 318 bp, Zea mays
  Peptide Sequence Number=SeqID_65016
atgtactcggcttcggcggtggaaagagcgaccgaattttgcttctttgaagcccaagacaccaaggatcttcccaagaactggcaagtccccgatggtgacgtgggggctcctccgaagccgaggttgagtctgtcctctgttgccgaggccgagcccgagccatggggtcgggcgaggcggaagtcgttcggccgaggccagggcggagttcgagccctggggtcgggcgaggcggaagtcgttcggccgaggccagggcagagtccgagccctggggtcgggcgaggcggagtttcgtcgtcttccgggtcttag

SEQ ID NO: 21642 - DNA, 444 bp, Zea mays
  Peptide Sequence Number=SeqID_65017
atggctttgctaggccctcccgagcgcctccagtccgaggtggcactcagcttggtgtgtaacctgctcagatggggtgtgccggcgttcgccggaaggatctgtgctggcgcctttcctcacggtgatcttgctgcgggagagttcgtgctctccgtctccaacctccccagcgggctggtgctgttgatttcgtctttcttcgtgctgctgctggaggagcttggcctccaacctcagcacctcacgtcgtgcttcatccttcaggtggccatcatcgcctacctctgcaagcattcagaggaaaggatgttcaccagccttgtgaaggtggacagcgggctaagctgcggctccatcccccgcgcgagcttcaactccatggagtgggaagcgagccgtgctgtggctccatctctcgcgcctccatctctttggctttga

SEQ ID NO: 21643 - DNA, 744 bp, Zea mays
  Peptide Sequence Number=SeqID_65018
atggcatttgcggtctccgacgagctgctgggcaccttcgtgccgattgcggtgtactggctctactcggggctctacgtcgtcctggacgggctcgggatggacgactacaggctccatcccaagggggaggaggaggccaagaacatcgtttccaggtcgacggtcgtcaggggcgtccttgttcagcaggcgtttcaaatcgctgtctcccttcttctcttcacggttcttggtgatgagaatggggctgtgaggaagcaacctccggctctgtatttcatgcacagatacatgcacatcaacaagttcttgtacaagcacgtccactctaagcaccacactcttgtcgtcccctacgcttttggagctctgtacaaccaccccctggagggactcatcctggacaccatcggtggcgcgctctcgttcctcatctctggcatgaccccaaggactggcatattcttcttctcgttcgcgaccatcaagaccgtcgacgaccactgtggtctgtggcttcctgggaacatcctccatgtattcttcagcaacaacagcgcttaccatgacatccaccatcagctctacggcaacaagtacaacttctctcagcccttctttgtcatgtgggacaagatccttggaacatacatgccttacactctggagacccgcaagggaggtggtctcgaggcgcgcccggttaagctcaaccaagcacagcagaccaaggctgattga

SEQ ID NO: 21644 - DNA, 2217 bp, Zea mays
  Peptide Sequence Number=SeqID_65019
atggtgaagaagcccaacgacgttgccaaggccgcggcgacctccgccgacgcggcagccaggccatccaaggcgaatccgtccacccctcagtcggtcaagacctcgaagtttaagaagcggaaggtcaaggccaaccgccagaagccagcggtcgctgctgcagctgttgacgatgtcgccccggtaggcgcaggcactggggatggcgatgcatctgcatccgcggttttaccgcagccatccaatgttgctgaggcatcgcctgtggtgcaaacgccaaagtcgaccacttttgttgaggcgtcacctgtggtacagacgcagaagacagccactgatgctgaagtaccggtgcattcaccaatgccagccactgctgaagcatcagctttgtcgccaaagccaaagccaaaaccagctcatgctaatgctgatgctgcagctgcaatttctgtcagcaagggcaagggcgtgggtgctgataatagcgggggtgatggcagaatgaagagcagaaaagagagggctaggagtggcaaggggaaggaggttttgggggatggaggaagtaagggaaaggggaaggggaaggggaagaaggctgtaggcaagaaggaagaaaggggtgaccataaggttgcagggtttatatttatgtgcaatgcaaagactaagaaggagtgctaccagaatcgcttgtttgggatgcctggtgggaagattggaatggtcaagaagataaggccaggggtgaagctgttcctgtatgattttgacctcaagcttttgtatggtgtgtacaaggcagcatcacatggggggctaaaccttgtccaaggagcatttagtgggaagttccctgcacagtacgccctcgacatcctggagtgggctggcatgtctggctgcaaggcctactccacgcctgtcgacactcacgcgaagctctctgaagacgacgggccctcggtcgccgacgcgatggcctactggagcctcaccgacgctctctatctttgccgtaggcttcccgcactgtgcggggtctggggaagggtatctttaagcgccaagccttacccgcataatatgcaaaggctggggctcgaacccgggaccttccggttacagacggttaagtttaagattgataaagattgccgtcctctccctgagagtagtctcaagcaagccatcaaggaaaattacagtgcaaagagcaaatttgacccagaactcaccacaaaacaggtccaaaggttacttttgctgtttaagcctcttagtgcacctcaatctgttccaaataatcactttgaagaaaggcgtcactatgaagaacaaaggaagccgtattatcattttgaagaaaggcttcctctgttgcctattgaagaagtgcgtcagccacggtttgatgatgaaaggcgccctgcagttagacatgttcctcttgaggatccatatagggcacaagcaccacgctttgctccagttcctgttgagtctcagcttggccattcgttggctagtgctcagggtgatcatggcagatattatcaaccaccagcacttgcgcctgagcctcgacacattcctcttgttctagagcctcgctatgttccgccagcccatgtgcctactgtgccagagcttcaacatgtcccagctgcatattatcgcacttcggctccatctggtgattcatactatcggcctgttgataatctggtgcctgaggggtatgcagacagaattgtggcaaacataaccgctagagatccaatcattagtgatcacacagcactgccagtggaagcctctgctcgaccagaccgcttggatgatctctaccggattcgtggtgctcatgtggaggagctgtaccgtccacgggaaattgctgatcgtgcggggatcactgctagagcagatcgtgtggaggaactctaccgttatgatcgacttgctaaccgtgctgtggacccccctcattcagcctaccttacaactgcttacgagaataaccctgcttatgctgaaacaagcgttaggcctatctcagcaagggttggtggctccggtgcgccagtttcgtcactctattcgttttctggtggtccatacattttcttgcaatatttaactacgccattgctgaccaacggtgagcaccaggagaacgagcacgtcgcctttctacagtatgattag

SEQ ID NO: 21645 - DNA, 714 bp, Zea mays
  Peptide Sequence Number=SeqID_65020
atgcctatcctaactcgttggaaagattacaaggacgaccagaaatactacaacaactttgtgtcacagctaaatgggcgcttgtccgttaacactgaggacaaggcaacaaaggaagcttgcaccgatatgctacgctctgcggtaaaaaaccagcgttatcggctcaagcagaaatacttcaatggtgtacctgcaaatgagattagcacaacttctcctgtatcttacatgactgatgaacagtggagggcattagttgcaaagtggtctgatccaaagaacatgaagcagaagagaaaccgagaagaacccagcttagatcagagtgaagaactagatgcggtggacgccttcaagacctgtcataccagctccaaacgtggcctaagtgaaccggcaagagaagcacttagcagctcacaccaattcctgaaaagcgtcggcatcaaaacatcggcaacctccaaggcatcatcatcaaatcatagtgagcttcgggaacaacttgcagctgaagcgacggctgctgttcaaggtgaactcgaccagctcaggaagaaatgtgaagaagctgaggaacagcaagcgaggacacaaagggagttggaggagtacaagaagataacagagaagaacaacaaggagatggaggagaccaatgtgctcatcaagaagctcttgtccttgcatggtaactcttcttcgacatga

SEQ ID NO: 21646 - DNA, 717 bp, Zea mays
  Peptide Sequence Number=SeqID_65021
atggtgtggaagaagaatgtcacaccgtcagggggaggagacgacgaggaccctccttgccccttcaggcaggtcaaagggaagacactctatcttgagcagcaggagggcaggaagaagagaccctcgctccactgctcccccactccttccgccacagtctccactccacctcccacttcgctagctcctgtcgctctagagctatgcaccacttccgttgtgcccaccacctccactactctagcttccactgctcccggtcctgctcctgcttccgctccgcccattccaccacctcgcttcagggagcgtgacaagaccgagattgctctgagggcacactggcttttggatctccctgcttttctgttagccatcggtgtcgagtcagagggtcacctctcttatctgccaggtttgctttcacttctgacctctagtggcagatatattgaggagtgggtcagagtgttctatgccactgtttggattgaccctgaccatcagtggttgaggttccgctttgagcgtgaggatgtcactctgcatgccactcaaatcagacagctctttggatttcctgagtcgacgactaggctccacagcttgtgctatggcacttcggatcctccctgtcgccctcacaacggagttgcacctgctacagctcacgtcgctgccctatttagacctccgttcacagatgggtcatga

SEQ ID NO: 21647 - DNA, 90 bp, Zea mays
  Peptide Sequence Number=SeqID_65022
atggagaaaccaaggagaaaagaccacttctcctacggctccccggcgcaacggctagctgacgtgtcacacccggttttagaaaggtaa

SEQ ID NO: 21648 - DNA, 479 bp, Zea mays
  Peptide Sequence Number=SeqID_65023
gccgtatctgccccggcgcctcacagttgagtgacagccctaggtgccaggaagaggtctgcgccggacttttgcaaagattcgcacgtttgcgacgtctggcgacatttgaacactggaagaaacaaatcgccacgtgttcgacgccgtctgccgcgccagagcacgcccgcgcgcgcgcccgcgccgcgcccaagccaagccagtgccctgccattcccaaccccgtccagccctcggagaagactgtgcacgtctccgtgaagctcctcgagcgaggaatcgggctctgcttcaccggagaggccggcccaaggtcaccggatttcaaccgaccgccggcaaccgtggaccgagagtacatcctcgtgccggagcaaggagctgcccaggaggttgcccccgatccagcaccagagccagcaccagaggacctgcctgccactgctttggaaggcaagccccggttttatgcataa

SEQ ID NO: 21649 - DNA, 681 bp, Zea mays
  Peptide Sequence Number=SeqID_65024
atggcagtttactttggagaaagtcgaagctacccaaatcaccctccctttcagatcaccgctactggccaccgcttcctagatacctgccagaatgctgcccaaaaagccctccgccagctatgccaaaactacagcagggaggtctttgagacaccccttcgctactttccacctagcaacaaaaatactcctgcttggaggaaaagactacaggccttatcaaggagagatcctaatgaagatgacccaaccatagtctacatggtcggatatctccacacccttgacaaccactttgacgaacttttctcccactgcacccacctaaactcccgggtggaaagcctagagcaacaaatcaaggaattgaaggaagaaaaggcggctcttcaagacagtctcgagatggcagaaggcgaagaagccaacactcgtgaggcataccggaccctgaagatggactatgctaggaggctgaagaagctcacccccgtcaagaagatccaaaagtgtttcaagagccaaggatgccagactcacccgaaggaagaagccccgccaacactaccctctctagggatagagaactttttcgacatcgaagaagtgtccctggctagccttgatgatctccttagagagtttggggacactttagtggataacgctcatgcgtag

SEQ ID NO: 21650 - DNA, 126 bp, Zea mays
  Peptide Sequence Number=SeqID_65025
atggaattactcagcaagtcttacccgactaaagaaaagactctcaagggtatgctggttatatgggagtcaagggtttcaaggagggtaatcaagatcaaggaaggtaatgcaggaattgtttaa

SEQ ID NO: 21651 - DNA, 279 bp, Zea mays
  Peptide Sequence Number=SeqID_65026
atggacaatataggatatccgaagcttgaacttggcctatctgcaatgttgaaagatcaacttgcagacagtcttgcttacaatagtctgaaggataggctgagatctaacgaggctgaacttgctgcacaagccgaagtggaagaactgaaaaggaaggttgttgaagcaaccgaaaaatttgaagttgaggtggtgaagcatgagatatgcgagatcgaaaggtcaagagcacaaaagaatgctgatgagcttcgtgcttccaaagaaagatgttaa

SEQ ID NO: 21652 - DNA, 345 bp, Zea mays
  Peptide Sequence Number=SeqID_65027
atgccgccgccgccacacgacatcgcacatccgctcttctccctcccctcgctctcggcggtcgacgtgcgctcccctggtgccatcgcttgtgcccggctcccgccatcgctggctccccgatggacctcgcggctagtgtggggccatggatccccgacggatcgagggtcgcgccgcctcatgaggtcagtgagcccgcccacactctacttgcttgctccttgttctacgagcttcggctgcgctgaggcggtcatggtcgctgttcatgtggaattagacaaaaatcatctttttggctcgaacagaaaatacctgaagcttcaatttgacatcgtgtag

SEQ ID NO: 21653 - DNA, 183 bp, Zea mays
  Peptide Sequence Number=SeqID_65028
atgaagaacaagtccccaacaggtgcagctgaactatctccgcctccggagccatacaatctagaagctaacccgttcctaaaagaggcactcgagaccatcaaaattgccaacgaagttgttgacgaagctgtcaacaagctgctaaacgaagctgccgagaaggtcatgaaggaagactag

SEQ ID NO: 21654 - DNA, 384 bp, Zea mays
  Peptide Sequence Number=SeqID_65029
atgctgaggcagagcagatgcctcctcctccacctcctcctcagcctcagcagtattggcagcctgggtccatgctactttgacccatattttcaaaatatgcagcaaaggcttcagacccatcttgacactcgctttgagggaatgttgacacatatggatcaacgtctggatgtcatgcaatccagttttgatagtaactgggatgcgctcaatgctgagtattctaaatttcgtgatcacattcaaactaatgtcactgatcctatcatgaccagacttaacaatatgcaacagagttttcaggataacatgggagctctgtctagtcaatttgacaacctctctacaaatgacagcatgcatgagatcagtcagaggtag

SEQ ID NO: 21655 - DNA, 609 bp, Zea mays
  Peptide Sequence Number=SeqID_65030
atgtcgtcatcacgtggattgggtggtctccgcaagaagcttgcaggtcgcttcaaatcaaagtgccctcgtgcatatgatgctgactacgctccaactactgattcagaggcccaatctttagctgggggcactgaatctatggacacagaagacattccccatatacatcctgactacccaattgatatcacaggatggacatttccaaagaggaggttttctatggctgaatactgctcaaggcgcactgtgaatcaatacactctgccatctgacaccaatgttcaatttttccacactcagctccaatttgatgttttttggggcactttgatggatacaaattttcataaacatcaggtgattgattggtccttcatgctgggacaatcagtcatggaggatcctaagtttgagacatgtgttgggctagatctctacactgaagataattttgaggactttgtgcaattctatgagccagcaaggctgggcatacctaggaggtttggagagacagcaggactgaggcatcatcctgctgtgatcaacaagattgcaagagtcactattcttcccaagagtggagataagagcaaaatttga

SEQ ID NO: 21656 - DNA, 81 bp, Zea mays
  Peptide Sequence Number=SeqID_65031
atggcgggcggaaaagagctcgccgtagctaaagaggggcgcctggccggcaaaggttttgctaactggatcaagagatag

SEQ ID NO: 21657 - DNA, 189 bp, Zea mays
  Peptide Sequence Number=SeqID_65032
atggcgcgatggcggtcggagaaagaaaagagcactgtcgcaagagattggtggctttcaccgtggcgggcgcaccagcgatcaccggatatgtgtaatatgagctactgcgacgtggtatcttcggactcgtatcagagagggagaagctcaaaagatacgaaggttgacacagcgccgaagctgtga

SEQ ID NO: 21658 - DNA, 654 bp, Zea mays
  Peptide Sequence Number=SeqID_65033
atggggtgcacctgtgttgccttctttttgctgctgtttgaggagcgcgaccccgtggggggttggcgctctccagtcaccgctcggcttcaaggattttcatcatgcagcccggctgcagtccctcaccaatggtcatccgtagggatgatcaccagccttgtggtggggagaagcaagccaggctgcggcctcttccccaccctcagcttcaaggatgttcatcatccgggctggggaaaagggcgcatcgaggtggggcctgcctccgcgtgggccggcgacccgcttcttcctccagcattcgggggagaagggcatcctccagctctatggaggaggcgtcctccagccatgcgggggaaggtgaactgctgctgcttggccagggtgcagttgtccgtcctccatctagacgacggtcgtgccgtgcgcaggcggctactgtcgccagtgctgaagcggcggccgccgctggtgaggcttcccaccgcaacggtggttgcttccaccgacgagaccgtcaatgccacctgcgctccggacctccggctctttggctttaatggctggttctcgtcccccgtgaggggacgtgaacgagggccttccagcggtagcgtttgccctgaggccatcgctgctgctgtctag

SEQ ID NO: 21659 - DNA, 321 bp, Zea mays
  Peptide Sequence Number=SeqID_65034
atggggaaatccctgtggccagcctccctaacgcccctaaccctagccgtcaccctcaaaccctcgcagccatctgccgcccataacaatctgctggtcaactgtccatcgtcgcaaccgtccagcaggctcctggccgccgaggagagcagcagtccggggccgcttcccaccactccatcgatctcgttgttcaccgtccccatgtttgtgccgccacagcagcactatgatggtgtctgctacgggggcgtggatggcatccgggcatcgacggcgcagctacagccgacaacacgctgcctcctagcacgttggtaa

SEQ ID NO: 21660 - DNA, 294 bp, Zea mays
  Peptide Sequence Number=SeqID_65035
atgggggtattggagacccaaccggagttgcaaaaaccgaaaatccccgtcaatctttccattgagatgttttgtgatatgaagactctcacagttgaagatttagtggggcgtcttcgtgctgcagaagaccggctggaagataaaatggctcatattacggataaaactggtcgtctgttacttgctgaagatgagtggcttgagagacacaagcaccgtttccaaactagctcacagaaagatgaaggcagtgcaggcagcagtcagtggaaggccaagacgaatctctag

SEQ ID NO: 21661 - DNA, 105 bp, Zea mays
  Peptide Sequence Number=SeqID_65036
atggcgttggcgccacctctccaggtgttgggctgtgaggaggagttggccaaatgggccgaaatgaaggcctgcggcccaggtgctaattcaatttcgtgttaa

SEQ ID NO: 21662 - DNA, 305 bp, Zea mays
  Peptide Sequence Number=SeqID_65037
acgccgagcagtctgtgtttcccgaggcagttgcagaggaagtccctgatcagcagtttggtgaaggcaaggggctcaggctgtttcctgagtacctctccgtaaggactgccgtcgtgccgtcaatggggctcggtgtatgcggctcgctctgccaagtttgggttcgccccttggggaggagtgcgagacattatggtacaggtggctatgagatcgatggttctggttatgactatggtgctggagaagatgaagccgtggaaggagacttccaggagttccaagactacgacgatttctag

SEQ ID NO: 21663 - DNA, 369 bp, Zea mays
  Peptide Sequence Number=SeqID_65038
atgcaggaagggaagaccaaggtgcgggcgtaccttgtgtgctcgtcgccggcgaagggccctaagaagatttgggcacctggcgtaggcggcaacgacctgggtccgaagaagacccggcgtagtcgtcgccgacggagagggggagagagcgcgcacgctggagcctggagtgatatcaaggctagcaaaagtatccaaccaaactttgactgcaaagcacacgagcattgcaactaccgaggcacgcgccttgtcgcccatgacccgactctaggaggtgagaaccgagaagaaggtcggctcgtgctggccaccaaggtgtccgagaggatgcagacaggggcgaacctatatagtgctgagtga

SEQ ID NO: 21664 - DNA, 576 bp, Zea mays
  Peptide Sequence Number=SeqID_65039
atgccgcgtcttctcgactgcggaaccagtaccgtgactcgaggcagccctgcgcgtgacccaacagtgccaattgagtgcaacgattacggggcaagcgacacctccggcaggaaaagcgggcaccgtttcacctccgtcatgatgaccgcgtcaaaaaagggaccgggaaagggggtatttcgaaaaaggatccttcccagcgaaggaaatgggccccgagccctcctactgatcaggagttcgaaggttgcaccctccggggttcagcaatcaccccagagcactcgggctccgagccctttactgatcaggggttcgaaggctggcccctcggaagggtttgatagccgccccagagcatgcagagtcagggatgaccctgagtacgtccgttacatggccgaggcttgggctacgctcccgaggtaccctaggacatttccgagaccagcaggaacgatttgtaacagaatcccaccggagggaggcatcgagccctcggaccctatcgaatgggtctgggtccggcaaatcacctgcaggtacttttggagcacgcctctgggccactag

SEQ ID NO: 21665 - DNA, 900 bp, Zea mays
  Peptide Sequence Number=SeqID_65040
atgtcttcgcactctcctcatgcatcgtgcccttccaccttccgagcccccggatggggagcgctcgcgttgcttttgtcttgtcgtcgttggaggaacgcaacttcgcggaagttggtacctttcagccatcgctcggcttcaaggattttcatcaggcagcccgactgcatcccctcgccggtggtcacccaagacggtgaccaccagttcgatggtggggagaagcaagccgggctgcgacctctgccccgccctcagcttcaaggatcttcatcatcagtgctggggaggggagtgcgccgagttggggcctgtctccgcgcgggcagcggcctgctccttccctcagtgatcgggggggagggtgttcgccgttcgtggcgctggcagctgtcgcatgtctggctctccggcctgagcggcttcggtgctgcttccggtgccacctcccaccgaggcagccggaagaggtttctccgccgacgagatagccgaagtcacccgcggactgacctccgactccacggccttggtagcttgtcctcgcccctcgagtggggtcgtgggcgagggccttgtcgcagcagcgtctaccctgaggtcatcgctgctgctgtttggccgcccggagcggaggtcgttgtcgctgctgccggagcaggtggcggtgagccacctatcggcgttttgttgtcccgcaggccctccagtgtggggggttgttcgtacctgcgggggtggaaccggagttctgtttgtaatggcaccttgagtgccggtgtttgttcattgtggctgtcggggcctgaacatgtaggtatttctgggtgtaataccatgtttttttcctcattttcgagcactggaactcgcctgtcggctagccgaaccgcttga

SEQ ID NO: 21666 - DNA, 315 bp, Zea mays
  Peptide Sequence Number=SeqID_65041
atggacttcgcctcgcccgaccccagggctcggactcagcctcggctccggaagacgacggtctccgcctcgcccgacccagggctcagactcaacctcgacgctggacgacggactccgcctcgcccgacccagggctcagactcgacctcgacctcggaagacagactccgcctcgcccgaccccaggggtcggactcagcctcgactccggaagacggactcgacctcgacctcggaggagcctccgcctcgcccaacctagggctcggaccgaccacgtcacagtggggggcatcattaccctacccctag

SEQ ID NO: 21667 - DNA, 386 bp, Zea mays
  Peptide Sequence Number=SeqID_65042
atggagggctccgattttatacccatggggagagcaaagtccgtgcaggcgaggatcacgcggccgaggaaccagggcacggcctgcaagctcaccgcggatctcgctgcagtccgttgcggcagggaagattccgagccacaggtcccacacacagtgacacgtgcgattcaccccgaggaaatggctctgaccggccgggcccgcttcgcagttagccgagtgcgcgcggtgggaagtgtctggttcccaggtccacacgccagtgacgactcacacgcacaagagactgacgaccgggcccatggtgtcggcgccacctctccaggtgttgggctgtgcggaggagttggccaaatgggccgaaatgaaggcctgcggcccag

SEQ ID NO: 21668 - DNA, 321 bp, Zea mays
  Peptide Sequence Number=SeqID_65043
atggccgtccgccggagatccagcggcccaggcccactacccctcaccccgtctctctgcccgctaggccccgcctgtcagcccgcccgcgcgctcgctctgccgtttgggcccagcctgtcagcccgccccgtgcgcgcgctgtccgcccggccccgcctgtcagcctgcccgcaccccgcgctgcctgcccggccccgcctgtcagccgcccaggccgccgcgcgcccgcgcgcccgcccgcaggatctaatcctgatcgttcgctttagatctgacggttgtaggcgctcgataccccttcgcccgcgcttttcttaa

SEQ ID NO: 21669 - DNA, 348 bp, Zea mays
  Peptide Sequence Number=SeqID_65044
atggcacctaagagaaccacctcgaaggctcacgaggctgcgaaggcagcactgctggccgagaaaaagggcaaggcccttgtcgacaccaccccccaagagccctgcgaagacgacacaaacagcaagaggcagcgcaacgaacaacccactaccgaaggcagcctccgcacctgcagctctggaggacaaccgcaccttcccccaggcttcgctccaccagagtgcgcggacgccatcgaggacggcgaaggcatcggctttttggccgaggagcagctacagctgcgcgccttggcgtatcaagaaccgcaacctccagaagcaaaaagagatcctcgaggctaa

SEQ ID NO: 21670 - DNA, 396 bp, Zea mays
  Peptide Sequence Number=SeqID_65045
atggcgccttgcggacctgggatcttcatgcacaggtacagtccgtggatagctgcctcaaacttgttgatggagccccggcccattatggcgttgtacgggtacaccatgtcgatgatgttgaacgtgacttgctcacttcgggcattgggtgctacaccgaaggagagaggtaactctattttgccgatgggaaaggtgcccttgccgccgaagcccgtagagggggttgtccgatggcttgagcaagctgtggcttatgcccatgcgatcgaaggcatggaggaaaatgatatcccgcctggctgccattgtcgactaagactttgtgcaagtccccagcctgccacactgcagtttgataaccatggcatcgatgtggagggcgctgcgtag

SEQ ID NO: 21671 - DNA, 309 bp, Zea mays
  Peptide Sequence Number=SeqID_65046
atgtgtgatagatcatcggcgaggcaagatactcggtggaggacatttcaggagctgtttatgttagttggtccaacaacatcgctcggaccagagaaaaaatgtaatcaaccaattatatgcagcaacggagcctatgaagaagccctattttctgctgctgtttgccaactccaagcagatcgcccactaaagaagcccaccctcctcgctatagaagatcttactagccaatttcaactattctactatgtgtttgcttttaatataacagtgaaaattgacaggagaacaaaggatcaagtttga

SEQ ID NO: 21672 - DNA, 804 bp, Zea mays
  Peptide Sequence Number=SeqID_65047
atggcgacgatggccgcttcttcctgccacgggcaacttctcctgtttctcctcgtggccgtcgcgtcggcctgcctcggctccgcggcagcgcatcaagccggatctggagagggctacacgatcgctggccgcgtcaagatcgatgatgtcaaacaattcatgtgtctaaagctgcgaactgaagcaatttcgattggtaggaaattagtagtatgcgaccatccactgactgttgaactgatgcaaattgacgatgccctgttgctcgttggttttgggatcttccgtggcacgagcgtgaagggctttggtcttgcaacaaagacatcaaacacaaaagtgatacttaatggcggccagaggatcagtgttaggagatcactatatttgctttattgttggctccttgacctgatatactttagccacaacgtgccagctggaactcatctgattgaggtctcctcaattggttacttcttttccccagttcgcgtagatatcagtgcaaggaatcctggttatattcaagcagcattgactgaaactagaagagttctaaatgagcttgtcctggaacctctgaaagaagagcagtactatgaggttagggagcctttctccgtcatgtcacttttgaagagccccatggggttgatggttggttttatggtcttaatggtctttgtgatgcccaagatgatggagaacatagatcctgaggagatgaagcaagctcaagaacaaatgaggaacaaccccgtatcattgtctggcttgctagccagagcgcagggctag

SEQ ID NO: 21673 - DNA, 2604 bp, Zea mays
  Peptide Sequence Number=SeqID_65048
atgtctgaagatctttttgaaggtgtgaagggagaagacgttggtgatccatctgttgcctacggtgacagcacagctgggaacacacctaggatcagttcatttgacaagctatacatagtgttaatcagtcttcatggcctgatacgtggagagaatatggagcttggccgtgattcagatactggtggccaggtcaaatatgttgtggaacttgctaaagcattaagttcatgtcctggagtttaccgggttgatctattgacaagacaaatcatagccccaaattttgatcgtggctatggtgaaccagacgagatgctggctttgacaagtttcaagaactttaaatgcgaacgaggagagaacagtggtgcacatatcatcagaataccatttggccccaaagaaaagcatctagctaaagaaaatatctggcctttcattcaagaatttgttgatggtgcactaggtcatattgtgcggatgtcaaaaactttaggcgaagaaactggcagtgtgtgtccagtgtggcctgctgtgattcatggtcattatgccagtgcaggagttgctgctgctctactatctggagcacttaatgtcccgatggtgtttaccgggcattttcttgggaaagataagcttgaagggcttctcaagcaagggagacagacaagagaacaaataaacgtgacatacaaaataatgcgccgaattgaggcagaggagttgtctcttgatgcgtctgaaatagttatcgctagcacaaggcaagaaatagaagaacaatggaacttgtatgatggttttgaagtcatgcttgcgaggaagctccgtgcgttagtcaagcgtggtgctaactgttatggtcgttatatgcctcgtatggttataattcctccaggagttgaattcggccaattgattcatgattttgatatctatggagatgaagataacccatctccagcctctgaggatccatctatttggtttgagataatgcggttcttcacaaatcctaggaaacctatgattctggctattgcccgtccatatgctgagaagaatatcgcaacacttgtgaaggcatttggtgaatgccatccgttgagggaacttgctaaccttacattgataatgggtaaccgtgaggctatttccaagatgaacaaaatcagtgcagctgttttgacatcagtgcttacattgattgatgaatacgatttatatggtcaagtggcatacccaaagcatcacaagcactctgaagttcctgatatttatcgtttagcagcaagaacaaagggcgcttttataaatgttgcttactttgaacaatttggtgttaccttgatagaggctgccatgcacgggctgcctgttattgcaacaaaaaatggggctcctgttgaaattcatcaggttctggaaaatggtctccttgttgatccccatgatcagcatgcaatcgcagatgccctctataagatgctgtctgaaaagcaattttggtcaagatgtcgagagaatggattaaaaaatatacaccagttttcttggcctgaacattgcaagaattacttgtcaaggatattaactctaggtccaagacatcctgctttcgcatgcaaagaagaccataaagtgcctgtgaagtgcaggaagcatatattcgttattgctgtagactccgttaacaaggaagatttaattcagattatcagaaattctgttgaggctacacgctctggaactatgtcagatttgacaggttttgtgctgtcgacttcactgacaatagcagagttacagtctgtaatagtacgcacaggcatgctccctactgactttgatgcctttatatgcaatagtgggagtgacatatattatccatcacagtctagtgatgtgccaagcaattcccgtgttacatttgcatcggaccataactaccgatcacatattgagtatcgttggggtggagaaggtttaaggaagtacttagttaagtgggcctcttcagtagtagaaagaagggggagaaccgaaaagcaagtcatctttgaagattcggaacactcttcaacatattgtcttgcatttaaagtgattaatccaagtcatttgcctcctttgaaggagctgcaaaaattgatgagaatccagtcactgcgttgtcatgcactgtataaccatggcgccaccagggggtctgtacttctgattatggtctttgagaaacattttatgtatttatttccatatgcaccttgccgcaaacaagtgtgccaacctactaagaaaattttctattataggtatttgtctatttgctggggcatagagttgccagatgctgtggtcattgttggtgaaactggtgattctgattacgaggaactgtttggaggtcttcacaagacagtcatccttaagggtggattcaacactcctgccaataggatccatacggttagaaggtaccctttacaggatgttgttgctcttgatagctcaaatatcattgcaattgagggatttagcactggtgacatcaggtctgctatgcaacaaaagcttggtatacccacacgatga

SEQ ID NO: 21674 - DNA, 183 bp, Zea mays
  Peptide Sequence Number=SeqID_65049
atggagcttcgacttttttttactctgcagcttcagcttcggcttggtcaacctgtatccagatttcaggaacgcagcagcggtgccccgagaagctaccaggacacaaaagtcgtcgtgtccggcaataacatcatcgaggtcatcaatctcaccttcgatgtgttcgaaggctcctggtag

SEQ ID NO: 21675 - DNA, 1185 bp, Zea mays
  Peptide Sequence Number=SeqID_65050
atggccgaaaagccgtcgcgggctgagtcttctccaacacgctccaaggacctccccctacgacacgggggctgggtcccacgcatcgtgcaagctggcccaggacagaaggagccaaaaccgccgcgcgtgatgcgcgcaactgaacagcggttacaagcattcctccactttcgcccagaccagcgggtgaaagggcggactgccatgcaagcggcatgcgaccgcaccgagggggcgcaccctttcgacttcgacgcgtccagcatggaggcccaggcccacacgtcatgtaaccggcgcgccggttactacgtgcgagaaactgcaccgccacttgcgccagtgtcgtgcctcctcgactgcggaaccagtgccgcgactcgaggcgaccctgcgtacggcccaacagtgccaaccgggcacagcggtcatgggtcagtcagccgcgggagaaggcgtgacggtcgatacggccagaaatgggcctgcagtaatggcggtggcaggcgagcggaagcagcggacaggcggcacctttggcaggcgaagcaggcgacgcttcacctccgccataatgaccgcgtcaaaaaagggaccgggaaaggggatattccgaaagggatccttctccgcgaaggaagcgggccccgagcccccctactgatcagaggttcaaaggctggcccctcggaagggttcaacagccgcctcagagcactcgggctccgcgcccactactggtcagaggttcgaaggctggcccctcggaagggttcaacggccgcctcagggcactcgggctccgcgcccactactaatcaggggttcgatggctggcccccgaagggttcgacaaccgcctcagacgcagagcgagggatgaccctgggctcgggggctgctctcgcaaacccggctccggccaaaccgttgacagtgtcaacataccagcccgagagcttgggacccgactgtgcacccgggctacggcccgctcgcatgagggaacaaccagaccggccgaaatgcgctaagacctcgaaggagtcaaaccactcctcagaggcctcgggggctacacccggcgggtgcgctcgcgcgcacccacaggaacgaaatgcaaccgagaaaggccggtccccttgcaaaaaagtgcgacaaaagcctccaagcgagtattaa

SEQ ID NO: 21676 - DNA, 270 bp, Zea mays
  Peptide Sequence Number=SeqID_65051
atggaggttggcagcctatacgcatcgatgactgaattcaggcttgcaatgtggcaatatgccatagaaaaagaatttgagttaggcattgaggccagtactccgaagaaatacagaggtcagtctgaattcaataagttcagttcagttagttcatctataactgtgatgcatcttgaaaccagaagtggatttaacatgaacccactcactgagtggtcaaacagaaaacttgacagaacattatatgatcacaaaaccattatatga

SEQ ID NO: 21677 - DNA, 774 bp, Zea mays
  Peptide Sequence Number=SeqID_65052
atgggtgaccgaccaagaaattttttcgggtgtgtacgagcgaggacaaagtgcacacaaaagactcgtgttggtctggagttttttggaactcagagcccagtcacgcctgctgttacgagttcatcccctcgtcccgttcctggaaacggatctcaggccgccgtcgctgccgacagtggcggatctgcgtccggggctgtctgggctgcaaccccggtcgcggctcagtacaagcgaataggcggtctattgtatcacgctcacgtccgctcttcacgtccagtggcggcccacgtcgcgtccagtactgcgagctgctttaggggcagggcgtgtttgcgcgtcggtcgaatctgtgtgccggtcgctctctgttcggacattttccggtacgagttcccatcttccacgccgccgagtactctttggaaatggaggcgccagcaggtggactcggcagcaggtggcctccacgctgccgagttcccatcttccctcacgcggatggaggcgcctccagcaggcaccaatgcagttgaagctccttctgaaagattaaatagagtttggaatggtcttttagacgtcattagacacatgcaagtctcagctgatgagttgaggaggttgaccagacgcaatcatgtacctgagtatgtagagtacctgcacaaaaatagcctagttaatgccatgagtgttgtcactgaaattgcacaaggtctagaccatgtgagcacagatctggaggaagttcttattggtctgtaa

SEQ ID NO: 21678 - DNA, 573 bp, Zea mays
  Peptide Sequence Number=SeqID_65053
atggccctcaaagccgccgtctccgtcaccccgttgctgccgtcgcctcccctccgccgtctcctgctctccccctctcctagctccgcggcggctcgtaggatcgcgagggtttccgcggcgatggcgacgacagaggtgcacccagccgtggtggtgggcggcggccgcgtaggccaggcgctcgtgtccatgggcccgccgggaggtgacgtcctcgtgggccgcggagagaaggtacccgacgatgcgcctggaccgatactggtgtgcacgcgcaacgacgacctcgacgccgtgctcgaggccacccccaagtcgcgctggcgcggcctattgggccaggggtttgggccgtctggccttgtaaagagggtgtacttaaaccctgaatcatctggtaatcggcaagaggaaaatagaagaaaaaccaccaaacagaatttctgtttacctgcgcttgtcctccccatcggaggcagccaccgtgagtgctcacgtcggagttggcgctactccggccatgggtctcacacttggtatcaaagacgggtcagcggtcttgctgggtag

SEQ ID NO: 21679 - DNA, 582 bp, Zea mays
  Peptide Sequence Number=SeqID_65054
atgctcgggaggctcattgctggtttggaggctaggggaatgtttgaggatgtgaacattatattggtaggtgaccatggtatggttaggacctgcgataggaagcttgtgtttctcgaagagttggctccatggatcgagttgaagtcagattgggttctgtcaatgacgccattgctggcaatcaggccgccggatgagagttacaggatcccgccaatcatcgggttgattggggaagggtatatgatcgagatgaagcgctccaagagaaatgagtgtggaggagcccatgggagagcacaaccaaatgcagcccattacgctcttgcgtctctagaaaggattggtcatgttcactcaatggttacccaaaatgtggataggttgcatcatcgtgctgggagtaatccatttgagctgcatgggagtgtatatgaggtaatttgtttagaatgtggtacatccatcagccgagaatcattccaggaggaagtgaagaacctaaacccaaagtgggctcaagctatcgatagtttggaagtaggacaaccaggttcaggcaaaagttttggaatgtag

SEQ ID NO: 21680 - DNA, 660 bp, Zea mays
  Peptide Sequence Number=SeqID_65055
atggctccccgcgtgcatcatgacgacggcggttctcagcctcctacggaagcagggaaacgtcaacaagatcccagcagcaccaacagctgtacttctacagggctcaagcacttctccgacggccacgttatcgcctacgcagggctcaagcacttctccgacggccacgttatcgcctacgcagggctcaagcacttctccgacagccacgttggcatcccgacgccaggagcaacacgccaggaccgcgcccctgtagccacccgagccgacgcgccctgccaggacgccgcccgcgcccaggcgcccaagctgcgcaacccgatgcccaggccgccaagcgtgcccctgcacgcgagcagaagccgagcagtcgcccgacgtcccgcccaggcgcgcccccgaccctggccacccgcgcccctaccagttaggacccgagccacccaacgccctgcgcccaagccgaggaccgcgcccgagcagccgacccgcccgaagatcccgcaaccgttcctcctctgcgttcatggagttgcaatgcgtccgttttctctcccctattactccctctccccattgatgaacgccatcaatggcgccttgaacccgttggccgccgtttctcatcactcccccggcgccctctccctataa

SEQ ID NO: 21681 - DNA, 423 bp, Zea mays
  Peptide Sequence Number=SeqID_65056
atgtcgtacgaaggtctcaccggtaactgcggagttgatcggggatcacgaccatgtcggcaaggtcgaagtgaccgcagtcactttgccctttcactgaccgacctgacaggaaaacagcgccgctcgcttcgctccgactgctgtgccacccaccaggatgagtctgacaacagccaagttcagcctcaggcgcaacaggaagctccgcctcgcccgaccccagggctcagcctcaacctcggcctcggaagatggtctccgcctcgcccgaccccagggctcggcctcaacctcggcctcggaaggtggtctccgcctcgcccgacctcagggctcggcctcgggagaagtctccgcctcgcccgaccttgggctcggaccggccgcgccatggaggatacatcattaccctacccctag

SEQ ID NO: 21682 - DNA, 423 bp, Zea mays
  Peptide Sequence Number=SeqID_65057
atgaccagtacgggttgcaccagggttgatctgtgtgcacgccatggccaggggtactcgtggggaagaaaagaaagtagagggacctgtcttgggtgggataaccatagcatcattgtgagggtaatccttgagctgaagatcctcttgggagaagccggttctgagcaagaactgcctgttatcgagagtacaagcttcggagccgaagcaactccagctttgaacgaagccattagctcagaaagtggaagtgagttcaccggaggtgggcgccaatgttggggacttgttctcaaatgctatgaattaagaacaagacaacacaaagatgttaagtataaatgcccttcgtccgctgaaccattaggattcaagctagggatcaaggtgaacatccctgatctttggctcaaggtctga

SEQ ID NO: 21683 - DNA, 429 bp, Zea mays
  Peptide Sequence Number=SeqID_65058
atggccaggggtactcgtggggaagaaaagaaagtagagggacctgtccaacgtgaagaagaaatagaagtcaccgaagacaggacaccaccaccttcggattcgcaagcaggcaactgcttctacttcgatatttgtggatccgaacccgaatcacctgtaaacgaaggcaagccccggatccactttagtaagcatttctgcaaaacagagtctttgattattgaaaagccttaccttgactcccttacaaccagcatacccttgagagtcttttctttagtcgggtggttcccaaagaagaaaaacaagactgaagtgcgggaggactcggtcctccacataggatcttttgcttataacttatcgggaggagtctgtgcctcccttggtttgtataatattactactcagcactcgcctttttag

SEQ ID NO: 21684 - DNA, 837 bp, Zea mays
  Peptide Sequence Number=SeqID_65059
atgacttctcacggatcctcggacgaagggaatgcactgtcccacactaacgggcttgcacgagagggttttccccgtattttgtgggaggtacttcagggagctggttacacgacgcctccccagtacatgatgcagcagtttgataagcaccgagtgccctgctgtaggcccagttggcgttcgctggactctgagtcctttggataccgggctgaggatacaatcgaggtgattgctcttcacggattgactactttctgcggattccaccccttggagctgtccactcaccccattggcttgttccccgctgagaaggaggacaacccaatgtgcaaggaccgagtagagcatgccaaggacatctgggctatctacccaggtcagactgctcacttgacagtgcggtgcatgaatgccctgtaccatctgcaagtgatgcgtgatgaggcaatgtcccatctgatggcattgttggaagcaactaagatcaccttggataacagagaagagcttgtggttgacttgtccactgagatggtggaaaaagacttacaggtggagcaactgtcaaatgagatccaagagcttgaggaactggtgggaacaagggagaacaccatcgaggttctcgaggatcagttaattaacacccagcagcagcttgccgaggctaacgagcacctggatatgcatcaccaggagatccaggacatggaggccaatgaggatgtcgacatcgagggaggagaggagcctgcctccagcttggacactgctggctcagggagacccccttcccccgagtcgagtgttgcctcgtttgctcactag

SEQ ID NO: 21685 - DNA, 237 bp, Zea mays
  Peptide Sequence Number=SeqID_65060
atggagaacaactgggttatgctgctgaaatctcgttcggaccaacggacacgtgcacgaatcacatgcggccacacccattctccggctgtccaaatacgtggacaatcccggaaccacgcacatcacaatggaggttgcagcggcgtcgggggaggggacgggcgggggcagcggcgtcggcaagccgcggcggaggacgggacgggcgcgtcggggtcggcggcggcggcgtaa

SEQ ID NO: 21686 - DNA, 435 bp, Zea mays
  Peptide Sequence Number=SeqID_65061
atgaggaaactcgagctcgagccatggagaagggaagggagctcgcaggggcgaactgctgggagatgggagcggctgctccctgctcttggggaagaagggtgccccacttgccgctgtgcagaaccagggcggaaggagggggcgcagtggagagagcctgcagagctgtggccgagccagggatggttgctccctgcgccatgctccattggaggagacagcagggtcgtcggcgttgagggaggagggtgcagggagcttggagctgctgctgggcgccgaccatggagaagcttctacgcggcgtccaaggcaggggaagtggagctcacgcccatgggaggagaagggcaggggacgccatggctggccgaggggaggagcaggcctgggcgccatggagaggagcacgactccctgctgctgcgttag

SEQ ID NO: 21687 - DNA, 162 bp, Zea mays
  Peptide Sequence Number=SeqID_65062
atggatctcgcgcgagctgttaccgatcccagggtgaccgaccactgggtccaagctgtcagcgcaacagaggagctacgcgcgcggagtttggctgatgggtgggcccttgttgtcggcgtcgtgatgcctggtgggcgcgcgggattatttaggatttaa

SEQ ID NO: 21688 - DNA, 96 bp, Zea mays
  Peptide Sequence Number=SeqID_65063
atggccgccgccgcggttgctactgcaccgccgctcggtctgcgctggggtgcttgggcggagacgatcgagtatctcttcgctcaggttaagtag

SEQ ID NO: 21689 - DNA, 447 bp, Zea mays
  Peptide Sequence Number=SeqID_65064
atgagctcgcatcgatgcgcaatcccgggtcaccaggtcgtcaatcccacaaggcaaagccgcaatccatccccggagctgcgcagtgaagcttcgacgacagagcccaagcgcagcagcacccgacttgtcttctcccttgcctgtcttcaactcgtgtcggcgacatggagagggagcagagatggggcgcgccgagcggaggctactggggagggagcttggggcactagagggttgaagggagagcccgcgcagcgcccacatttatgccagagaaggaagggagattacgcttcctgccagcgcagatcacggattccgtttggtggtcggcgagtacttcgcgggggcgcttccattgaactcggccgcggagtccgcgacggaggcgatcctggcagcagtggcccaccagccagcggagaaattgacacaggcgcgtga

SEQ ID NO: 21690 - DNA, 439 bp, Zea mays
  Peptide Sequence Number=SeqID_65065
atggatcgcgggttgattatctacttcttcaagggcttatttgtaaacttggctcagcgaagagatcacggattccgtttggtggtcggcgagtacttcgcgggggcgcttccattgaactcggccgcggagccagcgagcggcaccagcgagatccccgcgcgcggatccagcgtttgcgaacggaagagctgggagaagatcctgggtgaaggggcccgcatgccagtgactgctcacccgcacgactcgatttggctccaggtgatgcgactcgctgtgcgtaactcagagacaatcgatcaagccaaggatggaggcaagaagaggttcgaggtaccgagtgcacgggagaaggtcaaggagaccaggaacccaaagccaggggtgaagaagaagacttgcaaagtcaaggttgatcgagttaagaagagttatg

SEQ ID NO: 21691 - DNA, 156 bp, Zea mays
  Peptide Sequence Number=SeqID_65066
atgaagccaagtgaagttgataggaaatactattactttatcactaaggaggaattcctgatgatgaatgagagggaggagttgctcgagtatgctcttctttgtttatggggagtacaaggagatccccaacaacagttacaattgcctctatga

SEQ ID NO: 21692 - DNA, 1050 bp, Zea mays
  Peptide Sequence Number=SeqID_65067
atgtccgatggcacaccggacagtccggttgtccgcattgtaaccactgctcaggagaaggcgaagccgtggaaggagacttccaggagttttaagactacgatgaattctagatggctcgtcttagacacactgcactcgagtcacctggagaggctgcaccaccgcctgcgtgaggagcaggaacgccggcgccagcacggagagcagcagggctcttcctcctcaccccagcaggaggtggagaccgtgaggccccgttcctctgttgcccagctggaggcgccccttgtaccaccgcgggacgccccggctgttggaggagctactggaggagatcccgacgacgacgactcagaccacatcacggagtcttctgagccgcaggaggcggaaggatgggtcgcccgacccatcacccgtgacgccgctcgcggttgtcacttccacgacgcactcgacaccttgctgcgccaggctttcgaccggcacacctggtcgatcgagtatcgttgtgtagtctaccagcacagtcgcgggaggtacccggaccgctgggaggctacctgcctagttcgccgtccggaggatgacctccggggtgcggaggccgtttcggagcactattccatctccgagagggacactgcagaggcggctatgcaggatgcagcacggcgtgcactctctcagtactgttctttgttcggtggcgtggccgatggtcttaaccttcggtactacccctgccgccctactggcagcacagagagtgtggttgtctcacccgttggtgaggctaaccctaggttgagcagcacagtcaacctagtcgcagtgcttaacactgagctggaccactctctggacgagctaagcagggctcgaacggagattgcggagttgcgtgctgagttggcagagcgccatcaccaggagggtggttctcccgcacctgttgggactcagcacccataccgctcaccgccacgtggtcaccacacttatggttcccctgtctgtaagaccaggatagatctggatccttag

SEQ ID NO: 21693 - DNA, 452 bp, Zea mays
  Peptide Sequence Number=SeqID_65068
ggggagatggcgagcaaggctcggggctcaagtggccgagggcgaggtggggcgagccccacgcgcgacgtgggcgcggagaccgcggcacgcacggcggcggttacgcgaagacggagaagctgacaagccgggcccgcggcgcagagagagagaagaaagcgggtgcgggcgcgagggaagcggggctgacggaccgggcccgcgggcatacagactcgagggagcgggcgcgcgcgcgagggtgttacagcgctatccccgtcgcggatggcgaccagcggtggcggctgcgagagctcgaggcggaggcggaggcggaagctggatcgatcttgggtcctccgaggagcagcccccgtgaggtgaaagaggagatggcccggtgcttcgacctcgtccgccgcctcggcaggggcaccgtctatagatgtccaataagcacgagccac

SEQ ID NO: 21694 - DNA, 2889 bp, Zea mays
  Peptide Sequence Number=SeqID_65069
atgggcaacagcacgtcccgggtcgtcggctgcttcgcgccgcccgacaaggccggcggcatcgacctcgacttcctcgagccgctcgacgaagggctcggccactccttctgctacgtccgcccgggcgccgtcgccgactcgcccgcgatcacgccctccaactccgagcgctacacgctcgactccagcgtcatggactcggagacccgcagcgggtccttccgccaggagcccgccgacgacctggccgccgccgcagccgccggcctgcagcggccctgcaggagcttcggcgagaccaccttccggaccatctcgggggcctccgtcagcgcgaacgcgtcctccgccaggacgggcaccctcaccgtctcccttatacgtgacgtgcaggagcccgccgccgcgttcgagagcaccgcctccttcgccgccgtgcccttgcagccggtgccgcgggggtcgggcccgctcaacaccttcttgtcggggccgctggagagagggttcgcctccggcccgctggacaaaggctccggcttcatgtctgggccattggacaagggagccttcatgtcaggccccatcgatgctggcagcagaagcaacttctcagcacctctttcctatggacggaggaagcctcgtctgaggcttcttgtacataggattagtagacccatgaaaaccgcactgtccagaacattcagcaggagctcacaaaatccaggctgggttcaaaagtttctgtcgcatcctatgtctcaactgccctgggcaagggacgcaaagtccagatcagaaggttcacaggatggattggaatctgggatacccgagcctgagtataacgtgacaaggaaccttcagtgggcacatggaaaggcaggggaagatagggttcatgttgttctatccgaagagcaaggatggttgttcattggaatttatgatggatttagtggccctgatgtgcctgactttttaatgagcaatctatacaaggccattgatagagaactggaaggattgctctgggtttatgaagacagctctgaaaggagtgatcatgtatcgactcatgaagagggtggattggttgctgcttctgtggatgctcctcatgatgatagtggccagtgccagagtgacagtgggagacaagaacttggtaattttggaaaacaaaatgtatcacctggaaagggttgtgatgatagtgccttgcaatttcagccaaactgtaccagcagtgaagagaaagatttggctccacatggttcaagtagtgagatgttgggcagggatgagatagttgaggaaatggttgaagctgatctgggaaatgatctccaaagtagagaaccccacagctcgaacagagatctttcaggtacagatctaaacaccagctgcagatgtgcaacagaaaccagttcctattgtgatcagcatgccaaattcttgaaaggaaacagaaaaagcaagcgtctctttgagcttcttcagatggaactgctgcaagattataacacaaggttatctaaggagccaccagaggaaagtaaaataccaaacttgcatgttacacaggcagacactgcagaagcgcgctcaagaaacacagctgaggtctccaggtgttcattggcagcaactggagaatgttttgatgattctgaaggtcttggaagttcaagacacgctgatagtgtacttggcataggtattaaagagtgtacagggtgttctatatctacatcttcatcagggcacaagcaagttacgagaagaattttaatcggatcaaagttgaggaagatgtacaaaaagcaaaaaatgttgcagaagaagtttttcccatggaactatgattggcacagagatcaacctcatgttgatgaaagtgttataaaatcttcagaagtcactaggagatgtaagtcgggaccagtagaacatgatgctgtattgagggcaatgtcacgggcacttgaaataacagaggaagcgtacatgaaaattgtggaaaaggagcttgatagatacccagagcttgcattaatgggttcgtgtgtccttgtaatgttaatgaaggaccaggatgtatatgtcatgaatcttggcgacagccgagctatcttggcacaggacaatgatcactttgatcagtacgatagctcaagtttctcaaaaggagatttacaacatcgaaataggtcaagggagtcacttgtccgtgtggagcttgataggatatcggaagagtcgccgatgcataatcctaacagtcacctaaacagcaacgcaaaagctaaggaactgtcaatatgtagactaaaaatgagagcggttcaattgtcaactgaccatagcacgagtattgaggaggaagtcttgaggattaaagtagaacatcctgatgatccacaagctgtctttaatggtagagtgaagggacagctgaaggttacaagagcttttggtgctggttttctaaagaagccaaaatttaacgaggcactacttgagatgttccgcatcgactatgttggaacatcaccatatatcagctgcaatcctgctgtacttcaccaccgtctctgcgcaaatgataggtttcttgtgctgtcttcagatggattgtatcaatatttcagcaatgatgaggtagtttcgcatgtgctttggttcatggaaaatgtaccagagggagacccagcgcaataccttgtagctgaacttctttgtcgggcagccaagaagaatggaatgaattttcacgagctactggatatcccccagggcgatcgtcggaaataccatgacgatgtttctgttatggtagtctcgcttgaaggaagaatctggcgatcttctggatga

SEQ ID NO: 21695 - DNA, 87 bp, Zea mays
  Peptide Sequence Number=SeqID_65070
atggaggctggactctggtggggttttgctcatatccggaagacattattcctaatcaagcatgctagctccttaagatcagattaa

SEQ ID NO: 21696 - DNA, 228 bp, Zea mays
  Peptide Sequence Number=SeqID_65071
atgaccgttggtggaggctgtctgtcgtatggtgcaccggacagtccggtgcacaccggacatgtccggtgcgccagccacgtcaccaatgccgttggattccgaccgttggagcttctgtcttctgggcccgcctggatgtccggtgaccgttggcgcgaagtagccgttgctctgctggttcaccggacagtccggtgtacaccggacatgtctggtaaattatag

SEQ ID NO: 21697 - DNA, 684 bp, Zea mays
  Peptide Sequence Number=SeqID_65072
atggaaggtgccgcggatcccggccctcctcccacactgcctctccctccccctgtgctccacctcgccgtgtccgcaatggaacccacccgcggatctcgcccacgatgcacgcctccaccgcgccgccgatggaaggtgccgcggatcccggcacgcccgctcgcccggatctcgccgtgtccgcgcatggatcccgcccgctcgcccggtctcggcacgctctcgtggtggaggcacccgctcgcccggatgctcatgaatactgtccaagctcgcgaggcctccgcccgcctcccccaccgtgacagccgcactccatcgcccccttccatccatggcatcgcgcgtccgcgcccctacgccgccacctcactcctggtcctctctcttgcccccatcccccatgaatcccacctccgtgatgccctcagtccccttccgctctcagatttcggcatctcccggatccggccactcgcgagggccttctgcgacgcgccggcctcgcgtgcggatgcgggggccaacgggacgcccagcccgcaggatcacgccgagaaggatccgcccgatgtgctagacgttgctatcgttggtggaggcatgatgggcttggctgtcgcttgtgcaatgcgtaaggagaggatccaggtgtacaatgggggtgtagcagagtgctaa

SEQ ID NO: 21698 - DNA, 120 bp, Zea mays
  Peptide Sequence Number=SeqID_65073
atgccgtcgaaacccgtggtgagaaacacccccctgctgtcctcgttgtttatttttctgatgttatgttgtcagaaaggcatcgataaaaatttatgtgatgataaaaataatatataa

SEQ ID NO: 21699 - DNA, 258 bp, Zea mays
  Peptide Sequence Number=SeqID_65074
atgcagtggagaaagggcgctcatgactgctggccggagctagagctcggtctggaggtgagggcgcagggaatcccggacgccatggccagccgacggtctagagcttctcccactgcgcaagggaagccatggaggagggagctcgcagggagggacgccgagcacagggagcagaggtccggccatgggaggaagaaggtgtgggctactgccgtgtggagaagaagacagggagaaaaagaaagtggcaactag

SEQ ID NO: 21700 - DNA, 138 bp, Zea mays
  Peptide Sequence Number=SeqID_65075
atggggaagcctgtcccatcactcctcatgctcctcctctgccgagacaacgcatccccatggaccgttgtcaacagaccatcatcattccaatataaattggatacaagcaatttcctgacctcacgcgagtgctag

SEQ ID NO: 21701 - DNA, 162 bp, Zea mays
  Peptide Sequence Number=SeqID_65076
atggggaaatcaacccgcagtactgcaaatagtgttctgagtcttgaaataacttgcaccatagcccctgacttccctgaagagcccgtgactgaggatcctggtgagcagcagatagaagtagctgtgcaggagctcattgaaggcgagttgtgcccttga

SEQ ID NO: 21702 - DNA, 843 bp, Zea mays
  Peptide Sequence Number=SeqID_65077
atggggtttgacgggctggtcgtggtgtcagatccttacctgcagcgccgcttcacgcaggccgaacttcgcgcgctccaggcccagtatgcggcgctgcgggacgcgtcgcctaacgggaggctgcggatgcgggacctccccgccgccatctctggcgtccgcggtgcggccaagagcagggacgccgagaaggagaatagcgcgccggagccaggcccctgccatggcctcactgacgaggagtgggcctccgtgcttaaggccgtcgcgcgtgctgacgagaagccgcaccaggacgcgagcttcgagctcttcctccgcgtctacgctgagatgcagctgcgactcaaggcagtaagcgtctgctccggccgcgccggaggaatcgtgcgctcctcctcctcctctgctgttgccttcctcacggcggccaccaccacactgcttcacaccatcagcgagtccgagaaggcgtcctatgttggccacatcaacgcttatctcgcggatgatccgtccctgaagagcgccctccccatcgatccggcgaccgatcacatcttccatatcaccaaggacggcgtgctcctatgcaaactcatcaacttggctgtaccgggcaccatcgatgagcgagccatcaataccaagagggtccttaatctttgggagaagaacgagaaccacacgctttgcctcaattctgccaaagcgatcggctgcactgtcgtcaacatcggcacacaagacctcgccgaagggagggtaaagaatctcgcctcatttctctcggattttgatgagttacggcaagagatcatcagagcagagctgtcatga

SEQ ID NO: 21703 - DNA, 417 bp, Zea mays
  Peptide Sequence Number=SeqID_65078
atggtcggacacgacaccgtctcggattaccctaaggaagaatcgcgtaaggtcagattgcacggctatggcgccgccgtgccggagctggcgcgccgccgctgcctggtgtcgggtgtagatggtcacatctggaccgttgatgcaatatggacgatcattaatgttaattggaacatggagcataacttgagaaacatgtgccaccacaagggtttaatggggacgccctttggccaactaactaggaaagctagtggaagactaccttacccgaaaggggcaagggcagtaggggattgcatgcaaggaggttctcgggttgattttgctgcgatggcggtcagacggaggattcttgcaagtgctcttcccataaactgtagtgggttttcggaagctagtggaactttgtaa

SEQ ID NO: 21704 - DNA, 156 bp, Zea mays
  Peptide Sequence Number=SeqID_65079
atggtgggtacaagtgcggccactgcacggcggcagccgcagtcagtggagcattgtacgcttcaggatatggttgatggtgttacttggcctaccaccctgccaccgggttggactgtcgagtgggatgctgctccagcaggagaggagcagtag

SEQ ID NO: 21705 - DNA, 867 bp, Zea mays
  Peptide Sequence Number=SeqID_65080
atgacttcttacggatcctcggacgaagggaatgcacagtcccacactgacgggcttgcacgagagggttttccccgtattttgtgggaggtacttcagggagctggttacatgacgcctccccagtatgcggtgcagctgttcgagaagcaccgagtgccccgctgtagggtgaggatgaccctggagcctcatcccctacagccaggctggcgttcgctggactctgagtcttttggatacaaggctgaggacactatggaggcaattgttcttcacggactgaccaccttctgcggattccaccccttggagctgtccactcaccccattggtttgttcctcgcgaaggaggacgacccaatgtggaaggaccgagtggagcatgccaaggatatctgggctatctacccaggccagactgctcacttaacggtgcggtgcatgaatgccatgtatcgtctgcaagtgatgcgtggagaggcaatgtcccatctaatggcattgttggaggcaaccaagatcactttggatgacagagaggaacttgtggtagacttgtccactgagatggtggaaaaggacttacaagtggagcaactgtcgaacgagatccaagagcttgaggagttagcgggaaccagggagaacaccatcgaggttctcgaggatcagctgatcaacacccagcagcagcttgcagaggctaaccagcacctggatatgcaccaccaggagatccaggacatggaggccaacgaggatgtcgacatcgagggaggagaggagcctgcctccagtttggacactgctggcttagggagaccaccttcccccgagtcaagcgttgcctcgtttgctcactag

SEQ ID NO: 21706 - DNA, 534 bp, Zea mays
  Peptide Sequence Number=SeqID_65081
atggagatgggcgcgcagcgaggaagaagtagagggagggagagaagcagctgggcgcgcagggagaacgcgccatggctgagggagctcgggacacaggagcgccgcgaagaggaagctctgcgagctgggatccggcgcccggggaaggaagaaagaagagcggctgtcaggaggggaggagacgcggctagggagggactccgctggtgctccactcgacgaccggagatgaggcgacttgggaagagcctgggcgtcggccaggaagataggtcagggggcacggcggcatggcgagggagccggcgagcgcaggggctccacgagctgagggggcgcggcgatgggagctcagcacggatcttggcaaggcgtggccatgggaggagcgaccggcgcagagaacttgaggaacgcgcgataggaagatggagcagggagatgaagaagggtgtcgtgctcatcaacaggaagggaaggagcaggggacgaccatgggaaagcggcaacagggaagagcgcgcggcgtga

SEQ ID NO: 21707 - DNA, 234 bp, Zea mays
  Peptide Sequence Number=SeqID_65082
atggcaccgcggctaaaattcaccagactgtccggtgagccaaagccgcatgcgccaacggtcgacagtgcaatcagcgggcgacgcgtggcccgcgccaacggccggttggtcacaccggactgtccgggcgagaggctccaacttgtgagattcctcgcaaacgggaaaagaactctaaagaaaaagaccgtggtattcaagttgatcattggatcacttgaaaggggttga

SEQ ID NO: 21708 - DNA, 217 bp, Zea mays
  Peptide Sequence Number=SeqID_65083
caacgaagctgaagcttttgaggaagttttgagtggtcgtggggatatctgcgctttctcagctgagctatctccttccccagagcccttcgagccaacggccgtcccagaagcaaagagagaggaagaaatcactaaaatggccgaagctattttagatgaagctgtttctcgactgttgaacgaagctgcggaagcaattttgaaagaagaataa

SEQ ID NO: 21709 - DNA, 474 bp, Zea mays
  Peptide Sequence Number=SeqID_65084
atggacgagagttgcactcaactcctctcaggtgatccaatgatcaacttgaataccacggtgttctttttactttgctcttttcccgtttgcgaggaatctccacaacttggaatctctcgcccttacaataagaatcaatatgaagcacaagagttccttcgaggtggagatcctccgaccgtgttgccattcgaggccgggtcggattccgtcgaaggtggagtcgacgccgagggtgctgctgctcccccactgatgtctgaccctgcaagaacagtttatcttgtagtgtgtgagcccgagggtctcggcgtagatgatgttgaggctgctgcctccgtccatgaggaccttggtaagcctgatgttgccgatgacgggatcgacaacgagcgggtacttccctgggctcggcacacgatcggggtggccgccctggtcgaaggtgatgggcttgtcggacctgtctag

SEQ ID NO: 21710 - DNA, 1776 bp, Zea mays
  Peptide Sequence Number=SeqID_65085
atggccgccgcgacgtcgcgcgggccagcgtcggtcgccatctgtgcgctcgccgtgctccacgcaatggctgcgctgtgcgactccgccaccgcggcggcggcgacgtgcgcgggcctggccccggccaagcaccggccggaggtgatatccatcgccgacttcggcggcgtgggcgacgggcggacgctgaacacgtgggcgttccgcaaggccgtgtaccgcatccagcaccagcggcggcgcggcggcacgacactgcacgtgccggccggcacctggctcgccggcagcttcaacctcaccagccacatgacgctcttcctcgccagaggcgccgtgctcaaggccacgcaggacacgaggggatggccgctggtggagccgctgccgtcgtacggccggggcagggagctgccgggaccacggtacgccagcttcatccacggcgacggcctccgcgacgtcgtcattacaggtgacaggggagtcatcgacgggcagggtgaggtgtggtggaacatgtggaggaggcggacccttgagcacaccaggccaaaccttgtggagttcatgcattccaccggcattcacatctccaacatcgtcctcaagaactcacccttctggaacatccatcctgtttactgcgacaacgtggtcgtaaccaacatgatgatcttggcaccacgtgactccccaaacacagacggagtcgatccagactccagctccaacgtgtgcatcgaggactcgtacatatccaccggcgacgacctggtggccatcaagagcgggtgggacgagtacgggatcgcgtacgggcggccgagcgccggcgtcacggtccggcgcgtgaggggctcgtcccccttcagcggcatcgccatcggcagcgaggcctccggcggggtgcgcgacgtcctggtggaggactgcgccatcttcgacagcggctacggcatccacatcaagaccaacgtcggccggggcggctacatccgcaacgtcaccgtcgacggcgtgcgcctgaccggcgtgcgcagcggcgtccgcatcgccggcgacgtcggcgaccaccccgacgcgcacttcagccagctcgccgtgcccacggtcgacgccgtgcgcatcagcaacgtgtggggcgtcaacgtccagcagcccgggtcactggaggggatccgggcctcgcccttcacccgcatatgcctctccaacgtcaagctcttcgggtggcggagcgacgccgcctggaagtgcagggacgtgcgcggcgctgcgctcggggtgcagccgtcgccctgcgccgagctcgccaccagcttcgcgtccgcacggtattcactgcgtgccctgcacagatgtgaccgttttgaaaaatatactgataattcctgggcgtccccccaatgggtgtgggcaagggacggcttgacgactccccaggggattgccgcggaagtctggacgtacatccgggccgtcgagcgctccgggctcgagggctcggatgagtcggagtactcctcggatgaggaggactcggacggcggcgaggacgaggacgacgacgatgacgatggcgacgacgacggcgatggtgacggtgacggcagcggcaggggcagcggcgacggcgacagggacggtgacggcggcagcagcaagggcagcaccaagggcggcagcagcaagggcagcaccaagggcggcggcagcaagggcagcaccaagggcggcggcagcggcagcagcaacagggccagtggctag

SEQ ID NO: 21711 - DNA, 240 bp, Zea mays
  Peptide Sequence Number=SeqID_65086
atggcgagcacgactcggctttataggtgcgcggagtccgtggcgaggcaagctaccaaccctgcccagctagcgcgctcatggcgccaagccacggagatcgctgatggcaggtgggggaaatacagcggtctctgttgggatttggtttgggtgatgaagctgatagggatggcccaccgacagtgtctgatccacgcacgaggactgagggtggctgcagggagggcccaggtgtaa

SEQ ID NO: 21712 - DNA, 549 bp, Zea mays
  Peptide Sequence Number=SeqID_65087
atgcaggcggcatgcaaccgtaccaagggggcgcaccctttcgactccgacgcgtccagcatgagggcacaggcccacacatcatgcggcacctttggcaggcgaagcaggcgacgcttcacctccgccataatgaccgcgtcaaaaaagggttcgacggccgccttagagcactcgggctccgcgcccaccactagtcagaggctggcccccgaagggttcgacagcctcctcagagcacgcagagcgagggatgactctgggtacatccgatacatggccgaggctcgggctacgctcccgaggagcgattctgtaacggaatcccatcagagggaggcatcaagccctcggaccctatcaaatgggaccgggttcggcaaatcacctgcaggctcaggggctgctctcgcaaacccggctccggccaaaccgttgacagcgtcaacataccagcccgagaacttggaacctgcctatgcactcgggctacgaccagttcgcataagggaacaaccagaccggtcgaagcatcacgaaacacgctaa

SEQ ID NO: 21713 - DNA, 390 bp, Zea mays
  Peptide Sequence Number=SeqID_65088
atggggagcgcccatggttcttccgtcttgtcgtcgttggaggaacgcaacttcgcggaagttggtacctttcagccatcgctcggcttcaaggattttcatcaggcagcccggctgcatcccctcgccggtgcttctgggggtggaaaccatcctccagctctgcggaggaggcgccctccagccatgccggggaaggcgagctgttgctgcccagccagggtgcaacattccgtcctctgtcctcgctttcgtggcgaggacgggagtgaggacctgccggtgtgctttggggcggccggcactggctggtgcggtgttggcggacaggtggtcgccgccttcggtgctgaggtggtggcagctggagaaagcttgcacaccgtctag

SEQ ID NO: 21714 - DNA, 708 bp, Zea mays
  Peptide Sequence Number=SeqID_65089
atgacttcacagactgctgccgagtcgactatcttgtcgatgcgagggagtgggaactcgtctttagggcaggccttgtttaggcaggcattgatagctcttcagcctaggattgcattgtatgggtataccatgtcgatgacatcgaaggtgatgggctctgtctgtgcatttgcactggtgccgaaggatagtgataggacgattttcccgaggggtgtcaaggaagatggtatcagactaaccgcaattgtccacgatggccttgcgaatttcctagtctgctacattgcatttgatgaccatggcatcggtgtgtgggccggggtgttgtggagattgacattatttgagtcgaacgatgtcgtgaaccgtaggctgagggtagccctcttcttcttttggcggcaacgggggttgctacctttgatggtggactggttgcgtagggggcggggtctttggttgagtgactggagctttcatgaaatatgcagtaaggtttgtattcgcaaggaggatctcgtccatgcccccttccccttggggccctgcgctctaccagctgaggctgttgcgttcgcacccaagttttggagctccctgggtgtgaagggtcctttggattgcgttgtgcttcgaccttgcgatagtggaggtcttcgtgtaacacccccgggatccacaaacaccccgaaatgctactaa

SEQ ID NO: 21715 - DNA, 828 bp, Zea mays
  Peptide Sequence Number=SeqID_65090
atgcaggcggcatgcaaccgcaccaagggggcgcaccctttcgacttcggcgcatccagcatggggacccaggcccacacgtcatgtaaccggcgcgccggttactacgtgcgagaaactgcaccgccacttgcgccagtaccgcgccttctcgactgcggaaccggtgccgcgactcgaggcaaccctgcgcatggcccaacagtgccaaccgagcacatcagtcacgggtcagtcagccgcgggagaaggcgcgacggtcgatacgaccagaaatgggccgacagtaatggtggcggcaggcgggcggaagcagcagtcaagtcgtctgcaagctcacgtctcctcctgggacagcgagagaaccctctcccacggcgtgatgacgacgcgcccgagttccgttcctcgaacggctcgcgcacgcgcaacggctgccctgcgaaccactcgtcctgtcgcattaactctgcggcagggcaggcgacacctttggcagggaccgagaaaggggatactccgaaagggatccttatccgcgaaggaagcgggccccgagccctcttactgatcagaggttcgaaggctggcccctcggaagggttcgacagccgcctcagagcactcgggctccgcgcccactactggtcagaggttccaaggctggcccctcggaagggttcgacagccgcctcaggccactcgggctccgcacccactacttgtcaaaggttcgaaggctggcccctcagaagagttcgacagctgcctcaggccactcgggctccgcgcccactactgatcaggggttcgcaggctggcccctga

SEQ ID NO: 21716 - DNA, 804 bp, Zea mays
  Peptide Sequence Number=SeqID_65091
atgcatcgcgcccttccaccttccgagcccccggatgggggcgcccgtgttgcttttgtcttgtcatcgttggaggaacgcaacttcacggaagttggcacctttcagccatcgctcgacttcaaggattttcatcaggcagcccggctgcatcccctcgccggtggtcacccaagacggggtggaaaccatcctccagctctgcggaggaggcgccctccagccatgccggggaaggcgaactgtttctgcccagccagggtgcaacattccgtcctctatcctcgctttcgtggcgaggacgggagtgaggacctgccggtgcgctttggggcgaccgacgctcgatggtgcggtgttggtggacgggtggacgccgccgtcagtgctgacatggtggcagctggagaaagcttcttcgccgacgagcccgttagcgctacccgcggaccgacctccggctctttggctttaatgtctggttctcgtcccttgagtggggacgcgaacaagagccttccggtggcagcgtccgtcctggcaccatcgctactgctgcagaggtcgctggcgagtcaccaggagtttgtcgtcccgcgggctctccgatgtggaggttgttcatacccgcgggagtggaaccggtgttccgtctgtaatggcaccttgagtgccggaaccctcggccgctctgcgatgagccggagccagaggcagcggtgccagcacggacagaggcagagttggctcgaaaagaagcttcgtcggccggagcctgaccgggctgtccactggccggactag

SEQ ID NO: 21717 - DNA, 1632 bp, Zea mays
  Peptide Sequence Number=SeqID_65092
atggaaaagcttgaccataatgacatgacaattcgagccggcccagggaaggagctcaaaattacaaaggatacggtgcactttattttggggttaccaaatgctagtggagggacggccttgggcattgatgaagctgttgctgccaacaatttaagggctgaacttgctttatcgaaagaagattttggggttgcagctcttcaagatcgtctgaggaaagggtctgacgatgatctaaccatcagatccttctttctgatactgttcaataggttgttgttccctactgccagctggggaataaccaaccatgaggttcttttaactgaggagatggatcgtttccaccagatggactggtgccagcttattttcaatgatttatgccaagctgccaagaagtggcatactaggagcgttacaaacgtttctacaaccatttatggatgttccatcgtcattcttctgtattatttggatcatctgcatgactcagctgcacctcagaataaacgtgaaacaccacgcatcaagtattttgataggaatattattcaagctctggcaagagctgacaagggcaagatacgccaaggacaagaaccatttggacattgttcgaccaggacaaatacttttgatgtacctcgtcctaacccatctggacagcacacaattcacatcaaactcccgctcatcagggatttgatatcaagcaagctgaatcagcttccatcccaccatcgcctgagtttcatagagaagttgtcacattatgatacggaggttggtaaggcgtgttcagttattaaacagactcttcagaagattgttgagaaacaatacaatctatctgatgtttttagcgagttaattgatgaggtcctccgtgctgagtcgggggacaatgaagatggttatgatgtgcagaaaacaactacaaaatcagatgatattcttccccatactgcagaaagttgtcccgatgaagcttatattgatccactggttcatacaaatttaacgaaacagaacaaaacacctacaaccccagtgggtaaacatggtgacggtggcaagaacatgccgaccaacacaaacgtcactcctatagcaacaccacatacagaatcttccgcgccgatatttgatgcgacgccgcaaataaagtttcccggcggcgtccaacaagcggcagaaacagatctatccgacagtggtccatgctttgatcagactccatctgaacatgtttctgttgaaaccgatccagctacaaacactcctcagtcactactcaactttgaggaacaggaacgacacagccggaaccctcaaccctttgatgaatctgtactccacacacttctagacaattcattgcctgaggcagatgaattggatcaatgcaaagcgtcagatcatggttcccatgcaggatccaatgactgtgggttttatgttatgggttacattctcttttatgaatgcgacgaaggatctctgcggtcagacatagaagcaggcaacactagtgagatacggtctattgcgctgcattatatcacattccatccgaagaacaaagcattatcgctgcttgaagacattcaaagattcaaggtctaa

SEQ ID NO: 21718 - DNA, 252 bp, Zea mays
  Peptide Sequence Number=SeqID_65093
atgaagaacgtagaccaacctccatctaatccaaaacggattataattcagtctactcaagagtgttttagtgtcgacataccccatgttctggcggaaactgttagacacaatacaaggcaggctgctgatgaggacgatgaatttatgtcattatcgaagaagcgtaactttgatgacagtcctccaaaagtcttgaagaagatagttacaaagcggaggaaagtagtggaccccccacgacagatgtaa

SEQ ID NO: 21719 - DNA, 567 bp, Zea mays
  Peptide Sequence Number=SeqID_65094
atggttgcactgttatcccgggtggtcactcaacgaacaggtccttacagagaggcgcgcactgaccagcgggccagggtggtcagcgaccgggggcggggaagcagactgaccggtcgggcccagtgccaggggcacaagcggccgacaggtgggtccaggcgctgggtgcacgtgcgcgaagcggtatccggtgatccggaccgcgcgatagagaccagacggccgaaatcaagcacaaggagacgtggttggggatctcggcgtgcatatgcgctggtccacggtggttcatggggaaggtggagctggcaggtctgtcccacggcacagcgaggggcagcgggcgcgtggagggaacgactcggtgtgctgacaaaatgggcccacgaggcagagatagaagaggggcgcgtggacgagcaggtgaccagcgtcgacaacccggtcccactgagcagagggaggaagagagggagagagagcgtgcggggaaagaaactaccgctgacaggtggagcccacctgtggggcagcgcgggcgcgtgcgcggccccgctgggctag

SEQ ID NO: 21720 - DNA, 1350 bp, Zea mays
  Peptide Sequence Number=SeqID_65095
atgactactacgaccaagaatcataagcagcagcagctgctgcatatgctgcccacggcggctgccccgccttggcccgtaaggaccaagctcctgctctgcgccgccctcggcttcgcgctcggcgtcgtggccaccgcgtccctcgtgaactccccctcctacgcgacgtcgtccgccgccgccgccgcgctacggggaggaggaggagcgctgggcctcgtcttaccgccgtccgccaccaggaacgccgctcaggaccgccgcccgccgcccaaacaagcaggcgcggcacgggcaacggtccgccggtcccgaccggagccgccggctggcacgggcatcactagcgctgcagccccgccgccgtctgttgttggcgccgagggaccagcagcgcctagtgccacctcccgtgtcaatggtggtagcatcgtcagcgacagcgacggcgacgacgaggagctcatggcccgggcggaggcgtcggcgccgcgggaggtgcctgccggctgcagggtccccagggtggcgttcctgttcctcgcgcgctgggacctgcccatggcgccgctgtgggacgagttcttccgcggccaccgcggcctctacaacgtctacgtgcactccgacccggcgttcaacggctccgacccgcccgagacctccgccttctaccgccggaggatccccagcaaggaggtgaaatggggcgagatcagcatggtggaggcggagcgccggcttctggcgcacgcgctgctggacgaccactgcaacgcgcgcttcgtcctcctgtcggagtcgcacgtcccgctgttcgatctccccacggtgcactcctacctcgtcaactccaccaggctgtacctcgagtcctacgaccagccaggcgcgacgggccgcggccgctacaaccgccgcatgagccccgtcgtggccgcggggcagtggcgcaagggctcccagtggttcgacctggaccgggccctggccacagacgtggtcgccgaccgcgtctacttcccgctcttccgccgcttctgccgccgtcgccactgctacgccgacgagcactacctgcccacgctcctcaacatcgtccggcgcccgtcggcgggggccaaccggagcctcacgtgggtcgactggtcccacggcggctgtcaccccgcgcggttcacgaggatggaggtcaccgtcgacttcctccggtggctcagggaaggcagcacgtgcacgtataacggcaggaccaccacagtctgcttccttttcgccaggaagttcctgccgaactcgctcaccaggttcttgaggttcgcgcccaaggtgatggggtttggttaa

SEQ ID NO: 21721 - DNA, 408 bp, Zea mays
  Peptide Sequence Number=SeqID_65096
atgaggggagtagtgagcaggtcccgcacacaattgtgtcgtgattatcatgagttgggcgtggaggtgtcacccttcaacaagaagggaacaaaccttgacaactggttccttggttggcttgaggacgagctcaagagccttccatctgtcatcaaggggctaatgtcctactctgccctggttacccacaaaggtaccatgactgcccttgcgcacgtaggttgccgccactttgaaccttttggatatattaatttggacttcaacggtgctgtgtacgatgttgaagaagacctaactctaaagctgcctgttggggtgctctttgactggatgtgggggccgcacaatgtctctgttgtgcgggagagcatagaccgagaggtgaaacatgtgatgaattaa

SEQ ID NO: 21722 - DNA, 486 bp, Zea mays
  Peptide Sequence Number=SeqID_65097
atgccgccacgcacaaggctaacggcacgcaagtcaatgggaccaattggagtaccccggcatcaactggcccctcgacatgaaagcagcagcagtggaagtaatgaccccataggagatcttgaagcccgagatcagcttgctgatcgggacttagcacttgactgggcagtacagtctcgtttgctggcatgtgctaaggaagcaagggctcaggcccgaattaaagaacttagctcaactgtcgacaacctgcaggtctactgcaatacgttgcatgaggaagtccatgtactatactcacaattacaccctagtgtgcctgcacaccctgctgaggtagaagccggaccatctcacgttgcgggacgcgcgctgggtggggagttagacctttttgagccccctccttccttgaggttggttgacgtctggactcccacacctgacgatgaggccgccaagagtaatgggaagcaggactaa

SEQ ID NO: 21723 - DNA, 1989 bp, Zea mays
  Peptide Sequence Number=SeqID_65098
atgccatcctcttcttcttccgccaccgccacgccgccggccgccgcctcgtctgaggagacgttgagtaacgtgatggtggaggagttgcgcgccggcgactctgttgaatttggtgtgtcacggatgacgtcagcccgtattgaagatatgcagcggttgggctactttggcggcggagtcgctcgtgctccggggacggaggaagtccccgagccggagggcgagttggttgttttcgaggcgttcttcgccgccggactccgcttgcctgcgcatcgggtcttcgaattaaatcaactgccgtacgacggctaccctggtcaggacgaagcagaccgccgcgggaagaaaccggcggtggagaccggaggcgaccctgcgctggcggccgccacctcttcgaaaaagagaaaattagtgatggacaaggatcgccaaggcgcggcgcgaaaacgccagtcgactgtgagggttcacgaggcccggccgaaaaggcagcggggaacggcgaaggctgaggcctccggcggaggcaagccgccgctgccggcgaaggtgggcgcctccgcgcctggcaaggcgccggaggcgacggtgggcgccggaggccccaagctgtcgaaggtggcgccgtccgtcagcggagtggcggaggctgcgaaggcggcccgatcgttaccgccgtctggcaaacgcgttgccgacttcggcaccgagattaatgtggaggattatcttggggggtcggacgagggcccgcttgctctagttgtgcctggcgcggcgatcgcgacggctgcgccagcgccgaaggcgggggtagagacccttggcgctggaggcgaggtgtctgccctcgcgctggtcagagacgaggcgggcgtggcgacccgccggctgaaggaagcgacggaggcgctgagtcaggtggctgacttcaccagccgcactgcgtcgggggcccttacggcggcgttgtctgccgaggtcgagagacttcggacgcaacatgcggacgctgtccgtgagaagtcggcctccgacagcaagtgccgcaaactggcggagaaggtggccgcccttgagaaggagaaggcagacctccggcgccagctgacggaggagaggagggaggccaacgaagccattgccaaagagcaggctgcgcaggcggaggccaggctggcgcgggcggaaggcaatatcgctaaggagctcgccggagagctgcagcggcggcttgctgccttcgagagccgcgcggagggggccgaggccgcggcgcgagcggaggccgaacggacgcgcacgcagctcatgacttcatatcgcgagctgggtgtgcggacgggtgacttcgaggtgccggagcgagaggccggacttcgctgtctggagtgggtgcaggaggaactgcaggagctccccactgtcttggcggggttgatgtcgttcacctccctggtcacctgcgaggcagcgatgaacgcgctctctcgcgaaggctgccggcactatgaggccctcgaccaggtggatgaggactttgggcgagatatctttgaggtcgaagaccccgtggtgaaggagtccgccggggccctctatgaccggatgtggggttcatacggtcgtgaggtggtccgggcgcgggccgaggctgcgagggctcaggcggagcgcggcgagcgggtggacgaccttggggcgctgaacagcgcgctgcctgagccggagacaacccctgcggaggccgcgactggaggcgccccgggactgaccccggtgaccgcggaagatgcaccaggcgcccctgcacctgctgcggccggcgaaggccttcccccaaaggtggccgaaggcgcacctgatgcccccgcagctgctgtgccgagcgctgaagatccagcggaggtgggggcggaggcagcgacggaggcggcggcggaggctcccgcggcggcagggccttcgcaggtggcatag

SEQ ID NO: 21724 - DNA, 261 bp, Zea mays
  Peptide Sequence Number=SeqID_65099
gagacgaggaaatgcagttgggagagttacgacgacaaaggagaggtgatgcgcacaatagagtccaagagactaatgggacagaagatgcattgtggatctcggctcgtcgattcgtacattaacgatcctctagcagagtatatgaggttgaaggcggcagatgagaagagagcacaggatgcaagggaatgggaagcgactcaagccgagaaacagatgttggataatcttgctgatcgcctcaagggaagtgagtga

SEQ ID NO: 21725 - DNA, 297 bp, Zea mays
  Peptide Sequence Number=SeqID_65100
atggccttgctgttgtcgagggagaccgctgatccatcgccgccagacgccatcgcgcccagccacccagacgcttgtgctccagccgccgtcgcgcgcgcccaggagccgccaaagccagacgccgtcggccgtcctccaccgccctccaggtacgccgccggccccctcctccctcctccctccgccgccacccccaaagccgctgccgccgccagctactgcctctcccgtaccgccgccgccatcgtacgagcaggccgtaggggtgggtggtggccgaagggaggaggatga

SEQ ID NO: 21726 - DNA, 327 bp, Zea mays
  Peptide Sequence Number=SeqID_65101
atgggcagaattctttttgctctaactcctgccacctggaagggctatcaagcgtctcgtctgggcaaggcttcgcaggagccacctgctcctccgaacaacatcctcttcatccagaacttgccagaccagaccacgagcatgatgctccagatcctgttccagcagtatcccggcttccgggaagtccggatgatcgaagccaaaccaggcattgcctttgtggagttcgaggacgacggccagtccatggtggcgatgcaggctctccagggcttcaagatcaccccggagaaccccatggctatatcctatgccaaaaaatga

SEQ ID NO: 21727 - DNA, 654 bp, Zea mays
  Peptide Sequence Number=SeqID_65102
atggcgatggtcatgactgacgccgacgccgccaccgccactgccaccgccgacgccgccaccgccaccgccaccgccaccgccgacgccgccaccgccaccgtcgacgccgactccgtcaccgccaccgccgcagagaagccgaagcacgccgagaagccggactacgccccctacaacggcgcttccaccgcagatggcggcacgggcgcccgcgtccgccgcggcggcggcgtggtggattcggtggtggcgcggtggcggcgggaggacatgctcgacaagagccccctcgcgctgcatgccgcggccgcggtcttcgccttcgtcgctctcgtgcttgtcgcgtccaaccagcacggcgactggatgcagttcgaccggtaccaggagtacaagtacctgctttccatcgcgtcgctggcgctactctactcgctggcgcaggcggcgcggcacgcgcaccggatgcgcggcggcgtcgaccccatctcctcagcatctgggaggcttcttgatttcgttggtgatcaggcgagtcattgcttccaacttttagtctgcagctataaatgttgtgccgacacaggtatttcgctcagtcagcaaaagtccgacgtgtttttcgatttggtcgagattcctgctcagtga

SEQ ID NO: 21728 - DNA, 480 bp, Zea mays
  Peptide Sequence Number=SeqID_65103
atgagttcttttaggctatcttcgcggcgtgcgtgggagcggcaagtccgaccgcgagggcttctacgcctccgcactctggctccacgtgcggcacccacgcacgctggccctcaacgctgcaccctcgccgactttggctacctcaaggacctccccgagctgctccaccgaatcgtgcacggcggtgtgtccaccaggaccccaggcaagaaggcacgcctaaccaccaagtgcagctggggccggagccgcgtctgctttggcaaccgtacgcgtcgcagccgcgcggaacgggccacgcacgtcggctcaacggaggagcgtgtcgcggctagcctggagcgcgactggggacttgcggccgcggccgtggtggcgcgccggactaggagagcagaggccgctgcgagggcggtcgagatgtacataaaaaataacaagtcaccggcaaagccttcaacttcttcctccaattaa

SEQ ID NO: 21729 - DNA, 3867 bp, Zea mays
  Peptide Sequence Number=SeqID_65104
atgcccctgtcgcggcacacggtcgggaacgagtacgcgctgggtggccgcgacctctaccgcgcggccgaccagcacgacccggaggacgtcctcgatggcgtcgccatggccggactcgtcggcgtcctccgccagctcggcgacctcgccgagtttgctgcacaggtgttccacggcctgtacgacgaggtgatgagcacgtccgcgcgagggcacggcctcatgctccgggtgcagcagctggaggcagagctgccgctgctggagagagactcctgccagagagactacctgcatgtcgcttctaacaggggtgtcgattggcgttcgaatccgagggtcgaccaaggggttgtcacgagaggcgacacgcctcgcttcatcatggagtcaatcaagcagtgtcgcggaccacccaagctcttcatgctcgacaagtatgatatcggcggcgagggggcgtgcttgaagagatacaccgacccgtctttcttcaggacggattccgcatgttccaccttgccgcatgaggaaggaattcgagatgaaagaagacctcccaaagccatggagatcaggcctaaccttgagaatgcccagattttccagccccctaacgcagccgacaatgtctccaagctggagactgatccatctgctgaagctatggatgaagtgcccacaaaccgcagacggctgaagtaccgccaactaaatggatctgtattccaaagcttcagaccacttatgctgaatctgtatgaaaagccttcgtcagaggagaaactcgtcacaggtggccactcaaaagtgcgtatatctgtgaatggttcacctgaatcggatactgaagagagagataccatggtagacacgtccgtcaacatgggcaaaggcaaggtcgctgttcgcaagaacagaccagtttctgaagaagcactgtcacgttcttcagatgctcggtcagctggaagcagcaagggctacaactccgaattggatgtctacgtggacgcattaaccacggtggactctgaagcggagacagactcggaacacaggggccatggacaatgtacctttgatcggatggattcagacaatagattctccaatgctcaaaacgccatgacatcgaggaacagcaacttcgacaagaaagataggccagatgttccctcagcaaatagagatatgagtaaccagcatgaagaagccacggtctccacacaaaacaccaaaccagtggttgttggcgaacatgagaggaccagctcgttagaggaactgcttggccaagaaaaacctgcttcttgggatcatgagaggactagctccttggaggaattgctcaccgaagatttcaatgctccagaatctggagcaagagagcaggctactgaagagcagagctgcaatggcagtgccaccggtgctgtatcaaatggcacacaagatattactaagaagaccaaggaagtcaaggagaactctaacattgcaactatttccttcaagaaaatagcaagcaagaggtccagatatgtcggcagcatggctgcaaaagttggcattctgccaaggaaactctccaagaagcatgaccctttctctgattccctccggtgcatggcgaagcaactccttgaactgaagtacgatggcactaaagatagcgacttatatgactttgaagcaaacagtgtgggatgtgatgtcaagtatcagggaatttctgaccctcctgttgaaattaaggagagtgacgtgcacaaatttctgccagattcatcctatgatgatgtgggttcaagaaaatgcccgcaggaagaaatgaaccatgggcaggagcatgatgctccacctactgacagtccacatgattcagtccctgatgaaggaaacggatttcaggaccccaacatgatctacttggcaagcatcatcacatcttccagttcccaagaggaagaaggatgtgcaagtacttcactgcatgagaattcatctatggcagtgctcaaccatattttggagcatgctcaagagaagtttgaggaacatcttgacaaggatgtgaatgaggacattcatacagaagtcatttctgaaaattcatctggcaagtgtgaagacttgaaagaagtcagcatttactcagagcaggtgaatgtggaagatatggaggaaagcaataaatctgatgtatatgtgttggatgatgaaacagccgagtacatagaagagcaagtagtttcagatggtatgaactcttcaccggtttcatccaagcaatcagatgatccctgccggataactccactcgccctcgcagatgaagatgatacagtggcatgtaaggtcatcgatagccctgaagtggatcatattacattatcagaaacattcacggacattgatctacctaatgtggtaaatgagtcagtaatcagcagcgaacatgccatgccagaaaatgaacagtactatttccatccagaaactacttttggacaagatctgtgtctcgacaacaatgaaattgtaggggaaaatggggaagttccactatgcagctcaaccactgtggctataactcctgaaccaactgtaaacagagagatagaacatgagtttcatcaagctgtgtatcaggaaccatcgaattcattcaatagcagtaaagtttttggagatccactagcttctgactccagagatgttgcaccgtcagtcatctcgagctttgattggatgcttaatggtgcaatgcagcagtcattcaatgtctttccttctcatccaactaatggaaatgaacaagaaaatggttcttctgaagatgcgccaccacttcctcctcttccaccgatgcagtggagaacaaacaagatacagacatgctcatcaccgttatctgcaaagatcgggagaccaccaaggccaaaacctccagcaaaacaacaagaaagtgaagctgctcatattcttcaggagaacaatctccacaaaggcttgagtttgcagaatgaagtagcgcaggcaactatttctagtgatcatgagacaaatcaactccttaacatggattttcatgaaaaccatcaccaggaaggagatgaatatcatgcccaggattccaatccatttccctcgtcagaagctgaatgtttggcagaaattgattcagtaaaaagtgaaaatctgcacccattgcagctacctgagcttatagttgttccggaagaggcatggtcagagtttggtaatataaaattcatgccagaacaagaaggaaaactccaactaaacaacggactttctggtttggcagcacaaaagaccagcgggaagcctgatttgtttgcatattataaggaaaaggaattatcatttgcaggtagtgacaaagttgcaaattcagaagaaaacaaaccaaatggtgctgttaaacatatgcaaaatctggacttgccagcacaacagaaaaacgacaaaaatgattgtgatcgcaaggcagaggagttttcctctgcattagaggatgaatcatcaaaatcaccaactcatacagtgccaaaaccacctagataccctctacttcctgttacttctcatgacagaagcatgctaagaaaggtaccaactttggttcagccttcgagtaagcttgcagatgagaagaacacactattggaacagataaagaacaagtctttcaacttgaagcctgttcttgcaaagagaccaaatgtaatgggtggtccaaaaactaacttacaagtggtggccattctagagagagcccatgcgattcgccaggctgttgctgatgacgatgacgacgatagctggagtgagtag

SEQ ID NO: 21730 - DNA, 213 bp, Zea mays
  Peptide Sequence Number=SeqID_65105
atgggactggataactgcgagcgcgtgggtgggatcgtgagcactatgcacgtgatgggcaggaccggctccaggggtcaggtgacccaggtcagagtgaagttcttggatgaccagaaccgtctcatcatgaggaacgtcaagggccctgttcgtgagggtgacatcctgaccctgctcgagtctgagagggaggccaggaggctgcgctga

SEQ ID NO: 21731 - DNA, 444 bp, Zea mays
  Peptide Sequence Number=SeqID_65106
atgtcttcacgctcacttatgcatcgtgtctttccacctcccaagcccccggatgggggatacccgccgtctttccgccccatcgttggaggaacgcaactccgtgggagttggtacctttcagccatcgttcggcttcaaggattttcatcaaccagcccggctgtaccccccccccccccccgctggcggtcacccaagatggtgaccaccaacccctgggtggggagaagcaagacgggctgcgatcttggtcccaccctcagcttcaaggatgttcatcatccccgctggggtggaggccgggctgagccggagctctacctcccgcgcgagttcgtgggtcaccctctcctgcggcgttcgagggagagggcgctcactggccctgcgggcgggtcggacttcgacaacgcggggctagtcgacagcgggcgtcgctag

SEQ ID NO: 21732 - DNA, 720 bp, Zea mays
  Peptide Sequence Number=SeqID_65107
atggattctgccgccgagctttgtgcccagaagttgtccttggcggctgttgcagcccgtgacacactgaatgcttctgctgccacgagtattgttgctggtgattattgtgccacattttcgttaggtaacgatgtggtttctactcttgatgttcttgaatccgctgtggcggcggaaaaaagtgttatgcgttcttacaaacaggcgagtgcagccgtcgattgtgctaaggagacagtggccaaatattttgagcctgtttgctggtatgctttggtgaccctgaaccctcagttcactttggcagtattactggtatggatgttttcagcctgtttgctggtgaaccaaaaacttgcgcaagcactcagatatgccatgtctcaaatgagtgatatggctaagaaactacaagatactgcctctttgtgctacacagatgaagatgttgtagacggtttcaagctaactcaagtagctcgttcaatggacgagttagctgaaatgcttgaagtaactgcaattgactgccaggtctcgatgatggatccaacaactatgttagaagctggctatgctagtgaagatagtgcggtgtgggaggacgtattccgtgatcgagaaataatgaatcagccattagaagcggagacacttgctgagcactatgctaagtgggggcttaattacaatgagatctgggatagatcagtgtaa

SEQ ID NO: 21733 - DNA, 1959 bp, Zea mays
  Peptide Sequence Number=SeqID_65108
atgaccagccaccgtcgacccgcggggagggtctccgtcgacatgcgctgcgtcagtagaccgacggccgtcgacatgtgtactaccaagactaataatgttccacgctatgctaacatgtccaagctccaagcaggatatctgtttcctgagtatcaattcttgactgtcaagcagattgccaggagaagaacagatcatttgctgaagcatccagatgccaaaattataagccttggcataggtgacactagcgagcccattccagatgccatcaccaatgccatggcagagattgccaggagaagagcagatcatttgctgaagcatccagatgccaaaattataagccttggcataggtgacactagcgagcccattccagatgccatcaccaatgccatggcagagattgccaggagaagagcagatcatttgctgaagcatccagatgccaaaattataagccttggcataggtgacactagcgagcccattacagatgccatcaccaatgccatggcagagattgccaggagaagagcagatcatttgctgaagcatccagatgccaaaattataagccttggcataggtgacactagcgagcccattccagatgccatcaccaatgccatggcagagagaccagcacatgccttgtcaacaattgatggctacaacagttatggagttgagcaaggtgaaaagaaactcagagcagctattgctgcaacctactatgcggaccttggtattgaagattcagacatatttgtctctgatggtgccaaatgtaacatatctcgcttgcaggtactttttggatctaatgtgacaatttcggtccaagatccagcataccatgcatatgttgattcaagtgttagcacgggccaaactggcttatatcagcaagatgttcagaagtatggaaacgtcgaatacatgagatgcagtccagaaaatggattttttcctgacctgtcaactgtcccccggacagatattatcttcttttgctcacccaacaatcctacaggtgccgctgcatctcgggaccagctaaccagattagtaaaatttgcaaaggacaacaggtccattatagtctatgattctgcttatgcagtgtacatatcagatgacagcccaaagtccatctttgaaattcctggagcaaaggaggttgctattgagacagcttcgttctcgaagtatgctgggttcactggtgtccgtctaggttggactgttgtccccaaggagctccttttctcagatggacatcaagtcgctaaagatttcaaccgcatagtttgcacttgcttcaatggcgcatcgaacattgcggaagctggtggtttagcttgcctctctccagaggggctgaaggctatgcatggtgttgttggcttctacaaggagaacaccgaaataatcgctgagacatttacatcgcttgggttcaacgtgtacggtgccaagaacgctccttacgtgtgggtgcacttccctggccgcagttcgtgggatgtgttcgccgagatcctggagaaggcggatgtggtcactactcctggcagtggattcggaccgggcggcgaaggctttgtgagggtcagcgcgttcgggcacagagagaacatcatcgaagccgcgaggagattaaagcagctgtacagatctaccaaacctctcatatctcgctgctcgttaagttacctggtcatggatttgaatcagtctcaccatattcatggaatagtcctgtgtctatttgtccttgcatcagacctatcaaacctctgtaagagcctccgatactattctttggcagtggttgctgaagaatcatatagtttccagatccatatgcacttctgcggcgatgctgttcacacttcacagatgcctacgaaattctgctgggatccaacagaaggcagcatgcattga

SEQ ID NO: 21734 - DNA, 894 bp, Zea mays
  Peptide Sequence Number=SeqID_65109
atggagaccagcaccaagaagcttagcagccttcgtatcacctccctggacgacgatgacgacgagaccgagatcccgcaccagccccctcaagcaggcctctccaccgctgaagcggattatgaggacgacgacgatgaggaggaagaagccgaagtgactcttggtgtccttagcaaaccgaagcacccaggcctcctcctccgccacttgttccccagcaaggccggtggcatcccggcgtggctagacccggtgaacttgccgtcgggaaagtccagctactgtggtttctgtggcgagcctctgcagttcgtcctccagctcctgtatgccactggtgtggtacctggaaaggtgataaaatatgtagtagctgcaagaaaagcaaggtactgttctgagaaacatcaggcactgcattggcgaactggtcataaaaatgattgcctccagataataagttctgctgcttcaaattcagttctgccagctgtaggaatagttcctgctagcatttcttggccagaatttgagataaaaatagactacgaaggtacttttgattctgatagtggtgatgaaaacaactcgaagtcattggtgatgcaaagacatgggaaacttgatgctatgatgcagtcgtggatggaccatttcgaggctgatgctgacaacaaatgctgggcgtcttttcaagaacgggtctcaagagcaccaaatcaagtgttgaggtattgtcgagaaccaaatgctaaacctctatgggccttatctttcgggtgcccgtcagatgctgatatcccatcatgtagctactgtagaggtccattatgctatgaatttcagggtagcgtgggcactgagaagattgttgatttagggatagagtga

SEQ ID NO: 21735 - DNA, 285 bp, Zea mays
  Peptide Sequence Number=SeqID_65110
atgcatatatcttactcattgcattcattagattgcaatctcgctgacggagagtacgtgctcatccccgagcaaggagctgtccacgagaaagaccaggagcaagctcccgagactgccactgaggatctacccgcagccccagcatttgaaggcaagccccggtttatgcataaccgtacgcttcagtatatggttgatggtgtgacttggcctacaaccctgccactgggttggatggtcgaatgggatgctgctccggtaggagaggagcaagaggagtag

SEQ ID NO: 21736 - DNA, 1401 bp, Zea mays
  Peptide Sequence Number=SeqID_65111
atggggatgcacccttttgacttcaaccagtccggcatggagtcccaggcccacacgtcatgtaaccggcgtgccggttactacgtgcgaaaaactgcagcgccacttgcgccagcgccgcgccttctcgactgcagaaccagtgccgcaattcaaggtaaccctgcgcgtggaccagcagtgccagccaaacacgccggtcacggggaccgggaaaggggatactccaaaagggatctttctccgcgaaggaagcaggccccgagccctcctactaatcagaggttcgaaggctggccccctcggaagggttcgacagccgcctcagagcactcgggctccgcgcccactactggccagaggctcgggctacgctcccgatgtaccctaggacatttccgagaccagcaggagcgattctgtaacggaatcccatcggagggaggcatcgagccctcggaccctatcaaatgggaccgggtccggcaaatcacctgcagaggctcgggggctgctctcgcaaacctagctccggtcaaaccgttgacagcgtcaacataccagcccaagaactcggaacctgactatgcacccgggaaacgactagttcgcatgagggaacaaccagaccggtcgaggcatcacgaaaggcatcaagaccacgaaggagtcaaaccactcctccgaggcctcgggggctacacccggcgggaaaatagcgtcgcctgcactactccgactgttgtgccacccgccagggtgaggctgacagcagccaagtccagcctcgggcgccataggaagctccgccccgcccgaccccagggctcggactcaacctcgaccccggatgacggtctccgcctcgcccgaccccagggctcggactcaacctcgaccccgaatgacggtctctgcctcgcccgaccccagggctcggactcaacctcgacctcggacgacggtctccgcctcacccgaccccaggggtcggactcaacctcgacctcggacgacggtctccgcctcgcccgacccagggctcggactcaacctcgacttcggacgacggtctccgcctcgcccgaccccagggctcggactcagcctcgacctcggaggagcctccacctcgcccgaccttgggctcgggccgaccacgtcgcaggggggcacattattaccctacccctagctagctcaggctacggggaacaagaccggcgtcccatctggctcgcctcgataaaacaagtaatgatgacaccccgcgtgctccatgacgacgatggttctcagctccctatggaagcaaggagacgtcagcaaggtcctgacagccccgacagctatgcttctacagggtttaagcgctcctccaacagccacgacatcacatga

SEQ ID NO: 21737 - DNA, 1020 bp, Zea mays
  Peptide Sequence Number=SeqID_65112
atggtcctcgtcatgctcgcctacagcggttaccacgtcctcgccaagtccgtcctcaacgtgggcatgaaccaggtcgtcttctgcgtctaccgcgacctcctcgcgctcctcgtcgtcgcccccgtcgccttcctccgcgagaggctgtatgggaacccgctcctctgcctcgtcggcctccgctacacaaacgcctcctacgccgcggctttccagccctccataccagtgctcacgtttctcttggctgccattgtcggctacagtgttgaagcgatcagcgtcttcaccaaggacggcatcctcaaagtcaccggcacggccgtgtgcgtctccggcgccattctgatggccctgtaccgaggcccatccttgatcgcccttcttagaagcatgcccaccgcatggacgagcgctccctaccaccctgctacccccgactggttcacaccagccgtgcccgtgctcgagcagggtgtagaagcatggcagcttggcgtcctgtgcctcataggaaactgcctcttggtggctgtctatctagtcgtgcaggctccagtgatgataaagtatcctgcgagcttatccgtgacagcttactcctattttttcgccacaacctttatggtgctaactggagtatgcgcgactagtggcttacacgagtgggcactgacaaaagccgaggtcatagctgttctgtatgctggaattgtcgcatcctgtctgagctactcgatcatgacatgggcgaacaaagttcttggaccttctctggtcgccctctacaatccactgcaaccagccttttccaccgccctctcaactgttttccttggcgacccagtttacctcggaagcgttattgggggagtctctataattgctggtctctatctggtcatctgggctcgctacaatcaagggcagcgggcgcctacggatggttgtttggaccctcttattattgtggataatccaagaatccacaagacacaagaaagtcccttcgtgtag

SEQ ID NO: 21738 - DNA, 285 bp, Zea mays
  Peptide Sequence Number=SeqID_65113
atggcccatgaaattataaaaaagagtgaaaaggatacccacgacgcccgagaagaagcaaagcgagctgaagaagctacagaacgcgaaaggcgtataggcttcgaacttacgtgcttacctattacagctgaactgtccccgccaccagagccatatgatcccctagttgatccagagatgaagaaatcattgaaaatcataagcacgattgaatctattgttgacgaagtcgtcaacaaattactgaacgaaattgccgaaaaagtccttaaagaggaatag

SEQ ID NO: 21739 - DNA, 441 bp, Zea mays
  Peptide Sequence Number=SeqID_65114
atggtgcactggacagtgtccagtgcccaggctggcccgacggtgaactcatcgctctcgggaaaaagtaaaggcgccacggctaaaattcatcggactgtccggtgtgcaccggactgtccggtgagccaacgacgcttgcggccaacggtcgtctacacaatcagcgggcgacgcgtggcccacgccaacggtcggttggtcacaccagactatctggtgtgcatcggacagtgttcggtgcgccaacaggacccgaggtccaacgctgcgcttgataaggaaggagatcaggcaccagactggtactgttcatgtctggtggtgcaccggactgttcgatgtgccacccaacaaaagggcgagaggctccaacttatggagattcctcgcaaacgggaaaggactactaaggaagctaactgtggtactcaaagttga

SEQ ID NO: 21740 - DNA, 300 bp, Zea mays
  Peptide Sequence Number=SeqID_65115
atggcgcggctcaaggtagatggcgagagggggtgcagcacggtttttatactcaggacagcggctagctcggagggatctcaacgaactacgctatttcatcggctggggcgcgtgcgtttggccgagtccgcgcgatttctgcgcgcttcggttagaacagagcgaaggttggggatgaccgaccacgagggcccactcgccagaataacagggacgcgggagctagtgggctgtgaagaggaaatcggcccatgtatgagattcaaattcaatttcaccaacttcaaatttatttaa

SEQ ID NO: 21741 - DNA, 1149 bp, Zea mays
  Peptide Sequence Number=SeqID_65116
atggcgagggtgtgtgttggcctcggcggccgcagaaaacacacgctacaagacgatccgatcctgcaggctcggatcttgacgcttgaagggagcagcagcaccctcggcgtcgacaacaccttcggcgaggtccgacctggcctcggacggcgacacggaccaagggtctccgctctgaacgacaacgtcatcaccaagcccgggccatcgccgccaggacggaactctggttccgtccccgcgggtatgtacaacctccacaccggggagcctgcggggcgacgagcaccgggggacccgccagcgacctctgcagcagcagccatggtcccaggacagacgcggccgtcggagggctctcgttcgcgttcccgctcaagggacgcgaaccagctattaaagccaaagagcgggccgctccaaagcgcaccggcaggtcctcccctacggcgcgggggctgggtcccacacgtcatgcaagtcggctcagagcagaagaagccaaaccgccgcgcgtggtgcgtacaaccgcccagcggttacaagcggctctccacttttgcccagaccaacgggcggaagggcgggcagccatgcaggcggcatgcaaccgcgccaagtgggcacacttctccaactcccaacacgcccggcatggagacccaggcccacgcgtcatgcaaccagcgcgccgaatgcttcgtgcatgcaactgcaccgccacttgcgccaccatcgcgcctcctcgactacggaaccaataccgcgactcgaggcggcccagagcacgacccagcagcgccagcctggcgcgacggtcaatgcggccaaaaatgggccggcagtaatggcggtggcaggcggggcagcggccacgtcgtcagccaagcttacgtcccatccgggggcagcgagggaacccactctcacggcgtgaagacgacgcgcccgtgttccgttcctcgaacggctcgcgcacgcgcaacggccgccccgcgaaccactcgccctgtcgcattaactccgcggcgggacaggcggcgcctctggcaggagaagcgggcgacgcttcgccttcgccataatgaccgcgtcagaaaagggaccggaaaagggggataccccgaaaaggatccttccccgtga

SEQ ID NO: 21742 - DNA, 621 bp, Zea mays
  Peptide Sequence Number=SeqID_65117
atgttggcgcaccagacactctacagtgcatgtccggtgcgccaccggacatccaggcgggcccagaagacagagctccaatggtcgaatcccaacggctttggtgacgtggctggcgcaccggacatgtccggaaactccgcctcgcccgacccagggctcggactcgggctcggtaccggaagacgacgaactccgcctcgcccgacccagggctcggactcgggctcggccccggaagacgacaaactccgcctcgcccgacctagggctcagactcgagctcggccctggaagacgacgaactccgcctcgcccgacccagggctcggactcgggctcggccccgaaagacgacgaactccgccccgcccgacccagggctcggactcgagctcggccccggaagatgacgaactccgcctcgcccgaccccagggctcggactcggcctcggcctcagccgacggtctccgtctcgcccgacccaagggctcggactcgacctcgacctcggaagacagactcgacctcgacctcgggaggagcctccgcctcgccctacctagtggctcggaccgaccacgtcacaggaggggcccatcattaccctacccttag

SEQ ID NO: 21743 - DNA, 1056 bp, Zea mays
  Peptide Sequence Number=SeqID_65118
atgtcggtcgctgtgctgcgagtgcgagccatggagctactggcacgacccgcagcggcagcgtcgtcctcctgcgcgcgaccctcgctacagctccccgccccgggcacatcccgtccccgtcggcccgggttccctactctccgcgcagctgcggcggcagcggcggcgatcgccgcggagccgcaatcgaacgagcagcagaatatcattatggaaactgaggtgtttgcctgccctgtctgctacgagccattgatgagaaaagggccaccaggcataaacttgccagcaatttataggtcgggattcaagtgttcaaagtgcaacaagtcatttaccagcaaagacatcttcctggacctcactgtaactgcagggacaaaagaatatagcgaacagaagcccgctagaactgagctgttcaggagtccacttgtctcatttctttatgagagagggtggcgacaaaactttaatcggagtggtttccctggtcttgacgaagagactatttttcaacccattgctggtggtatccttcttgatgtcagctgtggcagtggcttgtttactaggaagtttgcaaagtctgggacatactcagctgtgatcgctttggacttctctgagaatatgctccgccaatgctatgaattcattaagcaagatgattctctcctcaatgtgaatctcgcactcgtgagagcagatatttcgaggctcccttttgcttcttgttcagtagatgccattcatgctggagcggctatccattgttggccctcaccctctaatgcggtagctgaaataagccgcgtcctgaggcctggtggagtgtttgtgggaaccaccttcttatcctctcccaggaacaacccattctctgttgaagcactaaggccacttagacagattgttggaccagttaacaccagctacaactattttactgaaggagagctagaagacttgtgcaaatcctgtggccttgtcaactacagcagcaatgttcagaggtcatttatcatgttctccgggcaaaagccatactga

SEQ ID NO: 21744 - DNA, 1536 bp, Zea mays
  Peptide Sequence Number=SeqID_65119
atgggaccgtccgggtccggcagaagctggctcgtcgtcctcgtcgtcgtctctgcaaccctctgcgcccatgcgtcagctgcggcgtccgacacgacgacgaccgtgctggcggcggagcgcacgcggcggaaggaccccctggacgggctcaggtactacaccggcggctggaacatcagcaacaggcactacctggcgtcggcaggtttcagcgcggcgcccgtgttcgcgttcgccgcgctctggttcatcgcggcggcggcggcgctcgtctgctgctgctgctgcttctgctgccgcggcggcggcaacggcaacagctactcctactcgcgccgggtgttcgcgctctcgctcctgctgctgctcgccttcacagccgcagccgtcgtcgcgtgcgcggtcctgtacgacgggcagcgcaagctgagcggcagcacgacggcgacgctggactacgtggtgggccaggcggacggcgccgcggccaccatgcgcaacttcacggccctcctggaggcggcgaagacggcgggcggcggcgtggcctcgctgccccccgacgtcgcgcggggcgtcgacgacgtcgcgcgccgggtggacgcggccgccgacgccaccgccgcgcgcgcggccagcaactcccgcaggatccggacgtcgctggacgccgtaaggaaggtcctgatcggcgtcgcggccgtgatgctggccctcgtcctcgttggcttcgcgttctcgttgacggggaagaagtcgcttgtgtccaccgtgataggagacacctgcgtggcgatggacgagtgggtggcccagccgcaggggcaggggcagagccacaccgcgctggacgacatcctgccctgcgccgacgcggcggtgacggcggaggcgctgcggcggagcaaggaggtgaactaccagctggtctccaagctcaaccagctgctctccaacgtgtcgaacggcaacgtgcctccgcaggccgggcccccgctctactacaaccagtcggggcctcccgtgccgctcctctgcagcccctacagcgccgacctctccgaccggccctgcgccgtcggcgaggtcaccgccgccgacgcgcagcaggtctggcagcgctacgtgtgccgcgcggcggcggggtcgggccgggaagaggtgtgctcgacggcggggcgcctgacgccggcgatgtactcgcagatggtcgccgtggccggcctcagcgacgggctgaggcggcagtccccggccctggccgacgtcgcgagctgcgtgaccgtgcggcgcgcgttccggacggtgggccagcgcggctgccccccgctgcggcgggacagccgccgggtgtaccaggcgctgctcgcggcgtcggcggccgggatgctcgccgcggccgcgtggctcgtgcactcccgggagcggcggcggcggcgggacagcgagcggttcaaggtgtcgccgtacaggctccccatcgaggacaaggtgctgctcaacagccccagacggccgtacaggcgagtgtag

SEQ ID NO: 21745 - DNA, 1197 bp, Zea mays
  Peptide Sequence Number=SeqID_65120
gatggtaagaaaatgagtaagagtaaaaagaactatccttcaccaaaagatctcattgacgagtttggagcggattctctgcgtctatatttggtaaactctccagttgtacgtgcagagtctctacgattcaaacgtactggtgtctttgctgttgtgaaagatgtcttcctcccatggtataatgcgtacagattctttgtccaaaatgcaaagagactggaagtcgagggtcttgcctcattttctccgatggaacaagcggttctcgtaacaacttgcgtggtgatggctccatttacaccattctttactgaagttctttatcaaaatttgcggaaggtatcaagtaaatctgaggagagcattcacttctgcaagttcccttccacaactggtgagagagatgagcgtgttgagcaaagtgtaaataggatggtgaccatcattgatcttgcacgtaatattcgtgagcggcataacaaagctctcaaaacaccactcaagcaacagattggtgagagagagaggcggagcggcttcgcggtagaaagagaggcgaaggtcgcacgagggaggagaggcttcgggagagacaatgactttcttgaagacataactggtaaactaaaagaggttgtccgacaattcaagcgtcctgaaaacgtgtcggagaaggagattgatgctgcaggagatggcgacgttttagtcattttagatctacgagctgaccagtcattgtttgaagctggagtggctcgagaggttgtgaacaggatccaaaaattacggaagactgctcagcttgaacctgctgatccagttgatgtgtattacgaatctgtgggcagtgacaaaaacacactggaagagattttgaagtcacaggatcagtatattagggacgcacttggttcaccaattatgccaaaagaaatggcaccaacagatgatgtaatacttggcgaggagtctcacaatgtacatgacatgtcatttgtcatatgcattgcaaggtccacccctattcttgcaccagatcttctttctcatgcctcaggcaaaagcaatcatgtggaggcgttgagagtatatcttctgtcaaggtctctttccagattgaagaaccagttccaagctggaaagggcatgttgactgcatcgaaggttatccaccggtcagtttactgctag

SEQ ID NO: 21746 - DNA, 456 bp, Zea mays
  Peptide Sequence Number=SeqID_65121
atgggcaagaacaacaaacgcaagcgcgagccgactcctccgtcagaggactttggcgactcggaatactcagaggaggagttctcctctgagtccgaggggtctccggctcccgtctctcccccagcgtcgtccgatgactcggacgactcgcaggggattgccgcggaggtctggacgtacatccgggccgtcgagcgctccgggctcgagggctcggatgagtcggagtactcctcggatgaggaggactcggacggcggcggcgaggatgaggacgacgacgacgacgacggtggcgacggtgacggtgacggcagcggcagcggcaggggcagcagcggcggcggcagggacggtgacggcggcagcagcaggggcagcaaccggggtggcagcagcaagggcagcaccaggagcagcggcggcggcagcagcaacagggccagtggctag

SEQ ID NO: 21747 - DNA, 342 bp, Zea mays
  Peptide Sequence Number=SeqID_65122
atggacatgtggttacctgcgaaaggcaactggctgttggggtcgattggaggaatcaccacagcagacgagctcgcgagagctaaaggcaaccgaaggcacctctggtctgggggcaccggactgtccggtgtacaccggacagtgtccggtgcaccaccggacatgtccggtgcaccagaggactccaactccgaactgctcaccttcgggaaattccaggggcgactccgctataattcaccggactgtccggtgtacaccggacatgtccggtgctccaaggaagggcggcctccggaactcgccagcctcgggttttcacttctgctgctccgctaa

SEQ ID NO: 21748 - DNA, 597 bp, Zea mays
  Peptide Sequence Number=SeqID_65123
atgcaccaccctgctggtgaggtagttgccggtgttttcctcccgtacctgccgcccgccgctgcagcagccacagcgcctttcggtttcggaaccggaccccaatcccataaccacgcgccagcagatgacgacggtcacctgctgttcccgtgcaacgacgacagtgacctgctgacgctgctgctgccgccctactccgccgtgggcttccactacgccggccagcagccattattgcttcatcatcgccatgaccatgacgacgacaaggcctcccaagcagccgagaaccgacagacccaccgtccgcggcagctgctcgccgaggagagacggcggcggaggacggcctccaaccgcgagtccgcgcggcggtcgcgcgtgcgcaagcagaagcagctcggccagctctgggaccaggtcgtccacctccggggcgacagccgcgacctgctcgaccgcctcaaccgcgccatcagggactgcgaccgcgtcatgcgcgacaacgcgcggctgcgtaacgagcgggcggggctgcagaggaggctcctggacctcatcaccgacggcgacggtgatgaccgaccattttag

SEQ ID NO: 21749 - DNA, 1170 bp, Zea mays
  Peptide Sequence Number=SeqID_65124
atgccgcgcgctgctagggcggcgttcgtgttctggggtggccctgcttttgcaccgggatggcgccctccggcagaggccggcgccctactcgtctgggaggatttgagtggggatctgccggggggccggcggcccccgctatcagcgccgaggcggaagcggctcgagaagtccccgtcgccgacgggatcactgccaccatccgcgccccgggcctccggttcttcgtacttgtcctcgcccctcgagcgtcggcgtgggcgagggcaagattgcagcagcgcccaccctgaggcctgcactgctgtggctcggccatctggtgcgggggtcgttgtcgtagtcagagcgggcggcggcgagccgctcgtcagtcttctgttgttccgcaggccttccccatggagtggggttgttcgtacctgcggagggggaaccggagttccgtttgtaatggcacttcgaatgccagtgtttttgttcattgtggctgtcgaggcctcaacatgctcctctagcttagttaaagggaccccttggccgctcttcgatgagccgaggccaggggtagcgatatcagtacgaacagaggtggagttggctcgaaaatgggaacctggttggccggagcctagccgggttgcccgtcagcgggggtcgacgtcggagtcgatcagccgaggcctcgggtcgggctggcgcccttggaagatgcttggccgaggccccaggggtaaccggccgagccgcctgctcgggccggattcccggagaagtccctggaccgcgtcgccgtccgaggctgggtcggacctcgctaaaggcgtcgtcgatgccgagggtgctacagcccccttcagcgtgaagacccgagcctgcaggatcagatcgtcttgtagcgtgtgccttctgcggccgccgaggccagaaaacacactctcgctgcgttgtaaagccgcgtctcctttcctcttatttcaagcatctggactttccatcggtaacagggatgtttgtgtgggcgagagttgcttctcgcggaaggtgatgagtgagaaggtgatgagtgaggtatccgtatcccggaggcgtaggagtccctcggctcggtcagccttggctgcttacgtgtactccgtcgtttccaggatccgcttttcgaagtag

SEQ ID NO: 21750 - DNA, 84 bp, Zea mays
  Peptide Sequence Number=SeqID_65125
atgacgcctataagcattgagatggacaagggaaaggagtacccagtgttgaaggatcccacaaattgtagaggtcgatgctaa

SEQ ID NO: 21751 - DNA, 906 bp, Zea mays
  Peptide Sequence Number=SeqID_65126
atgaggattcaggaaatcagcatctcaatggacattggtacacttctaattttgctcatgattattcttggatttaagacattaggaacattgctgtctgtagttgtggagctaattcaagattgttgtcatggacttaatgctttggtctattatccaggcataggccaattttgccttaactattctctatatgcaagtaatttgtccctagtgattctgggtgcgtggatcatctggaagcatataaatagatgtgtctttgagggctttgctcccaaccttgcggttgctcagcaggcagctagggaggggataaatctttgggctatagctggcgccaaagcctttcactgtcataggctagataatgtctctgctgggtcaactgaatggaagggtcttctgaaagactactgggaacgattcagcaaatattgtgcagatgtgagtaaactggatggcagaaaggtagagagaatgcttgaagaaaaatttggtcctatcctcttttccgatgtttacaaggattgtagaatttgccctagttgttctgaaggaaccttgagattcaaagttagtaggtacggtgaaggctattttgtaggttgtgatcgacatccaaaatgcaaatctaattactgtaggtacattgctcgctcactgtcacagcaagaagatgaaactgaacccatagaagaaaatgcaaaatcttttgaacccaggttacttggtgtcatgcctgattctgatcaaaaggtgtttttgaaacaagggccatatggctactatgttcaagttggagaggacaaaaaaggtctgtttccaaaaagggtttccctttccaaggggctgtttggttcgctgtctcacttgccacagtttgccaaaattaggcaagtttga

SEQ ID NO: 21752 - DNA, 417 bp, Zea mays
  Peptide Sequence Number=SeqID_65127
atggagggtgacgcaagggtactgacagaagatgaagatgtactgaatacgaacctcaaccttaacgagaccacattatgtgggacccatcaagtacagcagcacgggcgtagagcgagctatagggacttgcacgtcgggcagatgagacatgatgtcgtgccaagagtgagtattatacttcaaaatccgaagttccaatcctttgcatctgttttgtgtaagacagaagccttttgtctaaaaggcagtggactcggatatgtgcacatatccgtcgaccgcatcagcatgaacttcgtatgccaaaatgcggcaatgcatttctggaatggagctagttccatcttcccggtggcatcgccgcatcgggacgacttgagaaccatgggtccctttcggtcacgctttccatga

SEQ ID NO: 21753 - DNA, 495 bp, Zea mays
  Peptide Sequence Number=SeqID_65128
atgaaggttgacagccagtcgttccctgacatcaacatggtagagtgtgccaacccagttctctcatttgacatcaatatggtaggatctacaaggcaccagaacacccagaaggataaggccgatctaggcgatcgaccccaaaaagacgaaaaggaatatattactaaagagcaggtcaagcatatgcggtaccgacgaccaacgtctgaacatccgcttaggaagtatgagtaccaatacaggcagcgttgtcagcatgagcctgaggatgaggaatacaagcaccatactgggaagctcctgaagaggtgtgaagatacaagggaccattggcattgtccgttcttcaaacatcgctggaacgctggcatgagcctgcccaatgctagtaactgcccagagtgcggaccgtggaggcgggagaccgatgaggtttcagtatttcaccgtctaggcccgatgacacaccaagatgaaaggactgacccgtag

SEQ ID NO: 21754 - DNA, 225 bp, Zea mays
  Peptide Sequence Number=SeqID_65129
atggccgtgctcgggcagagatggcgggcggcggtgcttgctttccacggtgaccttgggcctcttcgtggtgtcggaagagactatctccatcggcttagcttgggtagagttggatctggtgttctttttgggatccatcgtgggattggtcttcataatgaacacattgggtgccaaatgttggatcctgactcatggtcccatgcacttaggaacaagtga

SEQ ID NO: 21755 - DNA, 472 bp, Zea mays
  Peptide Sequence Number=SeqID_65130
ccccttcatccggcagcctcacaccggttcttattccaaggctggtggccactacccttccctccccggcgtcggccgcttcccctatcccttcccgctccccaatgaggtccagcgctccttcaaggatgtgatgttggctgtgaagcctcctgaccctggtggtgctggcggtgttgatgctgatgatggctgggtgagagttgaagctcatccgaacatggtctgcaaactcaacaaatcgttgtatggtctgaagcaggcacccaaggcttggtacagttactttgcctccttggccaccctggctggcatggctgattgcaagccttgctccaccccgatacccaggctaaggtctcctccgcctctggtgcccctgtcagtgatcccactgcgtaccagagcctcgctggcgctctccacactcttcctgggcggcaacctcgtctactggtcatcgaagcggtag

SEQ ID NO: 21756 - DNA, 192 bp, Zea mays
  Peptide Sequence Number=SeqID_65131
atgacgtcagggtcaccatgccaacgagctgtggcagaattcagggtggtggctgaacagatcagcactagagatctagttcaagaatacctggccaactgggctgctaggatggtgaaagaggacgaaaaaactctgaagaagagaaaatccagtcttgagccgaaggtggtgacttctaaagggaattag

SEQ ID NO: 21757 - DNA, 150 bp, Zea mays
  Peptide Sequence Number=SeqID_65132
atgaccgttggtggaggttgtctgtcgtatggtgcaccggacagtccggtgcacaccggacatgtccggcgccgttggcgcgaagtagtcgttgctccgcagttgcaccggacagtccggtgtacaccggacatgtccggtgaattatag

SEQ ID NO: 21758 - DNA, 426 bp, Zea mays
  Peptide Sequence Number=SeqID_65133
atgaccatcacaacagcaagggcgagctcatgcgcagggccggccgtggccaggccggcggcgctcggcctcatgcctcctctgcgctggggtccacgcattggtgggctggctgcccacgcccaggccaaggcctcctccacggggaggatcacgttgggaggggcatgggtgcccacgacatgcaccatggcctttgcgccatggctacttggtgtagcgcccaacggaagggaaatcggaagggaggagagaagggaaagaggtcgtggcgtagggaaggagtcaatcagggaggagctgcaacgtaacagtgaaaaacgaagaatagaagaagaaacaatagagtttactcatcggagaataagatatcgtccgaaccgagaagaaattcgtcgattgacggagattcgaaggtccgattga

SEQ ID NO: 21759 - DNA, 2253 bp, Zea mays
  Peptide Sequence Number=SeqID_65134
atggcatggatgaggctaatttaccacgagaactatctgaattatgtaaccatcaatgcaagagaggcaatgactcatctgcaggagatgaaggatgagctgcttgcagtagccaatgagcttcttgatgatgatgataatttaagcacaccattaaattctgtatggaagagctataccccaaaggttatcgatattaactacactgaaggatctggtgatagaaagtggagtagtacaaatttcccatggactaaggaacttgaggccaagaacagaaataagtttggaaaccattctttccgccccaaccaacgagaaataatcaatgccacaatgagtgggcatgatgtttttgttttgatgccaactggtggtgggaaaagtttgacatatcaggctaatattcctgcaacttatttgagtggcaacttggactggtctgaacagcaagagataatgaaagatttaatgtcatgccgctacaagttgctatacgtcactccagagaaaatagctaagagtggtgctttatcgagactattggacaatttaaattcacaagggcacctttctagaattgttattgatgaagctcattgtgtaagccagtggggtcatgacttccgtcctgattacaaggtcagttactgtgaaaatgacgtggactgcagacgcctacttcaactgatccactttggagagaagtttgacccttcgctttgtgcaagaacatgtgataattgcttgaaagagtcaggatgggtcgaaaaagatgttaccaacattgccaggcaattggttgagctagtcacaaggacagggcactcacattcatctacttacattcttgaagtttacagagggtctatgagccaaaatgtcaagaagcagcgtcatgatgctttagctcttcatggagctgggaggcatctagctaaaggtgaggcagcaaggataatgcgacatttagtaactgaggaaatacttaatgaggatgtgaaaaagagcgatatgtatggatcaatatcatctgtcctcaaggtaaatcatttgaaagctagtggtcttctctctggcaagcacaacatcgtcctgaatctctttcatggtatcgagctaggttctcatctcctctcccccaccctcccaccctcagccgctggttggctctcccacagtcgtcggcttgtcgacattgcccctacccccacctcccctcgccctgcgtcccgccaggccccctgctccccatgcccggtgcgcgcgacggccaccatggcagacagctcttgggcgactgtggccgccagtgtccaccccgccaccagcgtcgccacctcacctgtctccaccaccgaagcgcacgccaccagtgtcgcgaccactccttgcgcgtacgacgccttctcagttggcacgacctcttctcgcgtgtgcggcgcctggggctcgcccggcttcggccacctggtgctggccgccgccgctacccaatccatctccaacctcgccacaaccgtcgttcccccctccacgttcgatctggacgtcgctgggacccatgccgacatgctaagcgcgtcccctgcatctgcccgctctttgccaccgtcgggcccatgcgccctccaggcttcctatgctcctcacggtgtgccgccgacgccccctacacagctcctcggcgtcccctccactgttgttgtcttcccgcaacacgactccaccttctctagcctcgacagcatgtcctccctcggcgtggtcgtcgatgcggggctggtgcacggcgagccccctactgcccccctttcccctgcctcgacagccctctacaccgcctttgcaggcatgggcgtggacacccatgtccctgcagcccccatgccctccctgccatgccggcggtcctcgctgccccgtctccggcacggtcgttgctctccgggcaccccttcatgtagctgggctcatccatgggggctccttccccatgtccccctcagtcggttattccgacgacacatcctacaatgtcccaccgccctcaacgcctgcggcttcgcccctccaatcgattccggggacccctacctctgccgcagtccctatgagagcctttgtcatgcctgtcaactcgtcttccctttcctacctcctcgtctagggctgctcaagcctttgatcttgttcattgtgatctctggacatctgttttcagtctctgtggttacaaatactatctggtaa

SEQ ID NO: 21760 - DNA, 255 bp, Zea mays
  Peptide Sequence Number=SeqID_65135
atgtgtgtcctaaggaatccgaagagcccactcaagctcaagatcaaccatcatcttccatgcaagcatctccaccaactcaagatgaggattaggctcaaggcaatgaagatgaagataaagaggatgagccacctcaagaggaggacaaggatcaagggggagatgaagttgatcaagacaaggaagatgatcagggtcaaagaccgccacacccaagagtccaccaggccattcaaagagatcaccccgtga

SEQ ID NO: 21761 - DNA, 513 bp, Zea mays
  Peptide Sequence Number=SeqID_65136
atggagctcgacgtcgcggctacgcagaccgagccgacgcaggggcgcgagggagctgcgacggccatggagatggaggtgcggccctgggcttcggcgggagctgggcatctccagcgcccacgagagtttcattggggtgtcgagcgcccaagcaaggccaccgaacaccatggattcgaggaggagaggaggtcagacgctggactagcaggacacgccatggcgagaaggggagagcaggggcgtcagcttgtgctgcgggagatggccggctggagcagaggggcgagaggaactcgtctgcgccaaggaagggagcagggagcgccagggttgggtgctcggctgctcaagcctcgccggtgccatgggaggaagggagccgagctccctgcgcgctggggaagaaggcgctgcgcgtggggaaaaaagccagggagaagaaaatggcggctaaggaaagtgaggggtgggagtgaaaatttgccaagtgagcacccctatttatag

SEQ ID NO: 21762 - DNA, 192 bp, Zea mays
  Peptide Sequence Number=SeqID_65137
atggctgccccgcgaaccacccaccccgtcgcattaactccgcggcgggacaggcggcgcctctggcaggagaagcgagcgacgcttctccttcgccataatgactgcgtcaaaaaaagggaccgggaaagggggataccccgaaaaggatccttctccgtgaaggaaacaggccccgagcctccctactga

SEQ ID NO: 21763 - DNA, 63 bp, Zea mays
  Peptide Sequence Number=SeqID_65138
atggcggtcaagaacaagtaccacaggatgaggcgcaaggaggatgttgcgatgagttcgtga

SEQ ID NO: 21764 - DNA, 807 bp, Zea mays
  Peptide Sequence Number=SeqID_65139
atggatgaaggagctcccctcggtggtctggagtctgaggacaacgccgagccgagccacgggcttcacaccgttctttctagtctatggggccgaggccatcttgcccacagacttagaatacggttccccgagggcgggggcctacgacgaccaaagcaatcgaacaaaccgagaagactcactggaccagctcgaagaggctcgggacccgagggcggtatcagtagtccctgcgacgctaccacgcccgaggggttcggtcccgggacctccaggtgggtgacttggtgcttcggctgcgacaagacgcccgagggcgacataagctcacgcctccttgggaagggccgttcgtcatcgccaagaaaacatacgcacactacaagaggaaccgatcctgcaggctcagacgtcgacggagggggagtagcagcaccctcggcgtcaactccaccttcggcgaagtccgaccgagcctcggacggcaacacggtcggaggatctccgctccgaaggaggacatcggcaccgcgcctgggccatcgccgccagggtcttcttcaggaatccggcccgagcagacgcctcggccggccgccccgaagcctcagccagctgtcccccgaggacaccatcccggctcgtggcctcggcaactcgactccagcgtcggtcccgccagtggacggcccgaccaggctccggccgtcgaagtcttcttttcgaaccaactctgcctctgtccatgctgacacagctgcctccggctctggctcatcgaagagcgaccgagggttcctttaa

SEQ ID NO: 21765 - DNA, 258 bp, Zea mays
  Peptide Sequence Number=SeqID_65140
atggctttgatgccgctcgtggccagttcttgcgaactcgcggccaggagcgtgacgaattgcttgtatgaccttgatgtcgcctcggagtcgccctgtcgtgtcgcgtcgtggttgggtttgcctgcatccccaccaaagttattttgttattctatttatgttcatgtcaagatcattaatgttaattggaacatagagcttaacttgagaaacacgtgccaccacaagggtttatggacgcccttggctgattaa

SEQ ID NO: 21766 - DNA, 924 bp, Zea mays
  Peptide Sequence Number=SeqID_65141
atgggtccacaggtcccagtggggggcaatccccaaatatcattcacaaaccgccgcgaagatggctgcttgcgagatggagttgggactgagattgtgcagctccaccccgtagacgtgcagaatcgcccgcataaaacggcttgccggcactccgaacccccgctcgtgaaaggagacgaagctcagcacataccccggcggcggggatggggcggctccgctcggaggggccatccactccggctgcgagtcaccggagagagggcgaagcaaaccgtcagcaacaagggcctccagatcctccgtcgtgacggtggagaaaggccacgggtcgcgcggcgaaacaacggtcacccggtcggccatcaccaagcagaagaggtggcgacggagaggacgaggtgcgcgcaggacaggcggcacctttggcaggcgaagcaggcgacgcttcacctccgccataatgaccgcgtcaaaaaggctggcccctcggaagggttcaacagccgcctcagagcactcgggctccgcgcccactactggctggcccccgaagggttcgacagccgcctcagagcacgcagagcgagggatgaccctgggtacgttcgatacataaccaaggctcgggctatgctcccgagcctcgggcgccataggaagctccacctcgcccgaccccagggctcgggctcaacctcgacgctggacgacggactccgcctcgcccgaccccagggctcggacatagcctcggcctcggaagacggactccgcctcgcccgacccagggctcggactcagcctcggcctcgaaagatggactccgcctcgcccgaccctagggctcggactcagcctcgacctcgaaagacggactcgaccttgacctcggaggagcctccgcctcgcccaacctag

SEQ ID NO: 21767 - DNA, 186 bp, Zea mays
  Peptide Sequence Number=SeqID_65142
atggggaagcctgtcccatcactcctcatgctcctcctcagccgagtgaccgcacttgtacccaccataaccggaatgggagaccacgtctcaggtcgcgtgaggggcaaagtctactaccaggttcaatcaggtactaggcttaccgatttaccatatttctcggatttaataacattatgctaa

SEQ ID NO: 21768 - DNA, 393 bp, Zea mays
  Peptide Sequence Number=SeqID_65143
atggcgaagctccccgggccaagttgcaaaggcgcaatgacaccgaatcggggtcctcctccgcgcggcggattccgcagtcaccgaatgaggcgcactcaagttctctccgccccgtgctcaacctggagtgtaaccatgccatccacgcggtcccgcgaaggtcactggcatgattcacaagcccatatggcaccgttgaagaggtccccaaagcggcggccctcgcttctgtcacctatctctcgcgttccctggcggctgtacgcttcttccgcacggctatggcttgtgcgcggtcttataggtctgggattaaggaagtcgggtagcgcacaactcggccaaagtggttacaacggcatcggtgaatccgtcggggaaaatccctag

SEQ ID NO: 21769 - DNA, 666 bp, Zea mays
  Peptide Sequence Number=SeqID_65144
atgacccgcgcccgcgcctataaagcccactcaggcgtcgaccacactcttccgcgcacgctcaaacctcaccggagctcaactcaccgtcgtttgcccccctcggagaagactgagcacacctcggtgaagctccccgagcgaggaatcgaagtctgcttcgccggagaggccagtccacggtcgccggagttcacaaccccgccggagtgcgtggacaagggggccggatacacaacacctcctcagtacgcggtgcagcagttcgagaagcatcgagtgccccgttgtagggtgaggatgaccttggagcctcatcccctgcagccaggctggcgttcactggactctgagtcctttggatatcgggctgaagacacgattgaggcaattgctctgcatgggttgaccactttctgcggattccatcccttggagctgtctacccaccccattggcttgtttcccacggaaagggaagacgacccaatgtggaaggattgggtggagcatgccaaggacatctgggatatctacccaggccagactgcgcacttgaccgtggagcagctatccaatgagatccaagagttggaggaattagtggggaccagagagaacaccatcgaggttctcgaggatcagctcattaacacccagcagtag

SEQ ID NO: 21770 - DNA, 1038 bp, Zea mays
  Peptide Sequence Number=SeqID_65145
atggtcgctgttgtgcttagggcattgatagacttctgtcaaagtggcaagtgtggtttgtttgggaaaggtggccttataatgtttgatgtgacagcagattatgtcacctaccatttgattcatttacatccagtaatcactttaggggtttttggaggaatactggggagtttgtacaactttttcctggacaaggttctccgtctctacaaccgtatcaatgagaaaggaaaagcttacaaactactacttgctgcaacagtcactgtttgtacatcatgttgtatatttggcttgccatggattgctgcttgcaaaccttgtccaactgacactagagaagcttgtccatcaataggccgttctggtaatttcaagaaattccaatgcgcaacagatgaatacaatgatttggctagcctattcttcaacacaaatgatgacactattagaaacctctaccgtgctggcactgatgatgaattccacatttcgtccatccttgtgttctttattgcatcgtattttttgggcatcttcagctatggccttgctttaccatctagcctttttgtgccagttattttaactgctgcagcttacggccgtctggtggtggcagatgcgttcaatgcaaacgtctatgatttgcttgttagattgaaagggtttccacaccttgaaggttatgctgaaccatacatgaggctatgggtcgtagtaacacacggagtgaggctgacagcagctaagtccagcctcggacgccataggaagctccgcctcgcccgaccccagggcttgggctcaacctcgacgctggacgacggactccgcctcgcccgaccccagggctcggacatagcctcggcctcggaagacagactccgcctcgcccgacccagggctcggactcagcctcggcctcggaagatggactccgcctcgcccgaccccagggctcggactcagcctcgacctcggaagacggactcgacctcgaccacggaggagcctccgcctcgcccgacctag

SEQ ID NO: 21771 - DNA, 1161 bp, Zea mays
  Peptide Sequence Number=SeqID_65146
atggggaagaagttgaagaaacccgggcaagccggggggagatactgggctcaagctccagatcatggtgctgctaccagaggcaatcctagaccgccatcacaaacatcgcgccatgttctgactccacctctggcaaatggttggcagtggcaatccaggcctcgcccatctggatctgaagtcaagaaggatgatgctcctccatctagttctgtccctgaggtggagaattttgatggcaacaatacatcagatgatgatgatgatgatttgagtgatgatatcagtgatgactatgattctgatgcaagtgagaaaagttttgagactcgaaaaacaaacaagtggttcaaagagttctttgaagtattgaatacattgagtttggaacaaattaatgaacaaactcggcaatggcattgcccggcatgcaaaaatggacctagggcgattgactggtacaaagggttgcagcctttagtgactcatgctagaacaaagggttctacaagggttaaacttcacagggaattggctgcattgctggaagaggagctttctcgcaggggaacttcagtgttaccagcgggtgaacaatttgggaaatggaagggactgcaagaaagcactgatcgtgagatagtgtggccaccaatggttattgttatgaataccttcttggaaaaagatgaagatgataagtttttcatcaatccagctacaagtcagcctaacgtcgtggggctgattcttgccgattctgctaattttaagactgagctgagccaatctgacatgtttgatcaacggctcgaagccaagatacttaatgcggttgatagcagccagtatactgggaaatatgtctttggtgttgatgacactctgaaggctcttgaaatgggtgttgttgagaccctggtagtgtgggaaattttggatatcaacagatatatcctcaagaacagttatactagggaaattactataaaacatatgaacaaagagcaggaagctgagaggagccagagccctgagtacatgccgacgtggcagttggagaggtgttgctgccctattcatgtgatgtcgtggccgtcggaggagcgcctgagccctgaaggagcacagctgtcgaagctgtcgggtccttgctaa

SEQ ID NO: 21772 - DNA, 903 bp, Zea mays
  Peptide Sequence Number=SeqID_65147
atggcggcggcaggtgggcggaagcagcagtcaagtcgtctgcaggctcacgtcccctcctgggacagcgagagagccctctccaacggcgtgaagacgacacacccgtgttccgttcctcaaacggttcgcgcacgcacaacggccgccccgccaaccactcgtctcatcgcattaactctgcagcaggacatggaccgagaaaggggatgctccgaaagggatccttctccgcgaaggaagcaggccccgagcccccctactgatcagaggctggcccccgaagggttcgacagccgcctcagagcactcgggctccgcgcccactactggctggcccccgaagggttcgacagccgcctcagagcacgcagagcgagggatgactctgggtacgtccgatacatggtcgaggctcgggctacgctcctgagggctgttcttgcaaacccggctccggccaaaccattgacagcgtcaacataccagcccgagaacttggaacctgactatgcacccgggctacgactagtcaaggctccgtccaatcaagggacacgatctcgccgcgcccgagcccagcctcgggcaaaggcagccgacctaggaggtttcacgtctcgcccgagggtcccctcaaacagcggacgcaccttcgactcgccccgaggcccggctcgggaaaacagtgtcgcctgccctgctccggctgttgtgccactcgacagagtgaggctgacagcagctaagtccagcctcgggcgccataggaagctccgcctcacccgaccccagggctcggactcaacctcgacgccggacgacggactccgcctcgcccgaccccagggctcggactctacctcgacctcggaagatggactctgcctcgctcgaccctag

SEQ ID NO: 21773 - DNA, 438 bp, Zea mays
  Peptide Sequence Number=SeqID_65148
atgggggcgggggttgttgagcggggggagcggagggagagggaggacgacggtcgcaacgggggcaggggcgcagcaacactctttccaccggggttggggggaggttacggccgaggagcaggggcgttgggggcggggatcacgacggcgggggagtgggggttggggggaggcgagcgcgagaggaaacacgcggaggttacgacggggggcgtcgagggcggagggagaacgaggagccatgcatgggggcacggcgggggcgagatccgcgatgactgctcaggagtcggcgagatccttgctcgggcgtggagcaggatttggcaggagccgcaactaactgctcgagcgtggggcaggggcactgtgtgcgttgggcgacctcaagcagtgacggaggcacacaagcgggctttggagtgtggacgctga

SEQ ID NO: 21774 - DNA, 1335 bp, Zea mays
  Peptide Sequence Number=SeqID_65149
atgtcgtcacaagaggtaactgtagaacttcttttaggcgatggctctaattacaaatcttggtctgtctctatttataatgctttcatgagtgttgattctgatttgagacagatctttagtagaagtatttttccatctgatattagtaaaaatccctctaatgatgaactaagatgtttttctctcaatcaccgtgcttgcagcatcttagttgattctctttctagaggtgcttattttgccatcatgagtaatgataatgatttaattgttgatgctcatgatttatggaatagaattaaagtaaaatattttgtggcaaattgtactacttctactccctatattgcttgtgatgctaaccattcaaagggagaagatcaagaacgatggacacccaacgatgaatctacctcgtcgacaggtttggtctccactaataataagtgttttattgctaacaatgacggtggagacaaaagccatgatgaggaggaatatgaggatgatagcgaggatgaatcttcatcacctcaaggtacattttcctatttggcttccactgacgttaatgacagggaaaatgagaccgatgatgtggaagaagaggagattcgccgtttctacatccatctcaacaaagaggacaaggcactcttggttaagctgttgagaaggaacaaggaacaaggcgagacgcttctcaggctagaggagtccctcatcaaaaccaacaacagcctggagaagatgaccaaagaacatgaggagctaaagtactctcatgggaatttggtccaaaggtatgaatatgttttaattgagcaaagaaatagtcatgatgcattatctaatattgctcaacttaaaacggaaaattctatgcttaagagtcaagtacaaacaatagacttagaaaaacgtgctctagatatccacgggcgcgtggtgaagaagcttgagaaaggaaaaactgcagcaagtgtcaagctcaataagaaaagtgttcctaaagatgaagaaatcaacatgagcttggaaaaaggtaaagattcaattaatcatgttgtttgcactgatcatctctccatgtcattcaagcacaaaaagggaagaaggaaaaggaggtgcttcaaatgcaaggagatagaccacctcatcgcgtcttgtccatacaaaaacaaggatgaagggacaagaagttgttttggatgcaacaataaggaccacacgatcacttcatgtccggtcatgaagaatcaaggatgtgcatccttccaggtgaccctcaccaaggaaagtgacacacagccaagcgtcatgtcaggttga

SEQ ID NO: 21775 - DNA, 1467 bp, Zea mays
  Peptide Sequence Number=SeqID_65150
atgctgagcaagatcagcgacatcaggctggcacggctgaggccaccgtccgtcgccgatatcgtgacacactaccgggtgacattcaccgccagaactttctgctacatcgatccggagtaccaatggcagatccaagaaaccaacctcgctaggctagctaaccacaagaaagatcgcgcgctgcgagaggcgccggccatgagttcctgcgtcgccccccgcgttctcatcgtgtcgcgtcgcactgtccgcaagaacaagttcgtcgacttcgtcggtgagtaccacctggacctcatcgtgggctacggcgcggtgccggtgatcgtgccgcgcgtggcgggcgtggacgcgctgctggactcattcgagcccatccacggcgtgctcctctgcgagggcgaggacgtcgacccgtccctttacgagtccgctgacgacgccgacggctcgctctctccggagcagctggaggccatgcggcgcctgcacccgagcgacgtggccatcgaccgcgagaaggactccatcgagctccgcctcgcgcgccgctgcctcgagcgtaacatcccctacctcggcatctgccgcggctcgcaggttctcaacgtcgcctgcggcgggtcgctgtaccaggacctggagcacgaactggttcggcccgccgcgcaggtccagcacatcaactacggcgactacgacgggcaccgccacccggtgcgcgtcctgtccggcacgccgctgcacgagtggttcgcgcgcgatctcgctgacggcgcgcagttgatggtgaacagctaccaccaccagggcgtgcggcggctggcgcagcggttcgtgcccatggcgatcgcaccggacgggctcgtcgaggggttctacgacccggacacgtacaaccccggcgagggcaggttcatcgtgggcctccagttccacccggagcgcatgcgcaagcccggctccgacgagttcgactaccccggctgcgccagggcgtaccaggagttcgtccgcgccgtggtcgcgtaccaggagaagacggcggctccgccgcacctgcccctcagcgcacccctccccgcgtcaccgaagctgagcaaggagatgatgaggcggcgcaaggtcatcccccggagcttctcgctcgccatggacatgtacctatccgacagccacaccaagccggcggagaagcgcgaccacgaagccggcgccgagttcctcgagtcgaacacggcgtcggtgagcgcgtggcaggagaagcggctgaagcagatgggcgccacggcgcggaacgcgtcggggtacctcaacggcgtcaaggtgaacggcgtacgcgaggcggcggcgcgggcactcatggcggagatgagcgtgaaccagctatccgacctcgccaccttctaccagaccatgggcaagatctgctctgaggtgcttgacaccaagctgcagggttag

SEQ ID NO: 21776 - DNA, 2583 bp, Zea mays
  Peptide Sequence Number=SeqID_65151
atggccgctgtcgagccccggcagttcggccgtctggagccggcgcgcgtcggcgcgtaccctcccccgccgagccacatcccgcggcgcgcggactcgcccgcgcgcggctgcggtttccctcccctcgtctccccaccccgcagcacgtcggacgatgcgtcgtcgtcggacgacgagcaggatgactggcgcgagctgtacgggtcgcagctgcagctggaggtggagccggcggcgcaggacccgcgcgacgagggcaccgcggacgcgtgggtcgagcgcaacccgtgcctggtccggctgacggggaagcacccgctgaactgcgagccgccgctggcgcggctgatgcagcacggcttcatcaccccggcgccgctgcactacgtgcgcaaccacggcgccgtgccgcgcggggactgggcgacgtgggccgtggaggtgacgggcctcgtgaggcggcccgcgcggctcaccatggacgagctggcgcgggacttccccgccgtggagatccccgtgacgctggcgtgcgcgggcaaccggcgcaaggagcagaacatggtgcggcagacggcgggcttcggctggggcgccgccggcgtgtccacgtccgtgtggcgcggcgcgcgcctccgcgacgtgctccgccgctgcggcgtcgcgccccgtcacggcggcgcgctcaacgtctgcttcgagggcgccgaggacctccccggcggcggcggcggcgggtccaagtacggcaccagcgtcccgcgcgagtgggccctggacccgtcgcgcgacatcatgctcgcgtacatgcagaacggcgagccgctgctgcccgaccacggcttccccgtgcgcgtcatcatcccgggctgcatcggcggccgcatggtcaagtggctgaagcgcatcgtcgtcacccccgccgagtccgacaactactaccattacaaggacaaccgcgtcctgccgtcgcacgtcgacgccgagctcgccaacgctgaggcgtggtggtacaagccggagtacatcatcaacgagctgaacataaactcggtgataacgacgccggggcacgacgagatcctgcccatcaacggcatcaccacacagcgcggctacaccatgaaaggatacgcctactccggcggcggcaagaaggtgacgcgggtagaggtgacgctggacggcggcgagacatggctggtgtgcgacctcgcccacccggagaagcccaacaagtacggcaagtactggtgctggtgcttctggtccgtcgaggtggaggtcctcgacctcctcggcgccaaggagatcgccgtgcgcgcatgggaccagtcgctcaacacccagcccgagaggctcatatggaacctcatggggatgatgaacaactgctggttcaaggtgaaggtgaacgtgtgccgtccgcacaggggcgagatcgggctggtgttcgagcacccgacgcagccgggcaaccaggccggcggctggatggcgcggcagaagcacctggagaagacggcggaggcggccgcgccggggctgaagcgcagcacgtccacgcccttcatgagcaccaccgacggcggccaccagcagctcaccatgtccgaggtgagcaggcacgcgtcgcgggactcggcgtgggtcgtcgtccacggccacgtctacgactgcaccaggttcctcagggaccacccgggcggcgcgacagcatcctcatcaacgccggcaccgactgcaccgaggaattcgacgccatccactccgacaaggccaaggctctgctcgacgcctaccgtgtcgcgagctcatcgccaccgcacctccgacagctccgtccacgcggctcccgctgccgtcccacctcctcgcgcccatccgcgagccgccaggcccggccccgcgctctccggcccgcgcgacaaggtccgctgccgctcgtcgcaggacgagctgtcccgcgacgtccgcctcctccgcttctccctgccgtcgccggaccaggcgctcggcctgcccatcggcaagcacgtctccgtctgcgcccatcgacgggaagctgtgcatgcgggcgtgtacttcagggacgaagcacccccaagttccccagcggcggggctcatgacgcagcacctggactcgctcccgctcggctcctgcatcgacgtcaagggcccgctcggccacgtcgagtacaccggtcgcggcggcttcgtgatcgacggcagggaccgctacgcgcatcgccaaataatggtctgcggtgggagcgggatcacgcccatgtaccaggtcatccaggcggtgctgcgcgaccagccggaggaccgcacggagatgcacctcgtctacgccaaccggacggaggacgacatcctcctccgcgacgagctcgaccggtgcgcggccgagtacccggaccggctcaaggtgtggtacgtggtcgaccaggtgaagcgccccgaggaggggtggaagtacagcgtcggcttcgtaacggaggacgtcctgcgggagcacatccggaaggcggtgacgacacgctggcccttgcctgcgggccaccgccgatga

SEQ ID NO: 21777 - DNA, 1230 bp, Zea mays
  Peptide Sequence Number=SeqID_65152
atggacacgctcccagaaggcgtcgtgcagcacatcctctcgcagctcagcaacgcccgcgacgtggccggctgcgccgccgtcgcccgctgctggcgcgactgtgtggccttccttccgtcgctctattttccgcggggcgcctttgaggccttggccggcggaccggcgtcggccgtggccttcgccgacgacgccatcggtcggatggtcgacgccgccgcgcgcctcgaggagctcgtcgtgtactgccccttctccgcgtccctgctcccgcactggctcgcggcgcgggccgccacgctgcgcgtgctcgagctacggatggactccgccgccgctgacaagtcggggcacctgaatctcgattctatcggggtggccgcgggcctcgaggagctcaggctgtgggggctcacgatgacgcgcgcccccgcgtgggggccggatggagcggctccgccggtcaacgacgtcctcgccgcctgccccaacctcaccgacctctcgctgctcgggtgccagtgcgacggagaggcggtcatctcgctagcctcgctcgagcggtgccggctcgacttcctcggctctggcaactcctctctcaggttcgccgcgccccgcgtcgagtcccttgaggtccagggtttctcatttatctatctgcaaggtggcaaccgtctcaaacatctcacaatctccaagaacactggtagtgtgcatcatgtcgagatggggaagctcccggagctggaccagctctcgctgcgcggcgtccagtggagctggggcgccatcagctcggtgctgcagtgcgctagcgaggtgaagcacctggtgatgaaggtcgaattctccggtgattatgacacgctgcagccgtttccggagatcgacctcgtcgaattcttcaacagccacccgaagcttcgcaagttcgaggtccacggcgccatgttcgcggcgctgagtcaggaaaacagcctgaagaatttggattcaaggttcgtgatacctttcttggagcaggtcgtggtcaccgtgcggtcatctctcaatgctaagcagaagctgaacaccctcaagtccgttgtcaggtacagcgtgaggctaagaaggatgatcattaggatctcgcagatgaagaattgccatgctgctggagatgatttctttgaggagatttgcaagttcacttacatgaacagtgggacagtgtgcatagagtag

SEQ ID NO: 21778 - DNA, 1290 bp, Zea mays
  Peptide Sequence Number=SeqID_65153
atgcagacggcatgcaaccgcaccacggggatgcaccctttcgacttcgacgcatccagcatggaggcccaggcccacacgtcatgcgagcggaagcggcggtcaaatcgtctgcaggctcatgtcccctcctggagcagcaggagagccctctcccacggcgacacctttggcaggcgaagcgggcgacggttcacctccgccatgatgaccgcgtcaaaaaaagggaccgggaaaggggatactccgaaaggggtccttccccgcgaaggaagtgggccccgagccctcctactgatcaggggttcgaaggctggcccctcggaaggccgcctcagagcactcgggctccgcgcccactactggtcagaggttcgaaggctggcccctcggaagggttcgacagccgcctcaggccactcgggctccgcgcccactactgatcaggggttcgaaggctcgggggctgctctcgcaaacccggccccggccaaaccgttgacagcgtcaacataccagcccgagaactcggaacctgaccatgcacccgggctacgaccagaaaacagcgctgcctgccctgctccgactgctgtgccacccgccagggtgaggctgacagccgccgagtccagcctcaggcgccataggaagctccgcctcgcccgaccccagggctcggacccaacctcgacctcggaagacggtctccgcctcgcccaaacccagggctcggactccacctcgacctcggaagacggtctccgcctcgcccgaccccagggctcggactccacctcgacctcggaagacggtctccgcctcgcccgaccccagggctcggactcagcctcgacctcggaagagtcctcgtacgagaaggtggtcgcgcgggagaacgggctggcggacgggctctctctctccctcgcgaacgcttgtaaccccctactcaccgcccgcatcgctccgactgctgcgccactcgacagagtgaggctgacagcggccaagtccggcctcgggcgccataggaagctctgcctcgcccgactcagggctcggactcgggctcggtcccggaagacgacgaactccgcccgaccccaaggctcggactcgacctcagccctagccaacggtctccgtctcgcccgacccaagggctcggactcgacctcgacctcggaagacagactcgacctcgacctcggaggagcctccgtcttgccctacccagggctcggaccgaccacgtcacaggaggggccatcattaccctacccctag

SEQ ID NO: 21779 - DNA, 396 bp, Zea mays
  Peptide Sequence Number=SeqID_65154
atgtctgtcttaagacgctactgtaggcgtccacagattgttttggtgcacggttctgtcgatcccactgcccacccaccgccccctctcctccccgccatcaacgcgatgcctcacttgtttggaggttggcatgtggtggacaggcgacgagcgttctttggtagccgctccggtagaatagcaaggatgccaagtggtagggctattttagcatgtggtgataaatcaagagaagaagcaggcacaaaaatatatggacaaagcgacttgtatgtaaaggctgacattacaccgagcaacaatgtttatacttcaacatattcgtatgcctcggagaagcctctccaacaagacaagccggatgaagaaggttacgtggacaattgtttttag

SEQ ID NO: 21780 - DNA, 96 bp, Zea mays
  Peptide Sequence Number=SeqID_65155
atggagccttcttccatggtgctacggagcgaccctgtcccattgcccgagaacgcgtcagagaaggaggtggcccgcgccaaggtggagcaatag

SEQ ID NO: 21781 - DNA, 2076 bp, Zea mays
  Peptide Sequence Number=SeqID_65156
atggagttcgacttcgactcccatggcggcgacgcttggctgctcgacgccatgtccacgtcgctccacttttcggccgtttcgcccccggtgccgtcgccgtggccgtgcggcgacccgcatcatccttccatgtggctggacacggttgccctgcaagacgacggcccgagcgtccccgccgagaaatctgaaatatccaagaaatgtgaacatttaaatggtaaatgccaggttcatctttccctggttgatggttgttctgatagctcatatttcttgaaggaaaagctcacagtagctctcatgtacttcaaggagtctaccaagcagcatttgttggttcaagtttgggtgcctatcaggaaaggggaccactacatgctaagcacttcagggcagccctttgtgcttgacgaacagagcatcggacttcttgattatagggctgtgtccatgatgtatacgttcgctgtggatggggatagtgtcgaagaattgggtctacctggacgcgtatacaagcagaggctacctgaatggacgcccgatgtgcagtactacagcagtattgaatatgcacggcttaaccatgcaataagttacgacgtacatggtactgttgccttgcctgtgtttgattcttccatgaagtcatgcatcgctgttgttgaacttataatgacatcaaagaaagtaaactatgcaagagaggttggtgaagtctccaaagctcttgaggccgtgaatcttaaaagcactgaagttatcgaacatccatatgtccagatatttaatgaaggacatcaaaatgttcttgtagagatgttggaaatcataacagtaatttgtgaagagctcaaactacccatagctcagacttgggtgccatgcaaataccaaaatttattgatacattgtggtggtgaaaataagagttgcttcgatattcatgaaagttgtgcccaagaactatgcatgtcaacaagtgctgttatgtttcatattatcgatgctcatatgtggggcttccgagatgcctgtgtagagcaccacctgaagaagggacaaggggtttctggaaaggcttttatcctacgtaggccttgctttacgaaagatgttactagattctctaaaatggagtacccccttgttcactatgctcgtatgtttggattagctggctgtttttcgatatgcttgcaaagtgcttataatagaaatgaggactatgtattggagttcttcttgccacctgattgtagagaagatggtgagcaaaaggttcttttggactccatcttagctctgctgagacagtatcttaatagattgcaggtagccactgacgaaggctcaaatgaagtttaccttcaagtcgatgctattactataattgaaaatggagatataaagaatgcacatgtacaacatatgaactgtgaaggtggcattcatgcatcagatgagagaaatatgcatgtaatccatgagtctgacagccagaaaagaatatccccaacagaatctgaaacatgtccatcgcctgataacaccaaatgcaatgacaaattatttgctagacaaaatggtggatgtatctcagattctttattgcttgaaaacaatagcaagcatagtggaaggagacaaggaaaagaagaaaaaacattcagtttagaggttattcaacagtattttactggaagcttgaagaatgcagcaaaaagtcttggagacgaccacacaaccaagcaaccaggacactctaagctcgaccagctggtcgcacgacttgtaaacattgctaagagcccttgcaatgctaggagtagctctaatgcgaacccaagtggggttatggctgatcgtttgatgagagatggggtaactcgattggtggatggaggcgatgttcttggtctgactacaactgtccatggacgctacgccttagaaaccaatacagcacctccaatggttgtcacaatcttgtggagtgcgaccaccggccacgagggcacttgtcctacaagcaatcgaagaaccagcaagaacaagtataagcgctga

SEQ ID NO: 21782 - DNA, 1341 bp, Zea mays
  Peptide Sequence Number=SeqID_65157
atggaggagtacgtggagacgctcaaggcacggaagcaggaggagaagctcaagaccgtgagcctggacgactggctgcccatcacgtcgtcgcgcacggccaagtggtactactcggcgttccacaacgtgacggccatggtcggcgccggcgtgctcggcctccccttcgccatgtcgcagctgggatggggtctgggcacggtggcgatcgtcatgtcgttcgtgatcacgctgtacacgctgtggcagctggtggagatgcacgagatggtgcccggcaagcgcttcgaccggtaccacgagctggggcagcacgtgttcggcgagcgcctggggctctggatcatcctgccgctgcagatcatcgtcatggtcggcaccgacatcgtgtacatggtcacgggcgggcagtcgctcaggaagttccacgacctcgtctgccgccagggcggctgcggcggcgacatccggctcacgttctggatcatgatcttcgccagcccacacttcgtcctgtcccagctccccaacttcaactccctctccgccgtctccggcgccgccgccgtcatgtcgctcgcctactccatgatcgccttctccacgtcggtggccaagggcggccgcgccgcggactacggcctccgggccacgacggcgcctgggcaggccttcggcatgctgagcgcgctaggcaccgtgtcgttcgcgtacgcggcgcacaacgtggtgctggagatccaggccaccatcccgtccaccccggaggcgccgtcgaagaagcccatgtggcgcggcgtcgtggcggcctacgccgtcgtcgcgctctgctacttctccgtcgccttcgccgggtactacgccttcggcagctccgtggaccccaacgtgctcatcaccctggaccggccgcggtggctcatcgccgccgccaacctcatggtcgtcgtccacgtcatcggcggataccaggtcttcgccatgcccatgttcgacatgatcgagaccgtgctcgtgaagaggcacggcttcgcgccgggtttctggctccgcttcgtatcccgctccgcgtatgtcgccgctaccatgttcgtcggcttgaccttccccttcttcgacggcctgctcggattcttcggcggcttcgggttcgcgcccacgacatacttcattccttgcataatgtggctagtggtgcggaagcccaagaagtacggtctgtcatggttcattaacattatctgtatcgtgatcggcgtgctgctgacgcttatcgcatccatcggaggactccgacaaatcatcctggacgccaagagttacaagctgtactcttaa

SEQ ID NO: 21783 - DNA, 95 bp, Zea mays
  Peptide Sequence Number=SeqID_65158
atggcttcctgcaccttctggtctcaggctaaggtaggtggctccgttgagggcagcgcacgaggccacgaggccgtcgtcaagaggcagccacc

SEQ ID NO: 21784 - DNA, 501 bp, Zea mays
  Peptide Sequence Number=SeqID_65159
atggagacaaatggtgctggcaatcatagtgaggcagtgggcgacggtgggcatgttgcagttgccgcgggcagcgacaggggcagccatgtctacctggagggcatacgtggaaacgagcgaggagagcgacgtggtgccgccgcttggacacggtgcagagcggttgatccgcgctgtccatcgtcaagcagggggggcctcatggtcgtcgtcaacgtcgatgactctcggattgttctgggcaccgcattcgacgacgacgtcatcacgtcgtccagctcatcgtccactgaagcccaacctgccacggtgcacttcgttttacagcccaaccaagagtcatcagtactcggtatgtcgcacgcgttcgacgactactatatcgaggaccgcggcgtcatcttgacgcaggaggtgacgcagaggaggaccgacagcaatgaccagttcgtcatcctcgccaccgttggggtagcttttgtgccggcttgcctttaa

SEQ ID NO: 21785 - DNA, 783 bp, Zea mays
  Peptide Sequence Number=SeqID_65160
atggcgaggttcaacagcggcggcgcgaacaccgcaccgagggctcccgtattgccgaaagaaggggaagtgcgccgcgccgcccgccatgctcgggattccgttggggatggagctgacgaagacggcccactgatcagcggtagagaaaccgagcgcgcgcaacggaagacagacaagcaggccccggtttccagcttcccagagtacgaggctaacgccctgcaagtcctttgcaagggtgctggcgtcatcagtccgcttggggttggcacgtcgcggggaagcgacacccgtcgttgtctcaggtgcgaggtcaacacccgacatagcccccgcaggggtgccggcgtcgtcgactcgctctggcccgacagccgacgaggtgccgcctcctgcatggccatgtttgccccgtctcctcctccggcgaggagggtggcggggcaaactcgggtgttcctcttctgccacggtgggaagccgtcgtcgtgctcgccgctgccgggcgagccgacgactgttgtcgccgtcgcgctgcgccgagaggagtaccatgtcatagctgccgtcaagggacatgaactcgagactcccgaagcggagcaccgtcccccgctgaagaggctgctggaggctacccatctagaactcaacgagaaagtgttcgttaacacgcagcgagcccctacctggcatgccaactgtcggcgtttcggacttgcggggaccgtcaaccgactagtaaatttgttgctgcgtgtccctgcccagatgggttga

SEQ ID NO: 21786 - DNA, 1458 bp, Zea mays
  Peptide Sequence Number=SeqID_65161
atgaggaaggtgtgcgccaacccagacagagaggtcggcctcgacacagtgctcgaggtgcccgtcccggaccagctccaccacgatccgtcgtcgtcgtcgtcgggccacggccggcgccggcgacgcacgctcaaggcgtgggtgcggtcgcgcatggaccagcgccaccggcggcacagctcgccgccttcccaggcggacgtgcagctcatgctcggggtggtcggcgcgccgctggtgccgcagccagtgcaggcgaggaaggccatggtggccggagaggacatcaaggaagagccccttgaggtgtccaaggcgaagtacatcgtggagcagtacgtcgcggcgtctgggggcgagcgggcgctgagcgcggcgacgagcatgtacgcggtggggaaggtgctgatgaggacgaggtcgtcgtcgacgacgaccaagcaggggcagaaagcccgcaggacgggaatggtgggcgtggtccacggcggcgccgagatcgccggcggcctcgtgctgtggcagaaggggccggaggtgtggtgcgtggagatggtggtggccggcggcaccaagatgagcgccgggagcgacggcagagtcgcctggcgccagacgccctggcagcaggctcacgcttcgcgggggcccccgagacctctccgtcgatgcgtccagggtcttaacccgagatcaacggcgaacctgttctcgacagccacgtgggtcggcgagaagagcgtcgacggcgacgactgcttcgtgctccgcgtcgacgccgacccgctggccctgcgcgcccggagcggcgacgacgtcgaggtcgtcaggcacgccgtgtgggggtacttcagccagaggacggggctgctgtcccgcctcgaggacagccacctgctgcgcgtccgcgcgacgaagggctcgccgctggcccagacgaccacgtactgggagacttccatggactcgtccatcggcgactaccgcgccgtcgacggcatcaacgtcgcgcacgccggccgcaccgtcgtctcgctgtcccggttcggcggcagcaccaacgacgacagcgctggatccgaatcggccggcgtgctcggcaggaggacgtgcacgtgcatggaggagaattggagcatcgaggaggtcgacttcaacgtcgtgggcctgtccgcggagtgcttcttgcctcctagagacatggtagtagtaccttgcagtcctaaaccagtcgacgatgagaaggggcagtgtggccgccttgaccacagctgcaagaaagacgacgctccagctgcacttgacgtcaggaacaagaacggtaatggcggtgccggtggtgtccatcgtcctgcgacggcaagaaaggctcttgtaacggcggcgacagggctaccctggtccgggactgccaaggttgtggccgtcgaaaccttcgacaccaccgctgagtaa

SEQ ID NO: 21787 - DNA, 240 bp, Zea mays
  Peptide Sequence Number=SeqID_65162
atgatgcttatgaagtatgtgaaggacaactgggagcagactgttttcatgatagaacttcacagaaaggatggagcgaggccgcgggcacgaccggcgcgtgccaaggcgaagccacggagcaccgagagcaaagttggtggcagtgggcacgaggtacggggcgtagtgtcagaggtgaggatgggagcctggaaatctgggtggagaagtagagatcctcctggaagcatcgcgtga

SEQ ID NO: 21788 - DNA, 297 bp, Zea mays
  Peptide Sequence Number=SeqID_65163
atggggatggtggcaagctcgcacaaccgcaatgagttcgtcatgatccgccatgacggcgatgcgccgggcccggctaagcccacaaagagtgcgaatgggggactacaaggacaaggatggtgtcaagggcctgtgcgtcgtgggcgccatcaacaactgtacctcccagctccccacctatgggagatcttctcccccataatatatgcgtctgagaacatcattgcatcatgccactgggcatacaagggtgttgaggaagactcaaccctagaagatccctatttcttataa

SEQ ID NO: 21789 - DNA, 495 bp, Zea mays
  Peptide Sequence Number=SeqID_65164
atgtccggtgcaccagaggactccagcgcaaactcgtcgccttcgggaaaatccagaggcaactccactataattcaccggactgtccggtgtacaccggacagtgtccggtgctccaaggaagagcggcctcaggaactcaccagcttcgggaaactgcaacggctgctccgctataattcaccggacatgtccggtgtacaccggactgtccggtgtaactgcggggcaacgactacttcgcaccaacggtcacctgcaacagcaattaatgcgcgccagagcgcgcagaagtcaggcacgcgcgtagtggcgcaccggacactctacagtacatgtccggtgcgccaccggacatccaggcgggcccagaagacagtgctccaacggtcgaatcccaacgggtttggtgacgtggctggcgcaccggacatgtccggtgtgcaccagactgtccggtgcaccattcgacagacagccccaccaaacggctag

SEQ ID NO: 21790 - DNA, 193 bp, Zea mays
  Peptide Sequence Number=SeqID_65165
atgacgctgagtaaagggtccaaaaatgacattaagtcatttagagagacaaccaatcaagccaaggatggaggcaagaagagcttcgaggtaccgagtgcatgggagaaggtcaaggagaccaggaaccaaaagccaggggtgaagaagaagacttgcaaagtcaaggttgatcgagttaagaagagttatg

SEQ ID NO: 21791 - DNA, 2073 bp, Zea mays
  Peptide Sequence Number=SeqID_65166
atggtaaccgagcagccatctgaggacgatggaggtgtcaattttcaggatggtggaggttccagtgcggctctgttggacaagaatgctggtgaagagatagaattggtggccggcgttcgggctctgcaggtaccattgacaggcaacggaagtgatgccagccatgaaagtgaaatgagaaagttcaatgaagtactaactgtcagagagaaaaacagtgaggttgatacacaagaagtcagtaaggagatggaacacactgatattgctgagttgcaggctgacattgtggatgaggcagcttttcttgattgctcgagtattgtcaacctggttgctggagaggagaccgaggtggtcaatactgaagacggtcttggctgtgaggaggatggtgatgttgacaaagtgctgcatgactctgtggatgacaccattcttattgattgctcaagtgagaatgttgaaatggagaaggcaggaaacgtcacacgtgagatgcctgagaaccaagctgcattggatgaggatgttggtaaaccgaatgaagtggttatcggtgacaagccccaagacacagtgacagataaagttgttcaggagggaagggaagtactgataactgatgagatgcagcaggggacagctggaatgcatgatgagatcgaggatgatcagtttgaatctgtttttgttcaagctgatcaagtagtcactgctgacaacctgctggaacaagtgacagatcgtgaaattactgtggaggagaacacagcactgatagttggtgagagacaacagagcacggttacaatggatgaggatgttgtagaggaccattctgatactgatggtgatcattccaatgaacacatagaagcggtaactactgtcaaagttccagaactcaagctgattgaagatatttttgttcaatctgatcatgcagttgctgctgacaacctaccagaacaagtgagagattgtggaattaccatggagaccacatcactgatagttgatgagaagcaacagatcatggttacagtggatggagatcttgtcatggatggttctgaaaccgataatgttcatcctgatgaacagatggaagtggtaactgctgaagaagtgctagaggacacagggataactgttgaagatgttgaggagaagcaaaagagcacagttacagtggataaagatgtcgttgatgatcattttttcaaaactgatgatgttcatgccgatgaacagatggaagcgtcaactactgatgaagtaccagagctcacagaggcagattacgaagttgttgaggagaagcaacagagcacatatacaatgaatggaggcattgaggatgatcatttcaaaacccatgttgctcatgctgatgaaaagaaggaagttgttgctactgatgtgccagaagtcacagggacggtcggtgaaattgaggagaagacatcagttacaatggatggagatgttgtctttgatcatgcagatggacagaaggaagtgatagttactgaagtgccagatgaagtcacagtgactggcgatgaaggtgttgagagaaaagcagctgtgattactgaggccataccagatcacgggactgccccaagtatcgcacatacaatgaatgggtgtgtcaaggaaacccattttggtgatggcaatgagcagaagaaagtaatcactgctgacataatctcgataccacaagatgattgtgtccggaaggagaatgcatccagcatagatgtcgcagagtccctgtccagcaacaagtcatcagggtgcaagaacagcagtgagaagaacactactgaacccatggcggtgctaaaagataagggactaaaagcgaccaagaaacccgtggatttgttagcgcttagcctagggaagcttaaagccaagctcaaggataggctgaacgccgagaagaagaaagaagcgaagaggctggcgcttgccagggtggacgagaacgtttgccgatcgatcccacgcaaaggggcagggcagcagcggaacctgaatctgcaacaacactaa

SEQ ID NO: 21792 - DNA, 1290 bp, Zea mays
  Peptide Sequence Number=SeqID_65167
atggctgagaatgactatctacttagcggtggccttgaaggtattggttctactggaaagaagtgtgaagtcgctcgccgaagaaatggtttagataccaacaagccaaaaaaaggtggtgggccaacaggaagagagctgaatatcggacaagcatgtttccattcagaaccgagcaacgcttcaaaccagttcatcctagcccaattgatgcaggtgcaacattttgagataattggattggacaagcttcttgataatagttctgtagaatcaatgaatgaggaacatacaattggtgattcattagacgaggctgagcaggaggaattgaaccatgagattgctctggagtctactgaagactgcactggctccttgtgcaaagccactgcttttctatttcccaagacagcttttgacttcctgacaaatgtggctgctagtttgtttggtattcatggttctccatctccaagctcagttttggtagatcctcgatatgaaattgtgaagatggcagaaatgcagccatgtgcagaagaaacgccaaaagaagaacagatagtgaagtttgtggcgcagattgacaagccaattctctcttcagaggatgccgtctcaaaaagattcgatgtagtcactgactgtttggatcatcattttgtgaaggaaaatggccatgaaagtgtaatgcagcttctgaagctttcactgacatttttctcgaacaataatcattggtgtgaaaggggcattatgtgtaatgatgattattttctatttttaggttacaagaggttggctgaagaagatggtattcatgtgagagtttatgaggaaaggatggatcttctgagggcttgcatcgttggggcacctggaacaccttaccatgacaatctttttttcttcgatattttctttcctcctgattaccctcatgaaccacctgtgctctcaagcgcagtggtggagaagttggcgtttgggcggaagctgggcggcgggccaaagaagaaggcggtgtcgcgatctgtcaaggccgggctccagttcccagttgggcgcatcaggcggtacctaaaggaagaacacagggcggcaacgggaggggatgctgggaagatgctgcacgacctcactgaatccgagtacgagctctcgctcaccaacctcgtcgagaaggacgcgggcgagggcgagggtggcagagccggagcccaagctgcaccccacgcccaagacagaggggaaggacccgagcgccgaacgaccagcaacagctaa

SEQ ID NO: 21793 - DNA, 690 bp, Zea mays
  Peptide Sequence Number=SeqID_65168
atgccgctggccgttggtagggtactagaggtggacgcacagctggccgttccgatcagaagccgcagagcggctagctccaaggggcgggcgatcgctgggagcttcgtcagccgcgtcctggccggcaaggccgcctccccgaggtactgggacgacggcaacacgaacgcggtttcgccccgtggacgtgcacgtcctcaaagccaagccacgccggggcctgatgggtctggtactctggtgcgcggcagttgtcgtccatccaccctctgctctgccaactgccatggctcgatgacggtggggtcgggaccaggcgtggttggcccaggcattattagcaatccgggtttcatgcgcccgcccatgtgcagccgtacccgtgcgcggaacctgatcctgacgagggccgtgcacgcctcgtcgtacgacaagaacccggaggagcaggtgcgcccggcgttcgtgccggacgatgtgatcggcggcgcggggagccccgacaagtactggagcccccaccccaagaccggcgtgttcggcccggcggcggtggacaccaaccagctgggcgtcgccgctgacgctgccgccgcgaatgcggctgcagcaggaggcacggtgctggaccagaaggtgtggttccgcccgctcgaggacgtcgagaagccgccccccgtcgcctga

SEQ ID NO: 21794 - DNA, 465 bp, Zea mays
  Peptide Sequence Number=SeqID_65169
atgccgcccaagttggacccctcgcaggtcggcgcggcgtcgtcgctggcgcccaagatcggcccgctcggcctctccccgaagaagatcggcgaggacatcgccaaggagaccgccagggactggaagggcctgcgcgtcaccgtgaagctcacggtgcagaaccggcaggccaaggtctccgtcgtcccctccgccgccgccctcgtcatcaaggcgctcaaggagcccgagcgggaccggaagaaggtcaagaacatccggcacagcggcaacgtcgccctcgacgacgtcgtcgagatcgccaggaccatgcgccccagatccatggccaaggagatggccggcaccgtcaaggagatcctcggcacctgcgtcagcgtcgggtgcaccgtcgacggcaaggaccccaaggacctgcagcaggagatcgatgatggtgaggtcgagatcccctccgcttaa

SEQ ID NO: 21795 - DNA, 681 bp, Zea mays
  Peptide Sequence Number=SeqID_65170
atggcgctggcgcacgattcctggtcgcagttcaagcctaagcctcctgttcttgtcgcgattgctagattaaagggggcaatgggtgcagagagggttttccctggtgggccaaaatggagaggggcgctatgcagtgcgccgggagaagcagggcacgaccatggggagagcagggcgaggggaggtggagctgaggggcccacgcccatggaggccctgctcctgcgctggcgtgctgctgcatgggcgccgagcacagggggcagaggagacgagggggagaatggagagggcatcagcaaggggcttcaacagtggagcgcttggccagggagagaggccagcgccatgggaggagtgtcgctgcactgctctactgtgggagaaaaaaacagtgagcgactgagctggggagggagcttgtccgcgcctggggaagggaaaggagtggcgctgggcggaggaggggaggacgccatgggaggagctcgacggcatgggagcttggagctcggctccctgcttgctgctgcgcgagggagaaggagcatggggcgtcgagcagttggaggagagagctcgcggccagggggtaagaagaaaggggcgccgtcgagggaggtgcagagttgctgcacgacaggaggaggaagaagacagggagtgcgtgtcggttga

SEQ ID NO: 21796 - DNA, 147 bp, Zea mays
  Peptide Sequence Number=SeqID_65171
atggaggacagtagcgcggtggtggagaagttggcgtttgggcgaaagctaggcggcgagccaaagaagaaggcggtgtcgcggtctgtcaaggctgagctccagtttctagttgggcgcatcaggcggtaccttaaggaagcctga

SEQ ID NO: 21797 - DNA, 612 bp, Zea mays
  Peptide Sequence Number=SeqID_65172
atggcgcctttgtcagggcctcactgcctgttagtctcactctgtcaagtggcactgcagtcggagtggcgcaggcggcgctgtccttctgtcagaccgctttatgctgatgggggttaccagctgagaattaggcgtcttgaagacgtgcaccctaggctctcgggggatagaggacgacagcgcggtggtggagaagtttgcgtttgggcggaagctgggcggcgggccaaagaagaatgcggtgtcgcgaactgtcaaggccgggctccagttccagttgggcgcatcaggtggtacctgaaggaaggtcagtacgggcaacgcgtcggtaggggcgcgcccgtgttccttgccagcgtcctcgagtacctcgccgccgaggtcatggagctggcgggtgccgcggcgcgtgacagcaagaggggccgcatcgtcccgcgctacctcctcctggccatccgcaaggacgaggagctcggcaatctgcttgtcgaggtcaccatcacgcacgatggtgtgttgtccaacatcaaccccgccctcctccccaacaaggtcgtcgccgccgcaggcagcagcaagtcccccacgaaggccgccgcgaagtag

SEQ ID NO: 21798 - DNA, 408 bp, Zea mays
  Peptide Sequence Number=SeqID_65173
atggaatatgaacaaaaatgcatagaaacttctaccaacatcgtgaagaacaacaaaaggaatagaaaaatgtttggatacatgagtagtccacgtcaaccacaagcaaaagccccgaaacacatggatacccaaacagaagaatcaagcctcgggctcccaagggcctacatccgattcgttgaacgggtcggattggatggctctaatgacttggatgatggctccgagggggaggaggaccaagacaacgatgacggaaacaagggcggcggtggcgaggacggtggtgacaatggtggcaagggcgacgacggccaaggcaccagcggcgaaggcagcggcggttacgacaacgatgatggtggcaagggtggcaacgccggtggtaaggcgccaccagcttag

SEQ ID NO: 21799 - DNA, 687 bp, Zea mays
  Peptide Sequence Number=SeqID_65174
atggcgcctaagaatccatggtcatcaccgtcgtctgggcagagcgtagcatatggctggtgtacacgtatgaaatacccatgggtaatcgggttcggattattgcttcccaaacccatacccatttacccaatgggtggagattttgtcccatatctatacccatgggtacatttttcgtcccatacccgtaccctaatagaggaattccccacgggttggcggaaccctcggctgctctgcgatgagccggagccggaggcagcggtgtcagcgtggacagaggtggagtcggctcgaaaaggggcttcgtcggcccaggagcaggtggcttcccaggccgaggaggtgcaacagcggtggctggagcttggccaggtcgtccgctatcgggaccaaccccggagtcacgctgccgaggccgtgagccgggctggtgtcctcgggggacagctggctgaggctacggagcagccggtcgaggtgtccgctcgggccggaacccttgcggagaccctggctgcgatggcccaagcgcggtgctggcgtcctccttcgaggtggagatccttccgcccgtgtcaccgtccgaggccaggccagattccgccgaaggtggaaacgacgccgatggtgctgctgctccctctgtcgatgtctgaacctgcaggaacagtttgtctgtag

SEQ ID NO: 21800 - DNA, 960 bp, Zea mays
  Peptide Sequence Number=SeqID_65175
atggcgcttcctgttgacctggctggcctgcgccctaggtcgggagacgtggaggctcctccgaagccgaggtcgagtctgtcttccattgctgaggccgagcccgagcccctgggtcgggcgaggcggaggtcgttcggcagaggccagggcggagtccgagccctggggtcgggcgaagcggagttcgtcgtcttccggggcctagcccgagtccgagccctgggtcgggcggagcggatcggagtggcgcaggcggcgctgtccttctgtcagaccggtcagtggagcggcgaagtgacggcggtcacttcggctctgccggggggcgcgcgtcaggataaagggttgcttcttagcgaaggcaaggcctcgggcgagctggagatgtgtccgccgttggaggggggcctcgggcgagacggaaatccctcggggcctctgcagctttatgctgatggtggttaccagctgagaattaggcgtcttgaggacgtgcaccctaggctctcgggggatggaggacggcagcgcggtggtggagaagtttgcgtttgggcggaagctgggcggcgggccaaagaagaatgcggtgtcgcgaactgtcaaggccgggctccagttccagttgggcgcatcaggtggtacctgaaggaaggtcagtacgggcaacgcgtcggtaggggcgcgcccgtgttccttgccagcgtcctcgagtacctcgccgccgaggtcatggagctggcgggtgccgcggcgcgtgacagcaagaggggccgcatcgtcccgcgctacctcctcctggccatccgcaaggacgaggagctcggcaatctgcttgtcgaggtcaccatcacgcacgatggtgtgttgtccaacatcaaccccgccctcctccccaacaaggtcgtcgccgccgcaggcagcagcaagtcccccacgaaggccgccgcgaagtag

SEQ ID NO: 21801 - DNA, 978 bp, Zea mays
  Peptide Sequence Number=SeqID_65176
atggccttactacactcggcgcggtaccagcagtccctgcgacgctaccacgcccgaggggttcggtcccgagacctccaggtgggcgacctggttcggatcttgatagttgaagggagcagcggcaccctcggcgtcgactacaccttcggcgaggaacccggctcgagcagacggctcggccggccaccccgaggcctcggccagctgtcccccgaagacatcagcccggcccgtggcctcggcaactcaattccggcgtcggtcccgccagtggacgacccggccaggctctggccgaccaagtcttcctttcgagccaactctacccctgtccgtgctgacaccgctacccccggcttcggctcatcgaagagcggccgaggggttcctttaattaagcgagagaagcctcggacagcaaggccgaccgagccaagggactcctacgcctccgggatacggatacctcactcgtcaccttcgcacgaggcgactcacgcttggtacgaacaaccccacacgattggggggcctgcggagcaacaaaagaccgacgaacggctcaccgtcgcccgctccagcagcggcgacgacgacgacttctgctccggggggccgaacagcagcagcgatgacctcagggcggatgctgctgccatgaggccctcgcccatgccctcactcgagaggcaaggacgggcagaaggccgtagagttggaggtcagtccgtgggcggcaccggctatctcgtcggcggagaaacttcttccggctgccgtggcggaaggcggcgccgggagcggctccgaagccactcggctcagagagctaggcacgcggcagctgccaacgccacgaatggcgaacgcccttccccccgatcactgagggaaggagcgggccgccgtccgcgcagggaccgaccccaactcggcacactcccctccccagcactgatgatgaaaatcctttaa

SEQ ID NO: 21802 - DNA, 150 bp, Zea mays
  Peptide Sequence Number=SeqID_65177
atgtccaaaccggacaaaactttccccctccttatcctcccaaggctccccagccttcttaaccctgggaagatctacttccggaagttcgggctccgacccttctaccggggctacgggttccggatcaacggtccccgcttcttctag

SEQ ID NO: 21803 - DNA, 150 bp, Zea mays
  Peptide Sequence Number=SeqID_65178
atggcggaggaggactcaacaacccaggtctacgtccccgtccctgccccgacgctgtttcgtggggtcggctcactctgcgacgacgtgccgctcgcggagctgccgtatgttggttgtgatcgtgaaaaaagatatatgcggacctaa

SEQ ID NO: 21804 - DNA, 255 bp, Zea mays
  Peptide Sequence Number=SeqID_65179
atggcgtcggaggccaaggacgtgggcatcctcaccatgatcatctacttcctgtccaattgcgtcatccaggaaaggctgccaagccaggagtcctactcagggtctcaggcgggcacgcagcgctacgggcatcaggccagaccagacgaccagaactgcgcgaccgcgcgggactgctgcggcggccggcggcgcggcgctgcagcctgcgggcggtccggcggggcctgtgaccggagccgaaggcgctag

SEQ ID NO: 21805 - DNA, 168 bp, Zea mays
  Peptide Sequence Number=SeqID_65180
atggagattggctctttccgggcagaatgggaatcacgacttgtgggtaaaatgtgcaacctctgcagagtattagaaactggttgtccccactgtactcagtgctcaggaggagatgctggcaacatggaggactttgaggagtttcaggactacgatgagttctag

SEQ ID NO: 21806 - DNA, 447 bp, Zea mays
  Peptide Sequence Number=SeqID_65181
atggggtgcgtggggctttacaacttggtggccggtgttgccttctccacagcggtgaggtcgccggagacgaggcagatgcggtcaccgtgtagtctggggtcgccagggagggctagaacgggtcaagactcaagagggcccgacgaactcactgacaatctgatgctcaactgtggatttatagcaaaaggccaagaagaaaggaccaaccttaatgtgattaaggaggtggtggcactatttcctcaaagtcttaaccgactgctgtccgcagagctgacaagtccaatcgacggtgagctctcaaggctatcttggctgttagctgagctctgtagaaggactcctaagtccggaccggctgctggatcacgctcagttggaagccaagtgtccactagcacgtgcctgaagcgacgatcccttgcagcagtggctctgtga

SEQ ID NO: 21807 - DNA, 762 bp, Zea mays
  Peptide Sequence Number=SeqID_65182
atgggtgacccatacccacatgagtatgggtatgggggtaaatccatacccgccagtgtatatggggatcgggaaaggggatatttcgaaaggatccttctaagtgaaggaaacgggccccgagccctcctactgattagggttttgaaggttgcgccctgcggggttcggcaaccgccccagagcacctgggctccgagccctttactgatcaggggatcgaaggctggcccctcggaagggttcgacagccgccccagagcatgcagagtcagggatgaccctgggtacgtccgtttcatggccgaggcttgggctacgctcccgaggtaccctaggacatttccgagaccagcgggaacgatttgtaatggaatcccaccggagggaggcaccgagccctcagaccctatcaaatgggtccgggtccagcaaatcacctgcaacctcgggcgcaacagggagctccgcctcgctcgacctcaggcctcggcctcggaagaaggtctctgcctcgcccgacctcgggcctcgtccttagcctcggcctcgggaggagaaacaacctcgcccgacctcagcctcagcctcaggagaagtatccgcctcgcccgacctcagcctcggaccgactacaccacaggggatacatcattactctacccctatctagctgcctcaggctacaaaggaacaagaccggtgtcccatctagattactccgggctcaagtacttctccgccggccatgttagcacatag

SEQ ID NO: 21808 - DNA, 702 bp, Zea mays
  Peptide Sequence Number=SeqID_65183
atgccccatgcaccaccacagggcatcgatgctgctggaggataccctgatggatacgacaacgatgtcggtgacagtttgagccacaacacggagctctcagaggaccaggagccggagggatggattgctagacccatcactcgcgacgccgctcgcgggtgtcacttccacaatgctcttgacaccttgttgtgtcgggccttcgaccgacacacttggtctatcgagtatcgttgtgtagtctaccagcatcgtcgtaggttatacccagaccagtgggaggctacttgcttggtgcgccgttcagacgatgatctttggggtgcagaggccttctcagagcactattctatcactgagagggatactaccgaggcaaccatgcaagatgcagcacgacatgcactttcgcagtactgctcgttgtttagcggggtagctaatggccttgacctgaagtactacccttgccgttcgactagcaaggctggaggtgtgattgtctcgcccattggtaaaggcaatcccaggttgaacagcatggtcaacttggtcgtcgtgctcaacaccgagatggaccaggcccttgacaagttgggcaaggttcgggtggaggttgcggaattgtgtgctgagcgcgcaatgcgccactatctggatggtggttctcctgcccctatcaggattcagcacccttaa

SEQ ID NO: 21809 - DNA, 1383 bp, Zea mays
  Peptide Sequence Number=SeqID_65184
atgaagaactttcatgagattaagcttccatacagcacacgctgtgccattctcgccgctgtcctgcttgtgacgacgtgccttatgatccttgcgttcgtgatcctgcctgaccgcgagatgctgccgccgccgttggtaagcgatgaccatggcggtggcaacctgtcatgcaacatcttcaagggcgagtgggtgccggacccgggcgcgccgcgctacaccacggagacctgcccggtgatccacggccactacgattgcatgaggtacggcaggccggacctcggcttcgtccggtggcggtggcgtcccgaggggtgcgagctgccccgcttcgacgcggcgcggttcctccgcgcaacgaggggcaagtccatggcgttcgtcggcgactcgcttgccagaaaccagatgcactcgctggtatgccttctggcgcgcgccgagcagccggcgccgtggaccaacgcgagctacgtgttccgcttcgagcgccacgggttcaccgtctctttgttctggtccccgttcctcgtgcgcgccgtcgagacggacccagacggcccgacgcggagcggggcgggcctgtggagcctccacctcgacgagccggacgccgggtgggcggcgcacgccaccgagttcgactacgtggtggtctcggcggggagctggttcttccgcccctccatgttccatgtacacggccgtctcgtcgggtgcaacggctgcctcgcgcccaacgtcaccgacctgacgctccggtactctctgcggatggcgttccggaccgcgctccgcgcagccgtggacgcgccaggcattggaaagcgctccaggaggacggtggtcgtgcgcacgctctcgccgtcgcactacgagaacggtgactgcgcgcgggcgcggccgctcaggcgcggcgagtgggagatgaacgcggtggaaaaggacatgtacgcgatacaagcggaggagttcggggcggcgaggagggtgagcaatggggccaggatgctactgctcgacgcgacggaggcaatggcgctgcggccggacgcgcacccgagcaagtatcgtctgtggcagcctgaccggttcaactgcataaagacccttaacatatacgaggacttgagatacctatcttatgggacggaggaggtgcagtgccatgaggaagaggctgtagcaacagatgtcggggtgcagggtcatgaggaggaggtcgaggccatagatgctagggtgcaggaccatgaggaggtccaggcgatgacgagaccatcgaggctcctgccgttccacggaggggcactcggaaaggccactttgtcctccctccatcagtgcctgcacagtcataatcttaggtacttgtaa

SEQ ID NO: 21810 - DNA, 318 bp, Zea mays
  Peptide Sequence Number=SeqID_65185
atggaagggcgttcaagactcactgcgcctggggcgttcttccgtcgccggaattcttcgacggtgcaggttttgtgtcgtcgtccgcctcgcaccgtgggcaagggtgtcgctacactaagcactggtaacgatttccccatggcgctctccatcgaccataccacgggtatttctcttggaattagctttcgggcactgattgtgggggaaggcttcaccggcgtggctccactgtggttctgcgtgggcgccgtcatccagctcggctggagtttgaggatagtcggtgagccgctaaccataggattcgcctag

SEQ ID NO: 21811 - DNA, 306 bp, Zea mays
  Peptide Sequence Number=SeqID_65186
atggaagggcgttcaagactcactgcgcctggggcgttcttccgtcgccggaattcttcgacggtgcaggttttgtgtcgtcgtccgcctcgcaccgtgggcaagggtgtcgctacactaagcactggtaacgatttccccatggcgctctccatcgaccataccacgggtatttctcttggaattagctttcgggcactgattgtgggggaaggcttcaccggcgtggctccactgtggttctgcgtgggcgccgtcatccagctcggctggagtttgaggatagtcggttattctctcatatga

SEQ ID NO: 21812 - DNA, 348 bp, Zea mays
  Peptide Sequence Number=SeqID_65187
atgaaagacggcgggttggagacagcgatgctcggggggctagaggcggtgttcgggcggacggcggcgctccgggacgagcagagggcgttggcggcctcgagggcggcgttccggcctcaggtggcgggcctcggatggcacggcggcgcggtggcgcggctgcgcagtggcgccggggcacgacggcgcggtggcgtgggggcgcggtggcgtgggggcacggcggcccggcggcgcgggagcgtggcagcgcggcggctcgggcgggcagcggcggcagctcgacggtttgagtggagagagaggaggaagaatgagtccgtgtgcggccgctggtggctctaa

SEQ ID NO: 21813 - DNA, 762 bp, Zea mays
  Peptide Sequence Number=SeqID_65188
atggcgcgtgccgaggatgtggaggacttcggacccctgaacagcgcgcagcccaaagcggaggccaacccggtggtggccgaggctgtggtcgacccggcaccacccctggaaactggtgacgactcccttgctgcccctgcgtctactgtgtctggtggaggctcgtcgccagtcactgtgccgatggtggaggatcccccgaaggcggcgacggagctggcagcggaggatcccccgaaggcggcgacaaagccggcagcggaggatcccatggcggcggctgggtcttcgcaggattttgggcctgcgcacgcaaccgctactgctaattttgtggcggcttcgaccgtggtcgctggaaatgaatcagatgagtctacgtctaagttttctgattttgatgactctgggagttcggttgagtggacggaagagtctttggatgaggacttggattactttgcgaccttggatgtggctgtggcggaggcttctccgcgtgttacggatgctgaagttttgcctggtccgagtgctgggcgtaggcggcgaagggcggtggcgaaacgtagagtgagtgaagtggatggcggtcggcttcgtgtgggcagggttggcaagcgggaattgttgtcctcgccggttggggcgagtgtaggtgagggggagctgcgaagtctttttgagggtgaggagcttaggataatgctatttaactatagggagatgggaatcattccgaaggttgaacctatgtaa

SEQ ID NO: 21814 - DNA, 609 bp, Zea mays
  Peptide Sequence Number=SeqID_65189
atggtgctgttgaatgtaactcaatggttcgtgcgagatgcacgagagacggtaggcgattttctacaggatcgggccgcttttagatgcgtaacaccctacttcctggcgtggatctttatgtggacaaaaagggttgaggttcgccatgtcgcttcggtgataagcggaagcgcgaaccaagtcctccctcggaggactttggtgattctgagtactcggaggaggaggtttcctccagatccgaggggtcgccggtctacgctcccccctgcgttgtccaatgactcggatgactcccaggggatagccatcgagctgtggacatacatccagtccgtcgagcatgccgggctcgagggctcggatgagtcagaggtctcctcggatgaggagaactcttccgactcgtccgaggaagggagcggcagcgacggtgacgacaaaggtgacagcagtgacgacgacagcggtggaggtggcgacggcgacgacggcaacgacggcggcaagggcggtggtggaggcagtggcgacggcaggagcgacgacatggcaagggcagcggcagcaaggccagtggcaaagcgccactggcttaaacattag

SEQ ID NO: 21815 - DNA, 1038 bp, Zea mays
  Peptide Sequence Number=SeqID_65190
atgccgtcgtggcagcctgagaggttttggcaccctgttcatgtgatatcgtggccgtcggaggagcgctggagccttgcggaagggcagctatctgtcgagtccttgctgacgtctccttgcttccgtaaggggttgagagccgccgtcgtcatggaacacgcggggcgccatcattatttgtttgtcggggcgagccagatgggatgccggtcttgttcctcgagccctgggtcgggtgaggcggaggctcctccgaggttgaggtcgagtctatcttctgaggtcgaggtcgagtccgagccccgggtcaggcgaggcggagaccatcgtctgagaccaaggctgagtccgagccctggggtcgggcgaggcggagttcgtcgtcttccggagccgaggccgagtcagagccctagggtcgggcgaggcggagttcgtcgtcttccggagccgaggccgagtccgagccctagggtcgggcggggcggagttcgtcgtcttccggagccgaggccgagtccgagccctggggtcgggcgaggcggagttcgtcgtcttccggagccgagacgggggccgagccctggggtcgggcgaggcggagcttcctatggcgcccaaggccggacttggctgctgtcagcctcactctgtcgagtggcacagcagtcggagcgacacaggcggtgctgtcttcttgtcaggccggccatccttgcattaaatgctcctgcgatacggtcggtcggtgtggcgatctggccaaggttgcttctcggcgaagactgggcctcgggcgagccgaagatggggcccccgagcctccgcacaaagcgagaggacggtcaaggacagactcggccttttacatacgcccctgcgtcgcctttccgcaaggaggagggggaaagtgccatgttgccctcggagggcgccgaacatggtgtctccagcgagttgctaacgggactcgatgcctccctctggtgggattccattacaaaatcattcctgttggtctcgaaaatgttctag

SEQ ID NO: 21816 - DNA, 369 bp, Zea mays
  Peptide Sequence Number=SeqID_65191
atgacgtgggcggtgggcagcgggcgtgggctggtggctggagcgaggcgttcgggcgcaggcgctaaccggctggccgattgcgaccggctgccaggcgaaggcgggggcgcttgctgtggtggcacggctggcaagggctacatggagcaatggaagaaggacgactcaagcatcaggcgtagccttgacgtcagcgacaatatcatcaggcaccactacgccgggcaacaccatcaagatccaccaagcgcgaatggatttgtccatagccttgtcgcgctgagccttcaaaatgctgtccaagccgcagaacttcatcttgggatacttgcagctcaggacaatgatgatccttgttcgacatag

SEQ ID NO: 21817 - DNA, 1425 bp, Zea mays
  Peptide Sequence Number=SeqID_65192
atggttgccatcccagggggtcacccgccttttaaaggcgactctccccacttgcgtcctcagccgtcgcagactgagtcttcaccaacacgcctccaaggtcttccccctacgacacgggggctgggtctcacgcgtcatgcaagctggcctagggcagaagaagccaaaccgccgcgcgcagagcgcgtaactgcccagcggttacaagcactcctccacttttgcccagaccagcgggtgaaagggcggaccgccatgcaggcggcatgcaactgcaccaagggggcgcaccctttcgacttcgacgcatccaacatggaggcccaagcccacacgtcatgtaaccggcgcgccggttactatgtgcgagaaaccgcaccgccacttgcgccagtaccgcgccttctcgattgcggaaccggtgccgcgactcgaggcaaccctgcgcatggcccaacagtgccaaccgagcacatcggtcacgggtcagtcagccgcgggagaaggcgcaacggtcgatacagccagaaatggcggcgggaccgggaaaggggatactccgaaagggatccttctccgcgaaggaagcgggcctcgagccctcttactgatcagaggttcaaaggctggcccctcagaagggttcgacagccgcctcagagcactcaggctccgcgcccactactggtcagaggttcgaaggctggcccctcggaagggtttgacagccgcctcaggccactcgggccccgtgcccactgctggtcagaggttcgaaggctagccccttggaggggttcgacagccgtctcaggccactcgggctccacgcccactactgatcaggggttcgtaggctggcccccgaaaggttcgacagccgcctcagagcacgcaaagcgagggatgactttgggtacgtccgatacatggccgaggctcgggctatcctcccgaggtaccctaggacatttccgagaccagcaggagcgattctgtaacggaatcccatcagagggaggcatcgagccctcagaccctatcaaacgggactgggtccagcaaatcacatgcaggaagctccgcctcgcccgaccccagagctcgggctcaacctcgacgcccggacgacggactccgcctcgcccgaccccagggctcggactcaacctcgacctcggaagacggactccgcctcgcccaaccccagggctcggactcaacctcgacctcggaagacggactccgcctcgcccgaaccccagggctcggactcagcctggactccggacgacagactccgcctcgcccgacccaaggctcggactcagcctcgacctcggaggagtcaccgcctcgcccaaccccgggatcggaccgaccacgtcacaggggggccatcattaccctacccctagctag

SEQ ID NO: 21818 - DNA, 198 bp, Zea mays
  Peptide Sequence Number=SeqID_65193
atgacgacggcagctctcagcccattacggaagcaaggagacgtcagcaaggatccgacagccccaacagctgtacttccacagggctcaagcgctcctccgacggccacgacatcacatgaacagggcgccaaaacctcttcgacagccacgaagggaccccccggggtcgaaacgccgacactttttgatccttaa

SEQ ID NO: 21819 - DNA, 408 bp, Zea mays
  Peptide Sequence Number=SeqID_65194
atggctgacgaagcactcagggaccgcaacgcagcaccagagtgccccgcggacgcctgcacgcccgtaactcttgggttcgccggcggtggatcaccacggcctcacgagcacacggcggccagtcatgtgttgttttgcggcgaaatgaaagggaagagacagctcggcctcgattcctttatctatgcggggaaggataaggtccaaagaactgacttcctccagtctggtcctaatatagaggagtcctgcacttcctgccatatagagcctcgaacggtgacatcttcagactcgcctgataactattattatatgagaactcaggataaggtagactcttgtcccaattactaccatgctgaagggaacaagctctcaacatgtcctccaatacttgattag

SEQ ID NO: 21820 - DNA, 195 bp, Zea mays
  Peptide Sequence Number=SeqID_65195
atggccaggcaagaggcagcacctcgtcggctgtcggaccagagcgagtcgacggcgccggcacccctgcaggggacatgtcgggtgttatcctcgcacctgggacaacgacgggtgtcgcttcccaacaacattcagcttcgatccgccaagcgatcccacttcggcaagcgctttcgcaagggcatatcctga

SEQ ID NO: 21821 - DNA, 549 bp, Zea mays
  Peptide Sequence Number=SeqID_65196
atgggcggcctctccctcgggggctcgggcatacggacaatccctcggtctctgcctcggctctctatgggaaatcagcagggacttggggactttccctctcctgccgtgcttgtaaacccctactacaggcaccacagtgcgagtaatataagcctcatccccctctgctcctcgggcgcaacaaggagctccgcctcgcccgaccccagcctcggcctcgagaggagtcatcactacgcccgacctaggcctcggtctcaacctcggcctcgggagaaggtctccgcctcgcccgacctcaacctcggcctcgggaggagtcacagcctcgcccgacctcagcctcggcctcggaagaagtcatcgcctcgcccgaaacggcttcggaccgactacgctacagggaatatgacattatcctacccctatctagccacctcaggctacgaaggaacaagaccggcaaagaatcgtcagcaggacctagggccacactgccagctacgcttctacagggctcaagcacttatccgccggccacgttag

SEQ ID NO: 21822 - DNA, 257 bp, Zea mays
  Peptide Sequence Number=SeqID_65197
acacaaccgaccccaacgacaccacagtcgtgcaaacgccgaccccgccgaccccaccgaagacgccgaccccgccgaccccgccgacgccgaccccgccgtcgtgcctacgccgccagcgcctacgccgccgacgccgaccccgccgcgcccgtcccgtcctccgccgcggcttgccgacgccgctgcccccgcccgtcccctccaccgacgccgctgcaacctcccgtcggctgcaaccaccgcgcctacagtaa

SEQ ID NO: 21823 - DNA, 63 bp, Zea mays
  Peptide Sequence Number=SeqID_65198
atggccagcctcgccgtcgacccccccggcacgttccgcatcgtcgtttctataattttgtaa

SEQ ID NO: 21824 - DNA, 2733 bp, Zea mays
  Peptide Sequence Number=SeqID_65199
atggttggggacggagttgcccagttcgggtcatgcacattcacgccgaagaccggcaagaccacaatgccagtagtggagttggttccgtgcgcccgcaacaagtggggcagttggaatgaattttggttttacgttgctgagggtactgtcgaaggccatgagggactccccgtgtctgagatgtgctctcattattattctgcgtatccgccttttgaagtggcagaagaggatgcagacgaaggggccctccgatgcgccgccggtcagagcagtgggcgtgatttagttgaagagttcgtggcgtacggggtctggcccttggcgcacggctgggcgctgggcgaagtgtgccctcgccagatgccttttcacggaggaagggtggtgcgaagtcctgccttcgcactgaatttgcgaaatcgtgacccggccgcctttgtgcgtgatgcggaggacttggcggtgcggctcgtgggacgttacgtgccgaggactgaaggccagcgcagctttgatatccgcgggtcaaatgagcgcttgaacagggtcttcgaattaaatcaattgccgtacgacggctatcctggtcaagacgaagcggaccgccgtgggaagaagccggcggtggagactggaggcgaccctgcgctggcggccgccccctcctcaaaaaagagaaaattaggtactgcgatgggaggacttggggtgtctgatagttttgctagagagttaatgaggacgtgtgcggccccgggggaaaggatgtcttcgcccgagctccgggagtcttcggctcggatgctgagggttaccgggggttgctggccgaaaaatgttcctatcccctgcgcggctgaggaggactgttttacatctcgtatggttcatcagtggagagtttttccttacgggcgaaatatcggtgctgttgtgtggacagtgatggacaaggatcgccaaggggcggcgcaaaaacgccaggcgactgtcaggattcacgaagctcggccgaaaaggcagcggggaactgcgaaggctgtggcctccggcggagggccgggcgagggccagcttgctatagctgcgcctggcgcggcgatcgcgacggccgtcatggtgccgaaggcgaggggcgaggcgcttggcgccgaaggcgaggtgtcggccctcgcgttggtggctgacttcgccagccgtactgcatcgggggccctcacggcagctgtgtctgccgaagtcgagagacttcggacacaacatgctgacgctgtccgtgagaaatcggcctccgacagcaagtgccgtaagctggcggacagggtggccgccctggagagggagaaggccgacctccggcgccagctggcggcggagaggagggaagccaacgaggccgtcgccaaggggcaggctgcgcaggcggaggccaagctggcgcgggcggagggcaatcttgccaaggagcgcgccgaacatctgcaagagcggctcaccgccctggagagccgcgcgaaggaggccgaggccgcgatgcatgcggaggccgaacggacgcgcacgcagctcatggatacatatcgtgagctgggtgcgcggaccggtgacttcgaggtgccggaccgagagcccgggcttcgctgtctgcagtgggtgcaggaggagctgctggcacttccagctgttgcgggggggttaatgtcgtacgcctccctggtcacctgcgagggggcgatgaacgctctctcccgcgaagggtgccggcacttcgaggccttcgaacaggtggatgaagaatttgagcgagatatctataaggtcgaagaccccgttgtgaaggaatccgccggggccctttatgaccggatgtggggtctgtacggtcgtgaggtggtcagggagcgggccgagactgcgagggctcaggctgtgcgtgtgtttgctgaatctgtgtgtcttgtcctaggcggagcgcggcgagtgggtggacgacttcggggctctaaacagtgcgctgccagacccggagccgacccccgcggaggctgtgactggggtcgccctggagccaaccccggagaccgcagcgatcgcgacggctgccccacatccgctgtggccggcgaagacctgcccccgaaggtggccgaaggcgcccctgatgcccccgcagctgcagtgccgagtgctgaaggtcccgcggcggtggcggcggagccaacggcggaggctcccgcagcgttagggtcttcgcaggttcaagattttgggcctgcgtacgcaaccgctactactgagtttttggcggcttcgaccgcggaaggtgggaatgaatatggtgggtcggtatctgagttttttgattttactgactctgggagctcggttgagtggactgaggagtcgtcggaggaggacttggattattttgcggccttggacgtggatgcggcggaggcttcgctacacgccgcggacgcgccagacatgccaggtcctagcaccgggcgccgacgacgaagggcggttgcaaaacgtagggttagcgcggaggagggggctcggcttcgtgtgagtagggctggtcgtcaggaactgttgtctttgccggccgctgcgagtacaggggaaagggaactgcgaagtctttttgcgggtgaggagcttaggatgatgttatttaattatagagagatgggacttattcctaaggttgagccgatgtag

SEQ ID NO: 21825 - DNA, 1530 bp, Zea mays
  Peptide Sequence Number=SeqID_65200
atggcatcgaaacgagccaacgccggcgacgagcagcagaagctgtcaccttctggcctcccggtccacaagatcccgggaagctacggcgtgcccttcttcacgccgttgcgcgaccgcctggactacttctacttccagggcgcggaggagtacttccgctttcgcgtcgccaaacacggcggcgccaccgtcctgcgcgtcaacatgccgccaggcccgttcctctccggtgactcccgcgtcgtcgccgttctcgacgcgcgcagcttccgcgtcctactcgacgactcccgtgtcgacaaggacggcacgctcgacggcacctacatgccctcgctcgcgctcttcggtgggcaccggccgctcgcgttcctcgacggcgccgacccgcgccacgctgcgctcaagcgcgtcatgatccgcctcgcggccgcggggatgcagcacgtcgcgccggcgtttggcgccgccttcaccgccacgttcgacgccgtcgaagccggcatggcgggcggagcctccgccgtggagttcaacaagcacaacatgcgccacatgctggacttcacctgcgcctcgctgttcggcgggaagctgccgagcaaggccatcggcgacggcgccgcggcgaaggcgttcaagtggctcgtgttccagctccacccgctcgcgagcaaggccatcaggccctggccactggaggatctgctcctccacacgttccgcctcccgccgttcctggtgcgccgcgactacgccgagttgacggcctacttcgccgacgtcgcggcgggcgtcctcgacgacgccgagaaggccgagccgggcgccgtcccccgcgacgagctcctccacaacctcatcttcctcgccatcttcaacgcctacggcggctacaagatcttcctgccgcacgtcgtgaagtggcttgcgcgcagcgggccggagctgcacgccaggctcgccgacgaggtgcgcgccgtcgtcccaccgggcagtgccagtgccggcgacgcgatcaccctgtccgacgtggagaagatgccgctggtgaagtcgttcgtgtgggagacgctgcgcatgaacccgccggtggagttccagtacggccgcgcgcggcaggacatggtggtcgagagccacgacgcggcgtacgaggtgaagaagggcgagatgctgttcgggtaccagccactggcgacgcgcgacgagcgcgtgttccggcgcggccgggagttcgtccccgaccggttcgccgtctgctccgacgacgagcggcggaggctgctggaccacgtggtgtggtcgaacgggccggagaccggcgcggccgcggagcggaacaagcagtgcccggggaaaaacgcggtggtggcggtggggcggctgatggtggcggagctgttccgtcggtacgacacgttcgtcgctagcgtccatgagaccccggtggaaccggtggtcacgttcacttcgctcacgagggcttcctccgccgcgggccatggcagcagcgtcaagccctga

SEQ ID NO: 21826 - DNA, 399 bp, Zea mays
  Peptide Sequence Number=SeqID_65201
atggctattgtcggtaccctggaacaggggtatcccttactacagtatgaagtgcgcttccgctccttgctcaggcggagacccgatgctgccacgtggcctattgcccgtgacgtaagccagcgggtggagcctgacgtaaggcctctgggccacgcgatctctacatttattgcggaaaagacgcgccgcctgtccgccctgctgacaggcaatgtgccgcctcggcatttaatgtgccccgtccactccgctggcaggcgacgaccaggccaccctacaggcggcgcgcccgtccaatcagacagtgggcggtacacccataccgcctcgcgtgccatggtcatcatgacttgtacgttgccaaggaagcttttgctgcacgccaatactacataa

SEQ ID NO: 21827 - DNA, 558 bp, Zea mays
  Peptide Sequence Number=SeqID_65202
atgttctcctcgcccttctccgtgacctcttcgcacagcagcgagcatgagccggttgcaagggacagctccatcatcgtcgccgtcgaccgggacaagaacagccagcaggcggcgaaatgggcggtggataagctcctcaccaggggcagcatgctccagctcgtccatgcttattatgttgtttcatatgaccatgctacagttgaagcaaacaaagatgagggtgacgcagagataacacagctatttatatcatatagagggtattgtgctcgtaaagggatgcatctgaaggagttgatcttggatggcactgacatctccaaagcaataattgactatgccactagcaatgccatcacagacattgtcgtcggcgcatcaactaagaacacattcatcagaaggtttagaaatcccgatgtcccaacgtgtttgatgaagatggcgcctgattattgcacggtacatgtcatccacaaggcaaaagccatccagggcctcaagaggagactggaagaagactcctcctacatcgtctccattggcaagtag

SEQ ID NO: 21828 - DNA, 546 bp, Zea mays
  Peptide Sequence Number=SeqID_65203
atgttgtcatcttcttcttcgtcgtcgtctgctgcgaccgcgtcctcaaacgcgccatcgtcagagaagacgattagtgatccggcagcggtcgttgagctgcagcccgaccataccgtggagttcgggacatcgaggatttactcgggacgcgtgcatgaaatgcaacgttcggggtattttggtaatggagttgggcaggcgtcgggggctgaagatgtccccgagccggaggattcatcagctgacgccgaacgctatggtagcattggcgaagtttgtctgggaggtgacatcagccctgccttcaccatcgatctacgagggcgggatgcagccgccttcattagggaggtggagtcggagactgttaaaattgttggttatgacttcgcccgaactccgggaaacatcttcgtgaatgttgaagtgatggataaggatcgccaagaggccttgcagaagaaacggaaggccccgcttcggctggtggacccgcgccgcgatgccaagatgtcgcgccccagcgcgaaggggctgctctga

SEQ ID NO: 21829 - DNA, 843 bp, Zea mays
  Peptide Sequence Number=SeqID_65204
atgatccacgagtgcggcgcagcccacaccggccaagggggcactcgcctggaaccggatgcccactggggtctgtggtgcaaccgcagtgaagtcgtagtcgaggttgcgaccctcgacgttctgtcggcgctcacgcgccctctccagggagatgcgggcatcctcgcctgcacgtctgcggttgagttatgcccgcaggtcctcagtcggcgcggcacctcatgttggcgctgggatgaccgaggcctgggtctagtagagctagagtgcgccatgctgagcaggcggtcgacgtcgtcacgccactgcttcatggcccctggcgaggccgtggagctaggagggtggcacaacaattatctagccgcagacagcgccccaggcacagccctagactctctagacgtctgcgcaggagtgtgctgtcatgccgagtgcacagcagcgacactaggcgctgggagcaaaagcttccttggcaacgtacaagtcatgatgaccatggcacgcgaggcggtatgggtgtaccgcccactgtctgattggacgggcgcgccgcctgtagggtggcctggtcgtcgcctgccagcggagtggacggggcacattaaatgccgaggcggcacattgcctgtcagcagggcggacaggcggcgcgtcttttccgcaataaatgtagagatcgcgtggcccagaggccttacgtcaggctccacccgctggcttacgtcacgggcaataggccacgtggcagcatcgggtctccgcctgagcaaggagcggaagcgcactggacaaacccctgacgagtatctgcgccggacccctatacgtccctga

SEQ ID NO: 21830 - DNA, 2106 bp, Zea mays
  Peptide Sequence Number=SeqID_65205
atgcacgcctaccgcgacaagacggagtctgccactcatgccagggtggaacgggcgcacccactttttgtggatgcgtaccgtgaccttggtgcgcaaactgctcccttcgacaaatcaggagggaaggtggggacccattttcttaagtggttgcaggaggagttggagtcgctctcgtccatcgtgacgggcctcatgtcctatgtgtcgctcgtgtcctgtgagggggctgtgaatgccttggcccacgagggctgcaggcacttcgaggcctttaaccagagcaacgaggacttcgatgttggtgtattccaggtcaaagatgatgtgttgaagcgtgtggctggggcaatgacagatgaagaagttgaggacctcgtcggcctagagagctcggtggctcgaaaggatgccgaagttgaggcgagagttgaagagcagtcttcgctcaagaaaggcggcgttgagaaccctgcggcggtcgggacttctgcgcaggtttcggtgcctggaactgcgcaagcaaattttggtgacaatggaaatggtaaattgttaatgtgtcaaagtttgatagtgcttagtagtgatgaatatgatgttgactcatggtcatcgaaaggtgaagagttgatgagcccatttgctaggatggatgatgagtcttcggaggatgacttagattattttatggcgttagatttgtctgttgtgaagtcttcgcctagggttgccccgaccgtggcagagtcttcgtctagggttgccccgactgcgtcgcggggcaagagaagtatcgaagtgttgaaacggagtgtggaaatgattggcgagccttcgcaaggcatgggagtccctcgaaggcgtcgtcatatgggaatggagaggtctcgtccatgggaaggaatgcggtcagaggaggggactcgccggatcatccttgctccgacgaccgggcaatgttttgaagagggagatctgcggtctctttttgatggcgaggagcttaaactgatgttgttcatgttggaacttgcaaactcacggtctagcaagctcaaacagtgggagagtgaaaagtggtttgatgcaaataaatgcaatatactaggggccttcgtggtctttgatcttgaatacgctggcatggggagctcgagcaagcgagacatgttcgccttcgtcccaacatttcaatttccgggaggctggcctgatcccaaagctgcacccttaggtgacttttgcttggatagaattgagcgtttcttggacgacttcgcacccttaggtgttggtgcggggccccacctgtcggcgccacgccctgctcactcgattgccctcttcttctctgccaagtgggtccaccccgtcagcactgcgcaccgctcgcccgctcgttccctcgctgactcgcgccccccatgtcagactcgtcccctccccccgcaaccgccgcgcacggtcaaaccacgcccactcccctacgacccgcccacgtcgctcaagcacctaggtgaagaccccatgtccccctcaactcgcccctacctctcattcgctctctcccagccctcacgctcactcagcccacagcgccgccccctctgttgctccgtcgttccgccgtcctcgccgggcctctgccgtcgtctcggccacggtgagcttcatcggagccttgtgcatcgggaacccgcagtggttttccctcccactaatccctctgcctggtccacgctcaacctctcccctgaacaggtcggagtttgccaccaccgcggtttctcattgtccggccaaccagaatcccctagcaccgtgccaagctgccccgagcaccgtctatgggtaagtaaccttcctcctcccttcttctgcaccagtttcgtctcatcatgggtaattttggctcgtcggagtcgcctctcgtcgggccgccgtgtcctcatggcgtatgaccggtacagcccctccacgagcccaaacctaggtgtagggcactcctaccctctcaccgaagcccatgctagcttcaacgcgccggattgtcccctcccgatgggtattgcttgccggagtggcctctggtccgcctga

SEQ ID NO: 21831 - DNA, 432 bp, Zea mays
  Peptide Sequence Number=SeqID_65206
atggcgattttgcctccaccatcagcagcggcgcaaaaatgcgccaacgggtccagcgaggtcccagccgcactcctcgccagagcccccgtgtcaatgggcaacctcgctggtgccaccactaactgcctagtctcagtccctacaccagaatcacagagtcgttgcgatcacaaccttctccttcgaggcgccctcttcagactgggtcttcacatgtttccctcagtcgtccccatcatcagtagagtccccctccgggtaaggaccgtaccgcaagctattcagttcaaaaactcggttcaacctgacgttggaacctcgtatatcctagctctttatcatctccgtcttcggcacatatttaccaacaattttaacagtctccgactccacctccctaatgaaggcggctgcatcccgccctcgtag

SEQ ID NO: 21832 - DNA, 591 bp, Zea mays
  Peptide Sequence Number=SeqID_65207
atggggtggcgagcggtaagggtgctgagtcccaacaggggcgggggaaccatcctcctgatggtggcgctccgcgcgctcagcacgcagttctgcaatctctgcccgagccttgtccaactcgttaagagcgtggtccagctcggtgttgagcatggtgaccaggttgaccatgctgctcaatctaggattgccctcaccaactgtgtgttggtcgaaggcccgacgcaacaaggtgtcgagagcgtcatggaaatgacaaccactggcggcatcatgagtgatgggtctggcgatccatccttccggctcctgctcctccgaaagctccatgttttggctcgaactgccaccgtcattgttggggcacctctagctgaggcacagaggagggctgcctcccagactccacctcctgctgaggcgagggggaagagtcctgctgcacctactcctggcatcggcgctcctgctcctcgtgcaagcgacagtacagtctctctaggtgactcgactatcccgtcaccgtgtgacacagtggacactccgcaaggcgagagggcaataaagggatcatcgacttacgtgtag

SEQ ID NO: 21833 - DNA, 312 bp, Zea mays
  Peptide Sequence Number=SeqID_65208
atggcgttcggctgctcggcgcccaactcctgtgctcgcgccgtcgtgctactgctcgcccataccgcgacctcgccgatccgtgtcctctgccccagctcgcggagcttcctctcccatggccggtgctcgataaattgcgtaagtcacgaaactcccgtcgacttcgcagttcttgcgattatcgagccaggtacgttaattaatcgcgtgatgcggaagacgagccaagtcgaccccaagcgtgggcttcttcgcaaggcgatgctaatggacaaacctgaagatggtcgtcaagtgctcatcgactaa

SEQ ID NO: 21834 - DNA, 312 bp, Zea mays
  Peptide Sequence Number=SeqID_65209
atggcgttcggctgctcggcgcccaactcctgtgctcgcgccgtcgtgctgctgctcgcccataccgcgacctcgccgatccgtgtcctctgccccagctcgcggagcttcctctcccatggccggtgctcgataaattgcgtaagtcacgaaactcccgtcgacttcgcagttcttgcgattatcgagccaggtacgttaattaatcgcgtgatgcggaagacgagccaagtcgaccccaagcgtgggcttcttcgcaaggcgatgctaatggacaaacctgaagatggtcgtcaagtgctcatcgactaa

SEQ ID NO: 21835 - DNA, 825 bp, Zea mays
  Peptide Sequence Number=SeqID_65210
atgggcgtaggtctctacacgtccacggtccatctcgtgtctattttgatcggtattcagggaggtctcgccctcaataatgtacacagatgggtgactttcctcaagttcggaggtgtggtgctagggacggctctccaccacaccgccagcgatgcctcaagcgcgttccacttcttccagacgtggtcagccttgtgcaagtatggtgaccgcgcaaccgtggagctcccgtgccacgaccgcacactcctccgtgcacggtccccgcctaccgtccacccggacgccctctcgaggttctacccaaagctcaccttctccgacgacccgttaggatcaggaccccttgccattgaagtctttgccatttccaaggaccaggtcgcctccttaaagcgcctctgtggcggcacaagcaccttctgcgccatcggcgccctcgtgtggcagtgcgcgctcgttgtgcgccggcttccgcccgacgccgaagcacgcctcaccttcccagccaacgtccggcgcagggtgaggccacctctcccgagccactacttcggcaacgcgttggtcaggctgggcgccactggcgcagttcgggatgttgcttcggaggctctggcgtccgtggccggccgcatcaaagacgctgtcgatcgggtggacgacgagctcgtgcggtctgcggtcgactactatgagatgaccgagatggacagcccggcctgtgaaggggcaccttgccagagacggacctacagattattagctggctgggcatgccaatgtacgacgtggatttcggatgggggaagccagcggtga

SEQ ID NO: 21836 - DNA, 195 bp, Zea mays
  Peptide Sequence Number=SeqID_65211
atggcccatgggaaactgaagtttctagcgtaccggcgcatgcagcctgaagagatatttttggccagtgttgcatctgccggtgcagtttatactagcagcaatatcatgcattctgacactagtacacaaaggctctatagtggcggttctagagctgtttgcactggcgtttttcagtaccgccagtgctag

SEQ ID NO: 21837 - DNA, 873 bp, Zea mays
  Peptide Sequence Number=SeqID_65212
atgtacgatgaagggtactcaccctcatcaccttgggagtgggatgatcaaggactccctggtttaggggagggcctaaggcgaaggctcagctggtttaggctcactcaatctgaactcgtacagtccagccccagggttatgaaggctggggagcaccgggaggttaaggagggggaatgttttgtccggtttggacatggcggtggcctgactcctttcaggataaccattaagatggaagactctctggccattaggacatcctactgctcagaagtggaggggttcccacatctgttgcgaagttgtgcgcttcacatgggaatccgcaaaaagccagaatatgtctggaaggagtatctcgagaatggaatggagaagtgctctatgcaacaaagataccccacctggaggaaaagacttcaagccctgtcaggaggagatcctatcgaaaatgacaccaccatcgtctacatggctggatacctccacaccctcgataaccaatacgatgaccttgcctcgcactgcactcacctaaactctcgggtggaaagcctggagcaaaaagtcagggaacttacaagggaaaaggcgtcccttcaagagagcctcgagatagcagaaggcgaggaaaccaacacccgtgaggcctaccgcacactgaagatggattacgacaagaagctgaagaaactcgcccctgcaagaaaaatccgcaagaagactaaaagtcaaggatgtcagactgagcagaaggaagaagcccctccagccctacctcttaccaggataagaaactcgtccaacaccgaggaaatgtccctagccagccttgatgaccttctcaaggaatttggggcactttag

SEQ ID NO: 21838 - DNA, 123 bp, Zea mays
  Peptide Sequence Number=SeqID_65213
atggcccgattaatggaaagcattcctattgggcaggattctattgaatcggcatctgctcgagtttttatggtcgtgctagagttgcaacttactcgagaacgaatcaagctgattcattaa

SEQ ID NO: 21839 - DNA, 153 bp, Zea mays
  Peptide Sequence Number=SeqID_65214
atggccatgatgggttcgacatcggaaaagatgtacctctgccagatttatgcatccgacgggacaagctcgataattgatagcaggtgcataaacttcatgacagcggagaaaaggatgttctcctcatatgagaaaaatgatgatccctaa

SEQ ID NO: 21840 - DNA, 102 bp, Zea mays
  Peptide Sequence Number=SeqID_65215
atggccagcccgctccagtcgcgtccaagttgcgcctgcccctcggacctcccctacatcctcgaccacctcaccggagcagtctcgccgccgagaacttag

SEQ ID NO: 21841 - DNA, 1107 bp, Zea mays
  Peptide Sequence Number=SeqID_65216
atgcccgacgcccgcccccgcatgccccgcgttgcggcaagccgagccggcgccgttgcccgcgcccgcgcctataaagccaccagagacttcgaccgtactaccccgcacgcgctagtcctcactggagcactagatcaccggcattgccccgcgcgcggcgtacccgcggccacccgatcccccgccaccgtagactggccagcagagcctctcccaaccccgtccgaccctcagaattgtaacctcgcggacggagaatacatcctcgtgccggagcaaggagttgctcaggaggtagccccggatccagcaccagagcctgccatcgaggatctgcctgccccagctttggaaggcaaggcccgttatggtgggtacaagtgcggtcactgcacgacggcagtcggggacagtgaggcattgtatgccaaggcggtgagccctgatctgctgacggggaatcgatggggatggttgatggctgaggatactatcgaggcgattgctcttcacggactgaccaccttctgtggtttccaccccttggagttgtccactcaccccattggtttgttccccgcggagaaggaggacgacccaatgtggaagaaccgagtggagcatgccaaggatatatgggctatctacccaggtcagactgctcacttgacggtgcggtgcatgaatgccctgtatcgtctgcaagtgatgcgaggagaggcaatgtctcatctgatggcattgttggaggctaccaagatcaccttggataacagagaggagcttgtggtagacttgtccactgagatggtggagaaggacctacaagtggaacatatgtccaacaaaatccaggagcttgaggagctagtgggaactagggagaacaccattgaggttctcgaggatcagctcatcaacactcagcagcaactcgcggaagctaaccagcatctggatatgcaccaccagaagatccaggacatggaggccaacgaggatgtcgacatcgagggaggagaggagcctgcctctagcttggacactgctgactcagggagaccaccttcccccgagtcgagtgttgcctcgtttgctctctag

SEQ ID NO: 21842 - DNA, 977 bp, Zea mays
  Peptide Sequence Number=SeqID_65217
atgaagattttgagcgagatatctacaagggttgaggaccccgtagtgaatgaatccgccggagccatctacgaccggatgtggggtccgcacggtcgcgaggtggtcagggagcgggccgagacggcgagggctcaggtaacgtttggcgtttgctggatgtgggctatgtgtgggtttgctgaatttgtgtgctgtgtcttaggcggcgcgtggcgagaggtggatgacttcggggcgttgaacagcgcgctgcctgacccggagccgatcccggcggaggccgtgtccggggccgccctggagccgcccccggagactgcggaaggcgctccggatgcccccgcatctgctacggccgtcggagacttgcccccagagaccgccgaaggcgcgccagatgcccccgcagccgctgcgccgagtgctgaggatcctgcgacggtggcggcggaagcgacagcggaggcaacggcggaggctcccgcaacggctgggtcttcgcaggttcaaggttttgggcctacgcacgcaaccgccactactaaatttttggcggcttcgaccgtggatggtggtaataaatgtgatggttctgcatctgagttttctgattttgctgactctgggagctcggttgagtggactgagcagtcgtcagaggaggacttggactactttgcggccttggatgtggctgcggcggaggcttcaccgcacgctgcggacacagaagatgtgcctggtcctagtacctggcgccggcgacgaagggcggttgcgaagcgcagagtgagtgaagcggagggaggtcggcttcatgtgagtagggctggccggcaggaactgttgtctttgccggccgccgagagtacaggtgaaggggaattgcgaagtctttttgcgggcttgtatgatgaggttgtgtgcccccgcacacttggctatgcttgcgaaggcgttatgtacttggtctg

SEQ ID NO: 21843 - DNA, 1059 bp, Zea mays
  Peptide Sequence Number=SeqID_65218
atgccgacctcctcttcttccgctgccgctacgccgccggccgacgcctcgtctgaggagacgctgagtagtttggaggtggaggagttgcgcgccggcgattctgtggagtttggcgtgtcgcagatgtcgtcggtccgcgtgcaagatatgcagaggctaggttactttggcggcggagttgctcgtgtcccggggacggaggaagtccccgagccagaaggcgagttggttgtgttcgaggcgttctttgccgccggtctccgtctgccggcgcaccgatttgttggcgaagtcctgcgcagggtttttgaattgaatcaattgccgtatgacggctatcccgaccaagacgatgtggaccgccgtgggaagaagccggtggtggagactggagacgtccctgcgccggcggccgccccatcctctaaaaagaggaaattagggtcagacgaaggccaacttgctatagttgcgcctgccgcggcgaccacgacggctgccgtagtgccgaaggcgaagggcagggctcttagcaccggaggcgagatgtcggcactcgcggctgtcagggatgaggcgggcgctgtgtcccgccggctgaaggaggtgaaggaggcactaagtcaggcggctgacttcgccgaccgcatagcgtcgggggccctcacggcagttgtgtctgccgaagtcgagagacttcggacgcaacatgctgacgccgtccatgaaaaatcggccgccgacagtaagtgccgcaagctggcagacaaggtggccgcactggagagggagaagactgacctccggcgccaactagcgggggagaggagggagaccaacaaggccctcgccaaggcgcaggctgcgcaagcggaggccaatctggcgcgggcggagggcaatcttgccagggagcgcgccgagcagctgcaggagcggctcaccgtcctggagagccgtgtggagagggccaaggccgcgtcgcgcgcggaggcagagcggacgcgcaaacagcttatggattcataccatgagctgggcgcgcggacccggtga

SEQ ID NO: 21844 - DNA, 509 bp, Zea mays
  Peptide Sequence Number=SeqID_65219
atggctttgaagctgccgaccgttctctccctctccccttggagcctctccctctccctccttgttggtaccctagaacaggggtaccccttactgaagtatgaaggcgcgaccactatgggagagtgtcggaccccagcgtacatggcccggacctccgggtacggtctaggacccccacgttcccccggatgggacctggacccctctgagtgcgtacgctcccgctccccgctcgggcggggactcgatgatgccatgtggcctattgcccgtgacgtaagccagcgggcggagcctgacataaggcctctaggccacgcgatctctgcatttattgcggagaagacgcgccgcctgtccgccctactaacagacgatgtgccgtctcggcatttaatgtgccctgtccactccactggcagacaacggccagaccaccctacgggcagcgtgcctgtccaatcagacagcgggcagtacgcccgtgccgccgcgcgcgtggcgtg

SEQ ID NO: 21845 - DNA, 552 bp, Zea mays
  Peptide Sequence Number=SeqID_65220
atgtgggacctgcggaacagccgcactaccctatgcatcggcagcttcgtctcaatcacccgggagcctcgcaaccgcccttccgcgcaggtgcataacagtctccgtggaccccgctgcttgcatggtgccctgaggcgaaaacggtggtcgaagtgctgggaaatgctcgccggagccaatccctcgaggcggaaccgtgctgcgatgccaacatggctcgccgtcaactctaccgacgacgaacaagtgaccgaggaccctggtactcagcaggtggaaaactccgagcaggagctcattgaaggcaagttgagcgacgaagtgatccacccgccagccatggagatgaagaaggtcctctgcgccgccctcgtcgccgccgcctcggccaccgccgtgctggcctcggtcgcctccgaggcgccctccgaggcgcccgccggcgcggccggtggtgcggctggccctagcgcaagcggcgccgccgccgccgccgtgcccgccgccggggcgctcgtcgcctccttcctcgcctactacctccactga

SEQ ID NO: 21846 - DNA, 1446 bp, Zea mays
  Peptide Sequence Number=SeqID_65221
atggtccgcagttgcgatgtccgttttgtctcctccggtgtcaagctcccgtgcgagtccacctccgcgctggccccgtccccgtccccgtctccggcacccgcgctcctctccgcagcgctcccgttcgcgcacatcggccgcgccatcgatgccgccgcccgccgcctgggctcctgcctcccacgcgtccctgttgcgcgggccgacccggctccgtccccgccacggcggcacggcaaggacggcggagggcccgaggagcgggtgctgatcagcgaggtcgcggtgcggggaaaggacggggagcccctggagctgcccgagctggaggccgcggccgccgcggcgctgcgcgcgtgccgccccaacgccgcgctcaccgtgcgggaggtgcaggaggacgtgcaccgcatcgtcgagagcggactcttccgatcgtgtatgcccgtcgctgtcgacacccgcgatggcattcgcctcgtctttgaggtggagccgaaccaagacttccatgggctggtatgcgagggcgccaacatgctaccgtccaagttcatggaagatgcatttcgcgatcgccatggtaaacatgaagaggcgaagggaggtggcattggtttccctgaggtgtgggagatgatacatgtacgggtttcatatgctgagatactttctggagggattctgaggctgcaggtttcagaagctgaggttaataacattagcattcgctttctagacaggaagaccggtgaaccaactgttggaaaaacacagacggaaaccatccttcggcagcttaccaccaagaaagggcagcatgctggtgctcgtgatgataaagggaatccggtcatcagggatttctataacagccaattgactgccagtggacatgattatgatgatacactgttagctaagtttgaaagtatctacacagattctggagaccatagctctacaatgtttgttttcaacattgagcaaggtctccctgttctcccggagtggctaagcttcaaccgactgacagcacgcttgaggcagggctatgaaattggtcctgctaggcttcttctaagtgcctctggaggtcacatggagggaaattttccacctcatgaagcatttgcaattggtgggacaaatagtgtaagaggatatgaagaaggtgctgttggctctgggcgttcttatgctgtaggtagtggtgaagtgtcatgccgcatgtttgggccactggaaggcgtggtctttggagactatggtagtgatcttggttctggtcctaaagttcctggtgacccagccggagctcgtggaaagccagggagtggctttggctatggtgttggcgtccgcgtggactcccctctgggacctctacggcttgagtcgggcgaccaactggtcgttccagaggaccgaccaggcgcctaa

SEQ ID NO: 21847 - DNA, 909 bp, Zea mays
  Peptide Sequence Number=SeqID_65222
atgaaaatccttgaagccgaacgatggctgaaaggtgccaactcccacggagtcgaattcttccaacaacgaggcggaaagacggcggatatcccccatccgggggcttggaagccgtcgcaggctgagtcttctccaacacgctccaaggtcctcccccgcggcgcgggggctgggtcccacacgtcatgcaagccggctcagagcagaagaagccaaaccgccgtgcgcggtgcgtacaaccgcccagcggttacaagcgactctccacttttgcccagaccaacgggcgaaaggggcgggcagccatgcaggcggcatgcaaccgcgccaagtgagcgcacttctctgactcccaacacgcccagcatggaggcccaggcccacgcgtcattcaaccggcgcaccgaatgcttcgtgcatgcaactgcactgccacttgcgccaccaccgcgcctcctcgactgcggaaccaatgccgcgactcgaggcgacccagcgcacgacccagcagcgccagcctggcgcgacggtcaatgcggccaaaaatgggccggcagtaatgacggtggcaggcgggcaggagcagcggtcacgtcgagaagcgagcgacgcttcgccttcgccataatgaccgcgtcaaaaaaggctccgagcctccctactgatcagaggttcgaaggctggccccccggaagggttcgacagccgcctcagatcgcgtgggctctacacccactactggtcagaggttcgaaggccggcccctcggaagggttccacggccgcctcaggctactcgggctccgcgccctattactgatcaggggttcgaaggctggccccgaagggttcacagccgccttagacgccgagcgagggatgaccatgggtacgttcgatacataa

SEQ ID NO: 21848 - DNA, 621 bp, Zea mays
  Peptide Sequence Number=SeqID_65223
atgggcgggggcctcctggcagcagcgtccgccctgaggtcatcgctgccgctgttcggccccccggagcagaagtcgtcgtcgtcgccgctgctggagcgggcgatggcgcgccgttcgtcggtcttctgttgctccgcaggcctcccccatcgagtggggttgttcgtacccgcggaggtggaaccggagttccgttcaaatgtttgtgcgagcgagagttgcttctcgcggaaggtgatgagtgaggtatccgtatcccggaggcgtaggagtccctcggctcggtcggccttgccgcttacgcgcactcttacccgtccatggggctctgtcaccgacgcagtcgagaaggctcgaaggatcgcttcagcagaagagcttccgaacgtgaagacttgttcggtccgcggaatcacttatccgaacgtgagttacttatcgcagaaggtgatgagtgaggtatccgtatcccggaggcgtaggagtccctcggctcggtcagccttggctgcttacgtgtactccatcgttttcaggatccactttcgaagtagtcaaaaagcacgaaagacattctggcagaaaagatcttttttcgaggaaaatttcgacgcatag

SEQ ID NO: 21849 - DNA, 854 bp, Zea mays
  Peptide Sequence Number=SeqID_65224
atgaacgcgttgtcccgcgaagggtgccgccactatgagcgcgagatctacaaggtcgaggacccggtggtgaaggagtccgcgggggccctctttgaccggatgtggggccctcacggtcgggaggtggcggcgcgtgccgagaccgtggaggacttcggatctttgaacagcgcgcggcccgaagccgagacgaacccggtggcagccgaggctgaggtcatcccggcgccgcccccgaaaaccggcgaaggctccctcgttgcccctgcggctactacgtccggtggtggctcgtcgccaaccgctgtgccgagggttgaggatcccccgaagacggcgacggagccagcggcggaggatcccacggcggctgggccttcgcaggttcaagattttgggcctgcgcacgcaaccgctactgctaattttgtggcggcttcgaccgtggatgctgggaatgaattggatgagtctgcttctaagttttctgattttggtgactctgggagttcggttgagtggacggaagagtcgtcggatgaggacttggattactttgcggccttggatgtggcagcggcgaaggcttcgccgcgtgctgcggatgctgaagttgtgcctggtccgagtgctgggcgtaggcggcgaagggcagttgcgaagcgtagagtgagtgaggcggacagcggtcggcttcgtgtgggcagggctagcaagcaggaattgttgtcctcgccggccgttgcgagtgtaggtgagggggagctgcgaagtctttttgagggtgaggagctgaggataatgttatttaactatagggagatggaaatcattccaaaggttgaaccgat

SEQ ID NO: 21850 - DNA, 249 bp, Zea mays
  Peptide Sequence Number=SeqID_65225
atggacaagatcctagaagagcagcggatccagcaagtggaggccatagagaagatcaaaaaatgggagcgggagctggaggacaaggccagcaacattgccctcgccgaggagaacctcaaggagaaggatgcgtccctggataggcgggagacggatctcgccgggcgggagaaggatctcgccttcagggaggaaatgcttgaaaggcaggagaagttgctggccgagcatgagctcgaggcgtag

SEQ ID NO: 21851 - DNA, 972 bp, Zea mays
  Peptide Sequence Number=SeqID_65226
atgggtaccaactggaaccaagttatggcacaatatggaagttacctctccgaggatgatgccactcagtttcagaacactgcatttgctcctacgcctgagataccagcccagggatcaccagcaccacctcctgtgaagaaggctcctcaacgcacaaagctagcaaatttcacgtctgaagaggatatgagggtttgtcaagcttggttggctgtgagttgtgatcccattgtcaacactggtcagaagcgtcaaggattttggaatcggattacagaggcatacaactctcgcagaggatcaatgccagagaggtctacaaaatctctcatgagcaggtgggacagtatcaaaactcaatgttctacatttgctggatacatgatggctgtgcttcgacaaaacccaagtggcatgactgatgcagataagacatctcttgcggctactcggatcaaccaaaatggatggaccagcacatgggtaacccagattcctccaccaaaccctattggaacccaatccaatactattgacttagatggtggtgaagactcagctccatcaagttttacttcgaagagaccgcttggtcgtgattcagccaaggaaaaggcaaagaagcaaagatcagagaacacatcatccactgattcggagtacctaacacggatgggtgagctttctttggaacggttatctgtgtacaaatcagtagcttcaactgaggagaagaagttggagttcatgaagaaacaggagaggcagaaactcatattggagaggaagaagcttaatctagagaagatgaagatggaacgacaaaaggtgaaggaggagacggaacaggaggtactgatattgagcatggatttgacaaaatgtaaccccctccttcgacagtactatgaggcgaaacaacaggagattctggcaagggtgactggaagctcgtcgtcaagcaagtga

SEQ ID NO: 21852 - DNA, 510 bp, Zea mays
  Peptide Sequence Number=SeqID_65227
atggggctcgagtatgaggagcacaaggccaagccaaagagggggagtaggacgtcgactggggtccctgcccagtcgcaaacgtcgactgagactccgtcggtctgctcgaaggaggagttcaagctgcggaggacttcgttgaacaagtcacaaggcaatgggcccaaaggggaaggcccccgctctagtgtacggggtagtaaacctggccggtcggttgaagaaaagaaaggtgtcggcgtccggagtgcccacccccacgatgtccctaaaggggcgaagactgttgccgacgctggtgcagtcgtgacgactgccggaggcgctgctcccctgaccgtagaggagtacgaccttgatgatgcggagatacttacgaagtctcccctgatgcacgtcggcggtcgggatgaagagaactacgatggcggcgcagtcgtgagcagagtaacccacaacttggtgaaagttctctatgcccgggaacaggatctggatgtcgcctag

SEQ ID NO: 21853 - DNA, 360 bp, Zea mays
  Peptide Sequence Number=SeqID_65228
atggcgcacgtattgaggcggccatcaccgttgttacgccgtcctggaggattccgcaagcacagcggtcacgaacttccaacgcgactctgctggcgtcgggtagtttacacctgcagagtagagatggaactaggattccacttggaggcagatgtaatacttttgctttttgtaaggctcgatttgtcgaggctgcacaccagcatacctaagaaagagtttggcggtggccccgaggagggtctagtctgggaggccaagttgtgcgtctggaccccctggatggtgcttctaggtactaggacacctgtcgcagggtggtggagtgtgcaggcccacggtacggaaccaggctga

SEQ ID NO: 21854 - DNA, 726 bp, Zea mays
  Peptide Sequence Number=SeqID_65229
atggatagtaatgatcctgttatggggttcttgcatggatgtatgcttgagacacaaaaagagagtgctatgagattgtccgaccttcatagccaggctattcgcgcctatcctggactatccagccttagtgcctggaccatccagcgtacacaggacaggctctatccggggcgcctccgctccccactcggccgaaggtctaatgcggcctcatggctgattgtccgtgacataggccagcgggcggagcgtgacataagggctctgagccgcgcggcctccgcatttattgcggaggggacacaccgcctgtccacccttctgacagttgatgtgcccccacgtcatttattgcgtcctgtctattccgctggcaggaggcgccagggccaccctgcagacggcgcacctatccagtccgttgccgaaacagtatgcccatgctgcgcggtgtactgtactcatcccttatgcgagaagcttccccctgtacgccgagactatgcagatctcaggtgtcagggcgcaagaagattgctccaacagaagatattagtagctacatccgctatgttcctgggcccatatgtcggggctcagtactcttgtacatgtccccctttagctataaaaggggaggcatacaatgttacaacacaagctcaatctgaaggcttagactctcaagtttccacagcaatccaaaacacagtgccgggctag

SEQ ID NO: 21855 - DNA, 936 bp, Zea mays
  Peptide Sequence Number=SeqID_65230
atggacaaagatggccacctggaggatgaagtggggcgtgaggtgctggagttggagtctgaactcctccagcagcagcaggaagaacggcgaaatcggcagcgccaacccgcagaagagataggagacgaagagcacaaactccccggcggcaagatcgccgaggggagtagtgccggcctggatcctcccggcgaacgcaggcgagccccatccgagcaggcggtgcaccgtgtcgagcgcctccttggtctggtaatgatcggggcggaccagcatggccatggcaaccacggcggcagaaaactgaggagcacgaacgcggagaggcgtggaaggctcggaggtgaaagggcggagcagttggggaaaatgcttgcgtcctcccttgaggtgggcccgggggccactattggtaccttgaaacaggggtaccccttgttacaaggtgaagatgatgtgccgacggtaaagtctctggttgcgcggcaagcagttcgccgtcagacaacatcagccgccttggggtcgccacgtggccaaggcgaaggacgtgctccggatacatgcagtgggtccggacctactacgtggaaagcaccggaccccgtgcatgacgggcggacctccaagaaagatcccagacccttccaagtggggtccggacagatcaccaccgggtcccgggatgctggggcagggaatacccggaccctgccctggaaggggtccggtgctggcatgtgtccagggcttgcaccgcgctccccgcacaggcaagggcccgttgctgccgcgtggcatgtggttcatgacataaggcaacaggcggagtctgatgtcgggccgctaaaaccgccggtctctgcatttattgcagagaggacgcgccgcctgccactaggccagcgaacgatgtgccctctcggtatttaa

SEQ ID NO: 21856 - DNA, 639 bp, Zea mays
  Peptide Sequence Number=SeqID_65231
atggggattgcgtccgaggctgaaatcagcgccgggcaaggcggagatttgcgtccacatgatcgatgtcttgttagccattgtgttcatgtgccgctgcgtgggctcgggcgagacgaacagagcagtggtgactacgggcgaggcagagatttgcctgaggttgtagactcttggggagaggccttaggtgaggcggtgtgggattgggatgttgtctcaaataaggaggttgtagacatagtagcatcagtcccatctcgtgtgatgacaaccaatgcccttgttgactatgctgttagatcatggaggttgaagatcccaacatccaagagtgatgattgtgctgttgtatgcttattattggatcacgagaagtcgactgactcgattcaagggagtgaacccaacatggagacaacaaaacccaccaggaaggagatttgcacacaagatgccaatgcaggggttgacaaagacattgcagatgctggtgtgcatgtatccaatgcaaagcacatttttgaggccacacagcaacacaccaccacattaaaggaggtcgacaagattgtaccgatcaacgaaccgacaaactcaaagaagcctagaaggtgcaggtctgctcgatgctcgtag

SEQ ID NO: 21857 - DNA, 123 bp, Zea mays
  Peptide Sequence Number=SeqID_65232
atggagaaccacccaggaaaaacagtgctaccacaagggtttaatgggacactggttggaccacatagaacaggaaatgttgaagagtcatacgcattggttgtggatcagatgaaggcaaag

SEQ ID NO: 21858 - DNA, 870 bp, Zea mays
  Peptide Sequence Number=SeqID_65233
atgtccgcggacggccgaaccgacaaattcgagcccgaaactcccacctattgccctctacacgatgcgcggatgaatacgaagctctcggggaggtactcaccggggatcgagggccgagcaggggcgtttgcggatgcgcggcggagtccggcaacggcgaggaattcagggcgccgcgatggacccccgggcacaatacttgacgccggtgatcaccacacgccgatgaacggtcccgacacctctctggacaccaatcagcgatacaggcccagcgcgagcgaagtccgagggcggtcagcgccggcgctttcgcggcggacattgcgcaacggcgagcgaagaaaggggaaggtgggtacgcggctgaccgaggggacccacgcgccaggcctcgcgtgcggaggtgactgccgagccgggcccacctgccagactgggtcagctgcggttgcgcgcgcgagacatctgctgcgccgcgcgtcactattaaatgggtcgtgcctcgggccggctcgccagacacgaccctttggccatctatacctccacacgataatgatggtcctcggctcagttgccaccacctcgttcgtcattctacttcttttctctctcccctcatgcctccacctccgcgccaccccattctcgacagagggcgtaggagcatgcacctcttccccgtattcgcccgacaccatccccgacactgactcacgcagtggctattgcacgtccacgagaacgtttcacattatgtgcgcaccatcgttttcgtcatcgttggacgtcccgttcgtcttcccggccttcgccctgttcttcctccccaacctactgccccacccacggtcgcaatcatga

SEQ ID NO: 21859 - DNA, 405 bp, Zea mays
  Peptide Sequence Number=SeqID_65234
atgactgtttatgaggcaattacagatagaaaatggatctatgatattaagggtccgctgacagtggaagtcttaacagattatctccagttgtggaatatgacttcagcttggcagctgcagcctgaggttgacgataacatgttttcagtattgttcctactggcatctattcagcaaagactgcttacgaaggtttctttttggggtttgtgggaattctggtatctgttgttaaggaaatctggtctgcattctttggctcctcaaccagatgttagctcatatctaggctgccctagtgttaccatgagtcttagagctacagatgaggaaagggcacaatgggagattgctggtgccaaggggctttgccatttagcagcacccttagctgagaattaa

SEQ ID NO: 21860 - DNA, 369 bp, Zea mays
  Peptide Sequence Number=SeqID_65235
atgcgcgcaccatcgtttttgccgtcatcggacatctcgttcgtcttccctgccttcgccctattcttccaccccaacctactgcacccgcccacggtcgcagctgcaagccgaccgacgctcgtcgatgcgggtacggggcaagtcaatcatgctcctggtctttctccgtgcgtgccgttgaggaggacatggtggcgtctgccactcttaggttatcttagcgatgaggagtccagcggtatactacctatgtcgcctccagataccccgatcttcgtcgtgtccttctccagcaacgaacagcactacgggccgaggctacggtccaagcaccacacggcgctcgttgtcacacccgggctttaa

SEQ ID NO: 21861 - DNA, 567 bp, Zea mays
  Peptide Sequence Number=SeqID_65236
atgccctgcccctgcgcgtcgccgcccacgccctgcccttgcgcgcgctgcccgagcgcgccgtccgccgccctgcccacgcgcacgtcgccgtccgtccccgcgctgctcgcccgccggcctgcccgccactccaccgccgtcgtcgagccgccgcatcgagagaaggaagaggaggatgatgaggaggaggtgcaacaccatgaggaggaggatgagcaggcccatgaggaggtgcaggcccatgaggaggaggaggaagtgggcatagatgctgaggcggatgacgataccaccgaggctcatgtcgttcgacgaaggggcactcggaagggccactttgtcctacctccgtcagcgcctgcacaatctgaagctcgggtactgatcatcccggttggtgatagccaatgggaagacacgccatttgacggtcgaggtcaccatagacaggttaatcaagtcttaggtaacctttgtcgtcaacataatccaggaattgtcaccgacctgaaagacgctatcgtgtggaacctgaggctcaagagcatgcagatcgagtattag

SEQ ID NO: 21862 - DNA, 333 bp, Zea mays
  Peptide Sequence Number=SeqID_65237
atgaaccgcctgttatcgggagtaccagcttcggagccgaagcagctccagcttgaatgtcgaacgaagccatcagctcagaaaagtggaagaccttcggcgacgaagcatggtcccaacaggcgatttgagatagacttaaccgaagcgatcggaatggaagtagatattgaaatggttgttgatgacgaggatgatgaggtgcaaaatgagaatgacttagaaatacttgaaggcaatgtcaatgacgaaattgcgccttcagatggtgttgactatgaaatggttgatagtgatgatgacacttatgatccggctaacccggacacatga

SEQ ID NO: 21863 - DNA, 864 bp, Zea mays
  Peptide Sequence Number=SeqID_65238
atgacatcgaattacaaatgtaccttcagcttggaaggagatgaaagtacagaaatactgttaaatcctgtttttgaggaccttcgtaagccgaaggcccccaacagcgccgcctgccaccaggccagcgaacgatcgcactgtgctcattattccttctgcaagaagcttccccggcacgccgaggatacgcagatctcgggtgtcaggacacgaagagtgccccagcagcaaacatttgtggctccaaacactcacaagttcatacaagctctcaagcaatacatcacacagtggagtagggtattacgcttcggcggcccgaaccactctaaaccctcggcgggtgcaatcggccacccggtcggggagatttcctctccgacatttggcgcgccaggagggggctgcatccgctacgccgcagaattccgactgcccgacgcctggtgccacagctgcgcgctccgcacggcagcacacatcggcgtaggcgtcccagactccatcgggggccgctcccgccggagcgctctccgcggccagggagttgttgcgtcacccaccaagttccacagcctcaccaagggctatgggacaatggcgcgacgacgtggatcgcctccttggcatagcacacattggctcggtcaggcccaggcctcaatcgtcccgacgccagtacgaggcgtcggcctcggtgcgctcgccctcggtgagggctgcaccgaccaaagatctgcgagcagagctcaatcgcagacgtgtggcaggagatgcgcaagtccccccgaagagaccagaaagacctacgggacgagctcaaccgcaggcgtgcgggcaagaatgcccgcctctctttag

SEQ ID NO: 21864 - DNA, 189 bp, Zea mays
  Peptide Sequence Number=SeqID_65239
agatactttggtacaggtggatatgagattgatggttctggttatgattatggtgctggggatatctatcccccacaagcccccgatctttgggttgatttagagaggtcggcattttggattgtaagactctggacttcattgggtgcaccggaggtgcacccaatgggtgtagcccccgacctttga

SEQ ID NO: 21865 - DNA, 399 bp, Zea mays
  Peptide Sequence Number=SeqID_65240
atgggtccactggatcccctttctggaggtccggagcagctccatgaccccagagtaaaagcaccccttgtctacaagatcggttatggacctcaagcaagccgaggtccaatgccgccacatgtccggaccattatggctagggcccggaccccctcaagcatgttccaaacccccagtcaagggaggtctggtggtgccacgtcgccacaggttctcaagcctgctctcggcccaggcagagcctacatcagagccttcgtccacacgatagcaggacgaaacgacaacaagtctgatcagaggagcctgcaccacgaccaagagaagtcttggttttcagagcaggcacaacaacaaccattcgttttccctcaatttcagccgccgatgtcttag

SEQ ID NO: 21866 - DNA, 620 bp, Zea mays
  Peptide Sequence Number=SeqID_65241
atgcagcgccgccgcctcacgcgcgccaaggtcactgcgtccatggtcatggccagctcggcgctcgtcaaggccaccgcggtcgcccagccatcctcgccctttcgccatcgccggcgcggcgtggtggcgccgctcgtgctcccggttgaggagctcaccgaggaggcgttcccggtctcgaggaggagtatgcagttctgtctccttccctttccgtccatcccgtcgaccccctctcccaagggcggctgcggcaaggaccgctgcgccttcggccatgcccgcctggccgctctgccaacttaccgccacgagggcgtcttcctcctcctttggtcctcctctacagcaccgacactaggagcctcctcctccacgtgtgtcccttgtggcaccctccccgaagctcagggcgccggcaccgcggtgcgctccagttctagcccctccttgacagctcggctcgcgggtgtgaggaaattagctgaagttaatttgccaacagaggagggtgtaccgaatgttgtccctgacttggactttccttgtgcaacttctaaagaaagagctgttgatgttggaaacatggataaaggcagaagaaaatcaactccgag

SEQ ID NO: 21867 - DNA, 351 bp, Zea mays
  Peptide Sequence Number=SeqID_65242
atggcgaaagggcgaggatggctgggcgaccgcggtggccttgacgagcgccgagctggccatgaccatggacgcagtgaccttggcgcgcgtgaggcggcggcgctgcatctcggcggggagcacgaagtagatctgcgccacatggagctccttccccggggcgaccagcaagcaggacagacgcgctccggcgcaggcgcgcgggagacatcggccacggacgacgcgctccaggagcggacgcagctcgacggatctgctgaatctctaccgccgccacgcgtcacgagacggatggcgcggaggccgccgaatgcggacgggcgcccaaaaggggtggagttttaa

SEQ ID NO: 21868 - DNA, 231 bp, Zea mays
  Peptide Sequence Number=SeqID_65243
atggcgacaatgggtccgaacccccacgggaaagtgttggacccctggacgcacagcctaggcctccgggcgaggttcaagacctccacagatacaaaccagacccctgggacggacatcccggactccgtcgagggcggctccgggggcattgtctgcaaccagggagttgttgtgtcaccctccaagctccacggcctcatcgggggccatgaagcagtgacgggatga

SEQ ID NO: 21869 - DNA, 586 bp, Zea mays
  Peptide Sequence Number=SeqID_65244
agagtttgtgttcttcgtctccaatctccccgacgggttggcactgccgatttcgtctttcttcgtgctgccgctggaggaacttggcctccatcctcagcacttcacgccctgcttcattcttcaggcggccatcgtcgcctacctctgtaggatgtccgccgcgccccctgcgccgccagccaccacaggccacgccactccgacgccgcccggagggtcgtacaagacgtcgtacgccatggagatgacggccgcgcgcctccagcacgaccctactgatgtcgaaccccttggatcgcggttccagatactaggacacccgtcgcaaagtggtggagcatgcaggcttacggtacggaaccaggctaagcggctacacggctccagaccaccccagaagacaagccaacaggccgggtttatgagggcggacctcaccggactggcgtacaccaaggtggtcacccccgggtcggcacatttccgtcaccttgaaggccgtttctgtatggacccatcagaagactggacccgtggggagtctagaagggtttccgggggaaggcaggctttggccccatag

SEQ ID NO: 21870 - DNA, 567 bp, Zea mays
  Peptide Sequence Number=SeqID_65245
atggacattttggagggctctattgctattcgtgatgatgaactgatcaaagcattggttgatgtttctttcgatccgaggtggagtgatgggagtttcaagaatggttacacttcagtacttgaagctcgcctcgctgaaaagctacctgattcaagaatttctgcaacttctcatatcgattcaaggttaagatacttcaagacaaagtattctgctttggagcagatgttgaacaagagtgggttcacatgggatcctaccaagaagatgattcagtgcgagaaacaagaatatgagacacattgcaagaataatccagatgcaaaagggttgtatggagtctcctttcattactatgatgaactttcaatggtatattccatggacatggccataggtgaaggtgtggaagacatgacagatgctgttaaaaacttggaagaagagttagttcatgtaaatgttaatgatgaaaaggatggagaggatatgacatttgtagagacaccgaggcgttttattgactcaacatcatctagctccaagaagcggaagaaagattga

SEQ ID NO: 21871 - DNA, 228 bp, Zea mays
  Peptide Sequence Number=SeqID_65246
atggactatgacataggcaacttctcacccctctatctccctaccccgaccgtatcttggcttggaactcacatcaaaaaggagccgccgatgacccccgccgcctgtgctcgtggccaaggtagctccgaccacctccgacgccgacccgcacaccgacgtgaccgtcgtgacctccccgacgtcactgaccaccccgccgaagctctgctgccaccgagaacttaa

SEQ ID NO: 21872 - DNA, 405 bp, Zea mays
  Peptide Sequence Number=SeqID_65247
atggcgagggcaggaggcgcggtttggtggtgggctggctcggggtcggggttggtgggggcgcgtccgtggatcccgccatcacagagggaagcgccgtcgagggcgagggcagtgggcgcgcgtgggagggagcagttcgcgttgagaactggatcgtttgactcgatctctggccttcctgtggtgattcttgctggttgtgattggaagaaagctgtagctggtgctgcgcacgtgcagcaacggttccttgtgcttttcttctgtgctcggacgcctgtgtggtgctgttcgtctgattattgtccaccgtggcctggtgcttgggctccctgctgcgcggtgttcctcttctcgggctggtgccgtggacgtctccctcggctccggcagcggctctag

SEQ ID NO: 21873 - DNA, 1014 bp, Zea mays
  Peptide Sequence Number=SeqID_65248
atgaattgggaaatggtgcagaggcttacccggtccacgtgctccggcggggttccgaactccggcgagcacgattgcgctattccggtggcgcgggtcctcggttcaagctcgtgcaagcttcacggcctcccaggggagctatccgagggcttggatcgagcggaggagggcgggaaaagggttggccacagtggttgccctcgggcggctctggcgggtcgcggggaggtcgccggagctatgggcgagctcagggagtttggcgcggggcaagggatgcaacggggaagacagccgggctctgggacgagctttatagccgtggcgcgagcgtggtcacgggcggccgcgggcgcgcgggggttcgcgcatgggcgtgctctgagcgcgcccccgagtgtcagcccgcgtcgaacacgtgggagcttgcttctgccatggttcaacggcggatttgagcaccttagcggcgtccacaggcctcaccacacccccgcccgtgatgtccgttgtcacgcgtgtcttcctctttcctccccgcacgccccgcgcgtgggcaccgcgaactgctccctcccgaactgctccctcccccgccccgcgaactgctcctcccgcccgcgcaccgcgaactgctccctcccacgcgcgcccactgccctcgccctcgacggcgcttccctctgtgatggcgggatccacggacgcgcccccaccaaccccgaccccgagccagcccaccaccaaaccgcgcctcctgccctcgccatcgacggcgccgcccgttgtgatggcgggatccgcggacgtgcccccaccaatcccgcccccgccagattaggaggcgaggcctccaacccatccccactcctcggattcaccgattcaccgcagttctgttcaccgattcgccgcagttctgctcatctcaaaggctgtacgccgcaagcccgcaagctagcaactgaacctcatgagacaccaaaacattgcgaatgtccattctcctag

SEQ ID NO: 21874 - DNA, 489 bp, Zea mays
  Peptide Sequence Number=SeqID_65249
atggaacaacaaaatcatttactgtcagctaaaaatacagtcaaggtgatgcagcatcagcaagcagcgggggagccaacaaggcagcaggagctgctcagccagttggtgttcaacaacatgtgctctttccaggaagcgaggaatggaccccacattgacaataggggtgatactgttgaagtaaatacatgggttagtgctaatggtaaaaatggaatgcgtagggattggcatatacgtgattctatgacaggccacacaacactgaaggcgacaagtaaatgggttatgatgaacaaactcactaggaagcttgcaagaattccagatgaagtgcagactgatatagagccatactttgttgggcgttctgctattgttgacgaagacaacagcaagcttccaaaactgccagagggtcaaagcacttgtgcagctaaatatgtgaggacaggcctgactatgggttgttgtatccatctgtag

SEQ ID NO: 21875 - DNA, 297 bp, Zea mays
  Peptide Sequence Number=SeqID_65250
atgcgtccagccagcctcgagccccccctgagcgcgggccgcgggctgcggctctccagtctccaccccttgtcccttgctcctcgtttcccaagagctatagtgaggggcgatagcgcccagcaggaggcgagagcggggctggaggcgggcgagagcgaccccggcgggcgctactgctaccgcccggcgataggcaggcgagagtggggcgacgcgttggcgatggcgtcttcgcgggcgagagcgaggggcgacagtgagtggcggcttctgattggtccacgtgtgctatag

SEQ ID NO: 21876 - DNA, 972 bp, Zea mays
  Peptide Sequence Number=SeqID_65251
atggctcgacttagacacactgcacgaaagtccgtcatccccttcttaccctcccgccttgctgagtgtccgcttcgccgtcccgtggcgggacagtccagccacttggagagactgcaccaccgcctgcatgaggagcaggaacgtcgacgacaggagcagcagggctcttccttctcgctccaacaggaggtagagtccgtgaggagctgctcccccgtgcttcccctggaggcgccccctgcaccatcactgggcgccccagcttctggagtagctgctggaggagacccagacgacggaggtggcgacgactgctctcgcgccacgacaccaacttctctgctaaccatgagccggaaggatgggttgctcgacccatcactcgcgacgctgctcgcactaaaccagcatacttggtccatcgagtatcgctgtgtggtctaccagcacagtcgcggggtctacccggaccactgggaggcaacctgcttggtgcgctgtccggagaacagtctccagggtgcggaggcctgctcagagcactattctatctctgagcgggactcagctgaggcagccatgcaagatgctgcacggcatgcgctttcacactactgctcggttttcggtggggtagctgacggtcttgacctgaagtattacccccaccgtccatctggcagcacaggaggcgtgattgtctcacctgtcggtgagggcaatcctaggttgagcagcacagtcaacctagccgccgtgctaaacacggagctggaccatgcactagacgagctgagtagggctcgtgctgagatcgccctgctgcgggctgagcgcgcggaacgtcgtcacctggatggtggttcccctgctcccgtcgggactcagcacccgtaccgctcacctcggcgtggacaccagtcttatggcaaccccgactgcaagaccaagataaatctagaaccatag

SEQ ID NO: 21877 - DNA, 438 bp, Zea mays
  Peptide Sequence Number=SeqID_65252
atgaggcggaaaaacggcgggtatcccccatccaggggcttggaaggtggaaagacacgatgcatgagggagcgcgaagacatggtctacttccaagggggtcaccctccttttaaaggcgactatccctacttgcgtccccagccgtcacgggctgagtcttctccaacacgctccaaggccctcccctgcggcgcgggggctgggtcccgcatgtcatgcaagccggctcagagcagaagaaggcaaaccgccgcgcgcgggaccgggaaaaggggataccccgaaaaggatccttccccaggaaggaaccaggctccgagcctccctactgatcagaggttcgaaggctggccccccgaagggtttgacagccgcctcagatcgcgtgggccctacacccactactggtcagaggttcgaaggccggccccctga

SEQ ID NO: 21878 - DNA, 303 bp, Zea mays
  Peptide Sequence Number=SeqID_65253
atggggaagcatgtcccatcactcctcatgctcctcctcagccgaggcggggtcccactcgacagtccaacccggtggcaagatggacggccaagtcactccagcaaccatgtcctccaaagaacctgtaaaaattatgctacaagcaaggctgagtatactaatactcagctagacttacccgtgaccgcacttgtacccaccataaccggaatgggagaccacgtctcaggtcgcgtgagtggtaaagtctgcgggcaggttcactcaggtactaggcttaccgatttaccatatttctcg

SEQ ID NO: 21879 - DNA, 1035 bp, Zea mays
  Peptide Sequence Number=SeqID_65254
atgggtcggaatttgaggcccggcccaggcccgctttcgggacgtgctagcccggtgttggaacttgctctcctgggcaagataatccaacgggggagtgaaaggaatgcaaacacggttctgactcgagatggtgattgctctgttaatccagtctctcaagggcactgtacggagatctggcccgcggaaagacttcgatggaagtcgtggagttggttccctgtgcccgcaataagtggggcaactggtgggatttttggttttacgtttcggagggtgaagtcgaagaccacccagggctccccgtggccattatgtgctcccatttttatgtggcatacccgcaatttgaggtggcggaggatgatgaggatgaaggggcccttcggagcgctgccccgcatgagtagcgggcgcgatttagttgaggaattcatcgggtatggggtgtggcccttggcacatggatgggcgttgggcgaagtatgccctcgcgagatgccctccctgggtgggcagcgagtgcgaagtccagccttcgtgttggatctgcgaggccgggatcccgccgcattcgtgcgtgaagcggaggacggtgttgtgcgtattgtggggcgttatgtgcctaggacggaggcccagcggagttgggatatccgcggatccaacgcccgcctgaatagggtcttcgagctgaattgcttgtcgtacggtggctatcccggggatgacgctgtcgaccgccgcgggaagaggccagtggttgtggctgaggaagacccttcgcaggaggccgccctagccactaagaagagaaaactaggtactgcagtgggggaactgtggggtctccgacagttttgccgtggagttgatggggacgtgcgcagccctcgggggaaggatgtcttcgcccgagctccgggagtctttggcgcggatgctggaggttaccgggggtcgatggcccaagaatgttccgatcccccgcgcggctggcgaagacttctttacgtctcgcatggcttgtga

SEQ ID NO: 21880 - DNA, 1086 bp, Zea mays
  Peptide Sequence Number=SeqID_65255
atgcgcctaggggtcccttttatagccccaaggcagctaggagccgttgagagcaaatctggaaggccattcttgccttctgtcgtcggcctggcgcaccggacactgtccggtgcaccaccggacagtccgctgctggtgctcccgaccattgtgacgggtttcatgtccttcgcctccctcgtcacctgcgatggggccgtgaatgctttgtcccgcgaggggtgcaggcattacgaggtcttcgaccaagcagacgaaaactttgaacgtgaaatcttcaaggtcgaagaccgtgtggtgaagcagtcggcgggggcactcttcgataggatgtggggtccgcacggccgagaggcggtcagggagcggtccgaccgggcaatagagcaggtgaaggctgttttttgtgtggttatatgtgtgggcacctcggcgacccccgcacccactgcggccggcgaaggccccgcaccagcccctgcgccaatgggcgaagacgccttgagggtggtggtcgagccggcagccgagccggcagccgaagaccccatagccacggctgggccttcgcaggttctggggtttgggcctgcgcacgcaaccgctactgacaatgctatttttgtggcggcttcgaccgtggttgccgatgacgattcgtttgggtctgtgtctaagtgttttgagtctgatgattctgggagttcgattgcgtggacggaggagtcttcaaatgaggacttggattattttgcagcgttggacgtggctgcggcggagacttcgccgcgtgtgctgggtgctgaggatcttccggttgcgagtactgggtgtaggcgacgaagggcgatggcgaaacggagagtgagtgaattgtcgcaaagtggcaggcgtcattgtggtgagatggagagtggtcgtcttcgcgtggacgggactagtaaacgggaattgctgtcctcgccggctggggctagtgtgggtgaaggggagctgcgaaatctttttgagggtgaggaattgaggataatgttgttcaactacagggagatgagtatcattctgaaggttgagccaatgtaa

SEQ ID NO: 21881 - DNA, 213 bp, Zea mays
  Peptide Sequence Number=SeqID_65256
atggctagtaccttagcaacacgaagttgcgagtacatcgaaagaaataagaagagtagaaaaatagccatgaaatcccacatcaccacaaagcttgaagctaaattgggcattaatatgtccttggtccttggcaccagaagagccataagtcttgaccacgagattaaatgttgcataaatcgatacccaatttcagagcagtatgagtaa

SEQ ID NO: 21882 - DNA, 1062 bp, Zea mays
  Peptide Sequence Number=SeqID_65257
atggaggccgagaagacggatctccggcgccagctggcggaggagaggagggaggcgaataaggccatcgctgatgcgcaggctgcgcaggccgaagccaaagtggcgcggacggagggtagtctcgcccgccaacgcgccgaggagctggaggcgaggttcaacgccctacgcagccgcgtggacaagaccgaggcctcaacgcgcgtggaggtcgagcggacacacgcgcagttcgtggacgcgtaccgcgagctgggaggagctactggtgctcccgaccattgtgacaggtttcatgtccttcgcctccctcgtcacctgcgagggggccgtgaatgctttgtcccgcgagggtgcaggcattacgaggtcttcgaccaggcggacaaaaattttgaacgtgaaatcttcaaggtcgaagaccctatgctgaagcagtcggcgggggctctctttgataggatgtggggtccgcacgaccgagaggcggtcagggagcggtccgaccgggcaatagatcagatggcgcatgccgaagatgtcgaggaccttggtggtttggacggcgcgctgctcgaggccacggaggtcgatccggcgctgccatctgatgccggtgaaggcccctcgacgacccccgcgccgactgcggccggcgaagaccccgcacctgcccctgcgccgacgtgtgaggacgcctcaaaggcggtggccgagcttgctactgaagaccccgtgacggcggctgagccttcgcaggttctgacgtttgggcttgcgcaagcaaccactactgacaataccaattttgcggtggagacttcaatttcagtgccggccaatgatgaagtgcctggctctgtgtctgaatgctttgagtctgacggtgagtctgggagttcatttctttggacggaggagtcctcggacgaaggcttagattattttgttgtgttggatgtggctgcggcggagacttcgccgcgtgtggtgggtgctgaggatcttccgggtgcgagtactggctataggcggcgaagagcggtggcgaaacggaga

SEQ ID NO: 21883 - DNA, 261 bp, Zea mays
  Peptide Sequence Number=SeqID_65258
atggcgcacgccatgtcgcgcacgggcccgcgagacaacggctacgacgacgactacgacgatgacgcgggcgactccgccaccagcaacggggtggtgaggtacgacggcgggcggagccccctccgcgggtacgggtacggcggccggagcccgctgcacgcctctgcggccggcggcggcggggccaaggacaagtacttcgctatcgctcttcctaagctttgtgttttttgtttgacgcccttttttgtctgttaa

SEQ ID NO: 21884 - DNA, 375 bp, Zea mays
  Peptide Sequence Number=SeqID_65259
atggagctaggactctacttgaaggcagatgtgataacttttgctttttgtaagggtacagaccacctagccgggcttatgaaggcggacctcaccgggcttatgagggcggaccttaccgggcttatgagggcagacctcgccagggtgacgtacccgcatgtattacctagttacaaaaaggaagaaaaactcgacctctcagacttgcttccgtggatagaacttacagggatgcgtcagggattagggagaggatctccttcagctgcagtgaggtggtcacccacccctgggtcggcatttttccgtcgccttgaagggtccttcccggctgggggagagttagcggagcccttctcggttcagtactag

SEQ ID NO: 21885 - DNA, 237 bp, Zea mays
  Peptide Sequence Number=SeqID_65260
atggcgcacgccatgtcgcgcgcgggcccgcgagacaacgactacgacaactacgacgacgacgcgggcgactccgctaccagcaacggggtggcgaggtacgacggcgggcggagccccctccgcgggtacgggtacggcggccggagcccgctgcactacgctgcggccggcggcggcggagccaaggacaagtacttcggtatcgctcttcctaagttttggatgtttttgtag

SEQ ID NO: 21886 - DNA, 75 bp, Zea mays
  Peptide Sequence Number=SeqID_65261
atggcgagcggcgtggacgaggttcgggcatgtcttcggcgaggcaccacggacagcggggcggacgacgacgac

SEQ ID NO: 21887 - DNA, 1137 bp, Zea mays
  Peptide Sequence Number=SeqID_65262
atggcgcgccttattccctctgtcgttgtttacctagttaggtcggaatggtgtggactcagctgcagcgaatcgcactccatcaacaggaagcttgaaatgctaaaagatgagaatgtaaatcttctggagaagcttgggctagcagaagagaaacttagacaatctgaagcccggacaacagagctcgagaaacaggttgctaatcttggcaatgggttatctatggaagtaaagcttatgaaaaggagggaggaaatgcttgtaagaaaggagcaagagataagaaaagctcttatatccaagaatggtaaaagcgaggaactcaccactcttcagcaacagctacaggaagaggttgtcatgaagaggtgttggttagcccgttattggggtttggctgtccaatatggcatctatccagacatctcaatgtcaaaacatgaatactggtcttcacttgcacctcttccatttgagtatgtaacatctgctggacagagagccaaggatggatccgaagcagaaggtaatggtttggaagacgtggacaagcttgttcatgatttgactgttacagcaggggaaggcaacgtagaaaccatgcttgctgttgataaaggacttcaagaactagctttcctgaaggtggaggatgcggtactttttgcccttgcccaacaccatcgtactaatgttgctggagcagctgatccagatattaaatcatctggggatgaaaaattcactgaggcatttgacctaagcaaggaggaggaagaagatgtacagttcaagcaggcttggctcatatttttctggaggagggctaagaccaacaacgtggaagaagatattgccgaggagcgattgcacatgtggatcgatcgacacggccagcaaccaactatgcttgaggctgttgccacactgaactttgaagaagccacgacggtgattgctggccgtgaaaatcagtccggagatgacttatataccttgggcattgttctcgcagttgagcaaggcatacacgagctgaggaagcttggcatcgagcagctcctgtgggagctctcccgccacgaggcgaaccttgccaaagacagtccatctgatgtcgaggacctgacctaa

SEQ ID NO: 21888 - DNA, 279 bp, Zea mays
  Peptide Sequence Number=SeqID_65263
atggcggttgccccagagcgtgcgccgcggtggacccccagccggtggccgcaactccatgacctcgacgcgcggtggcggagaggtggcgcatctttacccatgagtcgcgattcccttcaagcccggttagctagacccgtattcacttccgaggtgaatggccagggtctcactacgaggcttctccctagagttctcattacgcaaatgctggaaatggtcaactgcataaggtacacctaccgtaaccaacttatagcccagactacagggtaa

SEQ ID NO: 21889 - DNA, 483 bp, Zea mays
  Peptide Sequence Number=SeqID_65264
atgaagcagtggcgggacgacgtcgaccgactgctcgtcatggcacactctggctcgaccaggttgaggccacgaacatcccggtgccagcatgaggcgtcggcgtctgtgcgctcaccctcagtaaggggtgcacagaccaacaacctccgggcagagctcaaccgcaggcgtgcgggggaggatgcccgggtctcgctggagagggcacgtgagcgccggcaaaacatcgagggccgcaacctcgatcaagactttgctgcggtaaccccgcaaaccctagtgggtgccccgttccaggcggttgtccctttggccggcgtgggctgcgcgccgcactcgtggatcatcttcgtgccgcgacttggccatccaaattccggccgcacctgccggaaatgtacgacggaacgtgaaacccgtcgaaattcctgtaggtgtacgtcaccgccatcacagcagcaggcggaaacaccaccgtga

SEQ ID NO: 21890 - DNA, 174 bp, Zea mays
  Peptide Sequence Number=SeqID_65265
atggagagtcatgatctccgggcagaatgggaatcacggcttgtgggtggttatgagattgatggttttggttatgactatggtgctggttgtcagcattgcaaccactgctcaggcgaagatgaagctgtggaaggagacttccaggagttccaagactacgacgagttctag

SEQ ID NO: 21891 - DNA, 708 bp, Zea mays
  Peptide Sequence Number=SeqID_65266
atggcgctcggctctgcccatctccatggctgcgcgcggacctctctcctccccatctccccaagctcgtcgcgacccccagctccctctgtccagctcgtgcccagctccctgcgccttgcaaaaccccctatgtcgcgccctgctccctgttgccgcgagctccagctcggattcaacccagctcgcccctgcccatgtcgcacgagtttctctgaccccggcgttgtcgtttcagttgaccacaccggctgtgcagtggaagcatggtctagcgaaatatgcattaggtttataggagttgcttggaaacccttcgatgcattggctaccttgaaatccattccttttatagatacttctggtgaagtatcaaatattgtttacaaaaattgcttagccctgcctagagaaacacaaacaatcctaagggtggaagtacttaaatcgagacttgggctaggaacaggtgatgttctacccaggttgataaaggattatagagaatgtaggcctgctgaccgaggaccttttaactggccacatgcctcatcatgggtaagctttgcctcgggcagaccaataccagaaaggccaacacgcaatgggagtggagagatggcgagagtagcatgtaccctccgtggcaagaggctggacggtggtgtatctgtgctctcggttggcgtgaacctgttcaagtcttga

SEQ ID NO: 21892 - DNA, 552 bp, Zea mays
  Peptide Sequence Number=SeqID_65267
atgaccaagaggaagcgccgggagatggaaggcgggaaaggcaagattggtggatctcaggcccgaagcagtagctgtctctgtttctcaaggacaccagcatcagcgctagcaccagcagtatcagaggtagcacaagcggaggagcggcacacgcagagcagggacaggcgtgggcctaggtcgcttgtagccccgacgtggggtcgagccagaatgccgcgcaggggcttgcaggcgtccgtcactaaccaacggtgggggagagcccagggactgggcgcgcgacgaagggtggcttgtgtgcactgccgagtagcctggactaggaggggacgaagaagatccatgtgccctaggaagaagggggcgccatgggatgggaggggagctcgacagtctgagaaaaagcaaactagtgagggagatggcggggaggtggccgtggatgagcttggggaagtagaagagacggcgagaaaaggaagcctacgctgcacagatatgatgggggcaggggcgtccggtcctaggctccacggattttgctag

SEQ ID NO: 21893 - DNA, 675 bp, Zea mays
  Peptide Sequence Number=SeqID_65268
atgaagaggcagtggagccatcagtcggtcgtgctcccgctgctcgtcgccgtcttcctgctcctcacgttccggtgctccctgcgccacgcgcagcagcaggcatctagcctccacgccgacgacgcgggaacaagctacgccgtccacgccatgcttgtcgagcttgcggccgtggacccggccgcgtcggcggtgctgcgggccgccgaggcgctgctacaggccaacctgacgagggctcccccggagcgccgggacgccgtggtgcgcggcctccacgactggctcggcaagcagcggttcgagccacaggtgatggccgagctcgtggacctcatcaagtgccccatggacctgtacgccgccggggcgaggggcggcgatggcgacgcccccccgccgtacgcgtcgtgcgccgtggtcggcaacagcggcgtcctgctggagccactcggtaccttcctcatgaagcttttcctgcctcctctcggctcccatggtgggcgcgcgaaggtgctcctctccaaagccctaaagtgccgccccttgggtgggattcgcaggaacaagagcttctatggcgcagggactcctccagcacctcggctcaatgcttacatggatggatgccggtgcccttccccaacagcgctcagcgccctgctcacctag

SEQ ID NO: 21894 - DNA, 486 bp, Zea mays
  Peptide Sequence Number=SeqID_65269
atggagctctcagaggagcaggagccagagggatggatcgctagactcatcactcgcgacgccactcgcgggtgtcacttccacgatgctctcgacaccttgctgcgtcaggcattcgaccgacacacttggtctattgagtatcgttgtgtagtctaccagcatcgtcacgggttatacccggaccagtgggaggctacttgcttggccttttcagagcattattctatcactgagagggatactgccgaggcagccatgcaggatactgcacaacgtgcactttcgcagtattgctcgttgttcagcggggtagctgatggcctcgccccgaagtactacactcaccgttcgaccggcagtgctggaggtgtgattgtctcgcccgttggtgagggcaatcccaggctgaatagtattgtcaacctagtcaccatgctcaacaccgagctggaccacgcccttgacgagttgggcaagttttga

SEQ ID NO: 21895 - DNA, 213 bp, Zea mays
  Peptide Sequence Number=SeqID_65270
atgaccgtgttctctacatcccccttcccggtgtcccgagggtccatcgcgctcgcaccctcgtctccggcgggcttccgctatggacacgacaagcagcccgtggttcctgagcgtgttgccgaagatcttcctgagcaacacctgtgctcaggaggagatgctggcaacctggaggactttgaggagtttcaggactacgacgagttctag

SEQ ID NO: 21896 - DNA, 1206 bp, Zea mays
  Peptide Sequence Number=SeqID_65271
atgatgaccaccagttcggtggtggggagaagcaagccgggctgcggcctctgccccaccctcagcttcaaggatcttcatcatcctcgctgtggcagagggcaagctgagccggggttctacctcctgcattggccggcatgctgcctcttccttcagcattcaggggagagggcgctcatcggccttgcagagggggcgaaattcgacgacgcgggaccgatcggccgcaagcgtcatcagctccagcgtgcctggctcgctggctcagctggctctatcgcggcctccgacgctgcctcctgccgcttgatccgggcgtggccgtccgtccaccgcacgggcgactgttgcgtcgtgcgcactggaggatcgtccaagacatcgtacgccgcatgggcggcgttcgtgttcttggattgtcttgtcctcactccagcacgacgcctccgcacggaggtggccgctgtcgtcggtgctgaggtggtggtcgctagaggaggtttctccgccgatgagaccatcggcgccacccgcggtcagacctccggctctttggctttgatggcttgtcttcgcctctcgagtggggacgtgggcgagggccttcttagagcagcatttgccctgaggtcatcgctactgctgtttagccgcccgaggcggaggtcgttgtcgctgctgatggagcggtcaccggcgagccacccggagtttgttgtcccgcaggccctctggtgtagaggttgttcatacccacgggagtggaatcggagttccgtttgtaatggcaccctgagtatgggtaaccttcggctgctctgcgatgagctggagccggaggcagcggtgtcggtgtggacagaggcggagtcggctcgaaaagaggcttcgccggcccaggagcgggtggcttcccaggccgaggaggtgcagcggcggcggctggggcttggccaggtggagatccttccgcccgtgttgccgtccgaggctgggccagattccgccgaaggtggaaacgacgtcgagggtgctactgctccccctgccaatgacttgttcgtcggtagcagaatcgcttatccgagcgagagttacttttcgcggaaggtgatgagtgaggattatgttatcgatatagtcgtgaaggcacgaaagtcgttctggcagaaaagttttcgagcgttaggactcgttcggtag

SEQ ID NO: 21897 - DNA, 1467 bp, Zea mays
  Peptide Sequence Number=SeqID_65272
atggctgaagggcgccaacccccgcgaggtcgtgctcctccaacagtagcaagacgaaggcgacgcgggtgctccccatccgggggctcggaaggtggaaggacgcgatgcatgaggggagtgcgaaggcatggctaccacccgggggatcgatccctttttaaaggcggctctccccactcgcatcctcaagcgtcacgggcaaagtcttcaccgacatgctccggggtcctccccctacgacacgggggctgggtcccacacgtcatgcaagctgacccgaaaaggaagaagccaaaccgccgcacgcggagcgtgcaaccgccccgcggttacaagcactcctccatcctcgccgaaaccagcggtcgaaagggcggaccgccatgcaggtggcgtgcaaccgcaccacagtggcacacccccttcggcttcgtcgcatccggcatggaggcccaggcccacacgtcatgtaaccggcgcgccggttactacatgcaagaaaccgcaccgccacttgtgccaatgccgcgccttctcgactgcggaaccggtgccgcgactcgaggcaaccctgcgcgtggcccaacagtgccattcgagcacaacgatcacgggtcagtcagccgcgtgaggaggcgcgacgggaccgggaaaggggatatttcgaaagggatccttcttcgcaaaggaagcgggcctcgagcccacctactgatcaggggttcgaaggttggcccctcggaagggttcgacaaccgcccagagcactcgggcatcaagatcattactgatcaggggggttcgaaggctggcccctcggaatggttcgacagccgccctagagcacgcagagtgagggatgactctgggtacgtccgttacatggccgaggctcgggctatgctccctaggtcaaggcctcgtctaccaagggacgcgatcttgcctcgcccgagcccagcctcgggcaggaacagtagtcccagacggattcacgcctcgcccgagggcctcctcaagcgacgggtgcaccctcgactcgcccgaagcccatcttgggcaggcttcgttgtgaagcaaccttggccaaatcgcctcaccaaccgaccatatcgcaggcgcattcaatgcgaggatcgcctgacaccttatcctgacacacgtgcctcagtcggcaagggtgaggctgacaacagccaagttcagcctcgggtgcaacaggaagctccgcctcgcccgaccttaggcctcggcctcggaaggaggtctccgcctcgcccgacctcagggcttggcctcaacctcgacctcgaaaggtggtctccgcctcgcccgaccccagggctcgggctcaacctcggcctcggcaggaatcgcgtcctcacccgaccccggcctcggtctcgggagaagtcttcgcctcgcccgaccttgggctcggaccaaccgcaccacaggggataa

SEQ ID NO: 21898 - DNA, 75 bp, Zea mays
  Peptide Sequence Number=SeqID_65273
atgggagaaaatggacctaaagatgggttgtctgtcaccactgaaactaaaattcgactaaaacgatcttcgtga

SEQ ID NO: 21899 - DNA, 492 bp, Zea mays
  Peptide Sequence Number=SeqID_65274
atgtctgggaggaagaagacgcgggagcccaaggaggagaacgtgacgcttggccccgctgtccgcgagggagaacacgtctttggcgttgcgcacatcttcgcctccttcaacgacactttcatccatgtgacggatctgtctggaagggagacgctcgtccgcatcactggtggcatgaaggttaaagctgatcgtgatgagtcctcgccttatgctgctatgcttgcctcacaggatgtcgcgcaaagatgcaaggtattgtcttactgtggaaaattacatttgttatcggagcttggaattactgcattgcacattaagctccgtgctactggtggaaacaagaccaaaacccctggccctggtgctcagtctgctcttagagctcttgctcgatctggcatgaagataggccgtattgaggatgttactccagtccccacagacagcacacgcagaaagggtggtagaagaggaaggaggctgtaa

SEQ ID NO: 21900 - DNA, 345 bp, Zea mays
  Peptide Sequence Number=SeqID_65275
atgccgtcgagtacaccgtcgacagtggcagaggaggccccaactgcacccgcccccgccatcgaggtcgacgcggggggcgcgtccagctccatcccgccgcccacactggaggagacagaggtgatttttgggcggcggctccggtccgacgccgagccagaagtggcgccgattcccctcccccaggtgttgtctcgtgcccatcaggctcttcatgagactgaggcgacgatccaacgggagtgggaggcgcttgaggccgaacaccagctgttggaggtctgcttcgtcgccgaaggtcccataagaagaaacacctttggaagactggcacaaagctga

SEQ ID NO: 21901 - DNA, 129 bp, Zea mays
  Peptide Sequence Number=SeqID_65276
atgtcgcccattcatttggaggtgacgtggatgacgaagccgaagaacacagagtcgaagcttagcagacaattcgaagctcaacagatggtgatgaagctcgaatacctagctgtggaagaattctaa

SEQ ID NO: 21902 - DNA, 354 bp, Zea mays
  Peptide Sequence Number=SeqID_65277
atggcgggcctatggtgctcgcggcacggcagtgtggctcgtcatggagggcagcacatgacagcagggacggcacggcgaggctacgcagcgggacacgtacgcgggatcacgaccaagcagcacaacgctgaggaaaatgaaaatgaagaacagaggagggaactcaatggagacgaagggctcgccgaagaagaagggctcgccgacgtcgacgttacgacgtggatgcatagtgccatacaggaggcgggggcgtgtaaatatatagatgaggtggtgttgcaagcggttgtcaattttgttgtggctcgtgtcacgtcagacacgtgcgtgaaacgagcgaccatttga

SEQ ID NO: 21903 - DNA, 597 bp, Zea mays
  Peptide Sequence Number=SeqID_65278
atgtgcttcatcaagaatctgctggcggagctcttcattctttggcactacgctccaccgattttgagaacgacagcgacttccgtcccagccgtgccaggtgctgcctcagatttcaggttatgccgcttcaattcgctgcgtatatcgttgttgattacttgcacctttcccttcttgcggaactcatacagcggccagccgtccgacatctttatcaccacgtcaaagggggacagccaggctcataagacgccccagccaccacattggctttgcaccgaatacgtgcgcaataaccgtcttccggagactgtcatacgcgccatccaccctgcgctgtatcgatttatccccgacatagcccgtctgtccaacttttttgatgtgtatgaatgtgacagagacttgctgtatgatagagacacccgattgtcgagggatgaaccacagcgactagctccagatcatgagttgggtaatgctcctcatgtcggcgtaactgccttgaagcatatgcaattactcggccctcttgcattaatacacagccgagtccactgcctgacgcatcacaatatacatcataaggcttag

SEQ ID NO: 21904 - DNA, 297 bp, Zea mays
  Peptide Sequence Number=SeqID_65279
atggccgaggagcccaaaattgctcgccgtatttggatttgggccacatcacggtatggccgagctcctccacaaatcggcggcaggggacatcatataccagttggcattatggaccgcaagcttaatgagtttatggccttgactcaagggaatcacacagtgttgcaatatgctcaggcattcaacgatctatgtcagtatgctggctatcatgcagatacagatgagaagaagagggacatattcaggtggggtcttagtaccaagctccgagagcgcctcaacacggtctag

SEQ ID NO: 21905 - DNA, 765 bp, Zea mays
  Peptide Sequence Number=SeqID_65280
atgggaaaggagaacatagagcatcaccatgaggatcagactggtagagaggaaacttgccactgcggccgatcctcgcctagaccaccggtccaaccacgagggccagtccagaaggaagtgctaagctcagggatgaagcacggtggagcccaagggcgtaggtgtggtcgtgacgacagtgatttctcgtcgaagttgcacttaagctggaataatctgggcggttctgctacaatctgtccattccccgctgagaaggaggatgacccgatgtggagggaccaggttgaccatgccaaggacatgtgggcaatctaccctggggccattgctcgactcacgattcggtgcatgagtgcactgtaccgcctgcatgatgtaaagggcaccatcatcgaccgtgaagatcctgtggtggatctatctaccgagttggtggagaaggatctccagactaagcagatggtgcaggaaaggaaccacaccattgaggttctggaaaaccagctccaaaatacccagcaacagcttgaggaggcgaacgagcacctggacatgcatcaccagaagatgcatcatgacatggaagcagatgaggatgtggatattgagggagaggatcctgagctggcatctagcttggacacagccatcgcagctcgctctgggggccaccttctccagagtctagcattgcctcgtatgccctataggtgccatgctaggagtagatgtgacaggaagcagccctcctctggatag

SEQ ID NO: 21906 - DNA, 276 bp, Zea mays
  Peptide Sequence Number=SeqID_65281
atggacatgggtaacacggagaggaaagagatggttctgtgcatccgggcccatatggtggtcacaacaaggacgtgggagttagagaagtcactactcgatgggtccacctaccggtcaggcatgattccaatgtcatgcaatggcattgagatttgtgactcaatgcatcggctaccactttgggctttctgggatgataatgcacttccaaatcataatcctttatcagttccaaccatcttcgttgcctcatattcagattggcttgagtga

SEQ ID NO: 21907 - DNA, 840 bp, Zea mays
  Peptide Sequence Number=SeqID_65282
atggcggcaagaccaggcaggtcgttgtcgtgcggctcaagggcgagggccatgccctcggggaggagatcgtgcgtccctaaaggggcgcaggaggagggacgccagtgtgcgccactccgaggtgcgaccctccgcgcccgtagtgttgctgatcacaaggatctggacgctcgtcatgttgtgcatctcctacatgaactggcagcagtggccgcaaggcatgtgggagacggcgacgacatgcaatgcgggctcccccacggtggcagtgttttccatgaggaatcgctccgcgtgcatagagtggcacaacgggaggccacagaactcgaggttgacgccagcatatgtgcgactattggcacccaaggggaaccacgagatcggggggtcccttttatagccccaaggcagcaaggagccgttgaagctccatttggaagaccattgttgcctgctatccgtgggcgcactggactgtctgatgtgcatcagacagtgaacagtacgcgcacgggacacgacaaagaatcccctgattggttggtttccgcttctaggggcatcagactgtctggtgccaggcaccggactgtccggtgtgcatgtcgaccgttggccagcgctgacatggccactagccattgcgcggctggattatccgccaggcagattgcactctcattatcacgtaggagtgggactttgctcagattgttgccaaagtcccagagggtttgcctcatccaaagaagttacgcacaacactatcctgcggcaacatacttggcctcagcggtggatagggcaacagatatttgtttcttagagctctag

SEQ ID NO: 21908 - DNA, 516 bp, Zea mays
  Peptide Sequence Number=SeqID_65283
atggcagcagcctacgcagtgcagactgcagagagtcaaaggtcccgccttggtaacgtgcgagccactgtgcagcccatgtacttcggtcgtagcgcctgccactggagtgggcaggtatacatctcgttcgcagttaatgcagagcagtggctggcaccagtcttccttgtgacagctccaatctgcccctcacctagtgacctacaaaaaaggccgaccttaccaaactgggaaatagataaatgtaaccccattacgagggaagagtttgttctcatgctaccttcgggcataaggtttggggccaacctagatcgtctgagctccatcgcgcgcctggctcaaagggtaagcaacgcctggcggaggttattcgctgctaccccgaatgccagggagcttgtgttggatgggttgggtcttggaaacaccgcggccgatgatgggcaccgcacgtgccgggggaccaggatacagactagcgcaatcgactactctagcccttgttcctag

SEQ ID NO: 21909 - DNA, 489 bp, Zea mays
  Peptide Sequence Number=SeqID_65284
atgggaaccgctcaagaaaagcctctgcacagcttcaaggagttacgcaaaggcttgggggctgttgtcgggtacttgaaaacagggtacccagagaaggaccaaaggcctcccaaatacggcccactaaccggtcggtccacctgccaagcagctcggcgtgaaggtccaaaagacctcctagtgacgacccaccaagctgactggcctgcctgccaaacaaatactaccgaggaacacagcgaggcagggctgccgatcaacctacctaccgagcaacccagcgaggcggggctgccgaccatcctgtcgaccgagcaacccagcgaggtggggctactgaccaacctgcccgctgagcaacccagcgaggctggggtgccgaccaaccagcccgccgagcaaccttgcaagcaacatctggctcttaggggcgaatcgtctgggctgagcacgtggactgttcgtgcatggacatatcgtcagtaa

SEQ ID NO: 21910 - DNA, 684 bp, Zea mays
  Peptide Sequence Number=SeqID_65285
atggatgcgcttgcagtagggggttacaagcgttcgcgtgggagagagcgagacccttatgcgctggcccgttctcccgcgcggccaaccttctcgtacgagagccctgtaccttccttttataggcgtcgggcgaggcgggaggctcctccgaggtcgaggttgagtccgtcttccgaggtcgaggctgagttccgagccctgggtcgggcgaggcggagaccgtcttccgaggccgaggctgagtccgagccctgggtcgggcgaggcggagtcccgtcgtctagcgtcgaggttgagcccgagccctggggtcaggcgagacggagaccgtcttccgaggccgaggctgtgtccgagccctggggtcgggcgaggcggagtccgtcgtccagcgtcgaggttgagcccgagccctggggtcaggcgaggcggagaccgtcttccgaggccgaggctgtgtccgagccctggggtcgggcgaggcggagtccgtcgtccagcgtcgaggttgagcccgagccgtggggtcgggcgaggcggagcttcctatggcgcccgaggctggacttagctgctgtcagcctcactctgtcgagtggcacagcagtcggagcgacgcaggcggcgctgttttcttgtcaggtcggtcagtggagcggcgaagtgactgcggtcacttag

SEQ ID NO: 21911 - DNA, 624 bp, Zea mays
  Peptide Sequence Number=SeqID_65286
atggcgcctcctgttgacgtggtcggttcgtgccctgggttggacgatgtggaggctcctccgaggtcgaggtcaagtctgtcttccgagtccgaggtcgagtccgagcccctgggttgggcgaggcggagaccgttggctgaggccagggctgagtccgagccctggggtggggcgaagcgtagttcgtcgtcttccggggctgagcccgagtgcgagcccaggggggctgagcccgagtccgagccctggggtcgggcgaagcggagttcgtcgtcttcaggggctgagcccgagtccgagccctggggtcgggcgaagcggagttcgtcgtcttccagggctgagcccgagtccgagccctggggtcgggcgaagcggagttcgtcgtcttcaggggctgagcccgagtctgagccctggggtcgggcgaagcggagttcgtcgtcttccggggctgagcccgagtccgagccctggggttgggcggagcggagtttccttatggcgcttgaggccgggcctggctgcttgtcagcctcactctgtcgagtggcacagcagtcggagcggcgcaggcggcgctgtcctcttgtcagatcggtcagtggagcggcgaagtga

SEQ ID NO: 21912 - DNA, 1428 bp, Zea mays
  Peptide Sequence Number=SeqID_65287
atgaccgcgtcaaaaaaaggtaccctaggacatttccgggaccagcgggaacgatcttgtaacggaatcccatcagagggaggcatcgagccctcggaccccgtcgaaaggggactgggtctggcagatcacccgcagaggctcgggggctgctctcgcaaacccggctccggccagaccgttgacagcgtcaacataccagcccgagaacttgggacccgaccgtgcacccgggctacggccagctcgcatgagggaacaaccagaccagccgaagcattgcgcgaggcattaagacctcggaggagtcaaaccactcctccgaggcctcaggggcttcacccggcgggtgcgctcgcgcgcacccaccggaacaaaacgcaaccgagaaaggctggtccccttgcaaaaaagtgcgacaaaagcctccaagcgagtgttaaccctcccttcgaggctcgggggctactgtcggggaccataattaggggtaccctcaagactcctaattctcagctggtaacccccatcagcacaaagctgcaaaggcctgatggtcgccagagccgaagtgaccgtagtcacttcgccgctccactgaccgatctgacaagaggacagcgccgcctgcgccgctccgactgctgtgccactcgacagagtgaggctgacaagcagccaggcccggcctcaggcgccataaggaaactccgctccgcccgaccccagggctcggactcgggctcagccccggaagacgacgaactccgcttcgcccgaccccagggctcagactcgggctcagcccctgaagacgacgaactccgcttcgcccgaccccagggctcggacttgggctcagccccggaagacgacgaactccgcttcgcccgaccccagggctcggactcgggctcagcccctgaaaacgacgaactccgcttcgcccgaccccagggctcagactcgggctcagcccctgaagacgacgaactccgctccgcccgaccccagggctcagactcgagctcagccccggaagacgatgaactccgctccgcccgacctcagggctcggactcgggctcagccccggaagacgatgaacttcgcttcgcccgaccccagggctcggactcgggctcagccccggaagacgacgaactccgcttcgcccgaccccaaggctcggactcagccctggcctcagccaatggtctccgcctcgcccaacccaggggctcggactcgacctcggcctcggaagacagacttgacctcaacctcagaggagcctccacatcgcccaacctagggcacggatcgaccacgtcaacaggaggcgccatcattaccctaccccaagctgactcaggctacggggaacaagaccggcgtcccatctggctcgctccgctagacaagtaa

SEQ ID NO: 21913 - DNA, 201 bp, Zea mays
  Peptide Sequence Number=SeqID_65288
atggcctctgaagttagggttcatttaatcgaaattctgggcaccagggccccgcctcgccatgccccggcgttgcgtcgccgtgcgaacctctgtccgctgccttgttaccagctcgacgagcaggccactgaggacctaggtgttcagcaggtggagactgctgagcaggagctcgttgaaggcaagttgtgctcttga

SEQ ID NO: 21914 - DNA, 639 bp, Zea mays
  Peptide Sequence Number=SeqID_65289
atgtcacgcaagccggttcagagcggaagaagccaaaccaccgtgcgcggtgcgtacaaccgcccagcggttacaagcgactctccacttttgtctagaccaacgggcgaaaggggcgggcaaccatgcaggcggcatgcaaccgcgccaagtgggcgcgcttctccgactcccaacacgcccagcatggaggcccaggcccacgcgtcatgcaaccggcgcgccaaatgcttcgtgcatgcaactgcaccgccacttgcgccactaccgtgtctcctcgactgcggaaccaacaccgcgactcgaggcgacccagcgcgcgacccagcaacgccagcctggcgcgacgggaccgggaaaggggataccccgaaaaggatccttccccgagaaggaaccaggctccgagcccccctactgatcagaggttcgaaggctggcccctcggaatggttcgacagccgcctcagatcgcgtgggccctacacccactactggtcagaggttcgaaggccggcccctcggaagggttccacggccgcctcaggctactcgggctccgcgcccactactgatcaggggttcgaaggctggcccccgaagggttcacagccgcctcagacgccgagcgagggatga

SEQ ID NO: 21915 - DNA, 771 bp, Zea mays
  Peptide Sequence Number=SeqID_65290
atgtcttcgcgctcccttatgcatcgtgtctttccaccttccaagcccccggatgggggatatccgccgtctttccgcctcgtcgttggaggaacgcaactccgtgggagttggaacctttcagccatcgttcggcttcaaggattttcatcatgcagcccggctgcacccctccaccggcggtcacccaagatggtgacctccagtttgatggtgggggaaagcgagccgggctgcagcctctgcccctccctcatcctcaaggattttcatcaccagggctggggaggggactgcagcgtgcctggctctcggacccgagtggcttcggagccgttctcggcgccggctttcgccacggcagctggaagaggttcttccgccgacgagatagccagggccgcccacgggccgacctccaactctacggccttctgcccgtccttgcctcacgagtttgggcatgggcgagggcctcttggcagcagcatccgccctgaggtcagcgctgccgctgttcggccccccggagcagaagtcgtcatcgtcaccgctgctggagcgggcgacgactcgcctgttggttgtctgtaccgcttcaccaagcgtgagtcgccccgtgtaaaggtgacgagtgagagtggagatcctcggaccgcgtcaccgtccgaggctaggtcggacctcgccgaaggtgtcgtcgatgccgagggtgccgctgctcccttcagccgtcaagatccgagcctgcaggatcggattatcttgtag

SEQ ID NO: 21916 - DNA, 543 bp, Zea mays
  Peptide Sequence Number=SeqID_65291
atgtctggtgcaccagaggactccaactcaaactcgtcaccttcgggaaattccagaggcagctccgctataattcaccggactgtccggtatacaccggacagtgtccggtgctccaaggaagagcggcctcaggaactcgccagcttcgggaattcatttcagctgctccgctataattcaccggactgtccggtgaataacggactgtccggtgtaactgcggggcaacgactacttctggcgccaacggctacctgcggcgcattaaatgcgcgccagcgcgcgcagaggtcagacacgcctatgctggcgcattggacactctacagtacatgtccggtgcgccaccggacatccaggcgggcccagaagtcagagctccaacggtcggaacccaacggttttggtgacgtggctggggcaccggactgtccggtagccgttggcgccagaagtagtcgttgcctcgcagttataccgggacagtccggtgttcaccggacaagtccggttgaatttatagcggagcagctgaaatga

SEQ ID NO: 21917 - DNA, 432 bp, Zea mays
  Peptide Sequence Number=SeqID_65292
atgggtaccctaggacatttccgagaccagcgggaacgatcttgtaacggaatcccatcagagggaggcatcgagccctcggaccccgtcgacaggggaccgagtccggcagatcacccgcagagtaaggctgacaggcagtcaggcccagcctcaggcaccataggaagctccgctccgcccgacccagggctcggacttgggctcagccccggaagacggcgaactccgctccgcccgacccagggctcggacttgggctcagccccggaagacggcgaactccgctccgctcgacccagggctcggactcgggctcagccccggaagacgacgaacttcgctccgcccgacccagggctcggacttgggctcagccccggaagacggcgaactccactccgcccgacccaggcttcagcgctcctctga

SEQ ID NO: 21918 - DNA, 504 bp, Zea mays
  Peptide Sequence Number=SeqID_65293
atgaccaccagcccctggatggggagaggcaaaccgggctacgttcttggtcccgccctcagcttcaaggatgttcatcatccttgctggggcggagagcgaggcgagtcggggctctacctcccgcgcgggtcggctagccacctcctcttccagcttctggtggtggaaaccatcctccagctctgcggaggaggcgtcctccagccatgccggggaaggcgaactgttgctgcccagctaggatgcaacattccgccctcttcctcgctttcgtggcgaggctggccgaggcctcggggcgatcggccgagccgcctgctcgagccggattcttggaggagaccctggcggcgatggcccgagtgtgatgatgaagtcgtccttcagagtggagatcctcggaccgcatcgccgtccgaggctaggccggacctcgccgaaggtgtagttgatgccgagggtgctgctgctcccttcaaccgtcaagatccgagcctgtag

SEQ ID NO: 21919 - DNA, 636 bp, Zea mays
  Peptide Sequence Number=SeqID_65294
atggcgacctccagcttgatggtgggggaaagcgagccgggctgcggcctctgccccttcctcagcctcaaggattttcatcaccaaggctggggaggggagagtgccgagttggggtcggcccctgcgtgggcgcgtgcctggtcttcagccgcgagtggcttcggggccccttgcggcgtcggcgtctgccacggcagccggaagaggttcttccgccggcgcggcggccgggaccggccacgggttgacctccaacttctacggccttctgcccgtccttgcctcacgagttttggcacgggcgggggcctcctgacagcggcatccaccctgaggtcagcgttgccgctgttcggccccccggagcagaagtcgtcgtcgtcgccactgctggagcaggccgggggtagcgatatcagtatgaacagaggcggagttggctcgagaatggggaacctggtcggccggagcctagccgtgtcgcccgtcagcggtgccgacgcccaagagcccctggacctcggcgccgcccgaggctgggtcgggctttgctgtagacgtcgtcgatgccgaggatgctacggctcccttcggcgtgaagacccgagcctgcaggatcagatcatcttgtag

SEQ ID NO: 21920 - DNA, 447 bp, Zea mays
  Peptide Sequence Number=SeqID_65295
atggattcggagaacgaaaagctccgtaaagcactggctactctgctcagagttgttcaaaagcgtagttgtgacatcgttgatgtcgtcaaatcagcctttcagcctttcaactcacctttggtcgacgaattgaaccgagcactagttgagattgacgacctcgccaaggatcttgaagacgtagcagtgcaaactcagtgggaggtagaaaatatggctaacagtcaagtgaaaaaacatccacaacaagaggaagcagtagaggaccttctgatagaagatggttcagaagacgacctactgatagacaaagagtcaccaattaactatgaagaccttgtgggctatgacaatggtcgtgactactcaaccgacgacacatatccctactatgacgcagacaagacatcactggcagcttctaggtttgtgaaagggaattag

SEQ ID NO: 21921 - DNA, 1311 bp, Zea mays
  Peptide Sequence Number=SeqID_65296
atgatcctcagccgcctgcatgtccgtgtcacccgccgatcccccgcgtccgccgccctccgcgatgcggcaacgcgcgccttggcctccgcgggcctcttccgtggcctccacggcggcgcctcctccgagcacggccgcgaacccgcaggtcctcttacgctctacaggaagctagtgagccaagggaagctcacgcatgatagttaccaggaaaatgtagcttccgaattagacaacctacttagtaggcttcaacggtacgagatggaaatggaggattatcatgacaagctgtacttctgggagaatagcagggagaaagagcggcgcaggcttcttgtcgaagaagctgaagataagcagcgtggtggtgtatggattgatgagagaaggggatttcttgacaagttggttgcacggagaagaagaggaagcatagaacctggagttggtaagtgggtctcgtacctgaaccgagagaagaaactagatacattggtaggccatagaccagtcgctcctgttgctcctaaaggattgtatctctatggaaatgttggaagtgggaagacaatgttgatggacatgttctatggggccactgaaggtgtcatcaaacacaggaggaggtttcactttcatgagagacgtgatgatgacaaatctattcactcaagtgctttcagttggatatcaagccttccttttgacacaaaaattaaggagtggttgattggcgaagagaagtacaaacaacagacacaggaaaagcacatccttttggcagttgctgacaagtttttggttgatagacaggcaaataaaactggagcaagcattctatgctttgatgagatacaggatgggatgcaaagggacatcttccttgagttattatcaaaattggatgaaagctgcaatgagattcttgtgggtactgaaaaggattatcgccgcctaattccgacagaaggctcaactgaggcgatcagctgtccaactagagatggcaatgggtacccgctacccaaaacccggtgggtttttgctctattagggtacgggtttagatcaatttctctacccatgggtttgttaatgggttcaaatggaaacccaacggcgggtatgggaaacccattgggtacccaaaacccgcatgggctttggtttgggcaaacttttatactcgtcatggatctcatcttgagaaaacttccaacgatgctgatctggtaccccatgctgaaggacaatgccacatacttggtcccgaatgaggatattccgtcaggacctgtactataa

SEQ ID NO: 21922 - DNA, 123 bp, Zea mays
  Peptide Sequence Number=SeqID_65297
atggcctgcggcaatatactcggcttcaacgggaagaaagagctacggaatttgcttcttggaggccaagactaccagggaactttccaagaactggcaagtcccggatggggaactttctaa

SEQ ID NO: 21923 - DNA, 1140 bp, Zea mays
  Peptide Sequence Number=SeqID_65298
atggacggcctgtggcatctgggggacgagctccgcgggcagcccaaggtggtggaggaccgccagtggtcgctcatgacatccaagctggcagagatcaccaggtccaggggcgagaggacgaacgacctcgactacgccaggatgaacgccgcccccgacgccaagcagtggggcaaggcggcgtcctaccagcaccacgacgagggcaggatggaccaccacgtcggcctcagcctcaagatgaacgatctcaagatgaacgaggccgccgctgccgcagtcatgaagctccccttccgcggcgtgccctacaacgtcaacccgatgtaccccaaggggagcaacgccaacgccaatgtcaacgcgttcaagatgaatgtcggggtgaacaagtactccagcagcacgaacgggaaagactccggcgggaaaagcggtggcggcagcaacaacaacagcggcggcggaggcaacggcaatgggaccgccaacggcagttccgcagttgacaagcgcttcaagacgttgccgacgagcgagatgctgccgaagaacgaagtccttggtgggtacatctttgtctgcaacaacgataccatgcaggaggacctcaagaggcagctttttggattgccagcacgatatcgtgattcagtccgggcaattactcctggcctgcctcttttcctctataactacaccactcaccagcttcatggggtatttgaggctgccagttttggtgggtctaatattgatcccactgcatgggaggataagaagtgtaaaggtgaatctagattcccagcgcaggtgaggatccgcgttaggaagctgtgcaagccgttggaagaggattccttcaggccagttttgcaccactatgatggcccaaagtttcgcctcgagctctccatcgcggagccgcaggatctggatgggtttcggcaggtgcaccaaccagacagacttggtatggatggtgaatggttgcatctgttcaaccgctgtcggtcagtgacaggccaagtactagcagatttggttcagctgcttgctggtgagagcaaagtactagcagctttgaagtcgactagagggccttctaggtgttcaagcaataatgcattcgtataa

SEQ ID NO: 21924 - DNA, 741 bp, Zea mays
  Peptide Sequence Number=SeqID_65299
atggaattactcagcaagtcttacctgactaaagaaaagactctcaagggtgtgctggttatcagggagtcaagacggagacactacaccgagactcctttctcgtgcaagtcacccgcccggtctcagcttaatcatttcaacccaaaaacttggtacctggcagagggtttcaaggagggtaatcaagttcaaggaagcaagcaagcgagaaagattttaaaaacatcaaggaaggtgtcaaatgcaccggggtttgccttcgttgatagaatttatttggctctggaagaaaaagaaaaggaaaaggaaaaccaacaacagttctgggccggtttcagcccagacagcccaagtccacgcagaaacgtcaccgacaatttacatagggacccctcgaattctattcctttacacgacaaagtccttgacggcgcttcgcacgggaagctcaactccggcgagctagactggccggagggggccaagaccggcgctagtcttcggttcacccctgattctaccccagagaagtatttcccctcactcaatttccgaattggagctctaccgtaccctgtccacgaggacagtgcggagaatctaaggaacaacgtgttcccggcgacccgtggtagtctagttcaattggatgatttggtgagcattgtagacacacgagagtacttaaacagggaagaagatggtatgaacggacctgaacggtgctggccacggtga

SEQ ID NO: 21925 - DNA, 276 bp, Zea mays
  Peptide Sequence Number=SeqID_65300
atggcgcggccccgacgaagggcgcagcatgagaacagtctgatcacggagtccgaagaactcgcaggagaagaccctgagcaacagctggtggcgatgagaatggtggttttggtattgactatggtaatggtaggtgttcatacagtgggcattaaatgcgcacgtcctgaggttctgagaatttggctgagggcgggctggccctggacttcgcccgagatgccctcgggtgaggcagaaatgcgttttttgtccaagggtgtcctcgggtga

SEQ ID NO: 21926 - DNA, 597 bp, Zea mays
  Peptide Sequence Number=SeqID_65301
atgcagtacaaggaatcaagcagtctcattagctgcgagaagcagacgattcgaatcgagtttttaaaccttgcaaggcctcaccgccttggcatacaatgctccactgaccccgactgccgtcgtgcagtggccgcacttgtacccaccatagctagcatgggagaccctgtctcaggtcgcatgagggataaagtccgcgcccggcttcactcagtagccgcggcgaagaaaagggcggaggggcttacctgcggcgagactgttccggtgaagtggccgaaggtgaaggggaggtcgcgtggatcacaacggaggtcacgggatgccagagaaagacatgagcgaaggaatcgggcggagactcactggatagctcggtccacgcgcggcgggcggaagaccgaagtccgggtgagggttgatctcggggcctccggggaaagtcctatcgggtccgagggtttgggaaaggttcacgggctactggcgatctaccctaatgctgtctggtctggacggaggctggagagggctggtctctgtcgcgtacttgtggctgctgtggcttcggaatgtgtcgcgtcctcagtaacg

SEQ ID NO: 21927 - DNA, 660 bp, Zea mays
  Peptide Sequence Number=SeqID_65302
atggcccacgcctacgcctataaagcccccagggacttcgaccgtacccctccgcacgcgctcgacctcaccggagcccaaacccgccggcgtttgcccgtgcacggcgtgtccgcggccgcccgatccccctgccaccatagaccggccaacagaacccttcccaaccccgtccgaccctcggaaaagactgagcacacctcggtgaagctccccgagcgaggaatcggagtttgcttcgccggagaggccagtcaacggccgccagactccgcccgactgccggcgagcgtagaccggcacccgccgccgacgagaacacccgcctgtgcacgtggaccgaacgactccggccacccccgccatcgacccatacaccgttgtgaccgccaggacctcccggagccaaccccgcccctcaccgaacttctctcaccgccggaggtagccccggatccagcaccagagcctgcaccagaggatctgcctgccactgctttggaaggcaagccccggaatccttttgagatgaatactagtatgctaggtcgaggttctttggaggacatggttgctggagtgacttggccgtccatcttgccaccgggttggactgtcgagtgggaccccgcctcggctgaggaggagcatgaggagtga

SEQ ID NO: 21928 - DNA, 324 bp, Zea mays
  Peptide Sequence Number=SeqID_65303
atggcccatgaaattataaagaaaagtgaaaaagacactcatgacgcccgtgcagaagcaaggcgagctgaagaaactgcagaccgcgaaaagtgtataggaacgacttttgagcttcttcaccgtctatttttcggtgttcaccgtttatttttcggtgtaaggaatatgttggctgcagtgctggtggtggtggaagctgatgccaaaaagcctgtgaatggcttgctgaagcaacagaggttgcaggttgattgcccacgtattctgaatagtgatttagcacattcttgtagtgtggcccttgtcttcaccacagaataa

SEQ ID NO: 21929 - DNA, 342 bp, Zea mays
  Peptide Sequence Number=SeqID_65304
atggcccgcgcccgtgcctataaagcccccagggacttcgaccgtacccctccgcacgcgctcgacctcaccggagcccaaacccgccggcgtttgctcgtgcacggcgtgtccacggccgcccgatccccctgccaccgtagactggccaacataacccttcccaaccccgtccgaccctcggagaagactgagcacacctcggtgaagctccccgagcgaggaatcggagtttgcttcgccagagaggccagtccacggttgccggactccgcccgaccgccggcgagcgtagaccggcctctacgtcaccctgtgaagctcactgtgccattggtttga

SEQ ID NO: 21930 - DNA, 471 bp, Zea mays
  Peptide Sequence Number=SeqID_65305
atgacttcccacggatcctcgaacgaagggaatgcactgtcccacattgacgggcttgcacgagagggctttccccgtattttgtgggaggtacttcagggggctggttacacgacgcctcctcagtacacggtgcagcagttcgagaagcaccgagtgccccgctgtaggagatggtggaaaaggacttacaggtggaaacaactgtcaaatgagatccaagagcttgaggaactggtgggaacaagggagaacaccatcgaggttctcgaggatcagcttatcaacactcagcagcagcttgccgaggctaatgagcacctggatatgcatcaccaggagatccaggacatggaggccaacgaggatatcgacattgagggaggagaggagcctacctctagcttggacactgctggctcagggagacccccttcccctgagtcgagtgttgcctcgttcgctcactag

SEQ ID NO: 21931 - DNA, 414 bp, Zea mays
  Peptide Sequence Number=SeqID_65306
atgggaaccctagaagtagctctaggtgcagggaagagatctctcactggtcctagggcaagattcgtacgttttggccgctcagaagagggaagaacagggggcagatgcaaagagccacgtgttcgacgcgctctgagctcgctagagcacgcccgacgcacgcccttgcgtgcccctcgtcgcgccaaagccaagctggcgccgttgcacgcgcccgcgcctataaagcagccagggacttcgaccgtacccctccgcgcacgctcgacctcaccggagcccgaaaccaccggcgtttgccccatgcacggcgtgcccgcggccacccgagcccttgccactgtagaccggccacccgagcccttcccagccacgctcgacccttggaagagactgtgcatgcctcgatga

SEQ ID NO: 21932 - DNA, 1140 bp, Zea mays
  Peptide Sequence Number=SeqID_65307
atggctgccggcggtgccgaccaaagggggaataatgctgcgacgacgacttttgtggtgccagcggtggcgctgagcttggggaagccgatgccgcgggtgggcttcggcacggcaacggcgacgctgggccaagcggagggccgcgccggcgtgacggaggcgatcctccgcgccctggacgctgggtaccgccactttgacaccgccgcagtctacaacacggaggcctcgctcggggacgcggtcgttgaggccgtgcgcgccgggactgtcgcctcccgtgacgatctctacgtcacgtccaagctctggatcaccgacgcgcaccccggccgcgtcctaccggctctccacaggacactgcagaatctgcagatgtcgtacgtggacctgttcctgattcaccacccggtgagcatgcgggcgccggccgacgacgaggctgaaggagcaggccccgcggtggtggtgaagaaagacctggtggccatggacatggagggcgtgtgggaggagatggaggagtgccacaggcgagggctggccagggccatcggcgtcagcaacttcagctgcaagaagctagagcacctgctctccgtcgccaagatccctccggctgtcaaccaggtggaggtgaacccgtactgccggcaggagaaggtcaggaatttctgcagggccaatggtatccagctctgcggctactctgcgatgggtgcgagcggcacagcgtgggccaacaactccgtcatggactcccctgtcctcaaacaaatcgcccacgctcgcggcaaaaccgtcgcccaggtgtgcattaggtgggtttacgagcagggtgactgcgtgatcgtcaagagctttaaccagagcaggatgcgagagaacctccacatcttcgactgggagctcaccgacgatgaccaccgcaagattagcgagctccctgagtccaggggcaactacgatttcttgatccatgaatctgggccgtacaaaacagcacaagagttatgggacggtgcaattttaaacccgtaccataatacgtcgggtttcgggtcatttttaaacaataatttagctataaataatcaagtaccagcaataattgacttatacatatatggattttaa

SEQ ID NO: 21933 - DNA, 870 bp, Zea mays
  Peptide Sequence Number=SeqID_65308
atgaagctccccaagccctcagaatcggtagagcttcaccggagaccccgaatccccctcgtcggacttcttccgttcaccgacgaatgtggaccagatgacttcacccacccccgcaatggaggagatactcgtttcagttccaatttcctttcccacgagggttttccttccatattgcgggaggtgctcaactccactggttaccctacgccccctttgtacatagtgcagctgtacgaggagcatcgggtgccgcgttgccgagtctggctgactctggaagctcacccccttcagccgggttggcgttcccttgactccaagactattggatccagggcggacgacaccaccgaggcggcaactatgaagactctgacaactttctgtggctaccacccactagagatggtgatgcacccactgggactcttccccgctgagaagagggatgaccccatgtggtgcaaccgtgtgagccatgtgaaggacaaggacctacaggtggaacagttgagccagcgcattgccaccctggagcagcaggtggagatctgggacaacaccatagatgtcttggaaaaccaactccacgatgtgcaggaggagcttgaggaagctaatgaccacctggacatgcaccacctggagatggaggcaaacgaggctgaaagcaagggagaggaggctcccgaggagttaggaccagcccctgtactaatgcgactccctccgagatgcccccgtcgcccatatccagtgtcgcttctactactcagggttgatggcgccagccccaccctcagcagtatggtggaggccagccgcagtgacctctggccgcaacaacctatcaggagttcctga

SEQ ID NO: 21934 - DNA, 267 bp, Zea mays
  Peptide Sequence Number=SeqID_65309
atggccgagtgctcgggtggcttggctggcggcgcagagctcgccggagctaaggacggggtcaggacagtgggagcaggcgtggagcgaaagctaaaccacctagtaaaggtgaagaagctccaaagtcgttcctacggggatgcagagctaaaataccaccttgtaaaggacaaagggaaaaatactatatcttcaacagctgttatcctcaagcaagacaaagaaggggcaattcttttacttcggcaacaatattctttatga

SEQ ID NO: 21935 - DNA, 225 bp, Zea mays
  Peptide Sequence Number=SeqID_65310
atgaagaagagacccatcgagcttcagaggaagcaaggagagctgaagaagctgcagagcgagaaaggccggaactttctctccctggaactgtatgatcctaaagctgatccagctctaaggggaatccttgatgaattcaaggtggtaaacgcagcaatagacgaagctgttgataaactactaaatgaagctgcggggagagttttgaaggaagatgattaa

SEQ ID NO: 21936 - DNA, 498 bp, Zea mays
  Peptide Sequence Number=SeqID_65311
atgatggataagcagaccaaaaaattttcaagacttgagaaagagaaagaagctgacgcaaaacgtataatagacttagaatatgccttatccgctcaagtggagctccacaaatctgaagtggcaaggctagagaagaatcttgatgaagttactgagaattttaatgttgaaaaggcgaagcgtgaaatatctgatgcagagcggattagaattcaaaagaatattcaagagcttcgtcaagcaaaggaagaatgtttttctgctgctatgcaatgttctaacaagttaaagagtacttttgctaaagttggcgtgttcttaattgaacaaaattttatctgtggtgattctgaaggtgtaattaaatggatcgaaggtgaagtcgaatactttgatgaaatccttacaaaagaggagatttatgtgcctgtgttggtgcccgaggggccgtgtcgatacttgaaaaagctagctgtgaacacgccaaggctgtaa

SEQ ID NO: 21937 - DNA, 195 bp, Zea mays
  Peptide Sequence Number=SeqID_65312
atgtcgcacaggggcctagttaatccgaagctcgtgcacccgacagaaagctttggcaagcgggtccactccttggcttcggagagcccagataaaaatgctgagcctaacgatagcgttaggagtcagctgatgaagataaatttcgaaatcttccttaacatccccaatcgtttcatgcagaggaaaccttaa

SEQ ID NO: 21938 - DNA, 306 bp, Zea mays
  Peptide Sequence Number=SeqID_65313
atgggcagaggcaagagaggcaagggatggccccgtcgtgctgatgggaagcgcaagcgtcctctgagtcctccttcggaggatgtcagggactcggagtactcagagcagtggcgatccatcgagcgccccgggctcggtgggtcggacgactcagaggaggcctcaacggaggaggtggaggactcctccaacttcgaggagtggagcggcggcgagggcgatcatgtccaatccctagcatgtgaaaggccaggttacaggaatagtctgcaactgttgggcaagcagatgctgctgttttga

SEQ ID NO: 21939 - DNA, 192 bp, Zea mays
  Peptide Sequence Number=SeqID_65314
atgatgcttcaagtgggatgggatgttttcaaaaataaaattggatggtggatccatcatggtcgtgatgggttcaacatcgataaagatgtacctctgacaggatccactattagtaagcatttccgcaaacagagttttgattcttgttcaaagccttaccttgactccctccagtcaacatatccttga

SEQ ID NO: 21940 - DNA, 1449 bp, Zea mays
  Peptide Sequence Number=SeqID_65315
atggactactctgcaccagcagggtcacgttggaagctagctccgggcagcctcaccagcggctacgaccacctctactccgagcggcccgcctgtggaagcggccacctcagcaccaacggctcgccagcaacggcggccacctttgcaccggtggcttgccggcaagggcggccatcacagcgcgtgcgaagaggtcctcgcccccgtcctcctatgggggtgaggacaagaccatccaagaacgcgtccgccacctccatggcgtacgacgtcttgtacgacccctcgggcggcgtcggagcagtgcggccggcgatgcagtggacgccatggatgtggcggatctgcgcacggcgtgaacgtcgcccgtgcggtggacggacaaccacgccccacttgtcggcgggaggcagcatcggaggcggcaccaaagccatcaaagccaaagagatggagccgcagcacggctcgcttcccaccccaaagagttggggggcacaagggatggagccgtggctcagcccgctgtccaccttcacgaggctggtgatcatccttccccccgaatgctggaggaagaagcgggaaggagcgtcgcctccacagacatcccgcggagagaagtcgcaccgctgctcgcgccaataccgcgcctcctcggggccatcgcagaagactgagaagataaattttcaaaaccaatgcagtgactcgaggcaccccgcgcatggcccaacaaagacattaagtgcggaagtcacaggtcagtcaactgtggggacaggcgtggcagtcggcgtgaccatgggtggaccggcagtaattgcatcaacgggcgcgcaggggcagcgagccaatcgccaatcagactttggccccacctgcaggctcgtatcctctcctgaggtgggcccaggtgccattgtcgagaggacgcgccgcctctccaccctgctgacaggcgatgtgccccctcagcatttaatgcgtcctatccactccgctggtaggcggcaccagggccatcctacagacggtgcacctgtccagtccattgtcaaacagtgtgcccgtgctgcacggcgcgctgtgctcaccatcccttatacgagaaccatctccttcacgccgatgctacgcagatctcagacgtcagggcgcaagaagattgctccagcagcaaacattagtagctccaagtactccatctgttatgttcctgggcccacctgtcggggctcagtacccttgtacatgccccccttaactataaaaggggaggcatgcagcgttacaagaggaggctcttttggaccaagcttagacgtagactctaaacgctcaagcttccacaacaatccaacacacagtggagtagggtattatgctccggcggcccgaaccactctaaattctcgcgtgttcatgtgctcggtgatcgcttag

SEQ ID NO: 21941 - DNA, 474 bp, Zea mays
  Peptide Sequence Number=SeqID_65316
atgtatcagttggaccggacctccgcgagggagcaccggacccctgttcgcacaacccggaccctcgattacggcccgggactcccaagtaagcgtgacgggtcccttggatggggtccagatccctccgacatgatggtgcaaatcgtggagcaccatgccgagacttcaacgagtttcctggtggaggaagaagttgtttcttccacgccacaggttcccaaccgccccagtgccgggcactgctgctgtgcacgctgcacgacagcatacaactgcgcagacatcccggactccgtcgagggcggctccgggagcattgtcagtagccagggagttgctccgtcaccctccaagctccacggcctcaccaggggccatgaagcagtggcgggacgacgtcgaccgaatgctcgacatggcacattctacctcgaccaggtcgaggccacggtcatcccggcgccaacatga

SEQ ID NO: 21942 - DNA, 438 bp, Zea mays
  Peptide Sequence Number=SeqID_65317
atgtatgagatgaacgcaaagataaggcaatttcaacagatggtatctctagaattagcagagtacaatcattgtgagctgccatctacagatgagaggaacttcaagatagcccagtttggtgttgtctttgtacttatgaatataatttgtgttgttaaactttgtgaacatgtcaaagacaagagtaaaaccgtggactcggaaggcatttcggaagagttgtcagataaggtgagcaacattgaagctgaggtgcagctcttggaagaagagtataaaaaggatctgctttatcatgataaggtccgtcaggagctggccgaagtccaagcaaagagagctcttatggaggctgttatggaagagacaaagcagttgcaggagctcggcgaatatcctgaacatacagagctgtctgttcctatgcatttctag

SEQ ID NO: 21943 - DNA, 822 bp, Zea mays
  Peptide Sequence Number=SeqID_65318
atgcatgaggggagcgcaaagacatggttgcctttcaagggggtcaccctccttttaaaggcaactctccccacttgcgtcctcagccgtcgcgggttgagtcttctccaacacgctccaaggtcctcccctacgacatgggggctgggtcccacgcgtcatgcaagctggcccagggcagaagaagccaaaccgccgcacgcggtgcgcgcaactgcccagcggttacgagcattcctccactttcgcccagaccagcgagtgaaagggcggaccaccatgcaggcggcatacaaccgcaccaagggggcgcaccctttcgacttcaacgcatccagcatggaggcccaggcccacacgtcatgtaaccggcgcgccggttgctacgtgcaagaaactgtaccaccactcgcgccactaccgtgcatcctcgactgcggaaccagtaccacgactcgaggcaaccctgcgcatgacccaacagtgccaactaggcacatcggtcacggggaccgggaaaggggataccccgaaagggatccttctccgcgaaggaaacgggccccgagacccctactgatcagaggttcaaaggctggcccctcggaagggttcaacagccgcctcagagcactcgggctccgcgcccactactggtcagaggttcgaaggccggcccctcagaagggttcaacggccgcctcaggccactcgggctccgcgcccactactgatcaggggttcgtaggctggccctcgaagggttcgacagccgcctcagacgcagagcgagggatggccctgggtacgttcgatacataa

SEQ ID NO: 21944 - DNA, 491 bp, Zea mays
  Peptide Sequence Number=SeqID_65319
gatattataacaccatccaactacttgaggcaatagctttacatttagattccgtcaatgggaaatcctgcatctgggaagagcttgtatcatgtttccttcggcttttttctgacaatactgctgactacgaggattgcatatcatgtactaatacccatgggggtgaatcattggaggcttccagtaaattttcttcagtcttttttgagcagtttaccagagaatcatggaaggcccgatgcagatggtgggcacgccatcatttcagccaaaatgcttatacatcagaagctcagtcaggtgattgcaagctcctggctgccaaggcagcttgtgctgctcatttgtttggaccagaattcccatatgtcaaagcagttggtgtctatattgcaaagcaagaagctctggacgaaatcagtgtcctagtcagaaataagcagaactctgtcaggctattacaaactttggagaaactaacacgatga

SEQ ID NO: 21945 - DNA, 357 bp, Zea mays
  Peptide Sequence Number=SeqID_65320
atgtcacattctattatttgcactgaaggattggagcagagcttgctgcctttaaagctgaagttcgctactggggcttccaatgattgttttgataaatatatgaagtacaagtcagtgcctaataccttgtatgaagatgcagaaaaatgtctaagattggctctttattcaaatccgccagtgatggctgcattattgccactaatacagattctcctcctaggtgataaactgaaagttgcactaaatgagcttgagaaggcctgcctcagtttagctacagccctccctttcaggttgagaggtaggctgctggaagagtatgaccaaaaccagtactacttagatagctga

SEQ ID NO: 21946 - DNA, 573 bp, Zea mays
  Peptide Sequence Number=SeqID_65321
atgtctcgctcctcttgcattcatcgcgcccttccgccttccgagcccctagatggggtgcgccggtgttctctagagggatctgcgtcagggtcgccccctctgacgatctcaccgccggagagctcgcgctcgcggtggtgctttcgatcttgtcttcttgctgctgttagaggagcgcaaccccgtgggggttggcgctcttccgccatcgctcggcttcaaggattttcatcatgcagtccggctgcaacctcccgccagtggtcatctagagggatgaccactagccttgtggtggagagaagcgagccgggctgcggcctcccccctgccctcagcttcaaggatgtttatcatccgcgctggggaggagggcgagccgagttgggttcctgccttccacatgggctggcgacccgcttcttcctccaacattcgggggagaagggcgttcaccggccttgcgaaggaggcaaacttcagctacgtggggtcggtatcttcggactcaagtcaggcatcacagtagaccagaataatacgaaggttggtgaagcgccgaaggtgtaa

SEQ ID NO: 21947 - DNA, 1665 bp, Zea mays
  Peptide Sequence Number=SeqID_65322
atgggaccaagggatcgccaaggggcggcgcgaaaaacgccaggggactgtgagggtttcacgaagctcggccgaaaaggcagcggggaacggcgaaggctgaggcctcccggcggaggcaagccgccgctgccggcgaaggtgggcgcctccgcgcctggcaaggcgccggaggtgacggtgggcgccggaggccccaagctggcgaaggtggtgccgtctgtcagcggagtggcggaggctgcgaaggcggcccgaacgctaccgccgcccggcaaacgcgttgccgacttcggcaccgagattaatgtggaggattatcttggggggtcggacgagggcccgcttgctctagttgtgcctggcgcggcgatcgcgacggctgcgccagcgccgaaggcggggggagagacccttggcgccggaggcgaggtgtctgccctcgcgctggtcagggacgaggcgggcgtggcgacccgccggctgaggggagcgacagaggcgttgagtcgagcgacagaggcgttgagtcaggtccgccgagctatgccctctccgcccccccctcctttttttttacgcaacggccttacgtgtgttctgcgggtggctgacttcaccagccgcaccgtgtcgggggcccttacggcagctttttctgccgaggtcgagagacttcggacgcaacatgctgacgctgtccgtgagaagtcggcctccgacagcaagtgccgcaaactggcggagaaggtggccgccctggagaaggagaaggctgacctccggcgccagctggcgggggagaggagggaggccaacgaagccatcgccaaagagcaggctgctcaggcggaggccaggctggcgcgggcggaaggcaatatcgctaaggagctcgccggagagctgcagcggcggcttactgccctggagagccgcgcggagggggccgaggccgcgatgcgaacggaggccgaacggacgcgcacgcagctcatgactgcataccgcgagctaggtgtgcggacgggtgacttcgaggtgccggagcgagaggccggacttcgctgtctggaatgggtgcaggaggaactgcaggagctccccactgtcttggcggggttgatggcgttcacctccctggtcacctgcgaggcagcaatgaacgcgctctctcgcgaaggctgccggcactttgaggccctcgaccaggcagatgaggattttgggcgagatatctttgaggtcgaagaccccgtggtgaaggaatccgccggggccctctacgaccggatgtggggttcatacggttgtgaggtggtccgggcgcgggccgaggctgcgagggctcaggcggagcgcggcgagcgggtggacgacttcggggcgctgaacagcgcgctgcctgacccggaggcgacccctgcggaggccgcgactggagtcgccccgggaccgaccccggagactgcggaagatgcaccaggcgcccctgcacctgctgcggccggcgaagaccttcccccaaaggtggccgaaggcgcgcccgatgcccccgcagctgctgtgccgagcgctgaggatccagcggaggtgggggcggaggcagcggcggaggcctcggcggaggctcccgcagcggcagggccttcgcaggtggcatag

SEQ ID NO: 21948 - DNA, 693 bp, Zea mays
  Peptide Sequence Number=SeqID_65323
atggccacagaaggcctcggcgaggtggtctgcgagtgtgacgaagtcgtggaagcagcagtgcacggaatggcggcgttggtcggggcgacatacgctggtgacgaggtaggagacatagctgggcgcagatctggggacgagcgaggcgacgacaggctcggcttctccgggtcgaagacgcgtgcggatctcggcaacgtggaggctatgacgcgtgcggatctcaagaacgtggaggagggcgaggaggcggagcacaaggaggagacggcgagcgtggaagcggcgagatctcagccattgaagtatgtggcgacctcgacggccaggaggagcaaggagatgacgacgagggccttgatgaagtggagaccaccacaccggcttcgcacatcggtcctccccacggccaccttatgcctggccgcaccggccagtgcgacggtggcggaggctagcgaggctaggcacccagcagtcggtgcgcgccttgaggagcagcagccacatggtctggttggtgttcttggaaggccccgttggagaacgacgagggcgaccgagaggccctaccgtcggcgtcaacggctggagatctggcggccggtggcgaggaaggactggagcgagggtttccttggagacctttctgagacggggaatgcgaatcaggtgcgcatgagagagtga

SEQ ID NO: 21949 - DNA, 1377 bp, Zea mays
  Peptide Sequence Number=SeqID_65324
atgtcgggcggggagcagaggacgagggagatcacgcggggcagccacggcgacggcatgagcaggccagccatgacaacagcatgggcggggctgcctgattccggccaggagtggtttgtgctcgtggacgcaggtctgattccggcccctgttctaatcccttctatccccaatcctcttcccagtgttgttcgccacatgctcttaggcggtgaagattggctggttcttagtatgttgttggtagccagtgttgtctttcataacaaggcacagaatgggaagttggttgtgaactataagctttgcgtcccgcggcgtgtctacctgtacttccgatttggatttatcagtgaaggggttctcgacactgaggaattagccattgtaaacagcacctttcgtaaggcccaaggttccaggctacctggaatcattgaggaaacgaggagatcaggggagtcaacaacctcaacactggaaagtgaaacctgggcgatggaaagccttgagactgaactatttgataatgcctgtgcttcgatccagagatctcttggcaaacctgataaactttcaggtcggcccgttgctgcctcaacccccccaaaggccacagcaaatgcacctcgtgttgcagtatggtcccatttctcttttgtcctatttcatattcttcatacgtttaagaacattctggtcaggggcagagctgctgttgagtctgaaatggaagttctgttgaagttgaggagtgaggtagaggaacagctgcagaacgtactgagcaagaaggtggaggtgtcgttcgagaagagtaggattgagaatctccaaaaggaatttgagagtgataactcggctgttgtgcaacttcaggcttgggcagaggaggaagccaaaaaggcccgggagcatgcacgcgcccttgaggaggcccggaaccaatgggagcgtcaaggaatcagagttgttgtcgaaggagaactgaaggatgacgcctcagctggggtgacatgggctaacgctggcaaagaacacgcagtcgacgagtctatcaaccgggcggaagctctgctggagaagctccagacaatgtctggtgagatggaggtgcggtctcagggtgcggtggagagagtgatgcagcatgtgaggtccttcatcgcaatcctaaagcagcaagctgcagatgcaaggcagtggtgtaccgagtttggggcttgtgctgcttccagggcaaacgaggtatcagcacaagtgaagggaagcatatctgcgtttggtgcaacccttggagacaagtcgaagagggcaatggaagagtgtaaggacggcctggagaggatttcacacagattcaagacagactag

SEQ ID NO: 21950 - DNA, 438 bp, Zea mays
  Peptide Sequence Number=SeqID_65325
atgggcaagaaacgcaagcgcgagccgacccctccgtctgaggactttggtgactcggaatactcagaggaggagttctcctctgagtccgaggggtctccggctcccatccctctgcgtgagtcgtctgacgattcggacgactcccaggggctcgcggtggaggtctggacttacatccgggtcgtcgagcgctccgggctcgcgggctcggatgagtcggagtactcctcggacgaggaggactcaaccgaggaggacggcggtggcggtggcggtggcggtggcgagggcgatgacgacgacgacgatgatgacgacgacggtggtggcggcgatgacgacggtgacggcggtgatggcggcagcaggggcggcaacggcaacagcaggggtggcagcagcagcagcaggggcggcaacaaggccagtggctaa

SEQ ID NO: 21951 - DNA, 174 bp, Zea mays
  Peptide Sequence Number=SeqID_65326
atggagtggaacagccgggcgggcacgcaggcccagcccggccgctggggcctggggccgggacagcggacagggacgccgagacgtgtcgcttgcccagttgtcctacgcgccgcggctgcagcgtgcccgctcgctcaccactcaccagtcaccccgcgccttgccctccgc

SEQ ID NO: 21952 - DNA, 642 bp, Zea mays
  Peptide Sequence Number=SeqID_65327
atggcaagggaccgggaaagggacattgcgaaaaggatccttcccagcgaaggaaacgggccccgagccctcctactgatcaggggttcgaaggctggcccctcggaagggttcgacagccgccccagagcacgcagagtcagggatgaccctgggtacatccgttacatggtcgaggctcgggctacactcccgaggtaccctaggacatttccaagaccagcgggaacgatttgtaatggaatcccactggagggaggcaccgagccctcggaccctatcgaatgggtccagcgctgttcaccccgctccggcaactatgctagccaccagggaaagactgacaacagcaagtcacgacctcctagagtccagcctcgggcgcaacagggagctccgcctcgcccgaccctgggcctcggcctcagcctcggcctcgggagaaggactttgcctcgcccgaccctaggcctcagcctcaacctcggcctcgggagaaggtctccgcctcgcccgaccctgggcctcgacctcagcctcggccttggaggagtcgccgccttgcccgacctcggccctggctcaaggcacttctccgacggccacgttggtacctctacagggctcaaggcacttctctga

SEQ ID NO: 21953 - DNA, 423 bp, Zea mays
  Peptide Sequence Number=SeqID_65328
atgaggatcaggctcaggatgatgaagatgaagatcaagaggatgagccacctcaagaacaggccaatgatcaagggggagatgaagacaatgaagacaaggaagatgagcaagaaatacagggtcaaagaccgccacacccaagagtccatcaagcgattcaaagagatcaccccgtcaactctattcttggtgacattcataagggtggtggaggatgcactaagagatccggattgggtgctggcaatgcaagaggagctcaacaacttcacgagaaatgaggatggcaaacccatcaagacacccatgggaaccattaggtatctagacctcgacatgggagaccggatattatgctttccgtatgcatgtgtgcaaggttccaagccgatcctaaggaagttcaccttagggccgtaa

SEQ ID NO: 21954 - DNA, 180 bp, Zea mays
  Peptide Sequence Number=SeqID_65329
atggtctcgaatcatcactttttctgggaatcgatgcaaccagaaggtggtggcttacctgagggagggaagagtttattcgttcagccttacaactattggggtctggttgggtttggcttgcttaatttcgaacaccacgactttaccaaaaatgaggttcagtatcagagtggttag

SEQ ID NO: 21955 - DNA, 618 bp, Zea mays
  Peptide Sequence Number=SeqID_65330
atgggcaaaaaccggttgaaccggttttcaaaccggttgaaccggtttctaccagggggatcccggtccactgggctactcagccggacactcgaccggtttcaaaaccggttgagtagggacaaaaattggctcaaccgaaccaaaaagagagagagaatcgccagtccaaggatcaccattgaggaggaggaggatgaggagcgaagaagtgatgcgccaggtcagaggcaaagtgttcctctccagactgggccggaggaggagcactgcccgaagggtcctggggcggaggataggaggacgattgacccggatccccgtgatacgagggcgggacaaactgctccggatcatcaaactgttgaaaaaggtaccccatacgcctgctggtaccactcgttgacatctggaggaggagggtggagagcaatatttcggcacatggagaagaaagccgcaagcccgtgggccaaacgggcaccccatccccacggccacgacctcgaccacgaccacgaccacgtggtgtgggagatccgcggccagagaaagggcgcgaggcaccggcagcagcagcaggtaccaggtccagcaaaaggacccgcagaagtatga

SEQ ID NO: 21956 - DNA, 119 bp, Zea mays
  Peptide Sequence Number=SeqID_65331
atgaccaagcagaaaaggctagtgctcaagaagaggcataagcagggctcagcaccactatccagcaatcaaaaaccacatcggagcacaaaagatgaaagtaaagcttgttcctccat

SEQ ID NO: 21957 - DNA, 353 bp, Zea mays
  Peptide Sequence Number=SeqID_65332
atggcgctgaagcgcgcgaccccacacccggccatctggggcgagcgacatgccccgatgagtaggaagggcgcggcggccgccgcaaaaacccggggcgcgagcccgggcggagcggccgtcggtgcagatcttggtggtagtagcaaatattcaaatgagaactttgaaggccgaagaggagaaaggttccatgtgaacggcacttgcacatggccggaggtagggtccagcggccggaagagcaccgcacatcgcgcggtgtccggtgcgcccccggcggcccttgaaaatccggaggaccgaataccgtccacgcccggtcgtactcataaccgcatcaggtctccaag

SEQ ID NO: 21958 - DNA, 789 bp, Zea mays
  Peptide Sequence Number=SeqID_65333
gcgtgctccaactcgaacccttcacagaagatcagggtcggccagcggtgcggcccgtgagggcctcccgctcgtcagcttccttgcgcatctcaggccgttgcggcgcagcgccccgaggggcgcgccagaggcgcgcggataccgtccgcgccgacgacggctgccgggggcgcctagggcccccgggctttggccgccggcgcgggcgacaacagtccacgccccgagccgatcggcggaccagcaggagccgttccgcatacggccggtgcgcgtcgccagcccccatccgcttccctcccggcaatttcaagcactctttgactctcttttcaaagtccttttcatctttccctcgcggtacttgttcgctatcggtctctcgcctgtatttagccttggacggagtttaccgcccgatttgggctgcattcccaaacaacccgactcgttgacggcgcctcgtggtgcgacagggtccgggccggacggggctctcaccctcccaggcgtccctttccagagaacttgggcccggtccgtcgctgaggacgcctctccagactacaattcgggcggcgaggccgcccgattctcaagctgggctgctcccgggccgaatgtccggccgcgcgccgtgacgctgcaccgagaacaacttgatgtcgcccaccacgtgctgcgcccggcgtggttcgccggcagacgtgccctccgccagaaggcttcgggcgcaacttgcgttcaaaaactcgatggttcgcgggattctgcaattcacaccag

SEQ ID NO: 21959 - DNA, 288 bp, Zea mays
  Peptide Sequence Number=SeqID_65334
atggcgaacgggccaaaaacggatttttggccacggccgcgaaaacgggcacgtggaagggcacaggaccctcccgtggtcaccccgcgtgagacgtggaagttcgggtccacccgtgagggaaaacggaactccccgaagtcctgggagggggtatgcccctcaggtatagtagggggtagggaactcgtgcagccgaaacccgggcgaaacgctgctgaaaccatagcgtttccagcgtctcctccaggtctcctcggccgagccccgcaccccctcgcggcctag

SEQ ID NO: 21960 - DNA, 640 bp, Zea mays
  Peptide Sequence Number=SeqID_65335
atggcgaacgggccaaaaacggatttttggccacggccgcgaaaacgggcacgtggaagggcacaggaccctcccgtggtcaccccgcgtgagacgtggaagttcgggtccacccgtgagggaaaacggaactccccgaagtcctgggagggggtctcctcggccgagccccgcaccccctcgcggcctagccgtggccgggtcggcaccctaccgcgcccagctccggctggcgctgttggctgcctggccggccgtgaagtgcttgcgtgctgctacccgtcccacgggaagccgtgctcgatacacgttgccttcgtcgagctcacccccccgggggtgcggctcgtcgggctcgagagcgcccgcggcgtttgcctcgtgccgccgtcggcctatggcccggcggcaccgaggacacctcgctggcgcttttggtctcggatgtggctcacgctgaaggccggagacgcgttggcgtcacgcgcccaagaatcggtccgcccgaatgaacgacggccagcccggcacgacgcctccgcgcggaggccagcgctggcccgtctgcgaggacgtgctacctggttgatcctgccagtagtcatatgcttgtctcaaagattaagccatgcatgtgcaa

SEQ ID NO: 21961 - DNA, 347 bp, Zea mays
  Peptide Sequence Number=SeqID_65336
ccgggacgtggcggcagacggcgacgttaggaagtccggagacgccgggcgggggcctcgggaaagagttatcttttctgcttaacggcccgccaaccctggaatcggttcagccggaggtagggtccagcggccggaagagcaccgcacatcgcgcggtgtccggtgcgcccccggcggcccttgaaaatccggaggaccgaataccgtccacgcccggtcgtactcataaccgcatcaggtctccaagtgctctgaatgtcaaagtgaagaaattcaaccaagcgcgggtaaacggcgggagtaactatgactctcttaaggtagccaaatgcctcgtcatctaa

SEQ ID NO: 21962 - DNA, 483 bp, Zea mays
  Peptide Sequence Number=SeqID_65337
atggcgaacgggccaaaaacggatttttggccacggccgcgaaaacgggcacgtggaagggcacatgaccctcccgtggtcaccccgcgtgagacgtggaagttcgggtccacccgcagaactccccgaagtcctgggagggggtatgcccctcaggtctcctcggccgagccccgcaccccctcgcggcctagccgtggccggtcgggcaccctaccgcgcccagctccggctggcgctgttggctgcctggccggcccgtggttcggccgtgacgcagccacgaccggctatggctggctaccgccggccagacgccctggacgagtggctgcaccgtgggatggcccgttgctcgatgcgttttccgtttctcccgcgctcggtggaccttcggtcgccgtcctcgcaagcagacccgccgcgcccagcgcggagggatgctttggatggcccgaccgtagcggctacgctggcgcatga

SEQ ID NO: 21963 - DNA, 705 bp, Zea mays
  Peptide Sequence Number=SeqID_65338
atgaagaacgtagcaaaatgcgatacctggtgtgaattgcagaatcccgcgaaccatcgagtttttgaacgcaagttgcgcccgaagccttctggcggagggcacgtctgcctgggcgtcatgccaaaagacactcccaacacccccccgcggggcgagggacgtggcgtctggccccccgcgccgcagggcgaggtgggccgaagcaggggctgccggcgaaccgcgccgggcgcagcacgtggtgggcgacatcaagttgttctcggtgcagcgtcccggcgcgcggccggccattcggccctaaggacccatcgagcgaccgagcttgccctcggaccgcgaccccagcccaaatcgggcggtaaaactccgtccaaggctaaatacaggcgagagaccgatagcgaacaagtaccgcgagggaaagatgaaaaggactttgaaaagagagtcaaagagtgcttgaaattgccgggagggaagcggatgggggctggcgacgcgcaccggccgtatgcggaacggctcctgctggtccgccgatcggctcggggcgtggaccgttgtcgcccgcgccggcggccaaagcccgggggccctaggcgcccccggcagccgtcgtcggcgcggacgaaacctgagatgcgcaaggaagctgacgagcgggaggccctcacgggccgcaccgctggccgaccctga

SEQ ID NO: 21964 - DNA, 159 bp, Zea mays
  Peptide Sequence Number=SeqID_65339
atggcgcaggggcggaaaccgaggttcgggcatggccccggaaataagctaagtccaagcgtgtggaaagacaccgaagggcaaggtggaacggagggaaaacgggaggaggcgcgcggcgacgggcggcagggctgttcggccttgcgtctgggctga

SEQ ID NO: 21965 - DNA, 216 bp, Zea mays
  Peptide Sequence Number=SeqID_65340
atggctgttcggccttgcgtttgggccgaaaacgaggggttcgcccatggcgcaggggcggaaaaccgagggcatggcggaacggagggaaaacggcacggaggcgcaaggcgacgggcggcatggctgttcggccttgcgtctgggccgaaaatgaggggttcgcccatggcgcacgggccgaaaactgaggcccgggcacgaccccgaaaataa

SEQ ID NO: 21966 - DNA, 558 bp, Zea mays
  Peptide Sequence Number=SeqID_65341
atgaagaacgtagcaaaatgcgatacctggtgtgaattgcagaatcccgcgaaccatcgagtttttgaacgcaagattgcgcccgaagccttctggcggagggcacgtctgcctgggcgtcacgccaaaagacactcccaacaccccccccgcggggcgagggaacgtggcgtctggccccccgcgccgcagggcgaggtgggccgaaagcaggggctgtcggcgaaccgcgccgggcgcagcacgtggtgggcgacatcaagttgttctcggtgcagcgtcacggcgcgcggccggacattcggccctaaggacccatcgagcgaccgagcttgccctcggaccgcgaccccagggttcgagttggagcacgcctgtcgggacccgaaagatggtgaactatgcctgagcggagcgaagccagaggaaactctggtggaggctcgaagcgatactgacgatagctggagcccacacgagttctattgggtaaagccaatgattagaggcatcgggggcgcaacgccctcgacctattctcaaactttaaataggtag

SEQ ID NO: 21967 - DNA, 780 bp, Zea mays
  Peptide Sequence Number=SeqID_65342
atgaagaacgtagcaaaatgcgatacctggtgtgaattgcagaatcccgcgaaccatcgagtttttgaacgcaagttgcgcccgaagccttctggcggagggcacgtctgcctgggcgtcacgccaaaagacactcccaacacccccccgcggggcgagggacgtggcgtctggccccccgcgccgcagggcgaggtgggccgaagcaggggctgtcggcgaaccgcgccgggcgcagcacgtggtgggcgacatcaagttgttctcggtgcagcgtcacggcgcgcggccggacattcggccctaaggacccatcgagcgaccgagcttgccctcggaccgcgaccccagcccaaatcgggcggtaaactccgtccaaggctaaatacaggcgagagacagatagcgaacaagtaccgcgagggaaagatgaaaaggactttgaaaagagagtcaaagagtgctttgaaattgccgggagggaagcggatgggggctggcgacgcgcaccgggccgtatgtggaacggctcctgctgccgtcgtcggcgcggacggtatccgcgcgcctctggcgccccctcgggggcgctgcgccgcaacggcctgcgagctccccatccgacccgtctttgaaacacggacaaaggagtctgacatgcgtgcgaattcgacggggttcgagttggagcacgcctgtcgggacccgaaagatggtgaactatgcctgagcggggcgaagccagaggaaactctggtggaggctcgaagcgatactgac

SEQ ID NO: 21968 - DNA, 372 bp, Zea mays
  Peptide Sequence Number=SeqID_65343
gggcgaaggtggggcccgaaagccaggggcctgcccgggcgaaacccgcccccgggcgccagccccgtggtggggcgaacattcaagcccaaatcgggcggtaaactccgtccaaggctaaatacaggcgagagaccgatagcgaacaagtaccgcgagggaaaagatgaaaaggactttgaaaagagagtcaaagagtgcttgaaattgccgggagggaagcggatgggggctggcgacgcgcaccggccgtatgcggaacggctcctgctggtccgccgatcggctcggggcgtggaccgttgtcgcccgcgccggcggccaaagcccgggggccctaggcgcccccggcagccgtcgtcggcgcggacg

SEQ ID NO: 21969 - DNA, 714 bp, Zea mays
  Peptide Sequence Number=SeqID_65344
atgtcagactccttggtccgtgtttcaagacgggtcggatggggagctcgcaggccgttgcggcgcagcgccccgaggggcgcgccagaggcgcgcggataccgtccgcgccgacgacggctgccgggggcgcctagggcccccgggctttggccgccggcgcgggcgacaacggtccacgccccgagccgatcggcggaccagcaggagccgttccacatacggccggtgcgcgtcgccagcccccatccgcttccctcccggcaatttcaagcactctttgactctcttttcaaagtccttttcatctttccctcgcggtacttgttcgctatcggtctctcgcctgtatttagccttggacggagtttaccgcccgatttgggctgcattcccaaacaacccgactcgttgacggcgcctcgtggtgcgacagggtccgggccggacggggctctcaccctcccaggcgtccctttccagagaacttgggcccggtccgtcgctgaggacgcctctccagactacaattcgggcggcgaggccgcccgattctcaagctgggctgctcccggttcgctcgccgttactaggggaatcctcattacaaatataccttcggtcctaagagaaggtgaaaagtacgagcgtgatgccaagagcaaatgccaagtcagcgtgtccagtacgggagtactgttcatctatttatag

SEQ ID NO: 21970 - DNA, 444 bp, Zea mays
  Peptide Sequence Number=SeqID_65345
atggcgaacgggccaaaaacggatttttggccacggccgcgaaaacgggcacgtggaagggcacaggaccctcccgtggtcaccccgcgtgagacgtggaagttcgggtccacccgacccccgctgccgtgcggccgactcccggcgcccgtgtcccatcgctcgtgcgggcatcctgtgcctgctgcgttgagaagtgcttgcgtgctgctacccgtcccacgggaagccgtgctcgatacacgttgccttcgtcgagctcaccccccgggggtgcggctcgtcggctcgagagcgcccgcggcgtttgcctcgtgccgccgtcggcctatggccggcggcaccgaggacacctcgctggcgcttttggtctcggatgtggctcacgctgaaggtcggagacgcgttggcgtcacgcgcccaagaatcggtccgcccgaatga

SEQ ID NO: 21971 - DNA, 591 bp, Zea mays
  Peptide Sequence Number=SeqID_65346
atgaagaacgtagcaaaatgtgatacctggtgtgaattgcagaatcccgcgaaccatcgagtttttgaacgcaagttgcgcccgaagccttctggcggagggcacgtctgcctgggcgtcacgccaaaagacactcccaacacccccccgcggggcgagggacgtggcgtctggccccccgcgccgcagggcgaggtgggccgaagcaggggctgccggcgaaccgcgccgggcgcagcacgtgaggcgtcctcagcgacggaccgggcccaagttctctggaaagggacgcctgggagggtgagagccccgtccggcccggaccctgtcgcaccacgaggcgccgtcaacgagtcgggttgtttgggaatgcagcccaaatcgggcgggttcgagttggagcacgcctgtcgggacccgaaagatggtgaactatgcctgagcagggcgaagccagaggaaactctggtggaggctcgaagcgatactgacgatagctggagcccacacgagttctatcgggtaaagccaatgattagaggcatcgggggcgcaacgccctcgacctattctcaaactttaaataggtag

SEQ ID NO: 21972 - DNA, 940 bp, Zea mays
  Peptide Sequence Number=SeqID_65347
gcgtgctccaactcgaacccttcacagaagatcagggtcggccagcggtgcggcccgtgagggcctcccgctcgtcagcttccttgcgcatctcaggccgttgcggcgcagcgccccgaggggcgcgccagaggcgcgcggataccgtccgcgccgacgacggctgccgggggcgcctagggcccccgggctttggccgccggcgcgggcgacaacggtccacgccccgagccgatcggcggaccagcaggagccgttccgcatacggccggtgcgcgtcgccagcccccatccgcttccctcccggcaatttcaagcactctttgactctcttttcaaagtccttttcatctttccctcgcggtacttgttcgctatcggtctctcgcctgtatttagccttggacggagtttaccgcccgatttgggctgcattcccaaacaacccgactcgttgacggcgcctcgtggtgcgacagggtccgggccggacggggctctcaccctcccaggcgtccctttccagagaacttgggcccggtccgtcgctgaggacgcctctccagactacaattcgggcggcgaggccgcccgattctcaagctgggctgctcccgggccgaatgtccggccgcgcgccgtgacgctgcaccgagaacaacttgatgtcgcccaccacgtgctgcgcccggcgcggcagacgtgccctccgccagaaggcttcgggcgcaacttgcgttcaaaaactcgatggttcgcgggattctgcaattcacaccaggcgtgctccaactcgaacccttcacagaagatcagggtcggccagcggtgcgggccccgtgagggcctcccgctcgccgttgcggcgcagcgccccgaggggcgcgccagaggcgcgcggataccgtccgcgccgacgacggctgccgggggcgcctag

SEQ ID NO: 21973 - DNA, 1059 bp, Zea mays
  Peptide Sequence Number=SeqID_65348
atggcgaacgggccaaaaacggatttttggccacggccgcgaaaacgggcacgtggaagggcacaggaccctcccgtggtcaccccgcgtgagacgtggaagttcgggtccacccgtgagggaaaacggaactccccgaagtcctgggagggggtctcctcggccgagccccgcaccccctcgcggcctagccgtggccggtcggcaccctaccgcgcccagctccggctggcgctgttggctgcctggccggccgtgaagtgcttgcgtgctgctacccgtcccacgggaagccgtgctcgatacacgttgccttcgtcgagctcaccccccggggtgcggctcgtcggctcgagagcgcccgcggcgtttgcctcgtgccgccgtcggcctatggccggcggcaccgaggacacctcgctggcgcttttggtctcggatgtggctcacgctgaaggccggagacgcgttggcgtcacgcgcccaagaatcggtccgcccgaacgaacgacgtccagcccggcacgacgcctccgcgcggaggccggcgctggcccgtctgcgaggacgtgctacctggttgatcctgccagtagtcatatgcttgtctcaaagattaagccatgcatgtgcaacgtcacggcgcgcggccggacattcggccctaaggacccatcgagcgaccgagcttgccctcggaccgcgaccccagaggcgtcctcagcgacggaccgggcccaagttctctggaaagggacgcctgggagggtgagagccccgtccggcccggaccctgtcgcaccacgaggcgccgtcaacgagtcgggttgtttgggaatgcagcccaaatcgggcgggttcgagttggagcacgcctgtcgggacccgaaagatggtgaactatgcctgagcggggcgaagccagaggaaactctggtggaggctcgaagcgatactgacgatagctggagcccacacgagttctatcgggtaaagccaatgattagaggcatcgggggcgcaacgccctcgacctattctcaaactttaaataggtag

SEQ ID NO: 21974 - DNA, 234 bp, Zea mays
  Peptide Sequence Number=SeqID_65349
atggcgaacgggccaaaaacggatttttggccacggccgcgaaaacgggcacgtggaagggcacaggaccctcccgtggtcaccccgcgtgagacgtggaagttcgggtgcacccgtctcctcggccgagccccgcacccccttcgcgggcctagccgtggccggtcggcaccctaccgcgcccagctccggctggcgctgttggctgcctggccggccgtggttcggccgtga

SEQ ID NO: 21975 - DNA, 330 bp, Zea mays
  Peptide Sequence Number=SeqID_65350
atggcgaccggggcggccatgggcttgttcggcccttgcgttttggggccgaaaaacgagggggttccgccccattggcggcagggggcgggaaaacccgaggtttcggggcatggcccccggaaaataaagttaagtcccaagcgtgtggaaaagaccccgaaagggcacagtggaacggagggaaaacgacacggaggcacgcggcgacgggcggcatggctgttcggccttgcgtttgggctgaaaacgaggcgttcgccatgtcgcgcgggccgaaaacaacggttcggccacggcctcgaaaataagctaagtccaagcgcgtag

SEQ ID NO: 21976 - DNA, 234 bp, Zea mays
  Peptide Sequence Number=SeqID_65351
atggcgaacgggccaaaaacggatttttggccacggccgcgaaaacgggcacgtggaagggcacaggaccctcccgtggtcaccccgcgtgagacgtggaagttcgggtccacccgtctcctcgggccgagccccgcaccccctcgcgggctacccgtggggggccggctccctaaccgcgcccagctcgggctggcgctgttgtttgcctggccggccgtggttcaaccgtga

SEQ ID NO: 21977 - DNA, 510 bp, Zea mays
  Peptide Sequence Number=SeqID_65352
gtatgggactttaggttgcgcaaatttgtttctgagaagcgaaaattattatctcgtgaagcttctgtcttctcacgtcctaatgtatcattactacttacaccttcatctaaaggcacttgccgtttctgggacgctaagaaattcagatgttgctcactgctttcattgaaaatgtcatgtgctacattgaaaatgtcatgtgaaatgctcactgtttttctattgtttggccaaaaaggcatcccctacctaaacacctacgacggccgcaccatccgctaccccgacccgctcatcaaggctaacgacaccatcaagatcgatctggagaccaacaagatcatggacttcatcaagtttgacgtcggcaacgtggtcatggtgactggcgggaggaacaccaggcgtgtaggagtcatcaagaacagggagaagcacaagggcagctttgagaccattatgtattttagtttagatttagagtacacttatgtatgcgttgtttga

SEQ ID NO: 21978 - DNA, 588 bp, Zea mays
  Peptide Sequence Number=SeqID_65353
atgccgccaccaaaaaattacgctggtgtttacctaaccccacttgactttcattcaaacacaataaaaactgtgatcacctcgttccatcccttattatacatccgaccaaacataccatccccggttatcctcgccgagaaatcacttgcagtgcaagtaaacacgaccactatgaaactcgtactgggagcgacgggaaggggacaaaagaaaagctcagtttacttcaatagtaaacttcatccgtggaaccctggtcccggtcgccgtaagatcacacagtacagtaaccgctttcccgtgaaccttcatccacgctcaatgtgcatctccatgtttggtaccaaggctcctccgtctaggtctagggaacaggatgaagcagaactgaaggcgacgacgcccaggtccatccagtccaggggccaaaaaggctcagagcaggtccccaagaccggtcgctctcatgttgttcgccttcacgggctcgtgccctcagcggtccatcatgcacccaacgaccagattatcatgcctggtaacgatgggaaggcgtctaccagcgatgttggcgggaaggcgtga

SEQ ID NO: 21979 - DNA, 288 bp, Zea mays
  Peptide Sequence Number=SeqID_65354
atggaccaaggcaatgaggatgcacacctcaaagaagacataaaaagatgcatagaagtccagactcaagacaagaagcccgaagaaatcagtgaagaaatccaagaaaggactgtcagccagcgccaggtggcgcaccggacatcggtgtccgatcctactaaagcgtcttctggacctcccccgaaaggagacgacgaaattaaaaagatggctgaagctatcatggatgaagttgttaatcggctcctgaacgaggctgcagaagtcgttttgagagaagattaa

SEQ ID NO: 21980 - DNA, 471 bp, Zea mays
  Peptide Sequence Number=SeqID_65355
atggacgggaaacacacgctacaagacaatacgatcctgcaggctcgggtcttaacactggaagggagcagcagcaccctcggcatcgacaacaccttcggcgagggtcttctccgggaatccggcccgagcaggcggctcggccggtcaccccggggcctcggccagctgtcctccaaggacgttagcccgatccgaggcctcggctggtcaattccggcgtcggtcccgctaacggacgactcggccaggctccggccaaccaggttttcttttcgagccaactctgcctctgttcatgccgacaccgctacccctggcctcggctcatcggagagcggccgaggggttcctttaactaagctagagaagcctcggacaacaaggccgactgagccgagggactcctacgcctccgggatacggatacctcactcgtcacctttacacggggcgactcacgcttggtga

SEQ ID NO: 21981 - DNA, 237 bp, Zea mays
  Peptide Sequence Number=SeqID_65356
atgaccacgtcagtaaagggaccgggaaagggggataccccgaaaaggatccttccccgtgaaggaaccaggctccgagcctccctactgatcagaggttcgaaggctggccccccggaagggttcgacagcctcgcgtgggctctacacccactactggtcagaggttcgaaggccggcccctcggaagggttccacggccgcctcaggctgctcgggctccgcgcccattactga

SEQ ID NO: 21982 - DNA, 378 bp, Zea mays
  Peptide Sequence Number=SeqID_65357
atgtggaagctcctccgaagccgaggtcgagtctgtcttccgtggccgaggtcgagcccgagcccctgggtcgggcgaggcggagaccgtcggctgaggtcggggcgtagtccgagccctgggggtcgggcggagcggagttcgtcgtcttctggggctgagcccaagtccgagccctgggtcgggcggtgcggagttcgtcgtcttccgggacttagcccgagtccgagccctgggtcgggcgaagcggagcttcctatggtgccttcgaccgggcctgactacctgtcagcctcactctgtcgagtggcaccgcagtcggagcggcgcaggcggcgctgtctttctgtcaggccggtcagtggagcggcgaagtga

SEQ ID NO: 21983 - DNA, 339 bp, Zea mays
  Peptide Sequence Number=SeqID_65358
atggagcacatgggcgacgcggttgaggtccctatcacaaacaagaagattctaatggcgaagcggaccatcaaagataggggctatatcaatgaggcgttgaggattaggaagggatacctgggggtccctgagccgacgagtgaatgtcgccgcgtgccccagcccagatgggtcgagcgcgagaccgagcgcgaaggggggaaagcgaggcggccggagaccggcgtgagagaggtgggaatcccgcggccttcgtgttcgtcccgcgcccaggtcgggcgtaaggagaggatccaggtgtacaacagagggtttagcagagtgctacgtgtctag

SEQ ID NO: 21984 - DNA, 213 bp, Zea mays
  Peptide Sequence Number=SeqID_65359
atggctttgggagatagggttcaagagaggtctagggttttccctcctcttgcccaaggtaaaaacgaagaagaagtcgaagtgaccgaagagaagacaccaccaccttcggaatctcaggccgaaaattgtttctactttgatatttgcggatctgagcctgactcacctactaacgaaggcaagccccggtgcatttgccaccttccttga

SEQ ID NO: 21985 - DNA, 360 bp, Zea mays
  Peptide Sequence Number=SeqID_65360
atgtcgactgggaaacgccacctagatcagatcgaactcctcagtgttaggcggctcctcctgaaccacctgctcttctcctgtgggggggggtgtgagacagcaaggaggttgtaccctttacccacaagtcatgttacccatctgccaaggggtcatgaatcccatacacctctacctaggaagcgcggcagggcaacactacgaggcctttacaaagttccactagcttccgaaaacccgctacagtttatgggaagatccagtacagggttcctggctgaccgccatcgcagcaaaatcaaccagggacctccccgcactgacctctcccctactgcccttgcccctttcgggtaa

SEQ ID NO: 21986 - DNA, 1242 bp, Zea mays
  Peptide Sequence Number=SeqID_65361
atggccaaccggcggacgggccccctatccgtgctggtggccaccgtgtgcctgctcgtgctcgtggcaacgaacgcggaggccagcaggcactcgcggcttgtccccgcggcgttcgtgttcggcgactccacggtggacgtgggcaacaacaactgcctcaacgtcaccgccgcggccagagccaactacccgcagtacggcatcgacttccccgggtccaagccgaccgggcggttcagtaacggcttcaacacggcagacctgctagctcgaggcctcggcttcaccaagagcccgccggcttacctctccctgtcggagaagggcatccggtctcacatgtgcaagggcatcagcttcgcgtcggcagggtccgggctcttggactcgaccggcagagtactgtttggcgaggtgatccccatgtccgtccagctggagcacttctcgggggttgttgaccgcatggtcaagctctcgggtcagaggaagaccgccgctctcctccgcaagtccatctttttcatcagcaccggcagcaacgacatgttcgagtactccgcgtcgtcccgtgccgacgacgacgacgacgaagcgttcttgggtgccctggtcgatgcctacaagcactacatcatggtgcgtactacgtactgctcactacaagccgcactcgtcatcaatcgccagatcctcctcaggccggctagaataaattctgcttctgcactttcacaaacctgcacgcagtcgctgtacgaaatgggcgcgaggaagttcagcgtcatcagcatcccgccgctggggtgcatcccgtcgcagaggctgcgccggctgaagcagctgggaacgcagggctgcttcgacccgctcaacgacctgtcgctcagctcctacccgatgctcgcggggatgctgcagcagctcagcgaccagctgcccggcatggcctactccctcgccgacgcctacgcgatggtctccttcgtcttccaaaacccgcggaccgaggcctggaacttcacggacctggaggccgcgtgctgcggcggtggcccgttcggggcggcgctcgcgtgcaacgagacggcgccggtgtgcgccgaccgcgacgagtacctgttctgggacgccaaccatccctcgcaggccgtctcggccatcgccgcgcagacgatcttcgccggcaaccagaccttcgtcaaccccgtcaacgtcagggagctcgcgatgctgtga

SEQ ID NO: 21987 - DNA, 366 bp, Zea mays
  Peptide Sequence Number=SeqID_65362
atgacttcccacggatcctcagacgacggaaacacactgtcccacactgaccggcttgcacgagagggctttccccgcattttgtgggaggtggagcagctatccactgatatccaagagttggaggaattggtagggaccagagagaacaccatcgaggttctcgaggatcagcttattaacacccagcagcagcttgccgaggctaatgagcacttggatatgcatcaccaggagatccagaatttggaggccaacgaggacgtcgacatcgagggaggagatgagcctgcctctagtgtggacactgctggctcaggaagaccaccttcccccgagtcgagtgttgcctcgttcgctcactag

SEQ ID NO: 21988 - DNA, 117 bp, Zea mays
  Peptide Sequence Number=SeqID_65363
atggcccctagttccatctccctgtccagggaaatgccatcagtcctcgcgatttggaaaggcgggatgatttatttgtttgagcttctcggtgtgaaaaaacagaagctgaaataa

SEQ ID NO: 21989 - DNA, 1029 bp, Zea mays
  Peptide Sequence Number=SeqID_65364
atggaggaaggaaatggggataacgaaataaacgaacgcagaaaggaaccatgggatttcagggcgtcgtttaggcattgggttagtttggttcagttgcatcttcacgctatagactttgtgactggaaagaccacccaatcagttcaatgcaggatcacactgtctccatttcctttctttgcgcaaaatttggctgagctagcgtcgagcataacttcatgcttggatcgtatgcttattgttcctcaatttcacgcacagtcatttttctctcccaggaaagatgaatctgtgatttccacagatggtggaaatgaggagacagacactgacagcctccatgttgctagaggattgtctcatcctgggctttcgtcaagtttatccaataaggcatcagtggtcccaacccctttgcttccttctggacaatctgatctccggttcaatcgtcttcgaccctcaattgatgaaagtgattgcaaatacaaaagattatttggctgctatgttgctcgtgaggctgtgatcgatgaggaatactggatcgctgcatggttgagagcagaagatcagtatgaaaatgagtcaggcaatcgctatgttgaaagctttaaaagaaagtttgcatcaaaggaattccatgcattaaagaagagatgcaacacacaacatagagagaagtatatctgtcttgtcgcggtaaagaacgatgacatcaggcgaactgtcctgaatagtgttgttggtaccttagatgtatgtgtaaggcatcctctatatggggagaaatttcctgagaagttatatctagaagttattcacaggagcctggaaaaccgtctcttcactgtcgaatttatcagcctgatcagccaaaatttgggtgctgaaaatatttacattcatgtgcataaagataacttaccagcatggaggctctatgatcagattggattcaagatcgttgatcaggatgacgattgtcgttcatcagacctgtgcttactctccttcagttcataa

SEQ ID NO: 21990 - DNA, 309 bp, Zea mays
  Peptide Sequence Number=SeqID_65365
atgtcggcgcgtgaccgcgagacggccgaggcgctggtgcgcgaagacaaaggcttccactccgtaactcatccttcgccgtcgcttcgcgcatctctccatctttttggggagagttcaaagcaaaaggacttcgtctttgattattccgaacaggagaagctttttggaaaaacagaccaagcgcggaccgtccgggcccttgcggcggaccgtccgcaacaccaggatgaccctcggacagaaccaatgcaaaaatccgagtctgcactacggaccgtccggaggaaaagcacggaccgtctgtga

SEQ ID NO: 21991 - DNA, 711 bp, Zea mays
  Peptide Sequence Number=SeqID_65366
atggagaggtggagggacaaggacaagggagcggcggctccggcgccagggagggcgcggcggtacggcgaccagccgtccttctcgtccacgctcctcaacgccatatacaagtccatggacgagcctgacgacggggtaacatcgtcctcctcaaccgccgccaagaagcagaaccaggacctgcgccacagctgctactactacaaggcgtcgctggcggcggggagctaccgcggcagcagcagggcggcggcgccccgggggccacaggccgccaccacgtcgagctcctccgatcagtgctccagctacggcgggttctcgtcgtcggaggcggagtcgtcgcagcaccggcgcctgcggcccatacgcacgagcctcgccaccaccgcggtggccgtggccgcgcccgcactcgcgccggagaaaaaaaaggccggcgtcagcatccgcgccaggctgagggacctccgccgcaagccggcgtcccccggccccggcgcgcggctggcggggttcctcaacgccatcttcagcggcaggcgcgcgccgccgtcggcgtcctcctgttttttttcctgcctcagcaagacgccttccactcggggtctttcaaagctgaacgcgcggcttcatgatagcgacggtcccggcaaccgtcgccgatcactgtccctcttcttggcaatgtacttttcgtttttttga

SEQ ID NO: 21992 - DNA, 169 bp, Zea mays
  Peptide Sequence Number=SeqID_65367
atggcgtcggcgtcgcgtgcgctcctcctctcccgtgcgctccaggccggcgcgtctcgccgcgtccccgccctcctgcgcccggtcgctgcggccgcgagcctccttcagcgatgtcgtcctgctaagttcgggtacatgcaccccatcaatataacctggcgaaaag

SEQ ID NO: 21993 - DNA, 327 bp, Zea mays
  Peptide Sequence Number=SeqID_65368
atgggggacccttcggtcagcctcccattgtcgtcgctgcgcttaacctatgggtgcgcctaccgacgctgctatgtggggcccactggtcagtgttatcccgcgtggaactcatcttcaaccttccgagaataccacggacgccctgaccttgcgttcacctcggcgggtggtttcaaccaccattccgctttcctctctcgcggcgcggactctacagtccataaggacaagttgcggttcaccatggggcgtgattggtgtcccggttatggcatcttcgtcgtggccctgtacagcgccaccgtggtccggtgctggagatag

SEQ ID NO: 21994 - DNA, 981 bp, Zea mays
  Peptide Sequence Number=SeqID_65369
atggcccgtgtcgcgtcgctgctgctcaccgtcatcgtggctgcggcggcgtcgctgctgctgctgcttgcgccgtcggcggcggagctggcgcgggtggagcacccgcccaagaacgatggctcgctcgccatccttgcagttggcgactgggggcgccgggggcagttcaaccagaccctcgtggcccagcagatgggagtggtgggggagaagttggacatcgacttcgtcatctccacgggcgacaacatctacgacgacggcatcgccaacaccagcgaccccctcttcaaggagtgcttcaccaacatctacaccgcgcagagcctccagacgccttggtacatcgtcctcggcaaccatgactacacgggcaacgcgctggcgcagcaagaccccgccatccgcgaagtcgacagccggtacctcaacctcgccaagtccttcatcgtcaactcaggaatcgcggacttcttcctcctggacacgtcgccgttctacctcaagtactggaacagcagcaagtacgactggagagacgtcgctcctcgcgacacctacatccaaaacctcctcgatgatttggacgacgccctggtccaatccgaggcgccctggaagattgtcgtcggccaccaccccatcagcagcggctgcgagcatgggaacaccactgagctccaggagctcctcagaccaatcctcgaggcatgcatgcatttcatgacgagcggcggcgggtccaaggcatgggcgggcaagttcaagaccacgtccgacaagatagagttcatctacgacggccagggattcatgtccatgcagctgagcagcacggaggcgcacctcgtcttctacgacgtcgccggcaatgtcctgcacagctatgacagcaccaaaaacgaagaagaggacgatggctggccagctggacaacaagcagctgtgaggggatcaattgatcgaggcaacttataa

SEQ ID NO: 21995 - DNA, 225 bp, Zea mays
  Peptide Sequence Number=SeqID_65370
atgaggtccgaggctcgtggcggcggaagtagtgctggcacggtggtgctcgacggcgcctcgatggagcaaaccaattctcgtgctaaagaccttgacatgaagcctaactcgtctctaaatgctgctagggaaaaggttctcttctcagacatcaatgcttatgaggtggaccttggtaccgatgatgagaagcactgcttctgccgtgagtcgacttgttag

SEQ ID NO: 21996 - DNA, 342 bp, Zea mays
  Peptide Sequence Number=SeqID_65371
atggatgggtctgttgtcgaggggatttgggtgatagaggggcttaaacagggagccgaggatgactcccttcccaaccctgagtgcgctgtcccagagcttgcttgtcgtgttcctgtgccagtggtgaccgcagccacctatgttcacctcaccgtggccaagacactcgaagcaattacacacaaagtgaagctcaccgaagtgagttctctaactctactattgcctgatgtttggaatggggtcgcgccgccgtggatcggcgttgaagacaatcctaccgtagacccttcaactagcactttctctaaccgattcctcgcaagcattgaagactag

SEQ ID NO: 21997 - DNA, 128 bp, Zea mays
  Peptide Sequence Number=SeqID_65372
atggggcatgacaccaaacatgccaccgccaccacaatgcagccagtttgcatccacaccagctccgggactagagactcaatagttcaacacccctctgacacatatacctgcaccctgaagatatg

SEQ ID NO: 21998 - DNA, 336 bp, Zea mays
  Peptide Sequence Number=SeqID_65373
atggggcccccattcgttgatcaaacaagcacgcagactgttctatctcagtcacaggcgcgtgggacccccagtccaagttctctcccacctcgcgtggcgccgaactcagaaccggggactccactgctcgcgcagatctcgccgagctgttgcccggggccatcagtcccctccggacgggcatataagtaccgatgccccgcgcccctgaagcacttgaatgccacctgggtggcggacgccatcgtcgacattgggaggctatctgcctccattgagactctgttctacgctgtcgttccggtcccgacatgtggtgtgggagcttcataa

SEQ ID NO: 21999 - DNA, 249 bp, Zea mays
  Peptide Sequence Number=SeqID_65374
atggcgactgccgcggaccacggtgcgacgtggttcctcgtctccggtgaggaattcccaggcttcagaggcattggtggctgcgatcagcagctagatgcgacaccgtgcgtggaccctctcaagaatgacgcggaccactgcacgaccgcgacatgcgccttgcaatgcctgtccgccaagcacaagaccaagtctgcctactgcaagcatgagggcagcaaatacgagtgctgctgcccgccatga

SEQ ID NO: 22000 - DNA, 201 bp, Zea mays
  Peptide Sequence Number=SeqID_65375
atggaggcagaggtcaacctcaagggccacgagacaccacatacttggatttttctgaaacccggccaccgctttttgttaaagctggagaacctctggaagcagatgaatgggcgttcagggaacattatgttccggaaggggttctacgatgaagctggaggagttcatacgtttaaaacaaggggggagactcagtaa

SEQ ID NO: 22001 - DNA, 606 bp, Zea mays
  Peptide Sequence Number=SeqID_65376
atgatgctgaagaaaggggtgtctaactcggtggggtctttgagtgcaacccccaagcccaagaatcactggatcgacgaggagcggttacttgcccggatggtcgaagtggagccattgatccgctcggctgaagcccctgcagttccgcagggtatggcacatatccttatgatactggcactgggcatcgaggatgtcgtccagtgtccgctcgcctccacggggtgcagcttgggcatgagatacgggtggtccggcggcgtggacctcttcacggggcctcttctcccaacgattgccgggttgctggtttgcatcgcgccgcggtgctggtggcatgggttttgctcccccgatgaggtcctaagcccgctcatcagcggtgatgtagaggtccgcttcccggaacagctgctcggaggtggtcggcgctttctgcagtatggctcggacgaaggccgagtcattagacccccggtagaagtcctcaatcactgtcgcattagtgacttcggggatatggtttctcatggtatgaaacctctagaggggcccgagcggcggttgtatagacggccaaccagcctcctgggtcctgcttag

SEQ ID NO: 22002 - DNA, 390 bp, Zea mays
  Peptide Sequence Number=SeqID_65377
atgagcaggtcgaacttcttgctcatggcgcgcaccacggacgccgtgccctccgcgttctccaccgtcttctccacgtacaccaccccgctcgttgtccctgtgcctgctccagaactcctgcagcagctcctcgtccctcgcctcgtcgcgcccgcccatcccaacgcagtttcggagcttgaactgcaccaccgtcagcgacatggtcccggtctccggcatccgcgccacgtacgccagcgcctcgcggtcgtcggcgccacccagaaagtagagcgccgcccgctggagcaggcacatcgccgatgggggtgggggaagggatgggggcggcggcgcgattgcatcggtgggagggaagatgcgaggggtttggctgatttttga

SEQ ID NO: 22003 - DNA, 186 bp, Zea mays
  Peptide Sequence Number=SeqID_65378
atgggcgcgacgcgcagcctcgccttcctcctctactcggatttcactgcgaagctgtcgaacttcgggctcaccaagaatgggccctccgcgtggatgtcgcacgtcacggcccgggtcatggtctcctatggctacgcggcgccggagtacgttgccacagttactgtttccatcagcgtttaa

SEQ ID NO: 22004 - DNA, 825 bp, Zea mays
  Peptide Sequence Number=SeqID_65379
atgtcttcgcactccatgtatcgcgtccttccacctttcgagcccccggatggggagtgctcgcgtcgctttcgtcttgctgtcgttggaggaacgcaacttcgtggaagttggtacctttcagccatcgttcggcttcaaggattttcatcaggcagcccagctgcatcccctcgccggtggtcacagaagacggtgaccaccagttcgatggtggggagaagcgagccggactgcgacctcagtcccgccctcagcttcaaggatcttcatcatccttgctggggcagagagcgaggcgagccggggcctgccttcgcgtgggctggcgtcccgcctcttccagcttctggggtggaaaccatcctgcagctctgcagaggaggcgtcctccagccatgccggggaaggcgaactgttgctgcccagctagggtgcaacattccgtcctctgtcctcgctttcgtggtggggacgggagtgaggacctgccggtgcgctttggagtggctggcgcccgctggtgcggtgttggtggacgccgccgtcggtgctgacgctgtggcagctggagaaagcttctccgccgacaagtccgtcaacgctacccgcggaccgacctccggctctttggctttaatgtctggttcgcgtcccttgagtggggatgcgaacgagagccttccggcagcagcattcgtcctgggaccatcgctgctgctgcagaggtcgccggcgagtcaccaagagtttgtcgccccgcaggccctccaatgtggggggttgttcgtacctgcgggggtggaaccggagttccgtttgtaa

SEQ ID NO: 22005 - DNA, 1170 bp, Zea mays
  Peptide Sequence Number=SeqID_65380
atggttgccatccaaaggggtcaccatccttttaaagacaactctccccacttgcgtcctcagccggcgtggactgagtcttctccaacatgctccaagatcctccccctacgacacgggggctgggtcccgcgcgtcatgcaagctggcccaggacagaaggagccaaaaccgccacgcgcggagcgcacaactgcccagcggttacaagcactcctccacttttgcccagaccagcgggtgaaagggcggaccgccatgcaggcggcatgcaaccgcactaagggggcgcaccctttcgacttcgacgcgtccagcttggaggtccaggcccacacgtcatgcgggcggaagcagcagtcaagtcgtcagcaagctcacggcccctcctgggacagcgagagaaccctctcccacggcgtgaagacgaagcgcccgtgttccgttcctcgaacggctcgcgcacgcacaacggctgccccgcgaaccactcgtcccatcgcattaactctgcggcgggacaggcgacaccttaggcaggcgaagcaggcgacgcttcacctccgccataatgaccgcgtcaaaaaagggaccgggaaagaggatactctgaaagggatccttctccgcgaagaaagcgggccccgagctcccctactgatcagaggttcgaaggctggcccctcggaagggttcaacagccgcctcaaagcactcgggctccgcgcccactactggtcagaggttcgaaggctggcccctcggaagggttcaacggccgcctcaggccactcgggctccgcgcccactactgatcaggggttcgtaggctggcccccgaagggttcgacagccgccttagagcacgcagagcgagggatgaccctgggctcgggggctgctctcgcaaacctggctccggccaaaccgttgacatcatcaacataccagcccgagaacttgggactcgactatgcacccgggctacggccaccttggctccagaagacgatggactccgcctcgcctgaccccaaggctcggactaagcctcggctccggaagacgatggactccgcctcgcccgaccccagggctcagactcagcctcgacctcggaagacggactcgacctcgacctcggaggagcctcttcctcgcccgacctag

SEQ ID NO: 22006 - DNA, 603 bp, Zea mays
  Peptide Sequence Number=SeqID_65381
atggcgctccgcgtgctccatgacgacggcggctctcagccccttacggaagcaaggagacggctctcgtacgagaaggagaacacgaaggccgcgagttcccctttactattctcccccctttgtgtcccgtctcgcgccgacccatctgggctgggacacgcagcgacaatttactcgtcggtccagggaccccccggggtcaaaacgctgacagcagatattacgcgtttggttgctatatggacgtggtttggctcgcactggctaagcaggcctgccactggcaaggctttacggctacaagtctgctctctgtctacctcacgcacgggagcaggccacgctagggcatccaacgcgacgcatccggccgtgctaagtggatcggccacgatagtgagacctaagggcgagagcacgcagacgcagcccccgcgcgcgccgcacaggaggtggacgtgcgacggcgtggcgcggtgtcagcacggcgaactaagcaccctagcacgggtcgaaggatgctgcacaccagagacacagggacagccggagcccgccgagggaggagaaagggtggtgcaggagctatatagcgcgtag

SEQ ID NO: 22007 - DNA, 774 bp, Zea mays
  Peptide Sequence Number=SeqID_65382
atgcccgcctccggccacacggacgccgccgtggccaccgaccgagagcacgacgtctggaagggaaagccacaaccatcattcgatcagactaagcctgctttgatgacacttgcacgaattatccattccaacgatgagaaagttctcactgatgcatgctgggctctgtcatatttatctgacggcagtaataataagatccaagctataattgaagctgcatcgcttgctccaagtttttcggatgatttgttagcgaaggcaactttgcaagttgtccagttgctgaacaatagagcttcaaaatctgaaattaccggaacaaatatccagatgattggttctctaagattagcttacaccctttctgtattgccctcgagcttacccaataaagtagttctgaatggttattctatttttcatgcagagtctgttgaacataaatatccagaacagaaatttcggagccacgctgatcgatggtttgaaaggatatataagctgcaactaaggggaaagggtaaaccaaaatcaaaatcaaaggatacaggttcatggtttgatggcggcagaaaagccatgatccaactagctggagaacttttctggaaaatgggtgaagacctagatagcatcacaaaagattatacaacttctcttgatgcttttattacgcagctgcccatgcaacaacacgtcgatttgaagttccttctcttccgccttgacttcattgaatattacggccatgtttcctccaacaaatga

SEQ ID NO: 22008 - DNA, 585 bp, Zea mays
  Peptide Sequence Number=SeqID_65383
atggatgacgtcagtgacctcaaggacaccgccaagatcctcaccaacaccctcaagacactgcaggccactatcgaggccaaggccatcaccttcctcaccgtcgaccgcaatcctcctcaagcgtgcagcacggtgatcacgaccgtggcggacaagcgtccccatagacgagatccatggcggatcgcctcccccatcatcgttccagagactgcccctgttccgcctagacctgctctccagcgcgactgcatggctgttgttcctagcggcggcggtgttccgtggcgcgacagcgaaatcaacgatcacaggaacgcgctcgacttcgactctctaggcgtcgccaaccgcatcgtcccccgtgaggacgcccctcgcgtgctaaccgctgtgtctacggccagaagttcgtcatcccgctcccctgttaggtggaacaagtggaggtgcagttctaatcttggccgctgccgtgctaagccagaagaaaaggcggaagaagagctagaatttccattagaagtcatctcaaatgctggaggtgtacccatagtgattgatgaaactattgaggtttaa

SEQ ID NO: 22009 - DNA, 1713 bp, Zea mays
  Peptide Sequence Number=SeqID_65384
atggacaaggatcgccagggagctgcacagaagcgccaggcggtcgtcaggcttcatgaagccaggccgaagaggcagcggggggctgcgaaggctgctgcccccggcggaggcaagccgccgctggcggcgaagtcgggcgtccctgcatccggcaaggcgccggaggctgcggctgccgccggtggttccaagtctgcgaaggctgcaccggcgtccagcagggtgccggaggccgcgaaggcggcccgagagttgccgccgccggacaagcgcgttgccgacttcgccaccgacattagcgtggacgactatcttgttgggtcggacgaaggccaacttgtcgttgttccgcctgccgcggcgaccacggcggctgccatagtgccaaaggcgaagggcggtgctcttagtgccggcggcgagatgccggcactcactgctgcggctgacttcgcagaccgcgcggcgtcgggggcgctcacggcagttgtgtctgccgaagtcgaaagacttcggacgcaacatgctgacgtcgtccgggaaaagtcggccgccgacagtaagtgccgcaagcttgcggacaaggtggccgcactggagggggagaagactaacctccggcgccaactggcggaggagaggagggaggccaatgaggccctcgccaaggcgcaggctgcgcaggcggaggccaatttggcgcgggtggagggcagccttgccagggagcgcgctgagcagttggaggagcggctaagcgccctgcagagccgtgtggagagggccgaggccgcgacgcgcacggaggctgagcggacacgcaaacagcttatggattcgtaccatgagttgggcgcgcggaccgctgacttcgaagtgccggaccgagagcccggacttcgctgcctggagtgggtgcaggaggagttgcgggcgctccccaccatcgtggaggggttcatgtcttatgcctccctggtcacctgcgagggggcgatgaacgcgctctctcgcgaagggtgccggcactatgaggtcttcaaccaagctgatgaggatttcgagcgggatatctacaaggttgaggaacctatagtgaaggaatccaccggagctctctacgaccagatgtggggcccccacgatcgagaggtggtcaggaagcgggccgagacggcgaggggtcaggttcaagattttgggcctaagcacgcaactaccactactaattttttggcggcttcgaccgtggatgatggtaataaatcggatgagtctgcatctaagttttctgattttggtgactctgggagctcggttgagtggactgaggagtcatcggatgaggacttggactacttcgcggccttggatgtggcagcgacggaggcttcaccgcacgctgcggatgcagaagatgtgcctggtccgagtactgggcgtaggcggcgaagggcagttgcgaagcgtagattgtgtgccctcgcacattcggctatgctcgcgaaggcgttacgtacttggtctggtgtaattgttatgctggactggtgcgcgtgtagtcggtctttgcgcggacagtttggtgtggtcgttttcgcttttgttacgcttcgtccggctgtgccttcgggcaactgttgcacggatagtctccgtggtagacttcggttttttgcacttgttgtgctagtccggctgcaccattag

SEQ ID NO: 22010 - DNA, 450 bp, Zea mays
  Peptide Sequence Number=SeqID_65385
atgggcaaaaacaacaagcgcaagcgtgagccaactcctccatcggaggagtttggtgactcggagtactcagaggaggagttctcctttgagtctgaggggtctccggctcccatccccctgcgtgagtcgtctgacgacttagacgactcccaggggctcgcggcggaggtctggacgtacatccgggtcgtcgagcgttccgggctcgagggctcggatgagtcggagtactcctcggatgaggaggactcggacggcggcggcgaggatgaagacgacgacgacgacgacgacggtggcgacggtgacggtgacggcagcggcaggggtgacggcggcggcagcaggggtgacggcggcggcagcaggggcagcaaccggggcggcagcagcaggggcagcaccaggggcggcagcggcggcggcagcaacagggccagtgactag

SEQ ID NO: 22011 - DNA, 648 bp, Zea mays
  Peptide Sequence Number=SeqID_65386
atgacaagccagagccacccggcgcaggagcaggggctgctcccggtggaggaggcccacgacataagagtagcaaccagtgaactgtccgacacaatgggcctgctgagggagggtgcagcagccggcccagttggcgcggcttgtgcgatagaaggcgcagcgtcggcccagcttggccatagaggtgaacagagtggggctaaggtcggtgctgaatcagccgagccttgcagcgctgctgccgctgggccacagggtgtgaccgcaccggagtgcctggtgcacgtggcagcacagtggtggtgccaaaagaacctgcaggggcaacacataatggcgggaaccgatacagggttggaacaatcatccaaaaaaatcaaacgcagccctggtggggcgagtgggatcctcaaaggggaaagaggactcctcaaagaccacatggcacaacatgatgattcggtttgtctgacgatcaaggcaaaggataccaacttcgcagctacagccaaggcgaagtgggatcgtgcgatcaccaccaaggaactcatcaaggaaaccacgcacgttatggagaaggcagggcgtgctttcgtcgaggagaagatggagggccccaagtcgttagttctcgagatcgtgtag

SEQ ID NO: 22012 - DNA, 318 bp, Zea mays
  Peptide Sequence Number=SeqID_65387
atggaggccctccccctgcggcttgtgcccgtgcgcccgacggcgggccctcaccgagcccatggcggttccctgcgtggaaaggaaggtagaggcaggaagaagaggttgttttgtgaaaaactatgtacgaaggaggctcgagctgtttcccgagtacttctccttaggacctgttcgttggatgaccacccggaaaaacagtgcagctatgagggtggttgcctttggcgcaacctatgctcaggtaaagaagaagaagaaggcgttgatgcggatctccaggagttccagaacttcgacgagttcgtggattag

SEQ ID NO: 22013 - DNA, 513 bp, Zea mays
  Peptide Sequence Number=SeqID_65388
atggtgccgagcgaagagcttgtccatctcctttacccaatgatcgcagatgttgcggacaacttgcagattttctccatggtagtctatcagagtgtggcccgaagaatcgttttggtctccggataccatgtgtcacagtccttcctgggagggctggctgtgaggctgtttttgctcctgctggtggaggctagggttactgcatactcagatggccaagtcaaggtctacgagctcttggattcattggaattagacaagtggcagcttcaggcagagttccaaaacattactgatccaatctctagatttggaaaacctgcatgcacttctgcatccatagcatggaatccaagaagaggtggaagccaacaagctagttttgcaattggctttaattcagattcgcctcatttcaactcttgtaagcaagattttaatacactgaagatgaacagatttgggagtttgaagaagctcatcagcgctggcttccacttgttgagctag

SEQ ID NO: 22014 - DNA, 483 bp, Zea mays
  Peptide Sequence Number=SeqID_65389
atggagctccgaccgcgacgacctgagcctagagctccggccatcgacaacctgagcccagagctccagccgcgacgagcccaccatggaggagcggagatggagatgccgagagcgcagagccggagcgaagacgcgagaccgcgagagcagcggagaggggcaggcgaatggagaagagaagacaaggagcagcgcatgatggcccaagatttcactttgaagcaagatggctcaaggaagagaaatgtgcagaggcggtcgggaggacatggaaatttatatgccatcctgaatgtcgtgcaagaacatgtcatagcagatatgaatcaatccttaatcagcccattcattgaagaggaaatccagcgtgcactagaaagaattggtgatctcaaagcatccgaaccagatggcatgtcaccattttctacaagaagttctggagtgtggtcgggccaacgattttgcaggacattctga

SEQ ID NO: 22015 - DNA, 543 bp, Zea mays
  Peptide Sequence Number=SeqID_65390
atggttgctccgtctccccctcctctggcgaggagggtggcggggcaaacccgggtgttcctcttccgccccggggagatgtcatcgtcgggtttgcctccgccgggcgagccgacgaccgtcgttgctatcgtgctgcggggggaggagtatcatgtcgtagctgtcgtcgggggacatgaactcgagactcccaaagcggagcaccgtcccgggctgaagaggctgctgaagattgtccatctggaactgaacgggaaagtattgtcaacacgcagctgtcccctacctggcgcgccaactgtcggtgttttggacccacggggaccctcaaccgactataagtcgtctaagttagccttccaagcgtgccgtgggaaggccctgggcatctccttttatagatacaaggaggtgatccagctgtacatatggggagagctgagggtggtcgacatcatgggtgcatgccgggaatcatcattacctgctattggagtcgtctcgggcgaggcggtgatctctcccaaagccgaggcctag

SEQ ID NO: 22016 - DNA, 372 bp, Zea mays
  Peptide Sequence Number=SeqID_65391
atggcttggtggcgttgggagctcggtaatcaccgtgaagatcttgttggtgacccgactcaagtttatgaacagtacccccgtactgttcacgctttcatcgaaagtcactctcgcactctctccttcgagcaagctgaaggtattaatgatgacgacactattcaccccgttcaggccactgtgccaaccaccggggtaagactgacaacagtaagtcactgcctctcccaagatcggcctcgggcgcagcaggaagttccgcctcgtccgaccccagcctcgggctcgaaaggaatcgtcgccatgcccgacccaggcctcggcctcagcctcggcctcgggaggagatcttcgcctcgcccgacctag

SEQ ID NO: 22017 - DNA, 294 bp, Zea mays
  Peptide Sequence Number=SeqID_65392
atggcgcaccggacagtccggtgcgccatcggagctaccggaacagaagcggtcacagatactgccacagcagtagtggtaacagcagatgctggtggcactggcggctgcgggcagacagagctgagaaccggagaggtgaacgccaaagtgaccggccggagcggagagcctgatcctgaagaagctgctgctgaagcgcatcctgcctgtcctgcatgttctgaaacatcaagagcaccctatcggataaacgggcctgctcggctgccaggtgagcctgctgctgagtga

SEQ ID NO: 22018 - DNA, 513 bp, Zea mays
  Peptide Sequence Number=SeqID_65393
atggcgagagtggcattgaagaaggcattcttgacatcgagccgatgtattggcaaggcccgtgagagtgacagagtcggaacagtctggatgataccaggcttgaccacagggctgaagcatgtcgcgaggggcgcaagcgacgaggccacactgggcatagacgagggaaacggggccacgctcgtcgatggggccacatgtggcgttggaggagccgacagtgccacacgtggcgcaggcgggggcgatgaggccgcgcgtggcgcgaccggggtcgacggagccctgcgtggcgagggcgaggtcgacagggccacgtgtggcatgggcgatggcatgggtaaaggtagagaccgcgagggtgcacgtggcgttggggatggcaatggggccgtgtgcggcgtgaaagagggtagcagaagagaagcatcaacacaatcgacattgaggagggaatcaaggtcgagaggtggggaggaatcagcaagggaaagcatgacgaatctctag

SEQ ID NO: 22019 - DNA, 3540 bp, Zea mays
  Peptide Sequence Number=SeqID_65394
atggagctcgaggttatcatgtactacatctacctgggaattggaactgcagtttcttcctttctccaggtgtcatgctggacggtggctggagaaaggcagtcaacacggttgcggtcattataccttgaagctgtgctgaggcaagacattgcattctttgacgtggagatgacaactgcagaagcagcctcaagaatgtctgcggacactgtactcatccaagacgccctcggtgagaaggtagggaagtacatacagcttttgacaaccttcgtcggtggctttatcatcggattcattagaggctggatgctggcccttgttatgctcgcgtgcatacctccaagcattttatcctttgcaacagtctcccggttgcgagctcaaatatctcgaaagaggcaagaatcatatgaagatgcagggaatattgtcgagcaaaccattggagcaataagaacagttgtatctttcaatggagagaagaaagcaattgcaatgtacaacaatcacataaaaaaggcatacaaggctacaatcatggaagggatcatcactggtcttggagtaggctccatattttttgttgtcttcagcagttactctctagctttctggtatggtgccaagttaatcatcagcaaaggatatactggagggcaggtcatcaatatcgtatttgcaatcttagttggctcaatggctataggtactgcatcaccatctatttctgcaattgcagaagggcagtctgcagcacaaagattgtttgagattatcaacagaaaaccaaatattgacattaacgacacttccggaatagtattagaagatatcgagggagatgttgagctcaaggatgtgttctttaggtaccctgcaaggcctgagcagttgatacttgatggcctgtgcctgcaagtacctagtggtactacaatggctatagttggggagagcggaagtggtaaatccacagtgattagtatggtggagagattttatgacccacaggctggtgaagtgttggtagatggagtcaacatcaaaagtctgcaactccaatggttaagaggaaagataagtcttgtcagccaagaaccattgctttttatgacctccatcaaggataacataacctatggtaaagcggatgctacaattgaagagatcaagagagcagctgagcttgcaaatgcagcaaccttcattgaaaagctgcctgacgcatatgagacaacggtaggtcagcatggttctcagctttctggggggcaaaagcaaaggattgccatcgcaagagcaatcctcaaaaatcccaaaattcttcttttggacgaagccacaagtgctttagatgtagagtctgaaagggtagttcaagaagcactaaataggataatggtagggagaactacactcattgttgctcaccgcttgagcaccatcaggagcgcagactgcatagcagtagttcatcaagggaaagtagttgaacgaggtgtccatgacaagctaattaaggaccctgatggagcttattctcagcttattaggttacaacaggcacatgctacagaaaggcatgaggttccagatactgacgtgtcaggttcaatctataaaagtagaagtttacctttggaacaatcaacaggcagagattctcccaggaacaaaggacatcattccttcacaaaaaccactgggctgtctaaagaattgaacaggcaagattttacagacagacaggaagaccaggaacatggtaatagcaaggctcctaagaaagcaccaattggacgactattcaaacttaataagccagaagcaccagttctcctattagctgctatagttgcctttgtgcatggtcttctgttcccctcgttcagtataatgatgtctggtggtataagaactttctactatccaccacaccaacttcgaaaagattctcggttttgggcactgacgtgccttctgtttgcagtcattgccctgatttcaatccaactggaatactttctgtttggggttgctggtgggaaacttatacaacgtgtccgctctttgtctttccagagcatagtacatcaagaagttgcttggtttgatgagccttcaaattctagtggggcccttggcgcgagactctatattgatgctttgaacatccgacgccttgtcggagataacttggccatactagtgcagtgtatagtaacaatagcggctggtttttccatagcatttgcttctgactggaaactcacgctgatcgtcatatgtgtgattcccgtaatgggctcacaaaattatattcaagtgaaattcttgaaagggttcagtgaagatgctaaggtgatgtatgaagatgcaagtcaagtcgtaaccgaggcaattggtagtattcaaacagtagcatctttctgtgcagagaagagggtaattacatcatacatccaaaaatgccaagcttcaatgaaacatggcattagaagtggaatggttggaggccttggtttcagtttatcaaacttaattatgtatctcacatatgctctttgtttctatgttggtgcactgttcgtacacgaaggaaaaacaacttttaaagacgtttttagggtctattttgctctgattttcacagcttttggagtttcccaaacaagtgcaacggcaacagattcaacaaaagcccaggaatccacaatttcaatactaactattatagacaggagatctaaaatcaactcgactagtgatgaaggcgtgattatagaaaaagttgatggcaacatagatttcaggcatgtaagcttcaaatacccatcccgcccagacgtccaagtgctcagcaactttactttggccattccagcaagaaagactgttgcacttgttggagagagtggtagtggtaagtcaacaataatttctttgctcgagagattctacgatccagattctggtacaatctcactggatggaacagaacttaaaaaactaaagctgagttggttaagagaccaaacgggcttagtgagccaagaacctgtacttttcaacaacacaattcgcacaaacatagcatatggaaaacaaggagaagtaagagaggatgagatcgttgctgcggccaaggcagcaaatgctcatgagttcatatctagcttgcctcagggatatagcactattgtcggcgagaggggaacacagctctctggaggacaaaaacaacgggttgctattgcaagggccatcttgaaggacccaaaaatacttctactcgacgaggcaacaagtgctctggatgctgaaggagagcacattgttcaagatgcactggaccaagtgatggttagcaggaccaccattgttgtggcgcaccgactgtccacaattaaaggggcagatatgatcgtagtcatgaaagatggtgaagttgctgagaaggggaagcatgaataccttgtgggaaagggtggagtttatgcatcgctggtagaactacactccaagtcagcataa

SEQ ID NO: 22020 - DNA, 312 bp, Zea mays
  Peptide Sequence Number=SeqID_65395
atggctgggggagcgagacacggtagcgaggacgatgccgagacgacgacgacgaacgagggacgccgcagcagcgaccacgcagccggggccacgaccaactattcggagcacaagcagctggtgccgttccttgacatgctcaagtatgccgaccgcacggacgccgcgcttatggcggtcggcacggtggccgcggtggccaacggcatgacggagccgctcatgaccgtcgtcttcgcggccgtcatcgagtgcttcggcgccggagacgacgccaccatcctccaccgggtcagcaagattatttaa

SEQ ID NO: 22021 - DNA, 72 bp, Zea mays
  Peptide Sequence Number=SeqID_65396
atggtggctatgaacagcaatgaagctataatctatagagacaaaaacattgtaaaagccgatatagattaa

SEQ ID NO: 22022 - DNA, 1458 bp, Zea mays
  Peptide Sequence Number=SeqID_65397
atgcaggcccataacacaggaaaatctggaaggggcaaagttctaggaaaaaatgaggaaaggcaccgtaccccagctttcctgcagcagtccacaggcacaggcacagaccggcacgctgagtcgctgacgctgccaagccagcaggcagcagcggccagcggtcgggcctggcgctggcggcctgggcggtcgcgcctggcggcctgggcgccggtggaagacctcgctgtgaggacgcggcctgagaactacaagctgcaactaagcgatccaagctccaatatgccttccatggacgagcctctgttacctttggtccagcgtgaccaaaagtacatttccaagaaagacagaagaagctcctgtgatgttccaagcaggtgtgcaacttccttttccccaagcagctatctcaaagctaacttcagtactctcaatcatctgccgcccactgatgaaactaccagtacggtaccctcaccaaatatgcagcgggtgcactcttcaccttctatattcacatcaagcaaagaagcacactgtgtggatgagcttggtggccaaagccatgctgctgctgctgcacaatatacgccatcaattgcaaggcgggctattgtcagcgtcatcttatacatctcaataggggtgcttgtatacatgacaaatgttgaaggcttcaaggggaaatccacattcaagctagtggatgccctttacttcaccatcattagtttgtgcacaatagggtacggtgacatagtcccctgtactaccttcacaaaggtgttcacatgcttgttcctactagttggtgttcgtttcatcgacctaatgctaaatgggctgttgacaaatgtactggacaagcagagaacagttctacttagcacaatggacgataacaagcttaacaaggtgtttgacacctacatgattgatgctaggaagaaaaggtcaagagggaggatgaaagtaatacttgcattatcggttgtagcaggcactatctcaatttgcacaatcatagtacatgaagttgagggtctaaactggatcgatagtttctatttatcagtcatttctgttacaacggttggatatggagacaaaagcttctcaacaacagcaggaagactcactgccactgtgtgcctgttggtaagcactttagcagttgcaaaggccttcttgttcctaacagacttaaggatggacaaaaggaaccggcggactacaaaatggatcctcaagaagaaaatggacaacgagccacttgttggagacctagaaaaccatcctgctgtaagcaaatcagattttgtgatctacaagctcaaagagatggggaaaattgatgagaaagacatcaaaatgatctctgaccagttcgatcagatagagtttggaaaatgtgaaaggatccctctggcagatataattggaaaattatga

SEQ ID NO: 22023 - DNA, 741 bp, Zea mays
  Peptide Sequence Number=SeqID_65398
atgagcgtttcaacgtttatcgttttaataaccttgccaagtatgacccccattgtcccaaaagcaaatagcgagagggtaagacttgtgcggttgactgaggcggctgagaatcttaagaagcgagctgcaaccagtgtccgaatgggcaaagagagcgaggctgtggatttacttgtgcagaagaagaaattgaccaaagccctagagaacattaaagagcgcattgaggtgcttgacatgctttcggcaaagattagtgaggtaatttcgatgaagcaaaacatgttaattgagtatgccttgcgtccagagacatctaatggtgaagactctgatgacaagataagggttttctccagtacagtcaatgttggaaccaatggagctgggagtagcgattcacacccaaaatcagttgaaaaggaatcttttgagttgagaaatgaggcacatgcaattgcaagcatggctgacgacgctgagcaaagtgcacttcagatgtctgatagcttctcatttttgaacaatagtgacccagcaaactacataaagaatcattcagcatacgatgaccttatagagcatattaatttgcagatgaaatcattggaatatgaaattgaacagttcatcaattcccaatcagttgaagaggtgggcagtgagaagcagagaagtgacaagtggcaaaggttatctgacatacagatgcttataaaggaaactagagaaaagtga

SEQ ID NO: 22024 - DNA, 1173 bp, Zea mays
  Peptide Sequence Number=SeqID_65399
atgaattcacctacccccgccagtggaggagactctcgtttcagttctgacttcctttctcgcgatggctttccttccatcttgtgggaagtgcttaactccgccggttaccctacgccccctatgtacacggtgcagttgtatgaggagcatcgggtacctcgttgtcgggtctggctaactttggaggctcatccccttcagccgggttggcgttctcttgactctgagacgattggactcaggacggatgacaccattgaggcagcagccatgaagactctgacgactttctgtggctaccatcccctggagatggtgatgcaccccttgggactcttccctgctgaaaagaaggatgatcccatgtggtgtaaccgcgtgagccatgtgaaggatgtgtgggcaatgtatcctgacttggttgggagggtcactgttcagtgcatgagtgcgctgtaccgccttcaggcccttcagagcgatgctatgacacttcttgctaacaccgctcaggctgccaagctcactctcgatagtcgggaagattttgtggtcgacctatccacagagttggtggagaaggatctgcaggtggaaaggctgagccagcgtattaccaccctggagcagcaagtggagatccgagataacactattgatgtcttggagaaccagctccacgacgtgcagagggaactcgaggaagccaatgaccacttggacatgcaccacctggagatggaggccaatgaagcaggaagcgagggagaagaggctcccgaggagctaggaccagcccctggtgccaatgggactacctccgcgatgcctccttcacccatggcagcgaggcagcgtcgcgggcagaatgagcaagctcccccgccacctcctccagctcccacagtgcaggagctgatggcccagcagaatgagattctgcgacagctcttgcagcgccagcccccaccacagcatcatggtggagggcagcatcagcgacctccggctatggcaacataccaggaagtttctgagcacgcaccccgcccctgttcaaccaaggcagagggattcgtttggacgcccgactggtgggtttcccgttcgttcaaatcccaattttccccctccttcccaggagaactgcccctggatgagggccaaagg

SEQ ID NO: 22025 - DNA, 1962 bp, Zea mays
  Peptide Sequence Number=SeqID_65400
atggacttccacaacatcgatgattattttcatgaaaacagcccggcacaagggggcgaaggagctgcagaggctagcgccgaggcaattctggaaagggtgtaccgtgacaccgcgtttggatctgagaagctgctcaatctagacatgctggtcatggagatcgctcgccgagcctctgatatcgagcctctcatgtgggaccctcgttccatttcttccgagtcagttggcaaggctttcgaattcgatgtcctgcacggtattgtagattcggaagtcagcgagttggagaagctagctgcctctattcagacagatattggcaatgctgaaaccaaggcattggggggagaacccgggagcagagtgaccgatgagctgtgcgcgcggaaggagtccttgaagcagatgcaagatgtaatttctgatattagaacacagcttgcaacctttgagaatgccatacaaccttcacatggcaaacaaggaaatagtgagggtatgggatatgaaaatggtcatatatcaggtcacactgctatgcaggctgaggaccagagaaatgtactgcagatgttacaacagtcgatagcaagcaagctagatcttgaaaataagctacgtgattcgcagtctgttgtggaagacctcaaaatgaagctgcatcacgcagaacaagaatcatgtttcttggaggaatccatcaaagagctttatgaaagaacgttgtcggcagaaaatgcttcccaattgcttcttggaacttcaaaggaactcgttgccaaatttaataccacccagtcctatttaagtgcttcaattcgcagggaagatgatcttaaatcaaagttagacgaaaacttgatgaagctaagtggcaacaagagcaccagggagacagtgcttggagacagtgacaacaatgctaaccaggagcctgtgcagatgcgggtgctatcacgtcctgagttccagaatttatggaataaggttcagcagctggaggaattgttgagggactctggctctcaactgcagcaatcatctctttcaagaggggcagatgaagaagagcaggatacagcgcaatctgggataagcgcgtttgggaatgttatcgctgatttcaagcttgccatttccaatgcagaaagtagagcacaaaatgctgagacaaggtgtacacagctcactcgaacgaatgttcagcttaatggggagttgaacactcttaaaagtcagggatcagatagggctggcttattggagacgaaacttaaggaatcagacactcagttagagcatgcaagagcatcggttgatgctattgttgaacaacagggtatgttaagatcctccatgtctgatatggaactggtgattgaagatatgaaggaaaagtacttgaaagctgaaaccagggccgagagtgctgaatcaaaatgtgcattgttgacagataccaatttagaactcagtgaagagctgtcatttctgagaggccgagtagaaaggctagaaaactcactgcatgaagctaaccaactaaaggtgtccagtgcaaaagacattgctagtaaaactaagactatcatggacttggttgcaaaactttccttggaaagagaacgccttcatgttcaggttgttacgctggcgaaaaagaacggggcgttggctcaaaagtgcaaagaaaatgttagcgagcgcacattgctgtgcaagaatgttaccacaggcgaaggtgtacttaggcccgttcaagtaaaagaggaggttgaagccgatgaggtggtgattccagacgaatgcacagtgcgatctatcgagccgacgacgatgacgatggtaaactggaagtacatttccgcggcagtcctggccttgctggctgccgccgtcgtgttccagctattacgtgccaatctgatgatgacgacggcggttaacgattgctga

SEQ ID NO: 22026 - DNA, 555 bp, Zea mays
  Peptide Sequence Number=SeqID_65401
atggcgaagcagcagaatcctatccccatcccgatgccgctgtcgctgtcgctgcccctcgtcctcgtcgcgctgctcctgccggccgcccgcggcgccgcggagacgccgcagtacacgacggtgcacgcggagtcggacttcgaggtgcggctgtacggcgacaccgtctggatgtccgcccccaccccggacatcccttccttccacgtcgccaccaagctcggcttccacagattgttccagtacctgatgggcgcaaacctcaactcttcgaggatcaggatgaccacccctgtgctcacgagccactgcgtcgcagcgaggagcttctcgggtcgtgcacgggacaagaacgtggtcgaggaagccgagaagctcgccatgagcctgagccggtcaccatgggctaactccacagactactccagcaagagcgcttactcggttgcacagtacagcagtccattccgcatcattggccgtgtcaatgaggtgtggttcgacgtcaactgcagatctacatctactgctgctggtgttgagtcctactga

SEQ ID NO: 22027 - DNA, 273 bp, Zea mays
  Peptide Sequence Number=SeqID_65402
atggcgactccgtcgctgccgacgcagattgtggagttcaattacaaggcgatagaggacaagctcaagagactggctctcgaagtgagccaccatgagaacaacattaggttcctcaaatcccaactcaatactgttgaagaggcgtgcgtcgacctgggaagaacatccctagttattttgcagaagcacgccgctaaacctctttgcccgctatttaaagccatgtttaaactatatttatggtccctagcttacatagggcatatgtag

SEQ ID NO: 22028 - DNA, 1695 bp, Zea mays
  Peptide Sequence Number=SeqID_65403
atggcgggctaccgcgggggctcctccgtctccgcctccaccggcggcgggggcagcgcggtggccgcagccttctccacccggctgctgctactcctcacgctgctgccgctcgcgctcgccgccttcgccttcgcgctccagtggcgcggcggtatgcgggacccggcaggtgcagcctggcccgccgacgcgcagcgcttcccgggcatggagaacagccccctctcctcctcccacggaggagcaggctcctacttcgccgtctcctcctcctcctcctccccgggagccgactgcgccgagatccttggccggagcgccgcgtcctccaatggaatctcgctctaccgcgggtggagcttcgactccgaatctgctataacccccaagatctgtatcacgggaagcacatctgctagcctacaccagattcttccatggttgtattatcacaaggtcattggtgtttcccatttctttctttttgttgaaggagaggctgcaaagccagctgtcacctctgttcttgaatctattcggggtgtaaaaattatttacagaactaaagaactgaaagagaaacaggagaaaagctattgtttgataattctgattttactaaagcttctgttgcaaccattttataatttcagccgcatttggaatgagacgtggctagcaggtttcttttacaagccgtgtaattacgaactatttgtcaagcaatcactaaacatggaaatggctattattatggcaagggatgctggaatggattggatcattcacctcgatactgatgagttgattcatccagctggtgcccgagagtactccctgaggcgattgcttttagatgttcctgacaatgttgacatggttatcttccccaattatgagagcagcattgaacgtgatgacattaaggatccttttactgaggtttccatgtttaagaaaaattatgaccatcttccaaaggatacatactttggcctgtacaaagaagcaacacgtggtaatccaaactacttccttacttatggtaatgggaaatcagctgcaagggttcaggagcatttgcgaccgaacggtgctcatagatggcataattacatgaaatccccaaatgaaatcaaattggaggaggctgctattctgcattacacctacacaaagttctcagacctaacctcaaggagggatagatgcggctgcaaaccaactaaagaagatgtgaagcgatgttttatcttggaatttgaccgtttggcctttataattgcatcaacagctactgaggaggagatgaggaactggtacaaggaacatgttgtatggaccgatagagacaccaatttgaaacttttaaggaagagtgtcttgacacgcatatatgcgcccatggctattatccgtggcctcaaggaatctggcgtctttaccaatgcagtaacatcagcgaaagcacagtcaaaaacgaagtcatcaaacatgggtctcggaaacaaggatcctatccagccaaacggaactgctggtcagtccacactggaaggcagtcatggaaagttgcaggcaaccgtgagaaagatcctggaaatggttgacacacaggaagaagcagcgatgccaccaatgtcgcccccgggttttcttgagctgactgaaagtgtcactgccttttcatga

SEQ ID NO: 22029 - DNA, 261 bp, Zea mays
  Peptide Sequence Number=SeqID_65404
atggtcgggagggggcaccggactgtccggtgtgcaccggacagtgtccggtgcgccaacggctcccaggcgccaacggtcggctacgccacagaaggaaagagatccacaccggactgtccggtgcgccaggcgacagaaggcaaggattaccttcctggaatgcactcaacggctcctagctgccttggggctataaaagggacccctaggcgcatggaggagtacaccaagcattctctaagcattcctaagcactaa

SEQ ID NO: 22030 - DNA, 2157 bp, Zea mays
  Peptide Sequence Number=SeqID_65405
atggatcagagccggcgggcggtggagtcgtactggcgatcgcggatggtggacggtgtcacggccgacgacgacaaggtcgcgcccgtctacaagctcgaggagatctgcgagctcctgcgcgcctccgacgccagcatcgtcaaggaggtcgccgatttcgtcctcaagcgccttgacaaacaagagccccctcgtcaagcagaagaaacagaattagattttggtgatgctgtggttgatacctttatcctagttcttctggacactctcccagctcaatggtatttgactctttctacatttgctctccaggctttaaggttgatcaaatacgcagttggaaaatctggtactgatttcaagagggagatgcaaaggcactcagcggctatgcgccaactagttcattacaaaggccaccctgatcccttaagaggggatgcccttaataaggctgttcgcgaaactgcgaatgaggctatagctgcaattttctccacagaggaccctaaacctgctgttgcaaccgaaagtcttggcaagcgcatacagggctttggaaatactaattacgagccatctagagatgacaagaagtctttccttagcgagcttagcgaggtagtgggtattggaagtgcatccattaagcaggggttgagcaactttgctgcagcgcatgcaatgatgacaaatgacaatggtagcacatacaggagccctaatctccgtagatctttgaccacggaatctgaaagatatggtcggtatgatccaagtgaaattcaacgtgagagccgagcctcatctgatgcttcaaagaatgcaccttctggtccttggggtccaacttccagttctacaccaactgatgaaactagctcaagtcaaccagggattaagactcgtgaagaaagacttctagagacaattgttactgcaagtggtgtgcgattgcaaccaacgcgagatgctctgcaaatttttttcgcagaagcttccaaattggatgcagttgccttgagccgtgcacttgagagcaaactgaattctccattatggcaggttcgcatgaaggctatttgtgtgttagaagccattgtaaggaaacaggatactgatccttactctatcatcgcttcatatttcactgagaacacagcttctgttgttaaatgctctgagctgccacaggtttctctcagagagaaagcctcaaaggtcttgaatatgctgattggggaacaacctaccggaaccgcagcaacaaaagctgcgatgcccacacctgttcagatgcctgatttgatcgatacaggtgatcaagatgatctggcaacaagttctggacatgcaagcattgaacagaattctgggaacagtgcatatgtttcttcagttgatgatttgcttggtggtgaacctatttctgatacaagtgtcactgctgatagtaatggaagcgacccatttgcagatgtatcattccatgaggcagagactaaggagactaatgatctgttctcagggttgacagtagaagagaaatcatcaactaccatgcatgatagttcttcggacaaaaatgaattaccagatatctttggcagctcccctgattctttcaaccagggtagtgttactgaccaaggaactgtcaatgatttgattgctggcttgaaccttaatggaacaggccatgctcagtctgcagttaaagcagaacccaatagcaacagtggttcacagttctttgatacaaaaaatgagtccggccatgtgccaagtgctgcaacattgaatgacattcttggtcaaaactcgctttaccaacagcagcagactccattgcagtacagctttcctcaacatatgatgctcaatcaatcatttcctggacaacaattaaattatggtgccatggggattcttcttgctcagcagcagcagttactgcaaagttttggaaatttcaatgctggacttgggaattcttctttcaattcgatgaacggtgggaatacatctgtgcttccagatattttcaattcaagtaatcaacctcaaaatcatgttgcagtgatgagcagttcgaagaaagatgacaataaagcttttgattttgtttcggaaaatctgaaagcaaaaatctga

SEQ ID NO: 22031 - DNA, 582 bp, Zea mays
  Peptide Sequence Number=SeqID_65406
atgcaagccggctcagagcagaagaagccaaaccgtcgtgcgcggcgcgtgcaaccgcccagcggttacaagcggctctccacttttgcccagaccaacgggcgaaagggcgggcagccatgcaggcggcatgcaaccgcgccaagtgggcgcacttctccaatttccaacacgcccggcattgaggcccaggcccgcgcgtcgtgcaaccggcgcgtcgaatgcttcgtgcatgcaactgcaccgccacttgcgccaccaccgcgcctcctcgactgcggaaccaataccgcgactcgaggcgacccagcgcacgacccagcagcgccagcctggcgcgacggcggcgcctctggcaggagaagcgagcgacgcttcgccttcgccataatgaccgcgtcgaaaaaggctccgagcctccctactgatcagaggttcgaaggctggcccctcggaagggttcgacagccgcctcagatcgcgtgggctctacacccactattggtcagaggttcgaaggccggcccctcggaagggttcaacgaccgcctcaggctactcgggctccgcgcccactactga

SEQ ID NO: 22032 - DNA, 1839 bp, Zea mays
  Peptide Sequence Number=SeqID_65407
atggagcttgaggacgatggtgccttgggaggaactgctggcacgtggacagaggaggaccgaggtctcggcgctgccgtgcttggagccgatgcctttgcatatctaacgaaaggaggtggtgccatatccgagggccttgtctccgcgtctttgccggatgacttgcagaacaaactccaggagcttgtcgaatccgagagccctggtaccggttggaactatgccatcttctggcagctctcgcgcacaaagtctggtgatctcgtccttggatggggggacggctgctgccgtgagccccgagttggggaggtgggagctgctgcttctgcaggcagcgatgataccaagcagaggatgcgcaagcgtgtgctgcagcggttgcacatagcattcggggttgctgacgaggaagattatgcccatggtattgatcaggtcactgacactgagatgttcttcctagcatctatgtactttgcttttccccgttgtgctggtggccctggccaagcatttgcagcagggatccccctctgggttcccaatagtgagcgcaaggtatttccggccaactactgttaccgggggttcctcgcaaatgcggcaggatttaggactattgttttggtgccatttgagagtggtgtccttgaactggggtcaatgcagcacatagctgagagttctgatactatccagaccatacggtctgtatttgcagggacaagaggtaataaggctgcagtacagagacacgagggaaatggtcctgctccccctgaaaggtcacccagtttggcgaagatctttgggaaggatttgaaccttggccggccttcagttggtgtacctaaggtagatgaaaggatatgggaacagaggagtgctggtggtggtacctcattgctgccgagtgtccagaaaggattgcagaatttcacttggagtcaggctcgtggcctgaattcacatcagcagaagtttggcaatggagtgttgattgtgagcaatgaggctggacaccgcaacaacggagcagtggacagccctagcacagcccagtttcagcttcaaaaggtgcctcagcttcagaaactgcaactccagaaattgccggttgttcagaagacaccgcagctagggaaccagcagcctatgcagacacaggtacctaggcaaattgactttagcgctgggagcagttccaagcctggtgtgttggttacaagggcagctgtcctggatggagagagtgcagaggtggatggcttgtgcaaagaggaaggggcgccgcctgttatagaggaccgacgaccaaggaagaggggaagaaaacctgccaacgggagggaagaaccacttaatcatgtcgaggctgagcggcagaggagggagaagctcaaccagcggttctatgcgcttagagctgttgtgccgaacatatcgaaaatggacaaggcgtccctgctgggcgatgcgataacgtacatcactgacctccagaagaagctgaaggagatggagacagagagggaaaggctcctggagtctggtatggtggacccaagggagcgtgcgcctaggccggaggtggacatacaggtggtgcaggacgaggtccttgtacgagtgatgtctccaatggagaaccatccagtcaagaaggtcttccaagcgttcgaagaggcagaagtccgcctgggcgagtcaaaggtgacgggcaacaacaacaacgggacagtggtgcattctttcatcatcaagtgtcccggcactgagcagcaaacgagggagaaggtgatagcggcgatgtctcgtgcgatgagcagttga

SEQ ID NO: 22033 - DNA, 711 bp, Zea mays
  Peptide Sequence Number=SeqID_65408
atggaggcccggtcccacatgtcatgtaaccggcgcgccggtcactacgtgcgaggaaactgcaccgccacctgcgtcaatgctgcgtcttctcgactgcagaaccagcgcagcgactcaagggcaagcgacacctccggcaggcgaagcgggcgccgtttcacctccgtcaagatgaccgcgtcaaaaaaggttgcgccctccggggttcggcaaccgccccagagcactcgggctccgagccctctactgatcaggggttcgaaggctggcccctcagaagggttcgacagccgccccagagcatgcagagtcagggatgaccctgggtacgttcgttacatggttgaggctcgagctacgctcccgaggtaccctaggacatttccgagaccaatgggaacgatttgtaatggaatcccaccggagggaggcaccaagccctcggaccctatcgaatgggtccgggttcagcaaatcacctgtagcctcgggcgtgataggaagctccgcctcgcccgaccccaggcctcggcctcgggggaaggtccccgtctcgcccgacctcgcgcctcggccacagcctcggcctcaggaggagtcacatcctcgcccgacctcaacctcggcctcaggagaagtctctgcctcgcccgaccctggcctcagaccgactactctacaggggatgcatcattaccctactcctag

SEQ ID NO: 22034 - DNA, 318 bp, Zea mays
  Peptide Sequence Number=SeqID_65409
atgggcgcgcggtcggacccgaaacaccgacagctggcgtgccaggtagggggagagtggagtcgccccccatctctgataatgagccgaccgtgcccggagaagaacctcctcagcgggaatcccgcagatggagaaaccgacgctgaaatatccgacgacatcacgaggcagaagagcgggacccagcacaacccgtatcgcgagacgaggtcttggaggcgggagaaactccggaggaacgtgtcttcagggaacgaaggaattcccgacgacgcgatcgtcgacgggctcaagaataggccgagcaggagataa

SEQ ID NO: 22035 - DNA, 1002 bp, Zea mays
  Peptide Sequence Number=SeqID_65410
atggccatgctccaggagtccctgcccttcaggcaatctcggctccatgaacagcccagctttacttctaaacaaaagcagcaaagagttggttcaggattgactcctgtgagaagaaagagacgtgtcgatgggaccagcctgaagcttctgaaacgtacagtacaagcaattggatctgctgaacaaatattggggcaacctattgttgatgaagaagtaccaatgatcagtcgaaaactgctgatggcatacattagagtgcgtgcagtacttggggcaagatattatcgtgtaccttggaagtctctctctgatcttccagctccaccacatacatgtcttagaaggatgacactactattgaaaacaaacggaaagataagaggagctgtcatgtgtttatgtaaccttcttggggaacgaataatcaggctatacgaggtgaaaccaaaacgagtgcagtttcagaaagcggattctgtgatcctgaaaaatcatgcggacattcaaatgcagaaagtgaaaacatggaagtcttctgcaaacctcaagaaaaaatcattaaggatcaccgaaataagattattgaaagaggcatatggaaatcattggctgttgagaaatcctataagggttgaggttaagacagaggcaaagtacacaagcaaagttgctggacgacatgagcttggtccatccataacaccattagggcttcgatattttgcaacatgtgcttgtgtagattattgggctgttgttcttccactaattaactcgcttaaaggttctccaataattgcttcccatgggaagatgaaacagacgacaaacgaggtgtacacacgggtgtcgctactgcccgaggacgaggacacggagaagcgggcgcaggcgcgggtctgggaggacgaggacgcgaatcgccgcgacggcgaggacggtgccgccatgaggccgctcgcacggacgcgcacatgttctgcaagatgctcatga

SEQ ID NO: 22036 - DNA, 1713 bp, Zea mays
  Peptide Sequence Number=SeqID_65411
atggcgaggagtaatggggaggagcgggcgggaccaaggcggtggcgctcgtgcccctccggtctcgcttcgggctggttcgggggcggctgcaggcgtacgggtgatcttgcactcatcgattggattaaagaaatcccttgtgaaccaagggtagaagtcatgcttattgatgatgcctttgtggaaaggaagtggatggaatgcctatttcaaccggacgcatatctaggtgatgaggtgatagactgttacataaatttaataaaagctcaagagcatctaaaatgccgatctggaggtcgtgtacacatagaaaatgtttttcagttcaactttctaaagcgagacggtgatgttgaaactaaaatagatgagttatatccaagtaaagacatggcacaaatatctagcgctgaaagaagggttttactttatctagaccatgacatggtgtttattccaataaatatccgagaaaagcactggtatcttgccgtgatcaatgcaagaaatatggagatacaagtgctcgactcacttggtacatcattcggtcgcaaagacctcattgacactataaaaggactccaaagacaaattgatatggtatctcagcgtaaggagttaaaagatcacaggtggccagacctccgagttgcttcttggccacttagagaaatagaaatggaatatgcaaagcaaacagatagctcctcgtgtggcctctttctactaaactatatcgaatactggacaggggatgaactatctgataattttacccaggatgacatgtcacactttaggaaaaaattggctgctatattactatctttagatataaacaagagaaaggggtgtccgttatacaagtattacaaagaagtcgatgttggatgctcctctgatgttcagatattagatagtcccacaaatcctaagaagaggaaactactttttgtatctgaagaaagcgaagtattgatggaagatgatgatggccccatcactcaagcagacttagaaaggtggtttgttcatgattgggataaaagaactcctataaaagtcccgaccgatgagtgcactaatgaatttttactgaatggcctttccacaaaggacatgccagtgaccaaagtcgatttaatagatgttctatgtgattacatcatgacaatccaagatgatacgacattagatttcaacccttttaagatagaaatatctgtcaaagacctgcaaaacgtattaagggtaaatcttgatatgactctaaaatgttttgacatggttgttcgattgttggccattaaagagtcacatatgtcaaaagatgaaatgacaaaggataaaaaacattatatggacatgcgcttctgggttcttatgccatggaaattcaacggatgctacgcacttttcataattgatcatggtaaaaagcacgtaacttttatagactttacacccactcaagattggtgtaaacacatgccatacaagaggtttgcggaagcaattatcatggcctccaagaaatataagattgcctacaataagaaacgttctggatgggcagatgatatttttaagtgggaacatacaattcggtctggtcttccaatggacttaaaagggtatttttctcaataccatgttctcaacagtttaaattttttctatgataaccatttgtatataatatag

SEQ ID NO: 22037 - DNA, 786 bp, Zea mays
  Peptide Sequence Number=SeqID_65412
atggaggcgaggatgatggcagagcgggaggcggagcgggtggctcgcctggcagatcagcagaggatggcggagatgttccaatacatgcagagtcttggcgccgcccaggccaccggggacctgccatatgatgccccgggggttccactgggtggctcggatgcttcatcggactggacgtcgagatccatggcgagccccctcctagcggcctccgctcggcgtgccccctctctgctcgaccgtgcccatgccgccaccatcccctccgctcggcgtgccccctctccgctccctctcctcctcggtccacgctcagccaccaccataggatctggccgcgcctccgcagaacctctatatgacgcgggtgggctgatgtcacccaaatcaccggtgagatcacttcccataagctttacttcgcctttgcttcgtgttgccgcatccgggggattccaccgtgaaatcaatgaggaagaagccgccacacgggcaactcggtcgtaccatcgtgcaagctcaggcgagtgccctggtagcctcagaagatcgtacctatcgcgtgtggggccaccgtcgggtagctcggcggacaggcgcatccgcgatccccatctacggctgcgcggcggcgtcgccatccttctgcaccggcggcgaatgtggcggctgttgctgctccgcctcggtcgggagaagaagaacatgtgggagtcctcggatccgaaatggagggctggtgatgtcgatggtaccatgcgggtgtgggcggagatgtag

SEQ ID NO: 22038 - DNA, 207 bp, Zea mays
  Peptide Sequence Number=SeqID_65413
atgaagagcattggagagagagggtctccttggcgaaggcatattgaatgcctatggctctggatttggaagaaagagctagatatccgcagaaaagaaaattcatgggactgtttattgttcactggatttgaattttatcgaatgaccgtgaaagttgaattgaggccgaaacccctgaacggtttcttgggagtcactcggtga

SEQ ID NO: 22039 - DNA, 2025 bp, Zea mays
  Peptide Sequence Number=SeqID_65414
atgcctaagaagggtcacatggggacccctaagcaggcttacgctaccgacggcggcaagggtgacgtcgccgctggcagcacggtgacggcgagcgccatcgcgtcctcctacgacgaccagatccgcccgctcctcgacgcggtggaccggctgcgccacctcaaggtgacgcaggagggcatccagctgcccaccatcgtcgtcgtcggggaccagtccagcggcaagtccagcgtcctcgagtccctcgccggcatcagccttccgcgcggccagggcatctgcacgcgcgtgccactcgtcatgcgcctgcaggacgacccctctgcggactcgcccaaacttcagctcgagtacagcaacggccgcgtggtgaccaccaccgaggccgacgtcgcggacgccatcaacgccgccaccgcggagatagccgggagcggcaagggtatctccgatgcgcctatcacgctcgttgtgcgcaagcgcggcgtgcccgacctcacgctcgtcgacctccccggcatcacgcgcgttcccgtccatggccagccggaggacatctacgaccaggttgcaaagatcatcaaggagtacatcgccccgaaggagagcatcatcctgaacgtgctctcggccacggtggacttcccaacgtgcgagtctatccgcatgtcgcagcaggtggaccgctccggcgagcgcacgcttgccgtggtcaccaaagtcgacaaaaaccccgagggactgcttgagaaggtcaccatggacgacgtgaacatcggcctcggctacgtctgcgtccgcaaccgcatcggcgacgagacttatgaccaagcgcgcgtcgaggaggaacggctctttaaataccatcctttgctgtcgaagatcgacaaggacatggtcggcatcccagtccttgctaataggctcatgcagatacagtccaccatcattgccaagtgcctcccggacatcgtgaagcagatcaacgaccgcctcagccgcagcagcgccgagctggaccagatgccgcaggacttgaacaacgtcgctgatgctgtcagggtcttcttccacatagtgaagcaggtctgtaactcacttgaaaagttgctggtgaggggcgactttgctgagtaccctgatgcgcgtgagtttcatggcacggcgcgcattgccgacatgctgtctggatatgcaaaggaactccccgcgcagtgcccgataaacaggaacgaaccgtttctgatggaggaggtgcgtatactggaggagactaagggcataaatctacctaacttcctcccaagaacagcgtttcttgtcctgctgaagaagaaggtgcagattatagatgtgatccctcaggagcttgccaacaaagtctgggactacgtggaggacctggtgatgaaggttttgctgaagcactccgaaaattttccgcagatgcagtcgccctgccgccgtgccgtgcagaccctgatggacaaggcgcggctgcgctcggcacatcacgtgaaggagctgattgccatggagctggtggcagattacaccgccaacccagactacatgaagacctggaccgagataatggaagggtacgagatgttcatggaggccgtggaggacaagtcgaagccgacaagaatcaccctgaaaggctttggcgaggtggacgtgtcgcatcttagggtctatgctgactttgcagggaaggcgttcgacctgagggcgcgtcttacggcatactggaagagcatagtgctgaggcaggttgatggccttgcattgcacgtccttctcagcgtcaagctgctggttgagaaagaccttgaggaggagctcggcaacgagctgctgagcaacaagttagctggggtggagaagatgctcgcgccgtcgccgggcactggaacaaagcgtgagcgcctgaagaagagcatcgtcctccttcgtcaatcgaaggaggtcgtggcaaacataatggataggattagcgcggctggtgacatctag

SEQ ID NO: 22040 - DNA, 117 bp, Zea mays
  Peptide Sequence Number=SeqID_65415
agatactccggtacaggtggatatgagattgatggttttgattacgattatggtattggcgaaaatgaagctgtggaaggagacttccaggagttccaagattacgacgagttctag

SEQ ID NO: 22041 - DNA, 642 bp, Zea mays
  Peptide Sequence Number=SeqID_65416
atggcgcagagggttacccggtctacgctcgccggcggtcgggtggagtccgacgactgtggactggcctctccggcgaagcaaactccgattcctcgctcggggagcttcaccgaggtgtgctcagtcttctccgagggtcggacggggttgggaaaggcttggctggccggtctacggtggcagggagatcgggcggccgcggacacgccgtgcacgggcaaacgcagggcccgcagctgtagctggtcttcggctgagatgccaatgacttcaccatcttctattgtgtcttcgccctctagtggagctaaacttgttggtggtgcttgcggtacacctccggagctgcagcgtcgagtcatagagggtgagtctatccattttccagacatgacctatgggctcccaggcctacggtccactcatgacctatcgagcctaggtttgagcgcactggccgcatacatgacctacaatacgacgagtcgcgccatacaggacctacagggtcagcacggcgcagggacgacaatgatggcatcggggctctttgccactcacgttgctcgccataaagagcacgatcagagacactcggtgattgaggcgatatggacaaacacagccttaccggggtag

SEQ ID NO: 22042 - DNA, 870 bp, Zea mays
  Peptide Sequence Number=SeqID_65417
atgacttcccacggatcctcaaacgatgggaatgcactgtcccacactgacgggcttgcacgagagggctttccccgcattttgtgggaggtacttcagggggccggatacacgacacctcctcagtacgcggtgcagcagttcgagaagcacagagtgccccgctgtagggtgaggatgaccttggagcctcatcccctgcagccaggctggcgttcgctggactctgagtcctttggatactgggctgaggacacgatcgaggcgattgctctgcacgggttgaccactttctgcgaattccatcccttggagctgtccacccaccccattggcttgttccccactgagaaggaggacgacccaatgtggaaggatcgggtggagcatgccaaggacatctgggctctctacccaggccagactgctcacttgatggtacgatgcatgaatgccctgtatcgtctgcaagtgatgcgtggtgaggcaatgtcccatctaatggcattgttggaggcaactaagatcaccctggacaacagagaggagcttgtggttgacttgtcccaggagatggtggaaaatgacttacaagtggagcagttgtcagatgagatccaagagctggaggaattagtggggacaagggagaacaccatcgaggttctcgaggatcagctcatcaacacccagcagcagcttgccgaggctaatgagcacctagatatgcatcaccaggagatccaggatgtggaggctaacgaggacgtcgacattcagggaggggaggagcctgcttccagtgtggacactgctggctcagggaggccaccttcccccgagtcgagtgttgcctcgttcgctcactag

SEQ ID NO: 22043 - DNA, 603 bp, Zea mays
  Peptide Sequence Number=SeqID_65418
atgggtgtagcccccgaccttcaaatggattttttaaggataatccattcgaaggtcttccttttgcttgaaaaaattggcatgaagctattcgcattatgctttggaggtcagcattatgtcatcaaaattttgctacagaggtcagcatatattttgtctttagcagccgagtttgcaatccgtccatatcttgctaggtatttactgcgtgccctgcacggatgtgaccgttttgaaaaatatactgataattcctgggcgtcccccccaatgggtgtgggcaagggacggcttgacgactcccaggggattgccgcggaggtctggacgtacatccgggccgtcgagcgctccgggctcgagggctcggatgagtctgagttctcctcggacgaggaggactcggacggcggcgaggacgaagatgacgacgacgacgacggcgacgacgacgacggtggcgacggcgacggcagcaacagcggcggcaagggcagcaccagaggcggcagcagtacgggcagcaccagaggcggcagcagcaagggcagcaccaagggcggcggcggcaagggcagcggcagcagggccagtggctaa

SEQ ID NO: 22044 - DNA, 309 bp, Zea mays
  Peptide Sequence Number=SeqID_65419
atggggaagcctgtcccatcactcctcatgctcctcctcagccgaggcagggtcccactcaacagtccaacccggtggttatgcataaaaccggggcttgccttccaaagcagtggcaggcaggtcctctggtgcaggctcgggtgctggatctggggctacctcctgagcagctccttgctccggcacgaggatgtactctctgtcagcaagattacagtctatcgaaatgcaatgaacatgtatgtcatgactatgcaagattttaagaacattgagccacagaaattaagtcaagaattaacttag

SEQ ID NO: 22045 - DNA, 528 bp, Zea mays
  Peptide Sequence Number=SeqID_65420
atgaagataaatagtgaccagactgactcgaaggcgctcccacgggtgacatggtggttccctctcgacgacacctccaggttctggtccacggcggcggtgtctgcgcgggacggggcgaacgacaacaagcgtctcccgacgacgcctccacctctctgggaaagcctcgaggagacatggatgggttgcccagagagttgtgcctcaagatcttccacctcctggatcaccagtccctcgcctcttctccccaagctgttcaacgacaggtggagagcggacgccacagcgttctacgcgccggagggatccaagtcttggaaggacgtcttcgccgtgcaggaccggtgcgaccgatacggactgatcatcagggaagggaaggactactacctaatctaccagggcgagattcagaggtacttggacaaccagaaatttgccatgacctcgttcctgaccaagaaaaactgtcaagcacagttatgtgcaaaacataaggacatagaccttctccccacttaa

SEQ ID NO: 22046 - DNA, 1167 bp, Zea mays
  Peptide Sequence Number=SeqID_65421
atggatccgcgacgcgcatgctgggagagctcgacggaggacgtgacgaggccgctgctgcccgtgcacgacgacaggcctgcgggacgctgctcttgctccgggctcgggtccctgctcaccaccaacaagtacctggccgtcgcgtcgggcccgctggcgtgcgcggtgatctgcgcgctgggagacttcggcggccacccggcggcgcgcaacatgctcggggtgctggcgtgggtgttcctgtggtggatcacggacgccgtgccgctcggcgtcgcgtccatggcgccgctgttcctcttccccgcgttcggcgtatcctccgccgacgccgtcgccaaggcctacatggacgacgtcatctccctcgtcctcgggagcttcatcctcgcgctcgccatcgagcactacggcatccaccgccgccttgccctcaacatcacgtccctgttctgcggtgacccggtgaagccgcacctgctgctcctcggcatctgcggcacgaccgtgttcatcagcatgtggatccacaacacgccgtgcaccgtcatgatgatccaggtggcgacggggatcctgcagcggttcccgcgcgaccagcagctggagggcggggccgacgcccgggagctccagcggttctccaaggcgctggtgctcggcatcatgtacgcgtccaccatcggcgggatggccacgctgacgggcacgggcgccaacatcatcctggtggggatgtggtccacctacttcccggagcagcgccccatcaccttcagctcctggatgtgcttcggcctccccatgacgctcgtcctgttcgcggcgctctgggtcacgctctgcctcaggtactgcaccaagaacacggggagggtgctctccgcttacctcgacaggaatgacctcagaagagagctcagcttgatgggtccaatggcgtttgcagagaagatggttttggccgttttcggggctctcatcgtcctatggatgaccaggagcctgacggacgacatccctgggtgggcggtcctcttcgacggcagagtcggggacggaaccgtcactgtaagtacacaaaaacccgcaccctcggtcctcggaccatttctcagcgacgattcgccgcgtgggcctcacgggacagcattctatacctag

SEQ ID NO: 22047 - DNA, 1743 bp, Zea mays
  Peptide Sequence Number=SeqID_65422
atgcccgattttttttacaccgcaggctactgtatgctgtattcgttggtatcaagtgaaaatgccacggttgctgaactggctacgactttacaagccgacctttaccagctccaggcagctgcatcgtttgcttgccgactaggatgggctgtgaagcttctggataccgactctgttcttagggattcgagcactcttgcactgtccaacaacattctcagcgatgaagttgaaagctctcgtacgagtgtcgcctcagaaaagtctggtcatgagtcgcttagcagtgattctgatggacacaagaactccgggatggcttatgtgggcttcattgtcgatgctaatgtaacttcatacttaatgatgggctcactatctccagatttgaagtcgcatgctgtgacactatacgaggcaggaaagcttggcgattcttgtaaggctgatctatgcaatgatcttgccagtttagaggggaaacgatttgaaggtgctgtttctgttggtcgcttggccagcgaccgtgcaggtggtgccagagctgcttggggtcatggaattggtcagcgaggcgggggcgagaggatccctgggatgcgccttccatcgaccgagcgtcgacgcggggcgagaatggcggagcgacgatttcccttgctggttttagagctcagcgtcaatctcgtcatgtctctaccgcaccttagtctccgccgcacagatcgacatgccacacgtgcgccctggactgcagcccctgcacctccctccatcgccctcgtcaatcccgtcatggaaggcccgtcctcgcctccccgcgcgcggcgcctccctggatcttccccaccatcctcgcctctcggcgcgcggcgattccctggatcttcctcacctcccgtcaacaaaacaaaaggaaacacaacggcctcttaccatctttttcctcgcctcccgttcctcctcctaccttgtacggcgactccaaacagcaaaagtgaggaggaagatagtggcactgcagcgctcgtggaagaagaagcggtgaagcaggcagaggggttcgaggctgtggaggcaagggcaaagaacgtcgacaagtttgatctcagctaccttgacaaccaagtcttcttttggtctgtccgcgacatcttcaatagggatctcctcaataaaaagggcgaccttgcactcatcgattttattaaggaaatcccttgtgaaccaagggtggaagtcgtgcttattgatgatgcctttgttgaaagaaagtcgatggaatgtttatttcagccgaatgcatatctaggtgacgaggatgacatgtcacactttagaaagaaaatggctgctatattactatcttcagaactgaataagagaagggggtgtctgttatacaaaaatgataaagaagttgactctggaagcccatcggatgttgagatattagaaaacccaacagattctaagaagaggaagctactccacgtgcttgatgatagcgaagtagtgtatgaagatgaggaaggccctattactcaagcagacttgcaaaagtggtttgttgatgattgggataaaagaactcctgtaaaagtatctaatgatgtgtgcaccaatgactttttaatggttggtctttccacaaaggacatgccagtgaccaaagccgattcaatagatgttttatgtgattatatcatgacaatagaagacgatacgacactagagtaa

SEQ ID NO: 22048 - DNA, 510 bp, Zea mays
  Peptide Sequence Number=SeqID_65423
atggagcccttccttcccggcacccgccagctccacgcgtccgccgcagtgatgccgcgcgcgcgcccaccaccaagctcgccgcctaccaaacccgccagctccgcgcgagagccgccaggcagatccgcttgctcgccgcagtgctggcgcgcgatgaaggccgcgcgggggagacgctgggaaagccacacctccacgcccccatcaatcccgcccaccaccaagctcgccgcctaccaaacccgtcagctccgcgcgagatccgccgcagttatgccgcgcgagggagacggcgggatagccgccggccagatccgcttgctcgcgagggagaggaaggaaggccgctcggggggaaacgccgggagagccgctacctccgcgcccccgccaatcccgccgcccaccaaccccgtcctcgagcccgcccccctccaagctcgccccattccatactcggcgacaggattcaccgcgctcccttccgcgcctgctattaaaagctag

SEQ ID NO: 22049 - DNA, 834 bp, Zea mays
  Peptide Sequence Number=SeqID_65424
atgtcaactgagaaacgccacctagatcagatcatactcctcgtcttgtggctcctcctgaaccacctgttcttctcctgtgggggcgccgcctgcgccgctccgactgcagagccactcgacagagtgaggctgacagcggccaagtccggtctcaggcgtcataggaaactccgctccgcccgaccccagggctcggactcgggctcagccctgaaagacggcgaactccgctccgcccgatcccagggctcggactcgggctcagccccggaagacgacgaactccgctccgcccgaccccaggtctcggactcgggcttagccccggaagacggcgaactccgctccgcccgtccccagggctcggacttgggctcagccccggaagacggcgaactccgctctgcccgacccccggggctcggactcgggctcagccccggaagacggcgaactctgctccgcccgaccccagggctcggactcgggctcagccccgaaggacgacgaactccacttcgcccgaccccagggctcggactcaggctcagccccgaaggacgacgaactctgcttcgcccgcccccagggctcggacttaggctcagccccgaaggacgacgaactccgcttcgcccgaccctagggctcgaactcaaccctggcctcagccgacggtctccgcctcgtccgacccgggggctcagactcgacctcgaccttggaagacagactcgacctcgacctcggaggagcctccacctcgcccaacctagggcacggaccgaccacgtcaacaggaagcgccatcattaccctaccccgagctga

SEQ ID NO: 22050 - DNA, 267 bp, Zea mays
  Peptide Sequence Number=SeqID_65425
atgactgggaaaaagaccacggcttcctctaacggcgacactccaaagaaagccaaggtggtggtggaggatgaggaagaggcggggttggaggatgaggaagaggcgactgtgacactatccgtggagaaggacgcgctggagtgcgacatctgctgcctacccttccagtccgaagttttcatggcaagtcagattaccatgcattgcaagaacaggcattctggatgtgcaaagtgctgcatccgcacggacgaaagtcactag

SEQ ID NO: 22051 - DNA, 1812 bp, Zea mays
  Peptide Sequence Number=SeqID_65426
atgtatgtggcggagacggtgggccaccatgaggatgaggagaaggagggtcagaaagaggatgaggagcagcatgtgaagtttgaggaggtgatgatggaccccagatgggtcgagcgagtgggcgagcgcgaaggggggagaggcgaggcggccggagccgagcgtgagagaggtggaagtcccgcggccttcgtgttcgtcccgcgcccaggtcagggcgacgtggggtttcctccgaagccgaggttgagtctgccttctgttgccgtggccgagcccgagccaagggcccgagtccgagccctggggtcgggcggagcggagttcgccgtcttccgggtcttatcccgagtccgagccctggggtcgggcggagctgagttcgccgtcttccgggcggcgctgtccttctgtcagactggccagtggagcggtggagtgacggcggtcacctcggctctgccggaggcgcgtgtcaggatagagctttatgctgatgggggttaccagctgagaattaggcgtcttgaggcaactggcgtgccggttgctcgacgcgtgggcctgggttccaggctggcgtgtcggaagtcggagaagcgcgtccatctggcgcggttgcatgccgcctgcatggctgcccgccccttccgcccgttggtctgggcgaaaatggggggtcgcctgaacgcaactccatgggagctggtacctctcagccatcgttcggcttcaaggattttcatcacgcagcccggtcgcaccccttcaccggcggtcacccgagatggcgacctccagcttgatggtgggggaaagcgagccgggctgcggcctctgccccttcctcagcctcaaggattttcatcaccaaggccggggaggggagagtgccgagttggggtcggcccctgcgtgggcggtggcccgctccttcactcagtgatggggggagaagcgggcattgcccgtggcgtccggcagctgcagcgtgcctggtcttcagccgcgagtggcttcggggccacttgcggcgtcggcgtctgccacggcagccggaagaggttcttccgccggcgcggcggccgggaccggccacgggctgacctccaacttctacggccttctgcccgtccttgcctcacgagttttggcacgggcgggggcctcctggcagcggcatccaccctgaggtcagcgttgccgctgttcggccccccggagcagaagtcgccgtcgtcgccactgctggacactaggtctcgcctgtttgattatctgaaccgctttaccaagcatgagttgccccgtgtcaaggtgacgggtgaggccggggatagcgatatcagtatgaacagaggcggagttggctcgagaatgggaacctggggtaaccggttgagccgcctgctcgggccggattcccggaggaccccctggactgcggcgccgcccgaggctgggtcgggctttgctgaagacatcgtcgatgccgagggtgctacagctcccttcggcgtgaagacccgagcctgcaggatccgatcatcttgtagcgtgtgcttcctgcggccgccgaggccagaagaaaacaccctcgctgcacttgcgaagctgcgccttttttcctcctgtttcgagcatctggacttcgtcggtaacagggatgtttgtgtgagcaagagctgcttttcgcggaagggacgagtgaggtatccgtatcccagaggcgtgggaatccctcggcttggtcggccttgccgcttacgcgtactttcacccgtccatgaggccctgtccccgacttag

SEQ ID NO: 22052 - DNA, 654 bp, Zea mays
  Peptide Sequence Number=SeqID_65427
atggtgatggaggcagtaactgccgcgagccgagccgaggtggacacctcccggccgttccagtcggtccgggaggccgtgaaggtgtttggcgagcggcggcacgccggacgcagcggcagctccaacgggagcagcgcgtcgtccagcgtcaagctcggcgcgtctgatccggcgccagcttcgccagcgtccgtgatgctggagtacctgaagaagttggaggacgacctggcggaggccaagggtgaggtggtggagctgaggcagaggcaggcccaaatggaggtggccgtgtccagcctcagcgagcagttcagcaagggcctggccgtctactccagcctcagcaagggcaaggaggtggccgccgccgtcggagaaggggacagtatatgtggcggccatggccgcgtccgcagccaccggtgggacgagagccgggccgaggagtgggtggcgagcctcgagtacctgccgaggctatcggaggcgctggcgatcaagatggtcgaggatgacctgggccacaggaaggagaggaaggtgaagaacaaggctggcagcagggccaagaagcataagagcgggatcgcattgcgattgatcggaggcatgttctgctccaagaaagccaggtccagccgatggtga

SEQ ID NO: 22053 - DNA, 1524 bp, Zea mays
  Peptide Sequence Number=SeqID_65428
atggccgtcgcctttaatcggcactgttgggtcatgcgtaggggtacctcgagtcgtggtactggtcccgcggtcgaggagacgcagcattggtgtgagtggcggtggagcttcttgcatgtcttggatgcttgtcgcatagcagtccaccctttcgaccaccagtttctgcgaagatgggggagtgcttgtaaccgcgggacgattacatgccttgcgtgcggcagttcgccttcttcgtgcttcgggtcagctcgtatgacgtgtgggtcccagcccccgtgtcgtggggggagaaccctggaggatgtcagcggggacttcgcccgtgacgctaaggggtgcaagcgaggaggtatgcctataaaaagggagaaacgatcccctatgcagtggccatgcctttgtcctcccctcatgccatgtgcccttccgccttttgatcccccggatggggtgccccagcttcgccttgctcttgctgtcattggaggagcgcggcctcgtggagatcggtacctttcagccatcgttcggcttcaaggattttcgtcgtgtagcccggctgcattccctcaccaatgggcagtttggtggggagaagcaaaccgggctgcggcctccaccccaccctcagcttcaaggattttcgtcatccttgctgaggtggagggagatctgagccggggttctacctcccgcatgggccggcaggccgtctcctccttcagcattcaggggagaaggcactcaccggccttgcggaggggcgaactttggcaacgcgggaccggtcggccgcaagcgccgtcagctccagcgtgcctggctcgctggcttagctggctttgtcacggccttcgatgctgcctcctgccgcttgatctgggcttgggcgtctattgcgccgcgcgcaccaggggaccgtccaagacgctgcacgccgcatgggcggcgttcgtgttcttggattgtcttgtcctcactccggcacgacgcctctgtgcggaggtcgagggctgcccgtggctgctgtcgccggtgctgaggtggtggcagccggaggaggttgtccccgccgacgagaccgtcggcgccagctgcggccggaccctcgactctttggctttgatggcttatcctcgcccctcgagtggagacgcgggcgagagccttgtcacagcagcgtcggccctgaggtcatcgctgctgctgtttagccgcccgaagcgggggtcgttgtcgctgctgtcagagcggttgacggtgagccgcttggagttcgtcgtctcgcgggcccctagtatggaggttgttcatacccgcaggaacggaaccggggtcccttttcgggaccctcggctgctctgcgatgagccgaagccagaggcagcggtgctagcgcagacaaacgcggagtcggctcgaaaggagacttcgttggcctgggagatggcggcttcccaggccgaagaaggtgtggcagcagctgctggatcttggccaaaacatctgctggcgtag

SEQ ID NO: 22054 - DNA, 3192 bp, Zea mays
  Peptide Sequence Number=SeqID_65429
atggacaacaaatcagatggttccaatagcttgatcaccagaaatgctcatttctcatcaagaaatgatttaggtggttttcatcaagatgaagttgggattagggattcaagcttctcaccatctcaaaggaatgattctgatgggggattgtacatagagaggcaagatactgctaattcttttattgactatatctgtgtgggtcgtgctgatctaattaatagatctaatgattcatctttcagttctcaaacttcaggtcaaaacatgctgcaggagagtattgatgagtcatccttaagtggtttcaatcatttgtcgtcaggggcatctggttcatccaaagatcttcttgatgccgctgaagaaacaattgaagaacttcttatcgaggcacaaatgtgggagagccattatcaaaaattgaaaattgatctagagaaattacagaaggagtctgatgaaaaatccaagaatcagactgagatattgctagaactttctgcttcacaagccgaacaagagtcgttgagacaagaaattgaagaattgaaattgtctttgaaggtggctactgaacgacaaacagttggtggaatttccaaatctggtgatgcaatagatgtccaatttgagctaaaagatgaggtacactttttgagggaatcaaatgaaaacttaacaatgcaactgaagaagagtcaagatgcaaatatagagcttgtttctattcttcaggaactggaagaaacaatagaggcacaaagaacaacaatctccaatttcactcaaatgagtaatatgattgatcaagatatacccacgaatgcattatcagctcaagaggatgcagagtgggaaagaaagatgtcattgaaagaagatgaaatcatagcattgagggagaaattggatcgtgtactcagcatagaaaatccaggtggtgttggttctgatgctatatatcttgaactggaaaaggagaatgattttttgaaggttaaaatgcaagatcttgagaatgattgttctgaattaacagaggaaaatttggagcttatacacaaattgaaagaagttagtggggtcgaagaacaagattcttgcctttctgatattgaggtaatgttaaatgcgacaggtctttctgggacttcaaaatctagagcaaaatacctagaaagaaaatgtgctgaccttgagcagaagatgttgaattttcaatcggagtctagagaactagaagagaagctcaaaaaaagccacgaggatctaaaaggacaaactcttgaattatctgagcttagagagaacctaagtagattccgtgctatggagctagagagaggggaaatcaatttttcaagaggctaccagttaagaagtgaagaactaggagatattgaaaccgaactgaaactgttgaagagtactgttcaactcaaagaaaaagagatcgaaggattacaacattctaaactagaaatggaaacctttatagatagtgtacttggaccaaagatacatgagcttgaaatctacaaagtggaactagagttgcatatatcaaggctagaagatgaaaaaatagaattattggagtccatttctggaatggaggttgagttgactaatttgacaagtgagtacgagtcatgtatagttcaaatggatgattctagaacaatgatcatagatctcaaggataaagtagaaaggaatcaaatggagttggaagctcaaaaggtggaattgaagaaaaaacaactagaatttcagaaaatatttttagaggcacaagatgattcagaggctctaagaagattgaatgctaaactgcaggctaaaaaagatatatctttaaaagagcaatcttttctcttggaactagacaatatatttcatgagcacaaggatcatgaagaaaagataaatcgtgcacatttccttttaaacaagattgataaagaaaaggctattgagatagagaatcttgagagggaggtcatcagccttactgcgcaactatcttcaacacatggggagcaagcaagttccatggtggatactattcgtgaggcctccatccttcgagcagacaaggcaaaacttcaggctaatcttcatgatgtaaatgaacagttgagacattatgaatctctactagaagatatacacaaggagtcaaaaaggaagattaaatcccttaccgattcactcaatgtatcgaaacaaaatgaagaaatgctgaagatagatgccgaggctgtcagaaggctgatggaagctgctaaatccaatgaagaaaatttaagaataacttcaaatgaactagaactgaaatataaatctagcgattatgagaaacaacaaataatggaagaaaattatggattaaaaattcaagttcgaaaaatagcaggtgtccaagatgaacttttggaagtgcaaagttcccttgatgaggctcaatttgaaaaggagagactagaagggatacttcggttgatatctgaagaatgtgatgaactaaaggtgcaaaatgccatgttaacagacaaagtctcaatgatgcaggatacttcaaacaatatcattgaagaaaaacaaactaaaacatccatgcaaacaaagatgagtaccataaatgaggggaacaatgatctagctactgataacagaggttgttgtctagttaatgaggaaccagacctgcaagtaaaggtccaatcattggaaagcggacttgccgaagttctagagaaaaatagcatgtatatgacacaggtgaagaggaaacatgttgtgaaaactgccagaggcatccagatcttggaggtcaccatcgcgagaattgagcaagcgcagcaagaaccacagttctttttactctgcaaagaacttgtaggagacttttgtggaggtaacatgtgtggagcacaggaacagtggttgatggctgaggtgaaggtcatgcgggctcgtgctgatgaaccgggagcggtttggtggtttgggcctcaaaaccacccagcgctacggatggttggttttgctgagtttgggcctcaaatcttggcggtggcggttctggagggaaccggtggcggcacgcggcatgatcacggagggtgcgtcaaggcgaatcaactccgtgtgaaggacgtggccgtcggatcgagaacctag

SEQ ID NO: 22055 - DNA, 519 bp, Zea mays
  Peptide Sequence Number=SeqID_65430
atggattttgacatggcctaccgtcaacacaactatgttcaattatccgagggatggaaaaattcggctacggtttcctctaggaaaggtcgcagagcaccagcgggcaccttcgcaggcagtccgcagacgatgcggtggtcactagaattagagaaatcgaagcctgtcatactaactggtgaccttaattgtgcgcatcaggagattgatatacatgaccctgctgtcccatatcatgccgcaagcagtgtaatattaagcatgttggtcacaccttgtataagaagcatcatatcaaagaaactggggccttttgagcagatagaatctttgagaaggttcaagctggaggaagaaattattgatgcagaatacactctgacatgtgacagaattgtgagcttgaaggacaaggattccggctctcatcaagtgactcctccccctcacgataactttgcggacaaatgtctcaattctagtggtggagctacgaacaacaatccgatgtcctga

SEQ ID NO: 22056 - DNA, 228 bp, Zea mays
  Peptide Sequence Number=SeqID_65431
atggcggtgaagtcgctagagttgaggctggcgcgagctagggtggctccagggtcgccggagttgggcacaaagggagagggcgccacggcgaactcaatgatggggaagaggccacgaatccacgggcagagaggggagaacggcggtgagaaaaccctcgggcgggccggagtaactccgcggataatcgatgtcgtcggtagcgaggaaatgggcaaggcctag

SEQ ID NO: 22057 - DNA, 318 bp, Zea mays
  Peptide Sequence Number=SeqID_65432
atggtcatagaactcggtagaaaaaaatacatagatatcgggaaacttgctttaccgcgtgctatggacaagacactcaacaaattaggctcctttgtcgagtgcttggcactcgacattggaactgcgactggtcctcacggaagctttctttgccgagtgccaccaagcgaggaactcggacactcagcaaaggctctatcatcgtcacaatgtcttttctttgtcgtgtaccagttggcactcggtaaagacgttactgagtgcccgatagaaagtactcggcaaagagaccgttgccgacgtttggttcactaa

SEQ ID NO: 22058 - DNA, 216 bp, Zea mays
  Peptide Sequence Number=SeqID_65433
atggcagatgacgtgggggaggcgaaggtcccatgcatcatcattttggctacaccgacccctggcctccatatcctagagctcgccacagcccatcgtgtagttccctgtgggagagcggactatgttgctggtgtggtcgatgactcgcaggacatgtgtccaagacgtgggggatgcgcacacggtgcggtactcacgaaggttggtggttga

SEQ ID NO: 22059 - DNA, 741 bp, Zea mays
  Peptide Sequence Number=SeqID_65434
atggcgagagtagcgtgtaccctctgtggcaagaggctggacggtggtgtatctgtgctctcggttggcgtgaacccggtctggaacatttttgaggaagtttttagcgactttatagttagttcaattattccagagtcatctgagatatttgattctgatgttagtgatattaatcccacttcatgcaatggcattatgaagtttactgatgaattgttcgcgaagaatttcattgaactgtcttcagagattcaaagctatctaaatcagctgaaattaatacctttccttgctcaattcatcagatcatccctcttgtatagattcaatgatcctgtcgcaataaaagcaattcgatcccttagtgaaacagatttggagatatttcaccttatgaatgagatagagtcacccgtgtgccaaaccattactgaagttgatcatctgtggggagcttctgctctgaaatttagagaagaactgaaactagatttttcaaaatcagatacacataacacagagaatgctgaaattactgaaaagagaagggcgctctttcgggagaacatacctgttgattccaagctctgtgcaaagacatctttgctatattgctataaaagatctacaagggcttttgttttctcactggaacaacttcaacgggataactttgccgatagttttgaggtaatttctagaataatagtgtcaactgaagtttggatattgttctag

SEQ ID NO: 22060 - DNA, 165 bp, Zea mays
  Peptide Sequence Number=SeqID_65435
atggagtcggcgcggtgtgtgctaccgagccatggggcccacacggcaggagaagcggcttctggctgggctggcaggattggggaaggattatgggtcgagaggggtgcaatggagattattatcctcatgatatggtccatccggaagcaacgaaataattag

SEQ ID NO: 22061 - DNA, 766 bp, Zea mays
  Peptide Sequence Number=SeqID_65436
ggtgtccggtgcgccacttcgcgcgtgcctgacttctgcgcgctctggcgcgcatttaatgcttctgcagagttgctctcccctggggcaccggacactgtccggtgtacaccggacagtccgatggcacatgccgaaggcgttgaggaccttgatggtctagacggcgcgctacccgaggccgcggaggtggatccggcgccgccatcagatgctagcgagggcccctcgtcgaccccctcgttgactgcaaccggcgaagaccccgcactagcccctacgccgacgtgtgaggacgcctcgagggttgtggtcgaaccagctactgaagaccccacggcggtggccgagccttcgcaggtttcgacgtttaggcctgcgcaagcaaccactactgacaatactggttttgcggcggagacttcagttgtagtgcccgccgatgatagcgtgcctggctctatgtctaaatgttttgagtccgacggtgagtctgggagttcatttccttggacggaggagtcctcggatgagggcttggattattttgttgcgttggatgtggctgcggcagagacttcgccgcgtgtggagggtgccgaggatcttcctggtatgagtactgggtgtaggcggcgtggcaggcgccgtcgcatggggatggagcgtggccgacttcgagtagacggggttggtaggcgagaattgttgtcttcgccgaatggggcgggtataggcgaaggggatcttcgggagctttttgagg

SEQ ID NO: 22062 - DNA, 630 bp, Zea mays
  Peptide Sequence Number=SeqID_65437
atgacggtgccactgactccgaccaggtcaagggaagaccaggcgaagacgtccttattttttggaaagacaggagatgagtttctcctcgtcttgcgaagtcaggtcttcgcttatgatgaccgtttgcttgggcgttgccggatcaaggggaactgtcttcgttccgtcgttgctctgcagctgtgccttttcatgctcgttgtcggctgggcgggtagcctcagggacttcacgctgcgtcggatagaccatgtcaacgatgtcaaaggtgactgttcgcttcgcgcattgggcgctacgccgaaggataggggtagctctatcttgcccacagggaaggtgcccttgccaacaaagccatatagaggattgtccaagggcttgagtaaactgtggctgatacccatgcagtcgaaggcgtggaggaagatgatgtccgcctggctgccattgtcaactaggactttgtgcaggtcccagcctgccacactgcagttgattaccatggcatcaatgtggggtgcgctgcgcagatcaacatctctggcgtcaaaggtcagcggcacgtgtgaccacttcgtttgcacgactgggccggtgatggcgacgtggttgatgctgcggtag

SEQ ID NO: 22063 - DNA, 1806 bp, Zea mays
  Peptide Sequence Number=SeqID_65438
atggctacagcacgaggacgaggactccctcatcaaacgcagacgggaacccggggtcgggacctagtcctacggcaagtaccaaaccaagaagggctccacaactctcccccagctgggaaggacccttcaaggcccaggtcccagtcgaggctacctcctgggggccatcgccaactctttcttaggtatgctggtatgaactacctccacaccggtagggccgcgtgggtagctggctccgagtggctcgccagcagaggcaaccacctctgcaatgggcagcctcaccagcggcggcaaccacctctgcgccgggcagcctccccagcggtggcgaccacctcagcgtgcacgccatggcgaagaggtcctcacctccgtcccactacaggggtgaggacaagaccatccaagccatggagctgggagcacggcggaaggcggtgcttgcggtctggccaagactgcgtagccgaagttcgcctccttcacaaggctggtggtcatccttttcctccgaatgctggaggaagaggcgggcaccagcccatgtgggaggcgaagccgcggcttagctcgctcctcaccaccacgaggctgatgaacatccttgaagccaagcactggtggaagagcgtcgctcccgcaaggccgcgcacctctagcagaggaaaaacaagaccgatttccccgctcgcgtcccgaagcgtcacgggcagggcctcccccaatgcgcaccaaggttcccatcctatgatacggggccaggcctcacatgtcatacaagctggcccgaagcgcgaagaaggcaaaccgccgcacaaggagcgcacaaccgccccgtggttatgcgcctcttcatcttcgccgcaaccaacggtcaagaaggcgaaccgacgcacaaggagctcgcaaccgcctcgtggttatgcgccccttcatcttcgccgcaaccaatggtcaagaaggcgaaccgccgcacaaggagtgcgcaaccaccccgggttatgcgccccttcatcttcgtcgcaaccagcggtcaagaaggcgaaccgccacacaaggagcgtgcaaccgccccgcggttgtgcgccctctcggcttcgctacagccagcggtccaacctctggcatgggggcccaggcccacatgtcatgcacccggcgcgctggtttctgcgtacagagaagtcgcaccgccacttgcgtcagtaccatgcctcctcggggccgccgcagaagacggagaagttaatttttcaaaaccaatgcagtgactcaaggcaccccacgcatggcccaacaaagccattaagtacggaggtcaagggtcagtcagccgcgggggcaggcgtggcagtcggtgtgaccaagggcggaccggcagcaattacaccaatgggcacgcaaaaacagcgaatcaatcgccagccaaactttggccccacctgcaggctcgtgtcctcccctgaggcgggcccggtggccactgtcggtaccctgaatcaggggcggagtcccgatgctgccgcgtggcatcttgcccgtgacataagccagcgggtggagcctgacgtaaggcctctaggccacgcagtctctgcatttattgcggagaggacgcgccgcctgtctaccctgctgacaggcgatgtgccccctcaatatttaatgcttcttgtccactccgctggcaggcgacgccatggccatcttgcagacggcgctgttggggcgaaggtgaagacgctacccttcgcttcaggccttcgccaccttgctgcaccatcgaatgcaagatga

SEQ ID NO: 22064 - DNA, 396 bp, Zea mays
  Peptide Sequence Number=SeqID_65439
atggaattaccactagacgcgcagagcagcggaagacgtctcgatgtagatgaacgcgtcgagcagtgccgtgcagtcgtcggtgtctttcacgtcctcgcacggttcgtcctagtgctccagatgcagcacctccgaggttcccaaccgctcagtgccgggcactgctgctgtgcacgctgcacggcagcatacaactgcgcagacatcccggactccgtcgagggcggctccgggagcatagtcagcagccagggagttgctgcgtcaccctccaagctccacggcctcaccgggggccatgaaatagtggagggacgacgtcgactgattgctcggcatggcacattctacctcgaccaggtcgaggccacggtcatcccggcgccaacatga

SEQ ID NO: 22065 - DNA, 636 bp, Zea mays
  Peptide Sequence Number=SeqID_65440
atgtcccaacaactgaggcaagcgtcgcagcagctgtcgcagcagctgaagcatgcggccgacttcgccgaccacgtcgcatcaggtgccttgactgcggagtttgctgccgaggtcgagagtctccgggtgcagcatgcggatgttgtgcgggagaagtcggctgcggaaagcaagagtcgcaggctgtcggagaaggctgcgcaagccgaggccaagcttgcacgggcggagggcagtctcgcccgccaacttgccgaggagctggaggcgaggttcgatgccctgtgcagccgcgtggacaaaaccgaggcctcggtgcgtgcggaggttgagcggacacatgtgcagttcgtggacgtgtaccaggagctgggaggagctgggggtgctcccaacgatcgcacgggtctcatgtcctttgcctccctcgtcacctgcgagggggccgtgaatgctttgtcccgtgaggggtgtagaaatttcgaggtcttcgaccaatcggacgaaaactttaaacgcgaaatcttcaaggtcgaggaccctgtgctgaagcagtcggcggggcgctctttgacaggatgtggggcccgcacggccgagaaacggtccgggagcagtccgaccggacaatag

SEQ ID NO: 22066 - DNA, 642 bp, Zea mays
  Peptide Sequence Number=SeqID_65441
atgcaggtggagttggctgcggaggtacagcagccactacagcgcgtggagggtgcggcgcgcaaggctgctccttccccgccgtggcggtgcggcggcctcggcgttcttggacgagatgggaagcgcgggaggttcgtcgaggtcctcggcgaggagaggggcggtgaggtcgggatcgggacccgcgaccgcgacgtcgtcgacgacgggctttgtcgtgccatcctccgtgcagcagtgggacgtccagacgaggaggacgtacgcggcgtaaagggagaggaaggaggtggcgacccagacggtgacggagccggtgagcagcacggcgaggaggtagcagagcgcgacgaggaggaagcagacgtcgcgcacgaacccggcgcgctcgatctcgacgaggcctcctcgggtcccggacgacggggcctcctaggcgagcaagttgtctctatggctggagatggttggtgctatgccgacgcagaagaggaggtggaggtgagcacgtccggatctagcgtgcggtcggcgtttgtcgtcacgtcggacgagaaagaggtggtggagatggacgcgtcccgctccgacgttgtctcggcgctcgtcgccatggcgagctggagtgtgtcgtgctag

SEQ ID NO: 22067 - DNA, 651 bp, Zea mays
  Peptide Sequence Number=SeqID_65442
atggaaggtatggaatttggcaatttgttctatagtacagaacctaaacctaacaagggacatcttgcatgggctgatgcttttgtcataacagcagactcgataagtatgttaagtgaagcatgcagcacaggcttgatactgaagaacgtcgcgtcgctgttcatgaataaggattccctcaaggttgaagctgatactaggcttggggagctcataaagtctgtaagcgaggccgcgcatggagggtgtcaggtcagcagcaaggggcagaagtgccggccatgtggacgagcagcgtgggcgagaggcgaggtacaagtagcagcagtgcgggcatgcaaagagccagggaggcagcagccatgcgagatgttcatgttagatatgttggtcgtacttttgatacggagaagggaaagtactaatgttgaggacatgtttcttgctcatatctttggaatggacactctggcccgtggcctccacaacgttgtcaagctgattgagatgatcttttccgcaaagcggtaccagagttttgatagtgagattggtgccttgatcgaggatgggaaaggagactttgagatgctaaaaaagaaggttctagagtgcagtgcactgttccatccggcaagcaggaactag

SEQ ID NO: 22068 - DNA, 3336 bp, Zea mays
  Peptide Sequence Number=SeqID_65443
atggcggagacgttggccggctggctggtgtgcccgatcatcaagatcgtgatggataaggcaaaatcttgcgcttccgacaggatcaagagcctgggcgacggcgtccccaaggcgctcaagcggatggagcacttgctgtatcagctccgcgccgtgggggccgccgtccagcggcggggctctccgaacggatgcggggacccggacttccgtgagtggctacagcagctcatggatgccgtgtacgaggccctagacgtcgtcgatgacttcgacgactctatgccgccgcctgaatcccccgtcgccagggtcagcaagcggatcttcggcaccgacgagcgcgtcaacaggctcaacgatgtcgtcgacaagctggaagccatctccaaagcctcgccgacactgattctgacggcggaggccaacgcgtcggcgtcgcgcgaacagagcggtcacctgcccccgctcggccgcatcacggcctcgctgcgccaccacaaggacgtggtggttgggcgcgactgggagctgcaaaatatggtgtcctggctcgtcggcgcaggcggcgacgcccaggttgtctctgtccccatcgcggcgatcataggacatggcgggatggggaagaccacgctggcgcaggtcctgttagaggacccgaatgtggtctccacctttgaaatcaaaatctggatccagcctttcccgacggacaacgagcttgagcttgccaagaagatcctcctgggcgccgacgtgggcgtcgacgccttcgacgggctgacgaatttcgacttgctactgaaaaagataaaggagaaagtctcgttgcgcaagttcctgctggtgatcgacgacgtctggaacaaggagaacatgggtcagcatgagtaccgagagatgtggtccaaggtgctggcgcccctcagccacggggaaaggggaagcaggatcgtggtcaccacccgtcaaaagatggtagcgaatttgctgtccgcaagcatggaggtccggttggatgacttgccggccaatgacatctggtctctgttcaagaggtatgccttcggtggcgaggacattgatggtcagccttgtgcactgcaggacatcggaaggaaaattgcccaaaagctcaaggggtctccaatgctcgccaaggccgttgggcagatgcttgaaggcaaccccagtgtctcccactggaggaaggtgcttgagatggacatcttcgacaatgtttccaagacattagagttgtgctaccagaatttaccgggccacctgcaaccatgcttcgcaatctgcagcttattccccaagaactggaggttcaagcgcgataagctggtgaagatttggatggcccttggtttcgtgcaggcagcggatgggaaattggaggatctgggaagtgactacttcgatcagcttgtggccaggtcctttttccataggcagaaggtggggcgtcggagttactattacatccacgaccttatgcatgatttggccaagaaggtttctcggtttgattgtgtgagagttgaagatgcaaagaaggagatccccaagacagttcggcacctgtctgtctgcagtgataccgtggcacagctcaagagccgacctgagcttaaaagattgcacacgttgctgattctcaagagcccttcctcttcgctggatcaactgccaggagatcttttcacagagctgaaaagccttcgagttcttggtttggaagactgcaatatcattcgcctaccggagaggattgggaaccttaagtacatcagatacctggcactttgcaaatcaatcaccaagcttccacaagcactgacaaggctctatcgtcttcagaccttaagtagtcctaaggggtctggccttgaggtcccggaagatatcgtaaacctgacgcgtctgagacatttggacatggatacatccaaaatcaccggcattgggaaactggttcacctgcagggatctgtcaagttccatgttaaaaatgaaaaaggccatactttaggagacttgaatggtatgaatggtcttcgtaaagagcttcatatcaagaatcttgatcttgtagcggataaacaagaagcctgccaggctgggctaaacaagaaggagaatgttaaggtcctggaattagaatggaactcgactggtaagattgtgccctctagtgaggctgatgtcttggatggccttgaacccaaccaatatgttaaaaagcttactgttagaagatatcatggtgatagatcaccaaactggcttaacacaagcttgaaagtgagtgtcttctacgttaaatacctgcatttggtcaactgcagaaaatgggaggtcctgcctcctctggggcagcttccatgcctcaaggctttgcgtctgaaagagatgtgtgcagtgaaaaaaatcagcttccgtgacttctatggaaccaaatcgactgcgtttccatctttggaggaacttgaattcgatgatatgcctcaatgggttgagtggacccaagaagagaagaatatcgatgtgctacctaaactccgtaggctgaagcttttgaactgtcccaagctcgttaggttgccccagctccctctgtccgtgaggaaggtctcggtaaaaaatacaggatttgtttcacagctgaaactatccccctgctcttcctcgccatcaaacgcgtgcaagtttaaattagatacgtgctctgccaccatccttacaaatggcttaatgcaccagcaacataaggaatcaattgctactttggctctgaggaactgtcaagatgcaaagtttgaagagcttgagaagctgacttccctgaagagtctgcaaatatgccattcaagcattaacgatggccagctgggcacttgtttgaggggatcgcgagtacttacctgtctggaattgtccaactgcaacaacatcacatgccttccacagatggaaggttcagactgcttaacaaaaatgcatgagttacgcattcaacagtgttctgaattctcctctctgcgctcactgccaagttttgcggctctagaaagtgtattgattgaaaactgctcgaagatcactgcgggatcgttccctaccgacttcagcagcaacacctctctgagaaaactgggcataatgaattgcgttgagctggagtcgttgccaagcggtttcccatcttcactgcaagttcttcatctaattgggtgcaaagcaagtttgacgaagcaactacaactcaaggatggaccagaatgggataaagtagctagtattcccataaaacaaatccgttga

SEQ ID NO: 22069 - DNA, 255 bp, Zea mays
  Peptide Sequence Number=SeqID_65444
atgggggccggcctcgtcggcagactcctcctccccatcctcagctccctccccgacgctctcctcatggtagataagtttggtcttgatgctttaaacgagaatgttgaaggcgcttttacaatttctcgcctgcatcaattaatctatgagccttatctttacgtttcaccagaagatggtaaaaaggatgctgggttgacatatggacatagttctgataaggatgccactgttctttcaatgttgatgtaa

SEQ ID NO: 22070 - DNA, 822 bp, Zea mays
  Peptide Sequence Number=SeqID_65445
atggccgtgctcgactccctcgaggcgctcaagcggcccgcgctcgcgctcctcctggccggtgtgctgctcgccgcggcatcggcgggcgggccgcacgcggcggcgctggccgcctcgggcgggcgcgtcggcgggtcggccttctcctcgcgctcctcctcgcctcgatcctacgggtacagcgcgccggctcccaggggcgggtacacggccgctcccttctactctccttcgcccttcgtatccgtcggcccagccctcggcatcggcttcgggggatcggggttcctcgtgaccctcatgggtttcgcggctttcctctacctggcctggacccggacgcgtcgacggcggacggtgccgccgcgaggcgccacggaggggaggccagcaatggcgcggcggtggggatgtcgatggggctcgaccggattggggaggcgacagagggtgaggccatgccggtggacgtgggcagggtgggcaaaggccggggaggaggacccggacgcgtcgacgacggacgacgccgatgcgaggtgcagcagcggggaggccggcaagggcgctgcagtggggatgtcggcggggctcctcggatcggggaggcgaccgtgggtgaggccacaccggtggacgcggccgagactggggtcgggcacagtccaacgaaatcaaaggcagagagggtacctcatcgggagggcaggtgggcgaggtgggagagagggtggttggaggcagagaggacgtcatcgggagggcaggagggcgaggtgggactgtgggagggaggctggtgggaagataagaatgtag

SEQ ID NO: 22071 - DNA, 2133 bp, Zea mays
  Peptide Sequence Number=SeqID_65446
atgcctgcccccgcgccgtggcccgtgtcgcaggacgtcgcggcgctcgccgatcgcgccagcgccttctcccgtgccgtcgtcgggccccgcaacgacctgggtgctctcgcggcggcgctccttcggatccaacccgtagcccgcgagctcgagcgctggaggtggctcacgcccggcgaccctgaggtgcccgacctgcacgcctggctcttcgagctcagggacgcggtggccgacgccgagagcatcctagatgagctccaccgccggcgccagatcggccctccgctctcggcctgcgtatacgccacgttccgtggccccggacggaagctgaggcggctgacggagaggctcaaccgcgcccgcgacgattcggagcgtctgcgacctggcagcgctgcggccatctacggtgtgcggtcgccgaacagggtaaccggctccgttttcgcggagcggaaggtactcgggcgtggggaggagtgcaactccataatctccaggctcgtcgacgattgcgaggaaacatgccgtccggtatctccggttattgcagtggttggccatggaggcatcggcaaaaccacggtcgctcagtgcgtgtacaacgatgcgagggttgaagcgcggttcgatctgagagcctgggtctgcgtctgggacagatcagatgaggccgagctcaccagggagattttacagtccattggttgtgcagatgataaaccgtgtgatgacggtcttgccagtttagacagtttgcaggagaagtttgagaatctggttgcacgtaagaggttcctcctggtacttgacgatgtttggattgatgagggtaaaaccgagaaggagaataggagcatttggaacagagtgttggtgccacttagatctgccacaactgggagcaaggtcttgttgaccactcggatgaaactagtagctgaggttctgaatgcgggttatttggtttcgcttgatggattaagaagcagtgattgttggttgctgttgaaggaagttgctttgggtggagaaaccatggattttccacctgagttgcaagaggttgcaggaactcttgttgcaatggttaagggctcacctttagctgctaaagctattgggcaaatggcaaggagcaccaggagcacacggaaatggagaaccctggtgaacacagaaattagtaatgatatcattatctcttccatccaactcagttacaaacacttgccgggtcatctccagcgctgctttgcatactgcagcatatttccatcaacttggaggttcagtcgctctcagttggtcaatatgtggatagctctcggtttcattcaatcatcagcagaagggaaagggctggaagaattagggcaaaaatactttgatgatctcctatcacgatccttctttggtactgcaaataaagaccagcaaacatattacttccttgatgacctaatgcacattttggcacagcacttctctgctcatgattgtatgaaaatcaacgagggcatccctgttgtgattccaccaacagttcgtcatctgtctgtttcaaccgattatttaccacagctgaagagcaaatacaggttgggaaggctgcaaacattgttagtcctcagaagctcatcgttatcttcaggtcatttccctagaaaacttctggccaaatttaagaacttgcgggtcctggatctgagtggatctgatattgtagaattgccagaaagcattaatcagttggtacatcttcattacctagctatatgcagtataactaacaaacttcccaagactatatacatgcttaaacatcttgaggtgtgtgatatacctatattcttatttcatgatgatcatcctagaggtgttggtaaatctgttacagttaaacgtctcaaaacatgctgtggcaagcaggcaagaataactccagtttggtggatcaagaatctggttgttcacatccatcaaaacttcaaactattttgtgttggtttgtttgatagtcccaggtattccattttggttttcactgtcaactggtgcaaacaagactgttgcaacagggaaaaaatagactatgataccataactgaaaaacggtgttga

SEQ ID NO: 22072 - DNA, 642 bp, Zea mays
  Peptide Sequence Number=SeqID_65447
atggatgaaggaactaccctcggtggtctagagtctgaggacgatgccaagccgagccacgagcttctcgccgttctttctagtctatggcgccgaggctatcttgcccacagacttagaatacggttccccaaggacgagggcgtacgacgaccaaaacaaccatatcagccgagaagactcactggatcagctggaagaggctcgggacatggccttactacactcggcacggtatcagcagtctctacgatgctaccacgcccgaggggttcggacctgagacctccaggtgggagacttggtactttggctgcggaaggccctcgcccacgtccccacacgaggggcgaggacaagccgtcagagccaaagagccggaggtctgtccgcaagtggccctctagcctgcaccggcagatccccactcaagtcctcgcggatgggcaggcaccgacctccgcgcagaggcatcatgccggagcgaggacaagacaatccaagaacacgaacgccgccctagcgacgtgcgacgtcttagacggtcccccggtgcgcacggcgcaacagccacccgtacggtggggcgggcagccacgctccgccctagcggtgggaggtggcactggaagcagcgcctga

SEQ ID NO: 22073 - DNA, 402 bp, Zea mays
  Peptide Sequence Number=SeqID_65448
atgtcgtcgagtctgccgccgccgggcgggctgacggccgccgttgtcgctgtcgcgctgcggaggaaggagtaccatgtcgtagctgccgtcgagggacatgaactcgagactcccgaaacggagcagcgtcccaggctgaagaggttcctagagactacccatctggagctcaaagggaagttgttcgtcaacacgcagcaggctcctacctggcacgccaactgtcgacgtttcgaccccggggggtccctggaccgacgagtaaaattgtcactgcgtgtcccagcccagatgggggggcttgagaaccgccgtcgtcatggacgcacgcggggtgccatcattacttgtttaccggggcgaccagatgggacgccggtcttgttccccgtagcctga

SEQ ID NO: 22074 - DNA, 954 bp, Zea mays
  Peptide Sequence Number=SeqID_65449
atggcgaccaacccctccaacggcgccggcgccgacgtccctgcagccccggtagcggtgcggctctcggttgcggcgcaggcggccgcgatccagccctcttccccgcgcttcttcttctcctcgcttgccgggaccaacccggcctccccgcaccgtcgcatcgccatcgcagttgatctctccgacgctgtctctccacgtcctcgcgacggcggctgctggttccccgtcaactcgaccgccgtggagctccgcgaggccactgccggggcggagactcgctccgtgtcaccaagacgtcgcagcctggatccagttaagttcagcgtggaggtgcctacttccatcattcacgagtgctaccaatccacgctacaggagtacaccaaacgtgttaagccggtgggagaagagcctgcaggcgtccatgctcaggtcgacggccgcggcgagggcgacgaaggcagccgcgtcctcggcgcacccgacgtgcgccaccccgacctccaccgtcggcttgctgcaccggccctcgccctggaccgcggcggacatgacgaagccgcggtagttccccaggggccacttgctcaggtcgccgctgcctctcgggctgcaccccggcgtgcctccccggctgagcggctgctcggtggtcaggtcgatggctaccttgcctcccttgtaccaggggatggagaattcggcgagggcgacggcggcgtgtcaacgccggcaaaaaaggagggcgaagtgataacccaatctgttggacgctccatagccggggcagcatcgcaagcactcaagtcgctccaacgactctcacgcaccctcggccgctggctgatggaacatccacctccccgcatggctctgctcatgggggccgtgcctcgctcaataacgaatggcccacaaagcaccgcatccgtagagcgtgaccactga

SEQ ID NO: 22075 - DNA, 1773 bp, Zea mays
  Peptide Sequence Number=SeqID_65450
atggcggccgcggcggagatcggtggtttcacggcggccgcgctcaggccgcttgcgcacccagccccggcggcggcgcctaggagggcggtggcggcgcagtcgctgcggacgaccgccaccgagacgctgacggcggatctcgccgccagcacggccaacggcgcggtgcatgctcagatgtatagtgaggctagtagtgaaatcccttcacaggcagctattgcaaattctaggaggaagacaaagatagtatgcaccataggtccctcaaccaacactcgtgagatgatttggaagcttgcagagactggaatgaatgtagcacgccttaatatgtcccatggtgaccaccagtcacaccagaaggttatcaatttggtcaaggagtacaatgcacagaacactgatggaaatgttattgccatcatgctggacactaagggtcctgaagttagaagtggggatgttccagagccaattatgctcagtgaagggcaagagttcaatttcacaattaaaagaggggtgagcactgaagacactgtcagcgtgaactatgatgacttcataaatgatgttgaagctggtgacatactgttagtggatggaggaatgatgtcgcttgctgtgaagtctaaaacagctgatacagtcaagtgtgaagtagttgacggcggggaattgaaatcaaggcgccacctaaatgttcgtggaaaaagtgctactttgccatctatcactgagaaggattgggaagacataaaatttggtgtcgaaaacggtgttgatttctatgcagtttcctttgtgaaggatgccaaagttatccatgaattaaaggactacctaaaaggtgttaatgcggatatacatgtcattccaaaaattgaaagtgcagactcaataccaaatctgcagtccattattgctgcttcagatggggcaatggtggcacgtggagaccttggtgctgaacttccgattgaggatgttcctttgctacaggcagagattgttcaaacatgtcgaaacatggagaaaccagttattgtcgccacaaatatgttggaaagcatgattgaccatcctactccaactagggcagaagtttctgacatagctattgcagtcagggaaggtgctgatgccatcatgttatctggtgaaactgctcatggaaagtacccactaaaggcagtcaaggtgatgcacactgtggccctcagaacagaatccagcatttataacccaactacttcccctagtgttatagcatctgcacagggtctacagaacgaggagttttccccaagccagctaagtaaaatgtttggatcccatgcaactatgatggccaacacccttcggacaccaatcattgtatttacgcagacaggctccatggctgtcctcctgagccactatcgtccctcgtctacaatatttgcgtttacaaacgaggaacgagtgaagctacggctagcactctaccagggggtcatccctattcacatggagttctctgacgacgcagaagaaactttctccagagcaattagcagcttgctgaaagcacaatatgtgaagaagggagactacgtcactcttgttcagagcggagtgacttcaatctggagagaggaatccactcacaacatccaagtgaggagagctcaggcgacaacatgcctggccagaaggccgaagtcagaactcttttctgccgagacaggaggtcgtggtcattgttgtggtgtcatgaactcatga

SEQ ID NO: 22076 - DNA, 1398 bp, Zea mays
  Peptide Sequence Number=SeqID_65451
atgtcgcgccttctcgactgcggaaccagtgccgcaactcgaggcaacccagcgtgtggcccaacagtgctagttgagcacatcgatcacggacgggcagaagcagcgttcagatcgtctgcaggctcatgtcctctcctagagcagcaggggagccctcccccatggcgtgaagatgacgcgcccgtgttccaatcctcgaacgactcgcacaacgaccgccccgcgaaccacccgtcccgtcgcattaactcctcggcagggcaagcgacgcaggcgttgtttcacctccgccatgatgaccgcgtcaaaaaagccgcccagagcactcgagcttcaggctcattactgatcaggggttcgaaggctggcccctcggaagggttcgacaagccgcctcggagcactcgggctccgcgccaactactgatcaggggttcgaacgctggcccctcggaagggttcgacagtcgccccagagcacgcagagcgagggatgactctgggtacgtccgatacatggccgaggctcgcgctacgctcccgaggtactttttggagcgcgcctctgggccactagccgacccttatcgaacggggcacgggcgtccattcggatcacccgttagcaactcactggagacaccatgttcggcgccctccgagggcaacatggcgctttccccccctccttgcggaaaggcgacgaaggggcagactgatgggcgcaattctggtcaaggcttcgtctactcaggggacacgatctcgcctcgcccaagcccagcctcgggcgggaacagtagtcctaggcgaattcacgcctcgcccgagggcctcctcaagcaacgggtgcaacctcgactcgcccgaggcccagctcgggcaggcttcgcagtgaagcaaccttggccagatcgcctcgccaaccgaccgtatcgcaggagcattcaatgcgaggatcgcctgacaccttatcctgacgcacgttcctcagtcggcagggccgaagcgcaacaggaagctccgcctcgcccgaccttgggcctcggcctcggaaggtggtctccgcctcgcccgaccctagggctcgcccccgacctcggccttggaaggtggtatccgccttgcccgaccctagggctcggcctcaacctcggccccggaggatggtctctgcctcgcccgaccccagggctcggcctcaacctcgacctcagaaggaatcgcgtcctcaccccaccccagcctcggcttcaggaggagtctccgcctcgcccgaccttgggctcggaccgaccatgccacagggggtacatcattgccctacccctagctagctcaggctacggggaacaagaccagcgtcccatctggctcgccccggtaaacaagtaa

SEQ ID NO: 22077 - DNA, 1176 bp, Zea mays
  Peptide Sequence Number=SeqID_65452
atggcggcgtgccggggcttcttcgagtgcctgctcaggctgctcaacttcatcctcaccgtcgccggcctcgctatggttggttacgggatctacctgctcgtcgagtggatgaagatatccgaggacggcatcggcggggcttcgacggcggaggtgctcgtctctggccggccgttgttgggggctgtcattctcggtgacagcttcctcgacaatctacccaaagcatgcagtagcagaggcaataagattatcactatttctgcagcccaaaaaacgtttcgtccaaggcacttggcattttataatgatagggtcacagtattacacgcttgtttccttttacttgtaaacaagtatgctttcttggtcatattgttgatccttgctgaagctgcagctgctgcattcattttctttgaccatggctggaaagatgtaattccagtggacaaaacacataactttgatgttatgtatgactttctgaaggaaaactgggagattgcaagatgggtcgctctgggcgttgttgtttttgaggcagtgctcttgctgttagctctggctgtcagggcaatgaacaaacctgctgagtatgacagtgatgacgaaattatagcaattggccgaagccctaccatccggcagccactgatccatacccaaaatgttcctgccactggtgttcctgtcccaacacttgatcaacgtgcaagtagaaatgatgcctggagccaaaggatgcgagagaagtatggtctggacacgagccagttcacatacaacccttcagacccaagcaggttgaggttgaggccggggtcgggcgaggacgcgattcctcccgaggtcgaggttgaggccgagccctggggtcaggcgaggcggagaccaccttccgaggtcgaggttgaggccgagccctggggtcgggcgaggcggagaccatcttccgaggccgaggtgggggccgagccctggggtcgggcgaggcggagacttcctcctgaggccgaggcccaaggtcgggcgaggcggagcttcctgttgcgcctgaggctggactcagctgctgtcagcctcaccctggcgggtggcacagcagtcggagaggggcgagcggcgctgttctcctgtcaggtcaggtcagtcagtgggagggcgaagtga

SEQ ID NO: 22078 - DNA, 669 bp, Zea mays
  Peptide Sequence Number=SeqID_65453
atgactgccccgcgaatcacccgtcccgtcgcattaactcctcagcagggcaagcgacacccttggcaggcaaagcgggcgtcgtttcacctccgccatgatgaccacgtcaaaaaagtcgccccagagcactcgggctctgagcccattactgatcaggggttcgaaggctggcccctcggaagggttcgacagccgccccagagcacccgggctctgcgcccattactgatcaggggttcgaaggttggcccctcggaagggttcgacagccgccccagagcacgcagagtgagggatgactctgggtacgtccgttacatggccgaggttcgggctacgctcccaagcgccgctcgccccgctccgactgctgtgccaaccacccgggactcggcctcagcctcggccttgggaggaatcgcgtcctcgcccgaccccggcctcggcctcaggagaaggctcaagcacttctccgacggccacgttatcacgtacgcagggctcaagcacttctccgacagccatgttggcatgttcctgcacatatattatactttgggaaacattgttagtcatgtttttgaggaccttcggaagatgaaggcccccaacaaacaggttgacgccaacggctctggcccctgccacaagcagggggcgaattag

SEQ ID NO: 22079 - DNA, 1290 bp, Zea mays
  Peptide Sequence Number=SeqID_65454
atgctggatgcatcgaagtcgaaggggtgtgtctccgtggtgcggttgcatgccacttgcatggcggagcgcaaccttacggaggtgggtacccttcagccatcgctcggcttcaaggattttcatcaggcagcccggctgcattccctcaccgatgcttcaaggatcttcatcatccttgctggcgaggcgagccggggcctaccttcgcgtgggctggcgacccgcttcttcctccggcatctaggggtgcaaaccatcctccagctctgcggaggaggcgtcctccagccatgcggggggaaggcgaactgctgctgcctggccagggtgcagcattccgtcctccatccgggcgactatggccggctgcaccggggggtcgcacaacacgtcgtacgccgcgagggcagtactcgtgttctgagacggtcccgttctcgttcttgcggtgagaacgggagtgaggacctgccggtgcgctttggggcggccgatgctcgctggtgcggtgttggtgggcaggtggctgccgtcgtcggtgctgaggtggtggcagccagagaaggtttctccgccgacgagatcgtcggcgccacctgtggtcggacctccggctcttcggccttggcggcttgtcctcgcccctcgtgtggggacgtgggcgagggacctccagcagcagcgtttgccctgatgccgtcgctgcagctgtcttgccgtccgagacggaggtcgttgacgctgctgcagtggtcggcggcgagccacccggagtttgtcgtcctgcaggccctccgatgtggaggttgttcatacccgtgggagtggaaccagagttccgtttgtaatggcaccttgagtgcctgtgtttgttcattgtggctgtcgaggcctgaacatctagcgtggacagaggcggagtcggctcgagaagaagcttcgttggcctgggagcacgtggcctccctggccgaggaggtgcagcagcgacggctagagcttggccaggtggagatccttccgcccgtgccgtcgtccgaggctgggccagactccgctgaaggtggagacgacgccgagggtgctgctgctccctttgttgatgacttgttcgtcggtagcagaatcgtttatccgagcgagagttacttttcacggaaggtgatgagtgagaaggtgatgagtgaggatcccgctatcgaagcagtcgaaaagcgcgaaagatcaactggcagaaagactttttctgaggaaaattttgacgcagagggggttccccccttctag

SEQ ID NO: 22080 - DNA, 210 bp, Zea mays
  Peptide Sequence Number=SeqID_65455
atgccaaggcatggtcaaacgtccaagtccgggctcccctttttccagtgggtgccttggggtgggttttgggagatagggtttaagagaggtctagggttcttctcccctcttatccaaggtaagaacgaggaggaaatagaagttgaagaagcgaggacttcaccaccaccacctgaagaacctcaggtgataggagttatgtgctaa

SEQ ID NO: 22081 - DNA, 330 bp, Zea mays
  Peptide Sequence Number=SeqID_65456
atgcagaggccagtggctccagctcagtaccccctccagtacctcagacacctgaccttgcgttctccgctcttcttcagcacctcattcaatagcaggagtgtcaggcagcagagcaggcttgccttaccgcagagcaggcacgaatggaagggtagagcacctagccttcatatagtatatcctttagcacaccggtgctcctgtgccttcagttcagtcagctccacccctgctcttcagaatgcattagtcccagctattgggagtcagtctattggacttgcagtctccctgctccagcaagtcacccttgacttctccacctag

SEQ ID NO: 22082 - DNA, 354 bp, Zea mays
  Peptide Sequence Number=SeqID_65457
atggagcacggggagccggggtcgcggccgtgggggcatggccggcagagtccgccagaggggcagagctggggggcgcgaccggcactgaggaagaagcgcagggcaaagcacggagatgctggccggaccgctggatggaggcggaggagcagacatcgaggaaggaagtccaccggcggcaaggcgccgaggaagcagctggcgacgaaggcggcgcgcaagtctgcccctgcgaccgacagagagaagtcctactactgccgccccggcaccgtcgcacgccgggagaatccgctatctccgcgccgcaggaagcagccgacaagcagcgagcagcagagcgaggaatga

SEQ ID NO: 22083 - DNA, 384 bp, Zea mays
  Peptide Sequence Number=SeqID_65458
atgtcttcccagacacccgcccctgggttctccaccactcggccgctcgtcgccgacaccacctgggcttccccgacgccctccaccgactccacgctggcatttaccatcgccgccatccaggctgccctggccacctcgcaggagcgcgagcgcgccgcgtcccgcgcactggaacaggagtgcgccctggccgccacattgactgcccagatggccactgcgcagcgtctcgtcatcggccctcctccggtcgcccaggagacaccaccgcccacccagaggctccccatgcctctggactcgacgctaaccatatcgccgctctccacgcccaggcggccggactacacaacatccggtccctcatgtccatcgttatag

SEQ ID NO: 22084 - DNA, 324 bp, Zea mays
  Peptide Sequence Number=SeqID_65459
atgcaggaggttcaacaccaaggtgtggtccgccaccggctcgccgagatcacggagagagtccgccaggcccttcatctgacggcagtactcccccacgtcgagatccccatgggagaactagtggaactgggcgtcgaggtgcagggcgcgagcgtcccggttcccgaggaactgttcctcgagggcgagccacgcctgacggcccgtgtccgcctggtcgcggatgatgtcctggagctcgacggtgatagttccgtggagccagcactagtacaatttggctctatacaagcggtaggatttttacatcacaagcggtag

SEQ ID NO: 22085 - DNA, 204 bp, Zea mays
  Peptide Sequence Number=SeqID_65460
atgactcagacaacacatgtagctccaaaccagggtcagacttcactgcccaagctgattgcttcatgtgcacgtcggatcacacaagcgtttaaacaggttcaggccgctgaagtgcgtaacaccctacttcctatcgaggctgagtatttgagtatctctggtgtacatggattacagatgagctatggacgatggatctag

SEQ ID NO: 22086 - DNA, 657 bp, Zea mays
  Peptide Sequence Number=SeqID_65461
atgcctcacttaactcagggtgcgctcaaaccctactttatggaggtaagttttaatatggtcttcaaagttcaatactcaaaattacatgatcaaacatcaagctcgcctaccactccaacaactcaggggctgggatgctgcccgcctcgccgagtcactacttttgggggttgcaccgccttgcgcctcgccgactcgctacttcatcggcttgggggctgcaccaccgtgtgccccaccaacttgctgcttcacaagctcgagggctgggccatcgcccgcctcgctgactcgctacttcatcggctcgagggctgcaccaccgtgtgcctcgtcgactcgctacttcaacggctcaggggctgcacagccgtatgcctcaccgacttgctgctttgccggctcgggggctgggccattaccctcctcgtcgactcgatatttcactggctcaggggctacaccgtcgtgcgccctgccgactcactgcttcactggttcgagggctgcaccaccgtgcgcctcgctgactcgctgcttcaccggctcaggggatgggccatcacccgccttgccaacttgccactttaccaactcgggggctgcactgacgtgcgccctgccgactcgctacttcaccgtcttgggggctag

SEQ ID NO: 22087 - DNA, 108 bp, Zea mays
  Peptide Sequence Number=SeqID_65462
atggcgggcggaaaagagctcgccggagctaaagaggggcgtctggccagcgaaggatttgagctagggatcaaggtgaacacgcttgatctttggctcaaggtctga

SEQ ID NO: 22088 - DNA, 174 bp, Zea mays
  Peptide Sequence Number=SeqID_65463
atggttcggattaccactttcatccctacccatgctgtattggttgtaacagtgccagggtatgggccaaaggctgcttatagggtagctcaggattcttccatcctaatggggaatgggtcacatgctattgtttacgacattagcatgatgaatttgatgttcacttcatga

SEQ ID NO: 22089 - DNA, 213 bp, Zea mays
  Peptide Sequence Number=SeqID_65464
atgacgatgcaccgccggatgatgtacagcctggacctctgctctttcagggctctggccaccttccccttctgcttgctggggctcatggccctcacggcgatctctggggacagatctctgaacctgaatgcagagcatatcgttcttgtcggcgacagaaagcttagcttgatcgcgaactcacagatacgaatcgaccgtctcagataa

SEQ ID NO: 22090 - DNA, 222 bp, Zea mays
  Peptide Sequence Number=SeqID_65465
atggagcagcagcggaagaagcagcaccagcagcagcagagagggaagttgcagagggtgctaagacagcagaaggctaggctctacatcatccgccgatgcgtcgtcatgctcctctgctggacaagcaacatggttgactacattgatttcttcatgatatgtgcacaaccacagaagggtggatctagagaaaaatattggtgccaatgtgccatctaa

SEQ ID NO: 22091 - DNA, 171 bp, Zea mays
  Peptide Sequence Number=SeqID_65466
atggcgccgcccactgatgtcgcgccgtccacctcgccggagcacgtccccagcacccgcgctcgagtccgccgggattacgatccgtttccgagcttcgatgaatcaaagatcaagcgttggcgaccaagtgatgcagttcttcgagttccacaagatcgaagaccctga

SEQ ID NO: 22092 - DNA, 1278 bp, Zea mays
  Peptide Sequence Number=SeqID_65467
atggtgaggcggccgcagggatcaggtttttatacccccaagcgggatgacaacaaccccgagtttgttacatcggtggagatcacggtgaagattcctccagcttcgttggccccacgcgtcggcgactactcgggcaaaacagtacgggtacgcggaacccaaggtgtcagccgtggagccgacaacggccaatatcccctccgagtcgccctcgcggacgaggaagaagactctggaaatgtgaccccacccgacaacggtagtagaaggatgcaggcgcgcgggactggcctatgggccctgcatggtggtgatcagacggcgggcacgtgggtggctgagaggctgaccccgaggtcccacaggtatattctagtttaccctcaaggatgcgatgtctccaatcacttgtcattgtttctttgcgttgctaatcatgaggaacttctcccaggatggggccattttgcccagtttactatagctgtgggcaatcttgatccaaagaaagttaaatattcagacacgctgcacaaattttggaagaaggaacatgattggggatggaaaaagtttatggagctatcaaagattcaagatggttttcttgttgatgatgttcttgaaatcatagctcaagttcaagttatcagagagaaagcagacagaccatttcgctgccttgatcgcccttatcgtcgagaacttctccgtgtctacatgacaaacatagagcaaatttaccgacgttttgttgaagaacgcagaaggaaacttatcaggcttattgaagacaaaatgaggtggtccagtttccgtgctttctggcttgcgattgacccaacaaccaaacatcgcatgtccagagagaagagtgacatcatattgaaaatggtggtgaagaatttttttgtcgagaaagacgtgacctcaacattagttatggatgctctatatacaggtttgaaggctcttgaggcctgtagcaatggcaagaaaggaatggtaacttcaattgacttggaggagctatcagcttctatggtccatgtcgatatggacatgtttgttttggctggtgacttcataactttgattgagagggcagctttagagcccttgtcttgtcaatctctgtcaccaaaaggtgacaaatgttcccaaacccgtgctaagtatttaacctatttactttgtctccctgattcccttgattatgttgctcatatttggaactggtttacttggtacatagaacacccgttgcaaatgtga

SEQ ID NO: 22093 - DNA, 633 bp, Zea mays
  Peptide Sequence Number=SeqID_65468
atggagcctggcggagggacagctgtcggagcggttgagtccttgctgacgtcctcttgcttccataagggggctaagagccgccgtcgtcacagaccatcgtttggcttcaaggattttcatcagccagcccggctgtaccccccccgccggcggtcacccaagacggtgaccaccagcccctgggtggggagaagcaagccgggctgcgatcttggtcccaccctcagcttcaaggatgttcatcatccccgctggggtggaggccgggctgagccggagctctacctcccgcgcgggctcgtgggttaccctctcctgcggtgttcgagggagagggcgctcactggccctgtgggcgggtcggactttgacaacgcggggctagtcgacggcgggcgtcgccagcctcagcgtgtcgagctcgtcggcttggcccccggtgccccctcctgccggagggcggctgccgcgccgtgtgcacgggaggaccgcccaagatgtcgcgcgctgctagggcggcgttcgtgttctggggaggtcctgcctttgcaccggtatggcgccctccgtgcggaggtcggtgccccactcgtccgggaggatctgagtggggatctgccggagggctga

SEQ ID NO: 22094 - DNA, 636 bp, Zea mays
  Peptide Sequence Number=SeqID_65469
atggtgacctccagcttgatggtgggggaaagcgagccgggctgcgacctctgcccctccctcagcctcaaggattttcatcaccagggctggggaggggactgcaccgtgcctggctctcggacgcgagtggcttcggagccgctcgcggcgccggcgtctgccacggcagctggaagaggttcttccgccggcgagatagccagggccggccacggatcgacctccaactctacggccttctgcccgtccttgcctcacgagtttgggcatgggcgggggcctcctggcagcagcatccgccctgaggtcagtgctgccgctgttcggccccccggagcagaagtcgtcgtcgtcgctgctgctggagcgggtgacggcgcgccgttcgtcggtcttctgttgctccgcaggccctcccctatcgagtggggttactcgcctgttgattatctgaaccgcttcaccaagcatgagtcgccccgtgtcaaggtgacgagtgagagtggagatcctcggaccgcgtcgccgtccgaggctaggtcggacctcgccgaaggcgtcgtcgatgccgagggtgctactgcccccgtccggcgtcaagacccgagcctgcaggatcagagtgtcttgtag

SEQ ID NO: 22095 - DNA, 1734 bp, Zea mays
  Peptide Sequence Number=SeqID_65470
atgacgcggtgcctcatgttcacgctgctgttcctcgtctcctccctcatctccaccgtggggctccccgtcgagccgcccgcggagctcctgcagctgggcggcggggacgtcggcggcgggcgcctgagcgtcgacgcgtccgacatcgcggaggcgtcgcgcgacttcgggggcgtcgcccgcgccgagcccatggcggtgttccatccgcgcgcggccggcgacgtggcgggcctggtcggcgccgcgttccggtcggcgcgcggcttccgcgtctcggcgcggggccacggccactccatcagcggccaggcgcaggcggccggcggcgtggtcgtggacatgagccgcggccgcggccccggcgccgccgtggcgcgggcattgcccgtgcactcggcggcgctgggcgggcactacgtggacgtctggggcggcgagctgtgggtggacgtgctcaactggacgctgtcccacggcgggctggcgccgcggtcgtggacggactacctgtacctgtccgtgggcggcaccctctccaacgccggcatcagcgggcaggcgttccaccacgggccacagatcagcaatgtctacgagctcgacgtcgtcacagggaagggagaggtggtgacctgctcggagacggagaaccccggacctgttcttcggcgtcctgggcgggctgggccagttcggcatcatcacgcgggcgcgcatcgccctggagcgtgctcccaagaggggcccccagccgcccgggccagccatggccagtccgacacatacgtacgcgtcatccgctcgtgggatctttcgcaagattttgttcctctgctaattaatcggcctgttcggtggatccgggcgctctactccaacttcagcgagttcacggcggaccaggagcgcctcatctccctcggcagcggcggcggacgccggttcgactacgtggagggcttcgtcgtcgccgccgagggcctcatcaacaactggaggtcctccttcttctcgccgcagaaccccgtgaagctcacctcgctcaagcaccattccagcgtcctctactgcctcgaggtcaccaagaactacgacgacgaaaccgcagggtcggtcgaccaggacgtggatacgctgctgggcgagctgaacttcctccctggcacggtgttcactacggacctgccgtacgtggacttcctggaccgcgtgcacaaggcggagctgaagctgcgcgccaaggggatgtgggaggtgccgcacccgtggctcaacctcttcgtgccggcgtcccgcatcgccgacttcgaccgcggcgtcttccgtggcgtgctggggggccgcaccgccggcgccggcggccccgtcctcatctaccccatgaacaagcacaagtgggacccgaggagctcggcggtgaccccggacgaggaggtgttctacctggtggcgttcctgcggtcggcgctgccgggcgcgccggagagcctggaggcgctggcgcggcagaaccagcggatcctcgacttctgcgcgggcgcgggcatcggcgccaagcagtacctgccgggccacaaggcgcggcacgagtgggcggagcacttcggcgccgcgaggtgggaccggttcgcgaggctcaaggccgagttcgacccgcgggccatcctggcggcggggcagggcatcttcaggccgcccggctcgccggcgctcgcggccgactcgtaa

SEQ ID NO: 22096 - DNA, 417 bp, Zea mays
  Peptide Sequence Number=SeqID_65471
atggagtcagtcaaaaaggatgaacaagaagaacgcacctggcgaatgaatcgcagctccgcgagatcccgatctgcgatggctgcacgatggcgggcggtcttgtcgggagcagcgagcatccaaaaaggagcgtttggtctattccctctccgcggaaggagccaaaaacgaaagcgggccgaggtggtggcggcgctcaggacggtggagtcgcccatgccggttaccgggcgggggttggccaggactggacagcgacgcgagccggtctcagccgaaaggcggggggcggtggttgaactctcggtgcgtttgcagacgtggaccggcggcagagtaggtcgaatgcgtctagctctgcagataggtgacgtcgatggatggatggatggagaggcgggcatgagcgagtga

SEQ ID NO: 22097 - DNA, 1683 bp, Zea mays
  Peptide Sequence Number=SeqID_65472
atgagggccagggaagttgtaaaggccacattggaaaaagaaggacagcttctagggttccagggaattcatcccttgacatccctacatccaactcctttggaaaagactcccccggttctgaagggggccagatcatttcttcgggtaattgttggtgatgcaaaaattaatgcaccacttccaaaggctgtacctgtagccataagtgacgacaacaatggagttattccagcaacggcaacatacaccataaacaccaaacctgtgcttgtcagtcccactccaagtaaacttgagccagttttgtgtgaagaacatgtatcaagttcaatccagcaaacaaataaagctatcctgatgccttcaagatcaccactagttgataatgaggctaatccaactcccccaaaatcacccgtgccacaggctgatacagttgctaaagctactccagctccacccaaatcaccaatgctacagattgatacaattgctaaagctacagcagctcctacaaaatcttctacttcacagcttgataaagttgctaacatccaagctgcccccaaatcacctgcaccccagcctgatgaagttgcctcacatcataactcagtatcgggacagattctgtccacatctatctccaagcctcgagaagatacggtttctaagagggctgcagtcgttactgtacctggaactcctacaccaatgtcaaggcctacaagtgcacctctgctacaggtaccaaaatcaactatgctacctacaccgtcagtccaagtttctccaatgctttcacgttcttggactatgtcagcccaagttcctccaatgctttcacgttcgcggactgtgtctgaacggccgaacaatgagccttcacctaccgccccaatgtatgtaacacagacatatcgaaatgcaattcttggtaagggccatcttgatacaaccccagcaagtcttgagcaatcaacttctgtttcgccgaatactgcagcttcacagccatggtcagcatatgcgatggcaacatctgtcatggcccctccattcgaaaggaatggccagttaccaggtaacactgatgttaacagaaatacgtggaaacatgattttcctaaccagcaaatgaccaattgtgatgctcatttacaccacttgaaagatatttcttatcagcaattgagcagcattgggacggaacagcacagattgggtggactacagtgtagggagttcctccagagggagatacctgctgcaacctttgtttcacgccagcagtatgggtcagtgggcgaagaattcccccacattgatattataaatgacttgcttgatgaagaccaaaacagtgcccatatgacagtctctcctcttcatgagtatcatacgtttggtttgccattttcttcaggaggcaatgtggctgactcagaaataccatccgtaagtagttctgtccggtttgacatgaccgacccttactatggcgagggttaccggagggcctataatacacagaatgctctgcataggttggatggttaccccaacgaaaggttggattcaactgcaccgccgaagcgttgggcatatagccatccaaatccagctgtgaaccttgcatacaattctaatgtatttccacagcagatgggagactactaa

SEQ ID NO: 22098 - DNA, 849 bp, Zea mays
  Peptide Sequence Number=SeqID_65473
gccacgaatggaaaggaagactggaagagaggcgccgccttgggtttcccgaaaacccccctctccacagtccatacaccgctagacccagcgcaccggagccctgtgtcccgcgcggcctcgacgtggaagcaccctccgcctcatgtccccgcggcagcctcctcccacccacgcatgcaacaaaggtcttctggcctcattcattggccctcaaccctcaagcatcggctgtgcggacatgctgcgctcctgcacctcctcgggccgccgctcccagattcaccgcgccaggacgctcgacggaccgggtgcccgccccctggccgcccttcgcagcggtccccgcctgctgaaacccctcccgcccttagctgtaggcctcgcggctcggcgcggtcgaaagcagctggtgtaaatgcagtcagaaaattcggcatgagccccctctctgagctggtgtggtctccggatgaaggcttgagcattaaaattgcggcgtctagtcttagcacaagaaaggcttctcttcgttggaatgcagatacattgagcatattgatatcttcacctcaacgaagtggttctggtccaggtgaaaagaacggtgataccataaatgataacctagaggtatcagaaaagatgccatcacaactgcggattcgcagtgacagctcagtgagagtaaccgtggatagccccaatagtacaaatgttgacgccctacaatttacgtctatgagatcgcaggagcaagattcaagcctagacccttggcgggcagggacggaggcagcggtggagcgggcggggctcgagcccctcctaccgctgtcgagtacatag

SEQ ID NO: 22099 - DNA, 198 bp, Zea mays
  Peptide Sequence Number=SeqID_65474
atggcggatgctttgctgccactgctgttggaagctcgtctcgtcttctatggatgcttcgtcaccatgtgtgtctctggggctactgtggatgagctgaaggcatggtggtctgctgctatgaagggtgagtggaagctaccgtcgaaggaagaactgggtgtgaaactaagagaaaaagagctacttcgctcgtag

SEQ ID NO: 22100 - DNA, 459 bp, Zea mays
  Peptide Sequence Number=SeqID_65475
atggcgcccaaagggcatcgccattgtcggcctcacatcaaggctttcaccaagcaccctctcccaacacacagtcgcacagtcaaatcaagtcatggtcgcagatcacaatgtcgcaaccacaaagagcagcacaaggtacaccgccgcaccatgaagctctgcagaagaaggggaaagatcgaatctgagagccccgacccacatgtcactgttgtctccgtatgcgtgcgacatggtaagctttggcttggaagggagcctaggaggcaacgaattcgatcaccccataggccactaaccaccgaggaaggtagacacgacaaagccgccaacgacaaggtagccaccataggaaaacgcaaatccagtaatgaggaggacatatccggcctcaaaggcccagtctgcgatctcgtagcgctcgagtccgacaaacaaggaaagaacagagaataa

SEQ ID NO: 22101 - DNA, 291 bp, Zea mays
  Peptide Sequence Number=SeqID_65476
atgtggaatggagtgtcactgttgcggggcacagattcaaagacacctgccaagtcgtcgctcatgattgcccgagcaaaagatgcagagaagcgcaatcgtcagctccatgtggatctcaccatagctcaagcccgtgtagctgccctggaaagtcgtgaagtcattgatgttgaagctttgaagcaagccaaggatgagcatgtccagaagctgatggaggcctacttggtaacccacaaccaacgtagagcccgcttcatccaacccagttcaacccatgagagctga

SEQ ID NO: 22102 - DNA, 162 bp, Zea mays
  Peptide Sequence Number=SeqID_65477
atggggctcggtgtatgcgactcgctctgccaaggtggcaatgagattgatggttttggttatgactatggtactggttgtcagcattgcaaccactgctcaggcgaagatgaagctgtggaaggagacttccaggagttccaagactacgacgagttctag

SEQ ID NO: 22103 - DNA, 378 bp, Zea mays
  Peptide Sequence Number=SeqID_65478
atgggggagacgtcgtcgattccgccgccgtcgggcgggctgacggccgtcgttgtcgttgtcgcgtggcggaggaaggagtaccatgtcgtagctgccatcgagggacatgaactcgagactcccgaaacggagaagcgtcctgggctggagaggttgctggagactacccagctggagcttgacgggaagctgttcgtcaacacgcagcaggcccctacctggcgtgccaactgtcggcgtttcgacccggggtccctggaccgacgaggggctgaaaaccgccgtcgtcatgggagcacgcggggtgccatcattacttgtttaccggggcgagccagatgggacgctggtcttgttccccgtagcctgagctag

SEQ ID NO: 22104 - DNA, 1185 bp, Zea mays
  Peptide Sequence Number=SeqID_65479
atggcagtcatgctcaaacttctaacaagagcgagagagcaaagcgaagctcgtcaaatgctagaagatgttctctccataaaaatgctacgctttgacgagttgactaaagaacatgaggagctaaaatgctatcatgttgatttggtccaaagcaaatcttcctttgagctagaacttgtaggaacaaaaaatcaaaagctcaaagaagaaaatgagaggctaaaaataagattgacacaactaaaagggaagtgcactgctcaaccttctcaagacgatcgtgattacatggtgaagaagcttgagacgggaacaaccgtggcatgcactaaatcccttgaagaaaatgtcaaggacttgaggattgtcaagaggaaggaacaaaagaagaaaatcaatacctctgccaaaagcctcaaccatacctccatgcaaggaaataaagaattatccttgtgcggagaaatcaaggcctacaacatgaaggaaagccaaaggatgaaattcctctcatatggtagattgcatattcatcatttccatactatggcaatctacatgcttgaaattattagagtaagtgcaagctgcaagcctcaagggttactcttcacccaaaggaagaaaagtaaaagcaaaggtgaagtgattttattgtcaaagagcttaaagcttaaccttgtaacgaggataagctacctttgtttcaaaggtggagggtccttaagtctctttgaaatccttaagggtgccaaaggttcaacacaaaccaataaaaagaacaagttaggcttcaagagaaaggagcaaaaaaaggaaaccggagtgtgccctggtctggcgcaccggactgtccggtgcaccaggtgcaccagcggagcaacggctatctgcgcgcaacggtcgactctaacggatgaacagtgcagcacagtactgcgacagaagtcagagcagcaggaaaacagcacggcctaccctgctccgactgttgtgccaccagccagggtgaggctgacagcagccgagtccagcctcaggcgccatagaaagctctgcctcgcccgaccccagggctcggcccccgcctcgacctcggaagacggtctccgcctcgcccgaccccagggctcagactcaacctcgaccccggaagacggtctccgcctcgcccgaccctag

SEQ ID NO: 22105 - DNA, 1767 bp, Zea mays
  Peptide Sequence Number=SeqID_65480
atgggttgtaatagaccttcttgctcagccttggtaggtgatgctggaccagttcttgacatgatgtctgtgatgctagagaacatatcacacactcctcttattgctatagcaactacttctgctgtttatcgcacagctcaaataattgcttcaataccaaatttgtcatataagaacaaggtatttccagaagcactttttcatcaattgctgttagcgatggttcaccctgatcatgaaacacgtgttggtgcacaccgcatattttctgttgtccttgtcccatcttctgtttctccttttcccaatttgaaatccctagatcagtgtagaaagcatgatgtccagaggacactctcgagggttgtatctgtcttctcatcttcagctgctttatttgataagctgagaagggacagaaactcctttagagaatatttacatgaaggaagcatgaacagaattttgcatggtattgatgatgaaattgctacccctaatgacttgccaggctcgcaaagcttgagacaaagcctcagactttcttcagtgtctcacaaacattcttatacttctttaaaggaaggtcaaagtcccttgacagagtcaatcaacgaaatggaaacaattgtgttaagactaagcagccagcaggccactcttctgctctcatctatttggcgtcaagcactttctccaaaaaatgctcctcaaaactacgaagctattgctcatacatatagtttgcttctattgtttttgggatcaaagacaccaatttttgaggttcttgctcccagctttcagattgcattttctttaatgagccattcacttggaggaacagattcattgccaccatctcgccgccggtcattatttactctggctacatctatgattgtttttgcctcaagagctttcaatgtggcacctcttctcccaatttgtaaattaatgctcaatgatggaacggctgtgaaggactatacggaagatccatcaacatcctatggctcacccgaggacaatcagaatgccttgaaatctctttcagtggtggaactaacaaatagttgctcccgagaatccatgattttaaccattatgaactccataagagatttaccagacgtaattttcgatccattcttcttggagttagagaatataaggagtcaactgctgcgtgatttctcccctgatgacgtgtgcccaagtagcgctcactttcttgaatcacctggcaagattgcaccgccatgttctgatgatgacaccgactacgactatcaagaggtacacggaaattttgagcaggctgaacttatcgatctgagaaatgacaacaatacttatttggaagcctctgcaactacactggcggctatagctattcctgtgcccacaacaaatcttctcagtatcgatgaacttctagaaacagtcgtgaatgatgtgtcatctcagaccggagggcaatgtttggtgtcaatggccggagacatcccattccaggagatgactagccactgtgaggccttttcgatgggaaagcaccacaagatgtccctgctcatgagcttcaagcaaaacaagcaagcggccatggtcgtcgtgcctgacaatcagagcacaaacccgttcctcctgcagagcatcagtgccggcgaggcacaggttgctggcgacgtccagcagccgttcctgaggctgccaccgtcgagcccctacgacaacttcctcaaggctgctggctgctga

SEQ ID NO: 22106 - DNA, 708 bp, Zea mays
  Peptide Sequence Number=SeqID_65481
atgggagcacgcggggtgccatcattacttgtttaccggggcgagccagatgggacgccggccgagccctggggtcgggcgaggcggagaccgtcttccgaggtcgaggttgagtttgagccctggggtcgggcgaggcagagaccgtcttccgaggtcgaggcgggggccgagccctggggtcgggcgaggcggagcttcctatggcgcctgaggctggactcggctgctgtcagcctcaccctggcgggtggcacaacagtcggagcagggcaggcgacgctgttttcctgtcaggataaggtgtcagacgatccttgcattgaatgctcctgcgatacggtcggttggcgatgcgatctagccaaggttgcttcactgcgaagcctgcccgagctgggcctcgggcgagtcgaagcttgtgctgatggtgattaccagccgagtttaggagtcttggggcccgggtgcatggtcaggttccgagttctcgggctggtgatccgagtggacgcctgtgccccgttcgataagggtcggctagtggcccagagaatcgctcctgctggtctcagaaatgtcctagggtacctcgggagcgtagcccgagcctcggccatgtatcagacgtacctagagtcatccctcgctctacgtgttctggggcggctgtcgaacccttcggggggccagccttcgaacccctga

SEQ ID NO: 22107 - DNA, 819 bp, Zea mays
  Peptide Sequence Number=SeqID_65482
atgcagccaggctacctgatgaaaatccttgaagccgagcgatggctgaaaggtgccaacctccgcgaagttgcgctcctccaacaacagcaagacgaaagcaacgtgggcactccccatccgggggctcagaagggtcctccccctatgacacgggggctgggtcccacacatcatgcaagctggcccgggacagaagcagccagaccgccgcgcgcagagcgtgtaaccgcccagcggttacaagcactcctccaccttcgcctaaaccagcgggtgaaagggcggaccgccatgcaggcggcatgcaactgcaccacggggatgcaccctttcgacttcgatgcatccagcatggaggcccaggcccacacgtcatgtaaccggcgcaccggttactacgtgcgaaaaactgcaccgccacttgcgccagtaccgcgccttctcgactgcggaaccggtgtcgtgactggaggcaaccctgtgcatgacccaacagtgccaaccaagcacatcggtcacaggtcagtcagccgcgggaggaggcgcgacggtcgatatggccaaaagtgggccggcagtaatggcggcagcaagcgggcggaggcagcagttaaaccgtctacaggttcatgtcccctcctggagcagcaggggagccatctcccacggcgtgaagacgacgcgcccgtgatccgtccctcgaatggctcgcgcaacggctgccccacgaaccacccgtcccgtcgcattaacttcgcggcagggcaggcgacacctttggcaggcgaagcgggcgacgcttcacctccgccatga

SEQ ID NO: 22108 - DNA, 762 bp, Zea mays
  Peptide Sequence Number=SeqID_65483
atggtggggaaaagcaagccgggctgcggcctctgccccgccctcagcttcaaggatcttcatcatccttgctggggcggggggcgagttgagccagagctctacctcccgtacaggccggcgggtcacctcttccttcagcattcaggggagaaggcgctcaccggcctagcagagggggcggacttcgacaacgcggggccgatcggccgcaagcgtcgtcagctccagcatgcctggttcgctggctcagctggctctggcgcagcttccggtgcctcctcccaccgctgggcggagtgtggctatctacccgccgtacgggcggctgttgcgccgcgcgcaccgggggaccgcccaagacgtcgcacgctgctagggcggcgttcgtgttcttgggttgtcctaccctcgctccggcacaacgcctccgcgcggaggtcggtgctcgcccgtccgggaggacttgagtggggatctgccagtgggcaggtggctgccgtcgtcggtactgtggtggtggccgccggagaaggtttctccgccgacgagaccgtcagcgccatccgcagaccgacctccggctctttggatttgatagcttgtcctcgcccctcgagtgaggacgcgggcgagggccttgtcgcagcagcgtctgccctaaggtcattgctgctgctgtttagccgcctggagcggaggtcgttgtcgctgctgacggagcgggcggcggcgagccacctagaatttgtcgtcccgtag

SEQ ID NO: 22109 - DNA, 345 bp, Zea mays
  Peptide Sequence Number=SeqID_65484
atggccgggttcgcgcgcgccaccgcccccgcgtccccgtcaccggcggcggcgctgctcaccggcgagcgcctcgtggtcttcctcttcgcggcccgcgtggcactcgcggccccggtgcacctcgccgcggcgctcgcggtcctcgtggcggccgccctcgccgtcgagctcgccgtggacggctccggctccgccccgcttcgccgcttcaggaccaggtgcgctggagacagcgtcatgcgtaaggccaggtgcttcgtcaggcatacttcttggcgccactactctgcccagcgtcatgctttctcggttaattcaactgtcaaggctcctaccagctga

SEQ ID NO: 22110 - DNA, 252 bp, Zea mays
  Peptide Sequence Number=SeqID_65485
atggacagcaccacccctccacttcggctgaagcatgcccaaccctctacagcgcagctcctcgcagccgagtttcccccgcagccccgcaacgttggcgcttctcggcagcgatgtcacagtcgccgtgacctcgccttcgtgcgcggatcgcattgctccacgtcgtcgtcgagtctccttgcaagcttgcggtttagccaaaaccttgtttgcgtgcgagtggggaacctcgacgaagtttgtgtgtag

SEQ ID NO: 22111 - DNA, 522 bp, Zea mays
  Peptide Sequence Number=SeqID_65486
atggctcgagatctccctgcgttctgcaccgaggagatggatcgcgagctcttccagcgaggagtacccattggggcgggcatcaccaccgccgggcatggccggggcgccgcagctacgggccacgcagccgcccccgcggatcctggccgagccgccgctgggcttgctcgcagcgtctccacagctgcccccgcggatcctggtcgagccaccgttgggcttgctcgcagcgtctccgcagccgcccccgcggatcctggccgagccgccgcggagcttgctcgcagcgtctccgcagccgtccccgcggatcctggccgaggcatcgccgccgcggagcttggtcgcggcgcctccgcagccgaccccgcgtatactggccgaggcgtcgccaccgctgggcttggtcgcggcgcctcttcagccgccccgcgggtcctgtccgaggcgtcgccgccgcggagcttggtcgcggcgcctgtgggggatagatatcccctgggtccactaaaggagtaa

SEQ ID NO: 22112 - DNA, 468 bp, Zea mays
  Peptide Sequence Number=SeqID_65487
atgggcaagagtaacaaacgcaagcgtgagccgactcctccgtcgaaggacttcggcgactcggaatactcggaggaggagttctcctccgagtccgagggatctccggctcccgtctctcccccagcgtcgtctgatgattcagacgactcccaggggattgccgcggaagtctggacatacatccgggccgtcgagcgctccgggctcgagggctcggatgagtctgagttctcctcggacgaggaggactcgaacgacggcgaggacgaagatgacgacgacgacgacggcgacgacgacgacggtggcgacggcgacggtgacggcagcggcagcggcgggggcagcagcggcaagggcagcaccagaggcggcagcagcacgggcagcaccagaggcgggagcagcaagggtagcaccaggggcggcggcggcaagggcagcagcagcaaggccagtggctaa

SEQ ID NO: 22113 - DNA, 567 bp, Zea mays
  Peptide Sequence Number=SeqID_65488
atggccaaggcacgcaggccgccgttcgccgccgccgagcggttcctcggcttcccccgcggcgggccctcgccgggggccgtggcgccggcgcccgccgccctcgacgacctgccggacctcgccgaggccgacgtctggtactcggctgccgacccgggtagcccgtatcccgcggcgtcccgacatgcggcggcggagggcaggagcgcaggccagcgcggcccgcggcgcggcgtgcagggcggcctgagccgggcgttcggggacgggtccgggtccgggtccgggcggcaggcggcggcgtcggcgcccgtcgaggtggccgcgtggccggcccgcttctccgtgccggacgcggagccgacgctgctgttcgagatggagatgggggacgacgacgacgacaagggggagggggacgccgggtgggtgcctccgcacgtgtaccttgcgcggcgccaggcgcgggcgtcggtggtggagggcgccggccggacgctcaagggccgggacatgtcgcgggtgcgcgacgccgtctggagccggacgggcttcgacggatag

SEQ ID NO: 22114 - DNA, 115 bp, Zea mays
  Peptide Sequence Number=SeqID_65489
acattgtggtacaggtggttatgagattgatggttttggttatgactatggtgctggagaagatgaagctgtggaaggagacttccaggagttccaagattacaacgagttctag

SEQ ID NO: 22115 - DNA, 201 bp, Zea mays
  Peptide Sequence Number=SeqID_65490
atggaggatgtggagaaacgcctggccgagaagttccaacaagcattggattcctcagcgacaaccttgaaggaactattgaagaccaagctggtcaaccacgtgcaagcagaaactgaacctggtgaacccgaaaacccggaaaaagtgtcggttgatggtgaagaagctggtgaagaaggcaatgaacaacaagattag

SEQ ID NO: 22116 - DNA, 792 bp, Zea mays
  Peptide Sequence Number=SeqID_65491
atggggagaggcaagccgggctgtgatctcggtcccgcccccagcgtcgagggtgttcgtcatcctcgctggggcggggagcgaggcgagccaaagctctacttcccgcgcgggccggagggccaccccttcttccagcttctggtggtggcaaacatcctccagctctgcggaggagacgtcctccagccatgccagggaaggcgaactgttgctgcccagctaggatgcaacattccgccctcttcctcgctttcgcggcgagggcggcagcgaggacctgccggtgcgctttggagcggcccgctctttggctttaatagctggttcgcgtcccttgagcgggaacgcgaacgagagccctccggcggccgcgtccgtcctgggaccatggcagctgctgcagagtatctggacttttttgtcagtaacaaggatgtttgtgcgagcgagagttgcttctcgcggaaggtgatgagtgaggtatccgtatcccggaggcgtaggagtccctcggctcggtccgccttgccgcttacgcgcactcttacccgtccatggggctctgtcaccgactcagtcgagaaggctcgaaggatcgcttcggcagaagaacttccgaacgtgaagacttgttcggtccgtcgaatcacttatccgaacgtgagttacttatcgcagaaggtgatgagtgaggtatccgtatcccggaggcgtaggagtccctcggctcggtcagccttggctgcttacgtgtactccgtcgttttcaggatccacttatcgaagtag

SEQ ID NO: 22117 - DNA, 480 bp, Zea mays
  Peptide Sequence Number=SeqID_65492
atggcacgtacgaggaaaaccgcgcgcaagtccactagaccttttggcgtcccaagtcatcagttagctcccagacatgaagggagcagcagcggcagcaacgaacccatcggagacttggaagccaaagtggaacagctttggacggagctacatcaccgaaatagggtgcgggcacatgacagtcagcgcatagctgaattgtcagccgacgtcagacgcttgcaagacgagtttgctgaacgggatttggcggttgattgggccgtcaactcacaatcggttgcttgggaccgcaaagctaaagctcgagctcgtgtgactgagcttagtgtggcccttgacagtctacaagtatactgcaatactttacatgaggaagtacatgtactgtatgctcgactgcactcggacgtacctttcgacactgctgtaatgggagccgaaccgtcgggaacaacaaacgaaggaactgaatag

SEQ ID NO: 22118 - DNA, 244 bp, Zea mays
  Peptide Sequence Number=SeqID_65493
gcgcgcggacgcggctgacgagtggggccagggcgtcagcgagccagggcgtgctgaccagccgggcctagaggcagagacacaggggagggggaagagagagaggcagttggatctagatcggaggggcggtctggcgggttcagccatggccttcacgctggcacaggggcaccagagagcacagaccacggtggggcaagctaacggcggcgcgggattgctccggcgagcaatcgcgtga

SEQ ID NO: 22119 - DNA, 390 bp, Zea mays
  Peptide Sequence Number=SeqID_65494
ggaacacgggacagcgaggagctcaccgcgggtttcgatgacgacgcgcagacgctgcgcagatcgacgacagcagagaggaacgacgtccagcggcacagggacagtggtcgccggctgacacttgtgcgcgtccagggaaaacagagagggagctcgaccagggatctccagcctgagcagaggatgcagcgcaggagcagagggaggcgacatgagaaggatctaggcacctgctgcccttggggatttcctgtgcaggcagatgcaggggcgcctgctcctgtagaaaggatgggcgtcgtggggcagagagacaaggagcagggcgtccatggccagagcgccgaggcttgggggaagcccacgcttgccacggagagggagtag

SEQ ID NO: 22120 - DNA, 159 bp, Zea mays
  Peptide Sequence Number=SeqID_65495
atggcgagagtagcgtgtaccctccgtggcaagaggctggacggtggtgtatctgtgctctcggtgaagaagcgacaaacttttgttgcttctgttcgaaggtggtaccgaaggaagaacactaggagtaaagctgcaggaggaaaggatcctccataa

SEQ ID NO: 22121 - DNA, 138 bp, Zea mays
  Peptide Sequence Number=SeqID_65496
atggccatgatgggttcaacattggaaaagatgtacctctgccaggtgaggaaacagtacacttctgatgtttttgctctaaggtggtgcctaaagaagaacctcaacaatgaagccacggggaggcctcccatttga

SEQ ID NO: 22122 - DNA, 894 bp, Zea mays
  Peptide Sequence Number=SeqID_65497
ctcctgtaccaatcgtgcccataccaagcattgactttgttcctcgtcggcccattccttgatgggtttttgactaaccaaaacgtctttgctttcgactacacaactcaagtcctgttcttcatcgtgctgtcgtgcctgatctcggtctcggtaaacttcagcactttccttgtgatcgggaagacgtcgcctgtaacctaccaagttctcggccacctgaaaacgtgcttggtcctcgccttcggctacgtcctgctccacgacccgtttagctggagaaacatacttggaatcctgatcgcggtgatcgggatggtcctgtactcgtacttctgcactagagagactcagcagaagccggcagaggcctccccgcaagccatcctgcaggcaaaggagggtgaatcgaaccctctgatcttggattccctgagcgccgccgaaaacgggggcagtgccaccgacgacgagcctctgaaggtgccaatgtggagctcgaacgccgcctgcgccgctccgactgctgtgccactcgacagaatgagactgacagcagccaagtccggcctcaggcgccataggaaactccgcttcgcccgaccccagggctcggactcgggctcagccccggaagacgacgaactccgcttcgcccgaccccagggctcggactcgggctcagccccggaagacgacgaactccgcttcgcccgaccccagggctcggactcgggctcagccccggaagacgacgaactctgcttcgcccgaccccagggctcggactcaggctcagccccggaagacgacgaactccgcttcgcccgaccccagggctcggactcgggctcagccccggaagacgacgaactccgcttcgcccgaccctag

SEQ ID NO: 22123 - DNA, 333 bp, Zea mays
  Peptide Sequence Number=SeqID_65498
atggaggcccaggcccacgcgtcatgcaaccggcgcgtcggttgctacgtgcgagcaactgcaccgccactcgcaccactaccgcgcctcctcgactgcggaaccagtaccgcgactcgaggcaaccctgcgtatgacccaacagtgccagccaggcgcgacggtcaatactgccaaaaatgggccggcagtaatggcggtggcaggcgggcagaagcaacggtcacgtcgtcagccaagcttacgtcccatccagggacaggaccgggaaaggggataccccgaaaaggatccttctccgtgaaggaaacaggccccgagcctccctactga

SEQ ID NO: 22124 - DNA, 1182 bp, Zea mays
  Peptide Sequence Number=SeqID_65499
atggggaacacccgcaatccttccaccttgtcgttggaggaacgcaacttcgtggaagttgcttcaaggatgttcatcatccttgctggggcggaggccgggctgagccagagctctacctcccgtgcgggttcgtgggtcagcctctccttcagcattcaagggagagggcgctcactggccctgcgagaggggcggacttcgacaacgcggggctggtcgacggcgggcgtcgtcagcttcagcatgttgggctcgccggcttggctcccggtgccccctcccgccgcaagggcggttgtcgcgccgcacgcacgggaggaccgcccaagacgtcgcgcgctgctagggcggcgttcgtgttctagggttgtacttcctttgcaccggtacggcgcctccgcgcggaggtcggtgccccgctcgtccgagaggatccgagtggggatctgccgatgggctgacggctcctatcgtcggtgccgaggtggaggcggctcgagaagtcctcgtcgccgacgggatcaccgccaccatccgcgctccgggcctccggctctttgtacttgtcctcgcccctcgagcgttggcgtgggcgagggcaaggttgcagcggcttccgccctgaggccatcgctgctgcagttcggccacccggagcgggggtcgttgtcgctgctgctggagcgggcgacggcgagccatccgtcagccttctgttgctccgcaggccctcccaattactcgcctgttggttatctgaaccgcttcaccaagcgtgagtcgcctcgtgcgaaggtgacgagtgagctcgaacagaggcagagttggcttcgaaaagaagatttggtcggccggagcctggccgggtcgttcgctggcgggaccaacgccggagttgaattgccgaggccacgggccgggctgatgtcttcgggggacagctggccaaggcctcggggtggccggccgagccgtctgctcgagccggattcttggagaagaccctggcggcgatggcccgggcgtggtgctgatgtcgtccttcagagtggagatcctccgaccgcgtcgccgtccgaggctaggtcggacctcgccgaaggtgtagttgacgccgagggtgctgctgctcccttcaactgtcaagatccgagcctgcaggatcagattatcttgtag

SEQ ID NO: 22125 - DNA, 258 bp, Zea mays
  Peptide Sequence Number=SeqID_65500
atggcgccaccgtccccttcctccgctccggccaagaaactctttgcaatcccgagaggagagcctgaggacaccgacgacgcggcggcggcgctcggcctggtcacggccgccctggagatgtcgccgtgggtcaaggcggcgctggaggtccgggcgcgcgctcaggcgctaccgcgacgtcttcatccatggccagagatcgatgaggctcatcgtcattgcgacgagactgggcaaaagagaagggcaaattag

SEQ ID NO: 22126 - DNA, 657 bp, Zea mays
  Peptide Sequence Number=SeqID_65501
atggcgtcgtcgccgccgcctggacctccgtcgtggtcggtgacactgagcctgaagcaccgcggggggctagaaatccgcgccgccgcggagaacgtgctcccggggtggggccgcggcggggagcgcttgtccctactgctccggctccgccgccgcctcctcctctccgtcacgtcccaatgtggcggccgtcgagcggcgtccacagagccggggacgccgccgcgcgggagcagggtcgtccgcctcctgcgcagcgcgtgggcacggctgccgcgggccacctccatctggaggcgcaagaagcaggccccggcgcgcgttgtgccgcgggaccgccggggccagagtccaacaccggcgcggcctggcttctgggcagtggcatggacgccgacgtcggcggcgacgctgcggttcgtagccgttgtcgtcgccatcgctgccgtcctcgccgtggcgttggctatcgacgcggcgttccgcgtcacggacgacctcggtaaccgcagaggaggctgggacagcaaaccaatcgcgcgctgggccacgttcttggagttgatggagcatcctcctctcccctggaactacaactacaagtggctgccgggtgcgccgaaacgagggctggagtggatcttcagcaagtag

SEQ ID NO: 22127 - DNA, 333 bp, Zea mays
  Peptide Sequence Number=SeqID_65502
atgaacaagaacacaagagacacaagatttatcccgaggttcggtcacaccaccaaggtgccctacttcctcgttgaggcgcccacaaagagccgggtctctttcaaccctaatcctccctttgccgaccacaaagactgcagatcagaggtcagaggggtcagagaccagctgaactgcccctcaggaccagttcaaccggtcttgaccagtgagtttaggagagaaaaccccagctcaactgcccggaggcaagttcagctggtgtatgttcaaagaggttcacagctgaagttgagaaagctcaactcagctgaagttcagctcagctga

SEQ ID NO: 22128 - DNA, 417 bp, Zea mays
  Peptide Sequence Number=SeqID_65503
atgaacaagaacacaagagacacaagatttatcccgaggttcggtcacaccaccaaggtgccctacttcctcgttgaggcgcccacaaagagccgggtctctttcaaccctaatcctccctttgccgaccacaaaggtcaagctcacactctaatctttgctcaaacgagcgggggggcggttgaaccgcccctgacagctcctggcgacctgtttgccagtctgactggcagactgcagatcagaggtcagaggggtcagagaccagctgaactgcccctcaggaccagttcaaccggtcttgaccattcagctcagctgcagctgaagaagctcaactcagctgaagtcaagttcagctggaaagctcagctgcagttgaagaagttcagctgcttttcagcaagaacactctag

SEQ ID NO: 22129 - DNA, 1092 bp, Zea mays
  Peptide Sequence Number=SeqID_65504
atggagaaaggaaaacacatccagccaccaacttatggcaaccttgtaactattctttctatcgatggtggagggattcgaggaatcattccagctgttgttctcacctttctggaatcagagttgcagaaactcgatggagaggaagccaggttagcagattactttgatgtcattgctggaacaagcacaggggggcttgtgacctcaatgctggttgcaccaaacaacacaaacaggccactttttgcagccaaggatattcaagcattttatatgaaccatgctcccaagattttcccacagcagagaaagaagctaggaatcaccaggctgcatgagactttaacagatgttgtaataccaactttcgacatcaagcggctacaacctattattttctcatcttatgaggttaagaatgagaagtacaacacaatggatgctctactatcagatatttgtatcagcacatctgctgctccaacttatcttcctgcgcactacttcaagacagaagattgccatggaaacaccaaggagttccatcttattgatggaggagtggctgccaataacccggctttagttgccattggagaagtaaccaagcagatattcaaggaaaacccagattttttcccaataaaacctatggattatggccggtttctggtcatctcactaggcacaggctcagcaaagtttgaagcaaactacaatgcacaaacggctaaatcatggggactgttgggttggttgcttggcagtggatccactcccttggtagatattttcacacaagcaagtgcagatatggtggatatccatatctctgctgttttcaaagcattacattctgagcaaaactatctgaggattcaggatgatactctgcaagggacgctgtcctcggttgatgttgcaaccaaggaaaatatggagaagcttgccagagttggagatatgctcctaaagaaacctgtctcacaggcgaacttggaaactggccatatggtgcctgcttgtcatagggcagagatgaccaatgaagaagctctaaagaggttagctttacctctacacctctaa

SEQ ID NO: 22130 - DNA, 669 bp, Zea mays
  Peptide Sequence Number=SeqID_65505
atgtcatggaacctgcatcattgtgcctgggacatacagatgcttatcaaagaaaaccatcaggagccttccaggtactatggcctcagacgaggtcagggcatgaagatcatcaggccaaggggggaagagttgcttgcgtactggtggagagaggatcattggttgaaagcgatgtttctacatatgaggtctataattaaggttgaggaagagttggttggggttcctatgaaaggtggactagatgaggtctgtaattactttttttgttatgctctatcattacttgaaagaatcatcccagaggttaaagtatatgcttattcggctgcacaagttaagaaagctttggaggtcactcactacctaggtggtgaaaactatgtgttctggggtggaagagagggttaccaaagtcttctgaatactgatatgaatagagaacttgaccatctgctaactttcttcaagctgatgttgactacaagaagaagattggattcaacgttagcttcagagtacctgttgcccattaaagaaccactactagaattagaaaggccaccaattttttcagcacaggattggctaagaaagtctggtgttcactggagctactttgtagaggctgcttctttttgtgcagtaatacacagtaacctgtga

SEQ ID NO: 22131 - DNA, 573 bp, Zea mays
  Peptide Sequence Number=SeqID_65506
atggaccgagtcttctccaacacactccaaggtcctcccctacggcgctggggctgggtcccacgcgtcatgcaaggcggctcagagcagaagaagccaaaccgccgtgcgcggtgcgtacaaccgcccagcggttacaagcgactctccacgtttgcccagaccaacgggcgaaagggcgggcagccgtgcaggcggcatgcaaccgcgccaagtgggcgcacttctccgactcccaacacgcccagcatggagggcccaggcccacgcgtcatgcaaccgggaccgggaaagagggataccccgaaaaggatccttccccgagaaggaaccaggctccgagcccccctactgatcagaggttcgaaggctggccccccggaagggttcgacagccgcctcagatcgcgtgggccctacacccactactggtcagaggttcgaaggccggcccctcgaaagggttccacagccgcctcaggctacttgggctccgcgcccattactgatcaggggttcgaaggctggcccccgaagggtttacagccgcctcagacgccgagcgagggatga

SEQ ID NO: 22132 - DNA, 840 bp, Zea mays
  Peptide Sequence Number=SeqID_65507
atgtcttcgcgctcccttatgcatcgtgtctttccaccttccaagcccccggatgggggagatccgccgtctttccgcctcatcgttgggggaacacaactccatgggagttggcacctttcagccatcgttcggcttcaaggattttcatcatgcagcccggctgcaccccctcgccggcggtcaccccagacggtgaccaccagcccctgggtggggagaagcaagccgggctgcgatcttggtcccaccctcagcttcaaggatgttcatcatccttgctgggatggaggccgggctgagccggagcactacctcccgcgcgggttcgtgggtcaccctctcctgcggcgttcgagggagagggcgctcgttggccctgcgggcgggtcggacttcgacaacgcggggccggtcgacggcaggcgtcgtcagccccagcgcgtcgggctcgtcgggttggcccccggtgccccctcccaccggaaggcggctgccgcgccgtgtgcacgggaggaccgcccaagatgtcgcgcgctgctagggcagcgttcgtgttctggggcggtcctgcctttgcaccggtacggtgcctccgctgggaggtcggtgccctgctcgtccgggaggatccgagtggggatctgccggcgggctgacggcccctgtcgtcggtgccgaggcggaggcggctcgagaagtccccgtcaccgacgggatcaccgccaccatccgcgctccgggcctccagctctttgtacttgtcctcgcccctcgagcgtcggcgtgggcgagggcaaggttgcagcagcgttcggcctgaggccatcgccgctgtag

SEQ ID NO: 22133 - DNA, 408 bp, Zea mays
  Peptide Sequence Number=SeqID_65508
atgacagaaggcaagaatggccttccagatttgtgctcaacggctcctagctgccttggggctataaaagggacccctaggcgcatggaggagaacaccaagcatcctttgagcatcattgatcactcacacttcattcttgcgcacttgttcgacattctagagttcctgaccttcggcgatggagatgcatcgctggaggatgccggaggggctgcggtggtacggggtctgccagttttgatcaggcgtgaccccacttcgctcctccccgacgtgcagcgtctcgccctcgggggccgagggtacctcgggccgaaccgaggatgccttggaccgagccgagggtgcctcgggatgatccgagattgcctcgggcgattcatgccaaagggggagaaagtatag

SEQ ID NO: 22134 - DNA, 460 bp, Zea mays
  Peptide Sequence Number=SeqID_65509
atgtccggtgcaccaggggactccaactccgaactcatcaccttcgggaaattccagaggcgactccgctataattcaccggattgtccggtgtacaccggacatgtccggtactccaaggaagagcggcctcaggaactcgccagcctcggaaattcaattcggctgcttcgctataattcaccggacatgtccggaacaaatgatgattcatatcaaaagctcaaagaagaaaatgagaggctaaagaagagcttgacacaactaaaagggaaatgcattgcccaaccttctcaagataaccgtgatcacatggtgaagaagcttgagacgggaacaaccgtggcatgcactacatcccttgaagaaaatgtcaaggatttgaggattgccaagaggaagaaacaaaagatgaaattcaacacctcctccaaaagcctcaaccacgcctccataaaag

SEQ ID NO: 22135 - DNA, 1122 bp, Zea mays
  Peptide Sequence Number=SeqID_65510
atggagcaggagttcctgcaagccctccaggccttctactatgaccagaaggccatcatgtccaacgaggagttcgacaacctcaaggaggagctcatgtgggaggggagcagcgtcgtcatgctaaacgaagatgagcaaaagcttttggaagcttccttggcctatacctccggcaacccaatcatgtctgatgctgagttcgacgaactgaaacttagattaaagacagacggcagtgtcattgtgaaggagggtcccaggtgcagcctaaggactcataaggtgtacagtgacttgaatgttgactacctaaagatgttcctcctaaatgttccagccaccaccgtagctctgggactgttctttttcattgatgaattgactggttttgagatcaatgtgttccaggccgccgctcaccacctcccgcgttgttgcccctgggagcctattccttcgctcccgggggcggcccccaccctcctgtcgccgccgggcctccacccctggacgtcggccctctccaccgcccatgaagccgctgaccgccgcttcttcggcagccgcgccaccggccttagcgccctgcaaccctccctctcgcgcacgcagccgaagccgaccatggcgagcgcgtgcatccgtgggcccatcctacccctagcgcgccccctcctccgcgtcgccgcccctgtcgccggccatcccaaggctgccaacccccctcctttgcctttgggcaccctcttcgcgtcggcagcacctaggcgtaggccctcctccatcccacgcgagcagccaccgccggctctcctggtgcacttcaccctcctgccgccgtcgggcctccaccctaggacctcggtactatccaccgcccatgaagccgctgaccgtcgcttcttcggcggctgcgccgtcggccctagcgccgcgcaaccctccctcgcgcacacagccgaagccggccatggcgagcgcgtgcatccgcagtccgctgcccctggcgcgccccctccttcacgccgccgcccctacgccggctctactggtgccctgcatggtctgctcacccccagctttgtggtccagtggtggaccgacgagcagcggctctag

SEQ ID NO: 22136 - DNA, 501 bp, Zea mays
  Peptide Sequence Number=SeqID_65511
atgccccgcgacaacggcatgcgcgcagccaggcatacgcggcatggttgggctctggaatttctcgtcggtgggggaattttgccgtggatccgctcctcgccgtggccggcgtcacccgaacgacaattcatggaggtgagcccaccatctaattcgcgatcgcctctgcatcgttttgcgtcagcgcttgtggtgaatcggtcgctggagagctttgaaggtgcgatgatttctcgccgaactccctccgtcaccgcggtggcgcgcttcgccgtggccgtggtgctctgcgctgcaaagactggtggggacttccttctcggatccgccaacatctcgacttcaattagcactaaacgtacgtggggatcatactctgtgggccggggacctgcgcacgccgacgagctcgccgtctgggactgctcgggcgccgccgctctaagcgctcaatggggaagacaggggatggccctagacttcgagatatacggctag

SEQ ID NO: 22137 - DNA, 921 bp, Zea mays
  Peptide Sequence Number=SeqID_65512
atggggtttgtcgacgactccaaaggtgatgagctgttgtcttttactcatgagcaaaggggcttctgcacattttttactagcgtggatcacctgctaggaactaggaggaaggaatttttacaatcggttttcttgagcaaggcatgctgtcgctaccagaagtggagcgagtgcccatcctcgacgcaggcctccccaccgcgactagaagtaggagtacattgtaccattagcaatatattcagtcgtgaggacactggtaaaattagtggaacaatttggaccgaggaagtggtcttacatagcacaactgctgccagcaggagtggggaagcaatgcagagaaagatggcacaaccatttgaggccaaacatcaagggaaccagcttccagtgcctcttgtaccgatcatcggcaagggagtgctagaggaggaggttatggtgagtcacacgtgggggatcgctgccgctgggtcaaacacctcgtgcttcaccagaactgaagccgacccagtctccttcatcaacatggtgactcctcccactattgaggtacacaggcactcatgcatcatccactctgtcccatccttgccgagcgcaacccatggaagtatgcgaagaatgacattcttttccttgatttcccctgttttgcgactccagctgaggcactttgagtatatgagagataccatggtaaagctgccgcatgaactagagactgcacggattaatgagttgcttgggaatattcaggccgtggttactcctgaaatgaatcagacaacaataattgaggaatttgacaagggacaccagcttgaagaagttaaaacggtcaatgagcaagtggttgttcctcctgtaaagaatctaagcaaacaaaaatcccaacaaatccaagaagactaa

SEQ ID NO: 22138 - DNA, 189 bp, Zea mays
  Peptide Sequence Number=SeqID_65513
atggcactatcttactttactggcacatggtattctggatccattgtagcaggtattttctggctcaaattttacagattgaaggaattagtatgctctttccttgaaccagaattagtctggtgtaaacagttactaaagtttaataggttccacgtgatggcttttatactactttatttattgtaa

SEQ ID NO: 22139 - DNA, 615 bp, Zea mays
  Peptide Sequence Number=SeqID_65514
atgagcaccgccagggcgccgcgaaatcgtttcctctgtaaccacaaccgtccgtcgttcagtccacccacgcgggcgaacagtgaaaggcatcgtctccgtctcgtgactcgtgatcgctggactgccgccgcccgtcgccctcagcttagctcaatgattgggagcaccaagccgctcgcggcgccgctgcacccgccgtgcccctccggtcgccgcctcgccccccccccccccccgtcctgcgcccctgattcctccccagctctcacccccgccgtcgagaggccaggtcagtctcagtctgacggcgccccgccgccaccacgcccggatgtggtcgcctcgttcctcgcgctgcgcgctagcccgcaactcaatcggtggtcccgctcgcgggcgctgcggtcaaaccgccggcctaggctggaaagcgcgctctcctcgtcctcggcggcgtcggtgaccaagacgtcgcggcccgaggacgctgcggtggcggtggaggatggcgaggacaacgacagattcggtgtggttcagattctcatgctggaggaaaaggagggtgctcccaatcagatggagctcattaccttagcaacaagcctgtga

SEQ ID NO: 22140 - DNA, 304 bp, Zea mays
  Peptide Sequence Number=SeqID_65515
gcgactatcagaaggcggcgtcgaggtggatggcacaattctctcggttgccaaggaactgggcctcaagagcgagccaagcctggcgagccgcacccctgtgctcgcggacgatgtcttacagctcgatggtgagagtctcgaggatccaggagaggacgacactgtccatccggaaccaggagaggcgaggcgtggggcggttagtgagaacatggttgtcgagtgcgtagcgctacaggggaccctcatcggtggcgggctcgagcggaggaccaccaagaaggagctcgacctcggctag

SEQ ID NO: 22141 - DNA, 258 bp, Zea mays
  Peptide Sequence Number=SeqID_65516
atggctgaactactgaaagtttacctcttccatagccaggttcaggagcaagatgacgaggtggtggacaggaacatcctcccctactgcagcatcgacaggaagcagaagaagacgctgggagagatggagcaggagttcctgcaagccctccaggccttctactatgaccagaaggccatcatgtccaacgaggagtttgacaacctcaaggaggagctcatgtgggaggggagcagcgtcgtcattgctaagtaa

SEQ ID NO: 22142 - DNA, 951 bp, Zea mays
  Peptide Sequence Number=SeqID_65517
atggtgctggctgcgcacgatccccctccccttgtgttcgacgctgcccgcctgagcggcctctccgacatcccgcagcagttcatctggccggcggacgagagccccaccccggactccgccgaggagctggccgtgccgctcatcgacctctccggggacgccgccgaggtggtccggcaggtccggcgcgcctgcgacctgcacggcttcttccaggtggtggggcacggcatcgacgcggcgctgacggcggaggcccaccgctgcatggacgccttcttcacgctgccgctcccggacaagcagcgcgcgcagcgccgccagggggacagctgcggctacgccagcagcttcacgggccggttcgcgtccaagctgccctggaaggagacgctgtcgttccgctacaccgacgacgacgacggcgacaagtccaaggacgtcgtggcgtcctacttcgtggacaagctgggcgaggggtaccggcaccacggggaggtgtacgggcgctactgctctgagatgagccgtctgtcgctggagctcatggaggacgacgtgggcggactccaggtgttcgacgccgccacgctcgcgtggcgctccatcaggccccgcccgggcgccttcgtcgtcaacatcggcgacaccttcatggcgctctccaacgggcgctacaggagctgcctccaccgcgccgtcgtcaacagccgggtggcacgccgctcgctcgccttcttcctgtgcccggagatggacaaggtggtcaggccgcccaaggagctggtggacgacgccaacccgagggcgtacccggacttcacgtggaggacgctgctggacttcaccatgaggcactacaggtcggacatgaggacgctcgaggccttctccaactggctcagcaccagtagcaatggcggacagcacctgctggagaagaagtag

SEQ ID NO: 22143 - DNA, 447 bp, Zea mays
  Peptide Sequence Number=SeqID_65518
atgggcaagaacaacaagcgcaagcgcgagccgactcctccatcggaggatttcggtgactcggaatactcggaggaggagttctcctccgagtccgaggggtctccggctcccgtctctcccccggcgtcgtccgatgactcggacgactcccaggggatagccgcggaggtctggacgtacatccgggccgtcgagcgctccgggctcgaaggctcggatgagtcggagtactcctcggatgaggaggactcggacggcggcgacgagggtgaaggcgacgacgacggcgacgacgacggtgacggcagcggtagtggcgggggcggcggcgacggcagcaggggcagcaccaagggcgacagcagcaagggcggcaccaagggcggcagcagcaagggcagcaccaagggcggcggcggcggcaggggcagggccagtggctag

SEQ ID NO: 22144 - DNA, 522 bp, Zea mays
  Peptide Sequence Number=SeqID_65519
atgtcatcatcccctcaggaaccctactccccccgatgccactgtacatcgtacccatctcgccttgcaaccaacgcgaagaaggggaagcacaacgatgcccccgtagaggcgaccgacgcagggaagcctgaccagtccgcgccggcgtgcccggagcgcacgcccttcagcttcaaggacccggtccctgacaccaagcccgcctccacgggcgtcgagaaaacaaaaggatctttacctttggatggtgaagtctcatggagggtcaagggcaaccaaattgaaactgctgcaaggccatatgcttttatcaagtttgatacattcatccataagactaagaaactgtatttggatacaagaactcaaagaaacctcgcaaaactgaatgatgaactctatgaggtccatcaaattatgactctcaatgttcaagaggttcttggtgttggtgaaaagctagactataagatctcaataattttctgccaacgtttggtgatgtcgatagcagtctga

SEQ ID NO: 22145 - DNA, 309 bp, Zea mays
  Peptide Sequence Number=SeqID_65520
atggatctgtgggttgtggctcctcggttccccgtgactccgtgcactcctcgcctcctcggttctgcggctccttggattcggaaggagtcattagaggaggctcctcgtcctcggttatggatctgcgtctcatcggaattcctagccttctgtggccctccacctcccaggaaccaatgcgccacgccgccagcttgccaccaccgcgagtccacgagttcaacggttcaaccggctccactgctccagcaaggtgtaaaaggttcacactcagccaataaaaagaccaagttttggattcaataa

SEQ ID NO: 22146 - DNA, 1962 bp, Zea mays
  Peptide Sequence Number=SeqID_65521
atgtcggccggctccacggcgtccctcctcgcggccgtcatctgccttgccctcgccgtgcttgctcccgtcgttcctggagatggtgccacattggaatcagttccagaccttgtgaaggcaatgtacctaaacgttgaaagcttcccttgtgtgaggctgttgaatctttctggtgaaattggctgttctaatcctggaagtgagaaggtcattgcaccaattgtaagacttagaaaaggcagtgatcaattggttcaaccatctactattctcctttccttagatcagatgtcagatttctttctgagggtatccaatgatccagaacttcaccagaaggtggcaggtgtattggttgagtcaaatggtgtcaacaatgacttacaagagctgtctcctgatagaaaatttccacaagatgattttgcaccctactcaaatcacagccatgattggaatcctgctggatcaggtatcatgtggaacaaatataattttcctgtatttctactttcagaagagagtacaaacactcttcaaaagatttcagaaaaaaatgagaagactggcaatggatataaagcaaatgttgcagaattcgaccttgttatgcagggcagtgtatggacttcattaccgccacttaataacggatctacagagcatccgaaacctttaatattggctattgcgtctcaagactctgcatcattttttcgggaccgtagtcttggttcagattctcccatatctggattgattgctttgctcactgctgttgatgctctttctcacattcatggtctaagcaagcttaagaaacagcttgtgttcgctgtttttaatggtgaggcctggggttatcttggtagtcggaaattcttacaggaattagatgaaggcgctgcttctgtgaatggaattagtagcttaaagattgaccaggtactggagattggttctgttggcaaggctatacttgaggaatatccatcattttatgtgcatgctgaagggaatccatcagcttcaaaggaaatattagatgcactgcaaagtgccagcaagtctcttggttctgataatgttaaagtaaaacaagcagcttcatcaaatcctggtgttccaccatcttcattaatgtcattcataaggaagaacatgtcaacttctggagttgtgttggaggattttgattcccacttctccaatagattttatcatagctatctggataactctgtaaacatcaattcctcgtcaatagctgcagccgccgctttggttgcgaggtcgatgtatattcttgctagtgatgactcagttgttgaccttataacactaaacactataaaagtgaacgtttcattggtcgaagaacttattggatgcctgcttacttgcaatcctggtctttcgtgcggccttgtgaaaagattcatttctccaagcaatccctgcccaagtcattatgttggtgtttttctggatgacccatctggcacgcagcttccttcatatgcagatgacacgtctcggtttgtatggaactttttggcagacagaactaattcagcaggcaataaaagctcatgtactggaaagtgtggtgatgaaggtgaagtatgtgtaggggcagaggtggagggtggaggtagatgtgttgtatctacaaccagcacatcacttcccaggtatgttcctgcttattcaactcgggtgaagtttgaggacaatgcatggcacgttcttccagcgaactcgtcagatccaatgggtgctgcagatcccgtgtggactgaaagcttctggaacactattggcctcagggtctacgccgtgcaagatccagcttacgattggcttattcttcttgccgggctcggaatcactgctgcatcttattgcgctgtacactttggcagagcatacatttcaaaggtggcgaagcttgactga

SEQ ID NO: 22147 - DNA, 906 bp, Zea mays
  Peptide Sequence Number=SeqID_65522
atggcgcttcttgtcgatgtggtcggtccgcgccctaggttgggcgatgtggaggctcctccgaggtcgaggtcgagtctatcttccgtggtcgtggtcaagtccgagcctctgggtcgggcgaggcggagaccgtcggctgaggccagggctgagtccgagccctggggtcgggcgaagcggtgttcgtcgtcttccggggctgagcccaagtccgagccctgggtcgggcggagcggtgttagccgtcttccggggcttagcccgagtccgagccctgggtcgggcggagcggagttcgccgtcttcaggggcttagcccaagggcttagcccgagtccgagccctgggtcgggtggagcggagtttcctatggtgcctgaggtcgggcctgactgcctgtcagcctcattctgtcaagtggcactgcagccggtgcggcgcaggcggcgctatccttctgtcaggccggtcagtggagcggcgaacgatttggtcagggttgcttcttggcgaagacagggcctcgggcaagccggaaatatgttcgtcactggaaggggggcctcgggcaagacggagatcctccgggagccgggtttgcgagagcagcccccgagcctctgcatagggcgagaggacgatcagggacagactcgacttctttacatacgcccctgcatcgcctttccgcaaggaggaggggggaaagcgccatgttgccctcggtgggcgccgaaaatggtgtctccggtgagctgctggcgggtaatccgagcggacgtccgtgccccatttgctaggggtcggctagaggcccagaggcgcgcccaaaagtatctgcgggtgatctgccggacccggtcccctgtcgacggggtccgagggctcgatgcctccctctga

SEQ ID NO: 22148 - DNA, 288 bp, Zea mays
  Peptide Sequence Number=SeqID_65523
atggccgtgctgatcatgaacaagaacctcgtgcttccggcggtgatcatgctggtcgtcgtcatggtgttgtcgatggtgcttggctcggccgccgcgcggccactgctaggagaggatgatcgactgcccggggaggccgccgccgccgtcggcgactccatcgtcaggctcatccggcagctgtatcggcaacagctaagcgggccaggtgcccaggtccctcgtgtcaggtggggatatacttcccgtgttaaaagtgactccctagctcgtacagaattttag

SEQ ID NO: 22149 - DNA, 234 bp, Zea mays
  Peptide Sequence Number=SeqID_65524
atggaggaggctatgctcaagctcaatgaagagtcgtcgagtcggcccaagcgtcatcgacgctacatcaatcgtgattgttggggatcacccgcaaacgtttctgtttctcctttgtcaactgaggtgcagaacttgaaattttccgtctacaagcccgcccaatcactgccaacagtttacttcaaagctccggttatcaaattccagcttagacccgctgaatggtgctaa

SEQ ID NO: 22150 - DNA, 192 bp, Zea mays
  Peptide Sequence Number=SeqID_65525
atggagaagtgttgtcctgtttctttgagggcttcacattgctttaaaattttgatagctggagtgagcgtgagcgaggtcgaggcatttgtacaagctgttcaagaagatcaacaacgcctttcatcgatgatggggctgattaacaggtcggcaatgggtgtctggttcactgcttggttccttatgtaa

SEQ ID NO: 22151 - DNA, 642 bp, Zea mays
  Peptide Sequence Number=SeqID_65526
atggggcctaagtcatctgaggatagctactgtggagtatcacatctgttggagagaatggccttcaagagcacagtgaatcggacccacttacagttagtttgtgaggtagaagccattggaggaaatgtctctgcattagcttcccgtgaacaaatgagctatacctatgatgcattgaagaactatacaccagaaatggttgaagttctcattgacaatgtgaggaatccagcattcctcgattgggaggtcaaagagcagcgcgtgcggacgccggagtcggaagagttcccgttgaggagaagcttgtcgcggcccaaagagagaggaggcatacgtgccgccagccgccggtgccgtgcagccgggcccttccatggtgtgtcaggcgagctctcggaggtgcagaagaagtgcacgctctacagcctgagttgccccctggctctagctggaggagacaagatctcgcaggctttgaaatctatatgctggaggagcaaggccatccaagtagagggcgactcggctataattcaccggactgtccggtgtacaccggacagtgtccggtgcgccaagggaggtcggcctcaggaactcgccagcttcgggaaacgccaacggctagcccgctaa

SEQ ID NO: 22152 - DNA, 114 bp, Zea mays
  Peptide Sequence Number=SeqID_65527
atggcgccatatagtataaaaaggagctactatttggaaaagtcttatacttatcaaaaattttgtgattccagatctgttgacctcaagccagattgggaaatccaagagtaa

SEQ ID NO: 22153 - DNA, 450 bp, Zea mays
  Peptide Sequence Number=SeqID_65528
atggatttggcgacggcggtgcagtacaggtcaaacttcctcttgagcaccacagcgtacgcgtcggggtcgctgccgcctcaccactatctacgcgtcgatgcgtgggagctggtacacggggcggcgacgcggtggcaggcgacatgcgccttgagctcttacagcgggtgcaccacgatggcctccttctccctctcccagccggggccgacggccacgacgcctgagacaaagctagggttcgaggccaccccaaccgcgtggtccatcgccaacgcgtggtccatcggatcaagggagcgctacgccaaggaggccgccgctgttgggatcaagggacgtccgtcctcgaatccgtaccttgcaggcagtgtcgtcctcgtctccacagatacaacgtcgccgcttcgggtcgtcctccccatggttgctctcttccggatctag

SEQ ID NO: 22154 - DNA, 147 bp, Zea mays
  Peptide Sequence Number=SeqID_65529
atggcgtgccgccggcgagcactccgccgtgtgatttggtgcgccgccgcgctcggtatccaggacgagcaagccactgtggaaactgaggttcaacaagtagagatagctgagcaggagctcgtggaaggcaagttgtgcccttga

SEQ ID NO: 22155 - DNA, 1614 bp, Zea mays
  Peptide Sequence Number=SeqID_65530
atggcgacatcatgtccaacgctcccatttgatgaagcacggtggatcgtccgaattcgccggatcttcgatgaggagatcgaggtcagcgaggatcagcccatctgcgtgtttgatgttcccaagcctctgctgatcacgaaacctgaagcttacgtccctcagctattggcccttggcccataccaccattgccgcgaagagatctgtgacatggagaggtacaagctctcggcggcgaagagagcccagagccaccttccggacatggacttccagaagcttgttgacgtctttacgaaactggagcatctggttcgtgctcattatcacaggcatctgaacctaagcaacgaggcactagggtggatgatggccatcgacgtgtccttccttctcgagttcctggagactctgaagaacaggaacggcaaccagcagagagcgctgcagaggatcccctccaggatgtcacatttggtagacccctctcgcaggacgtcctcgcacagcatgctgctccgtgacgtagtcatgctggagaaccaggtccctctcttcctgctcctgaaggcgatcgaggcccggtgctcgacggcggcggcgcaactaccgccgccacagtccgtgctgagctccatgctggctgggctcttccaggaggtctccacgttcagagggatcggccgtccgtgtaccgacgtcgatcgccacgtccacctgcttgacttcctgtactcaaacatggtacccagatgcaccgaagaatcacatggcgcggaagaaggcggagacgcgtcgtgccatgaccacggaaagagcgcactgaattcagccatggacctgctcgtcagccgtggctcgaagatcgtgtcggtgatggcagacttcgtgctgagggtcctactcaagttcgtcgccagcctcccttgcctctcggtgctcggagaccccatcgagcagctgacgcaacacgcggccgcgccaggcgtcccggacaaggacgcgtcgcctctgctcgaagagatcgcggtgccgtccgtcgccgagctggcgtacaccggcgtcaggttctgcccgacggtcggcggcctgtcgacggtggacttctgcccggccaccgcgacgcttcacctcccggtgatcggcgtggacgtgaacagtgaggtggtgctgcggaacctggtggcgtacgaggcggcggcggggctcgggccgctcgtcctcgcgcgctacgtggagctgatgaacggcatcgtcgacaccgcggaggacgcgcgggtgctgagggagtgcggcgtcgtgctcaaccacctcaagagcgacggcgaggtggccgagctgtggaacggcatgacccggtccgtgaggctgaccaaggtgcccgcgctggacagggtcatcgacgacctcaacaggcactacggcagctgctggaaggtgagggtcaggacgttcgtgaaggcgcgcgtctttggctcctgcagggagctgctcgcctgcgtcgccctgcttttgctcttcctcttcgttggcctccagtccatctgcgtgcttcatggctgcgtccctgtctcgtacgggatgcccagcagaagatttggtgcctcgtga

SEQ ID NO: 22156 - DNA, 1704 bp, Zea mays
  Peptide Sequence Number=SeqID_65531
atggagtacgatgtttcagattgcaaacaaattctattgcccttttatttcatgggtcacttcaccttatatgtacttaacatggacactagaagcatctatataatggactccatgcctataccatcatggtttaagggtgatcatcctagcatgcattatatccataatatacattatattgccaacaatatgaatgctgccatggaattggccaatcctacatggaaagacgatatttatatgtggcgtcgtttagtaccaacatgggttccaagaacattaaactgggatttatctggctttcttgttatcaactttatgcacgattggaatggtataaggttaccctgcatttgcactcactgtagtctgtcaccactgccagcatatgagcctgcatttgattgggagaatgagaggtctttgatatttggccaaagggtgccagaaagtataccagcaataagcaacagtggcttcaagataactgtcaagagtgtttgcgtgaaaatgattgctgccggtgccgaacatactgctgcagtaactgaagacggtgacctctacggatggggttggggtcgatatggaaacttaggtcttggtgaccgtaatgaccgtttgcttcctgaaaaagtatcttctgtggagatgtgcttcaatgcatttgacgaggaagctgacctcgatgttcttgaccatccagttctgaatttgttctattacctgcttgtggagattctcccttcatctcttgtcctgtacattctaaggaggattcctgcaaagctacggctatcccagtatcaccccactcagaaggaccccgagaagcttcgacgcgaaagggaggaacttgagagggtacaaagagaagagagagctcggttgcaagctgaggctaaagctgcagaggacgttcgcaagagggctaaagcagcagctgctgatgaggctgctgctgaagctaagcgacaaagagaacttgagagagaagcagctcgcaaagctttgcaagagatggagaaaactattgacatcaatgaagggagccattttttgaaagatcttgaaatgctcggaagtgtcacaggtgaacagatacccaacttggttggtgaaacaagtcctgggtttcaaatgggaagcaacacaactaaaaaagctcgggttgtacgtgaaaacgatgaggatgatgaggatgatgatttcacagatgaaccagtggctgatgttgaagagggagaaatagcaaggcaagtgagatgtacatgtagtattcggatgtcggtgttcagtgtttatcatctttgcttatcgtggcttctttttctattagcagatgagagaccccttgaattgcttgctaaagcatatgctatcaactcttttgacatagatcctcagaacccctctgatgttgttttcacgttagaatgggaaccaatcggtgtcctaccttgtggcgagaagaaagataatttttactaccaagcttccgaatgggtcaagggcaagcaagtggaggaagtagtagccatcaagaacaccgagattgcgaagcacctgtctcttccaccagtgaagctccactgcagcatgctcgctgaggacgcgatcaaggccgctgtgaaggattacgaggcaaagaaagggaagaagatggccaaggcagaggagcaggacaccccatgcccgtaa

SEQ ID NO: 22157 - DNA, 1473 bp, Zea mays
  Peptide Sequence Number=SeqID_65532
atggatatagtggcggaggaaggaaatgctgatgttggcaatactgctgaaccatcgtatgaggttgtgtctagaagtggttgttcagcacaattgtcaactaatgacactaatgaacatgaattggatatagagagcgaggatagtaaggtcagtgttggtaatgctgcaaaacaatcacacgatgttgtgggagtagacattgactgtattttcaatcatgtaaaagtgtcaactgaagccgatcttgggacacaaccggatgtgatacacctgacatctttggatgttccaaatgaatcaagtcaaataagttctgatgcggatatggtagagcagaacaaacaagatgctttggacacacttattagaatatcacaacataagaaaccaaagaaattgaatgtagctcgagttgtctctgaagatgttcagcttattgaatacattaaaacattaccggggaaacaagttgtggtggacatcgacagcgcatggttaaatagaaatgatatggaatgtctttttcatggtgacatccaagtgtctggcgaagccctcagtgcatatatacactgtattagggatgaagagcatttacttcatagagaaggtggaaaggtcttcttggagaacacattcatttccagtctgcttaagcgtgatggcgaccctaaggtgctcttaaattgtgttcattccaatgaatatagaaaattttcactggtacctggcagttctgaatgcaaaaaaaatgaggtacatgtacttgattctatgggacaacaaataacggatcgccgagacctttatactacattaaaaggtatagaaagacagattaaacttgcagcagaacataaagagctttaccaaggcaagtggtcgaaccttgatgttgcatcatggccagttatagagaagatcacaacacaaatgcaaaccgatggggtatcttgcgggctatggatgataaactatatggaatactggacaggatcctccctatctgataacgtaactcaggatgatataacaatgtttaggtttaagctacctgcaatattatgggactcgagattaaacacaaagaaaagacatcaaaatcttgaccacaatgtggatgaagatggagagagttcaagtgatgttcaaataattgatactccattaacatcaacaaacacgcaagaactgatgtttgtattatgcacatatatcatggggatagacaacgacaaatatttaaagaaacattggattcagagcactaaaccttatccaatttcgttaagtcttcaaaaacttaaagatatattggatgtaaataagccgatggataccgattgttttaacatggctgttcggatgatcgcatgcaatgatgccttgttcttgttggaagacaaataccactacatggatctacagttttgtgtatatttgtaccttcgttttagcagaaagcaataa

SEQ ID NO: 22158 - DNA, 462 bp, Zea mays
  Peptide Sequence Number=SeqID_65533
atgggcaagggcaccaagcgcaagcgcgagccgactcctccgtcggatgagttcagtgactcggaatactcagaggaggagttctcctctgagtccgagggatctccggcccccgtctctcccccggcgtcgtccgatgactcggacgactcccaggggatagctgcggaggtctggacgtacatccgggctgtcgagcgctccgggctcgaaggctcggatgagtcggagtactcctcggatgaggaggactcggacggcggcgacgagggtgaaggcgacgacgacgatgacgacgacgacgacgacggcgacggtgacggcagcggcagtggcaggggcggcggcgacggcagcagggacagcaccaagggtggcagcagcaagggcagcaccaagggcggcagcagcaagggcagcaccaagggcggcggcggcggcaggggcagggccagtggctag

SEQ ID NO: 22159 - DNA, 243 bp, Zea mays
  Peptide Sequence Number=SeqID_65534
atgaacgtatgtgagctcactcttgctgtctcacaccccccacaggtcaagaacagaaggttggacagctacgacgtgacgctatcgaagggcctcatggaccacgacaccaagttggatctacaactgttggcacgggacgcggacctcaagcgccgcctctccgatctcgacgccaagtgggatacacgcatctcaacgatgtccgaggccagagagacacgagtgtcgcgcctgaaatag

SEQ ID NO: 22160 - DNA, 237 bp, Zea mays
  Peptide Sequence Number=SeqID_65535
atgcagaaggcccatagcataagaataattctccgcaatggacctctggtggacaaagccagtttggtccccgccaacaaggtcaggaatatgaggctgaagtgtacgggaaaggactttggaaatgattttgatgggacaattttggaggcagattgggcggaagttggcctatcgattgcaaaaagaagtgaagagatcgctaagagcaggagaggtgatgttccaggtggctaa

SEQ ID NO: 22161 - DNA, 252 bp, Zea mays
  Peptide Sequence Number=SeqID_65536
atgtccggtgcaccagaggacttcaacacaaactcgccaccttcgggaatttctggaggcaactccgctataattcaccggactgtccggtgtacaccggacatgtccggtgctccaaggaagggcggcctccgggactcgccagcctcgggttttcacttcagctgctccgctaaaattcaccggactgtccggtgcaacctcgggggcaacggctacttcgcgccaacggtcacctgcaggcgcatttaa

SEQ ID NO: 22162 - DNA, 666 bp, Zea mays
  Peptide Sequence Number=SeqID_65537
atgtggacagaagaggtgatatactccaggataccatcagtaggtccggacctcctcaagaaagcgccgaacccctgtacacatagcccggacctccgagtacggcccgagactcccaagcggcgtccaggccatcctacaggcggcgtgcctgtccagtccattgtcaaacagtatgcccgtgctgcgaggtgcgctgtgtccatcatcacttatacgttgccaggaaagcttcccctacacgccaatactacgcagatcacggatgtcaggtgcaagaagattgctacaacaacgaacattagttgccccaagtattacatccgttgtgttcttgggcccacatgtcggccggggcttagtactcttcagatgtcgcacatgattcctttgatcgccattctccaggtaagggacagggttggcgacgccgtaacctggacgggctcgggcatctccactaacccggaagtgagggaagttcaatttgctggaactttcctcagccgtctgtccaccggtgggatgcagaggcactatctccaaacagcaaatggcaatcatgccttccggggctcaggtctggccgtgggcgtttggcttcgcctaatcattggctcacagagtcgtgctgcacttgccctcgctaactactcacttgtgtaa

SEQ ID NO: 22163 - DNA, 327 bp, Zea mays
  Peptide Sequence Number=SeqID_65538
atgtcgtcctcttcctcttctgctgccgctacaccgtcggccggcgcgttgtccgaggagacgctgagcaatgtggcggcggaggagttgcgcgccagtgacaaagtggagttcggcgtgtcgcagatgtcctcggtccgcgtgcaagacatgcaacagcttggttatttcggcggcggagtggcacgtgtcccggggacggaggaggtccctgagccagaaggcgagttggttgtgttcgaggcttttttcgctgctggccttcgtttgcccgcacatcgatttgtggaagaagtcctacgtaggttcaacgtccaggtccactag

SEQ ID NO: 22164 - DNA, 726 bp, Zea mays
  Peptide Sequence Number=SeqID_65539
atggacaaggatcgtcaggaagctgcgcaaaagcgtcgggcggtcatcaggctacctgaggctagaccgaagagggcgcaggggaccgcgaaggctgccgcccccagcggtagccagccgacgctggcggcgaagtcggccggccctgggtctagcaaggtgccggatgtcgtgaaggcagccggcgccggcggagccaagtctgcctcggccggagccgcgaaggcccaagaactgccttcgccggggaagcgcattgccgatttcagcactgatattagcgtggatgattatctcactggatcgggcgaggggcaacttgttgttccgcctgcggtggcgaccacggtatctgccacagtgcctggggcgaagggtagcgctctcagtgctggcggtgagatttcggcgctcaccaccgtcaaggacaaagcgggcactgtgtctcgccggctgagggaggcgtcacagcggctaagtcaggcggctgacttcgctgaccgcgtggcgtcgggggccctcacggcagttgtgtctgccaaagtcgagagacttcgggcgcagcatgctgacgccgtccgggaaaagtcggccgccgatagcaagtgccgcaagctggcggagaaggtggccgcgttggagggcgagaggactgacctccggtgccagctgacggaggagaggagggaggctaatcaggccctcgccaaggcgcagtctgcgtag

SEQ ID NO: 22165 - DNA, 207 bp, Zea mays
  Peptide Sequence Number=SeqID_65540
atggggagtactgtagacgggcgacggcggccatgggagacaagggcctcggctgggagcatccatgggaggggtcttggcgagcagcaggaagatccggtcaggcgcgaccgagcaagggtcactagtacaaataagctcaaagcctgcggcacgttcaacttttcactggcggtttccgttatcaaacccacattttggatctag

SEQ ID NO: 22166 - DNA, 1026 bp, Zea mays
  Peptide Sequence Number=SeqID_65541
atggggtccaggcacagtacttgctctgccaagatggctcgtatcaggtgcactgcacgtaagtctgtgatcccctttttgccttctcgactggcggagcgtcccctgcgtcgcacggtgtccgatcagtccagtcacctggagagactacatcatcgcctgcacgaggagcaggagcaccgacgccaggagcaggagcaggaccaggagcaacaggactcttccccctcgcgtcagcgggaggtggagtctgagaggccgccttcccctgcacctcagccagagatgccccctgcaccaccacagggcatcccggctgctggaggagaccctgacggagacgacgacgacaccggtggcagttcgagccacggcacggagcgctcggaggagccgaagtcggagggatggatcgctagacccatcactcgtgacgctgctcgcgggtgtcacttccacgacgctctcgataccctattgcgtcgggccttcgaccgacacacctggtctatcgagtaccgttgtgtagtctacgagtatcgtcgcgggctatacctgggaccagtgggaggctacttgcttgaggccttctcagagaactattttatcactgagagggatactgccaaggcaaccatgcaggatgcagcacgacgggcactttctcagtattgcttgttgttcagcggggtagctgatggccttgacctgaagtactaccctcgtcgttcgaccggcagtgctggaggcgtgattgtctcgcaagttagtgaggacaatcctaggctgagcagcatggtcaacctggccgccgtgctcaacacagagttggaccacgcccttgacgagttgagcaaggttcgggtggaggttgtggaactgcgtgctgaatgtgcggcacgccactatcttgatggtggttctcccgcccctgtagggattcaacacccttaccgttcaccgccccgtggtcgcttcgactatggtaccccagactacaggacccgcatagatttagatccatag

SEQ ID NO: 22167 - DNA, 606 bp, Zea mays
  Peptide Sequence Number=SeqID_65542
atgacggtgaggaatgtgatacttgagagatttgcagggttcaaggaggagagcatctctgaatttcagcccttgctatttgatcctaaagatcgtgtaaaaggttcacactcagccaataaaaagatcaagttttggattcaacgaaaggagcaaagaggcaaccgaaggcacctctggtctgggggcaccggacagtgtccggtgcaccagaggactccaactccaacttgccaccttcgggaaaatccagagccggcgcgctataattcaccggactgtccggtatacaccggacagtgtccggtgctccaacgggacgcagctctagaactcgccagcctcgggattttacgaaggctgctccgctataattcaccggacatgtccggtgtgcaccggactgtccggtgcaaccgcggagcaacggctatttcggcgccaacggctacctgcgacgcattcaatgcgcgcgcagcgcgcgcagatgtcaggcacgcccaaactggcgcaccggacatccaacagtacatgtccggtgtgcaccagacatccaggcgggcccagaagtcagaagctccaacggtcagaatccaacggcattga

SEQ ID NO: 22168 - DNA, 279 bp, Zea mays
  Peptide Sequence Number=SeqID_65543
atgccctgcataaagtacctttttgagggccataacttcgtgttgcttagccttcgaagaaccttcgtgccatcctgtattaaggagccgaaggggattgaaatcaagtaccaacattggcacccatcttctgtgatctcacaaccacaacaactcacacgatgccaccgaagaaggcaacaacagttggctccgtccttaggaccttggacaccacccaaggaggcgaagctctcctcagggtggcaagaaaccaaaagagaaaggctatcaacctag

SEQ ID NO: 22169 - DNA, 321 bp, Zea mays
  Peptide Sequence Number=SeqID_65544
atgaccgatgacgaaggcatcccacagtgcggcctcgcccagctcagaggcccacgtgcgatccggcccattgtaacgggccctgcatggccgccgcgtgttacgggcctaatttgtaaaggcatccctgtaattacagtctgtaaccctgctttatgggaatattctggggataacctaggtccttacggagaggtactcgggaaacaacccgagtcccctaaagtatcacaagttcatcaacatatccagaataacagcccgagtcccctgaagtatcacaagttcatcataaatattctcatcatgttcattgattaa

SEQ ID NO: 22170 - DNA, 330 bp, Zea mays
  Peptide Sequence Number=SeqID_65545
atggagtcccaccggagacgagggcacgagcgagctaggggccctgggcgccaggaagggcttagggaggttcggggaaacatggtgaacacaagtgtgggcatggcgacaacgcaggagccccggaagatagctgcctacggtgggatggcttggcggcaacgtgaccttgctccggcgagcaatcgcacacacccgagggcaggaaagggaaaaatagaggtaggggaaggttggttacctcgaaaatggactccggtacccttgaacggcggaagggacacgacgaggccttgggtcaacggcggcgatgctccggctgcgcggtga

SEQ ID NO: 22171 - DNA, 186 bp, Zea mays
  Peptide Sequence Number=SeqID_65546
atggctgctgggatttatcgcttggatgagaggaggccaagagtccgttggtgtgagaatgaagtgaacgcgagtaacccgaaggtgataggaataagcgtcgaagttattgccggagagcttcggattgatatggttacgaagaccaaggacgataccgacttaaagggggaaaagactatttag

SEQ ID NO: 22172 - DNA, 468 bp, Zea mays
  Peptide Sequence Number=SeqID_65547
atggatccagttcctccgccctactattctccatcatcgagtcaagaatctgaccctagctggaaatggcgaaaggcttacctacaaggccatcgccgtcgctccatccaagcccccgtttgccagcgccagcacccttacatccgccccacaatccctcgacgccggatgggggcggtgctggcagattacacatcttccgatgaagatgctagggaggacgcggtgaagggaggaggccatgttgctgcttcggcgacggaggaggaaggcaaggttgctgcttcgacgacggaggatgaaggcaaggtggctgcttcgaagacgggaggatgcaaggttgctgcttcattaacgggagaagagaacacactgtgcaagaatgttgctgcttcggcgaatgaagagaaaggagcaggcaaggtgacgacgggtgaacaacagaaagatgctccttcattcacttga

SEQ ID NO: 22173 - DNA, 1868 bp, Zea mays
  Peptide Sequence Number=SeqID_65548
gcctccgccatgttcctcaagttcctcaagcggacaaaaaggcggcgcccggcggctccgtgccggaggagcagggccggcccgccccatcctcgtcgcctttcgcggccaggcacttctccgccggccatgacatggcagagttcaagagttttgttgtctacttcttcgacaagatctgtgccagaatccccagagggcaggagaaattcctctgcatcgttgatctcaagggctgggaaatattagtatttctacaggttaacaaggtacatacaaagaaggcggctgctcccaagattgctaaacaagagtccagtgatgatgacactagcgacgagacctttgaatctgatgaggaacctgcaaagaagcctgttgctaaacccttggctgcagttgcaaaaaatggttcgaagacggtcaagcaagagagcagcagcgatgaggacagttctgaagatgagtcggatgacgacagtgatgatacattctcgagttctcctaattactgccgcaatattgggcaactacagaactcaaaatcttcaaatctgtccctcaaatcttgttccaggagacaaaagaagtcatatgttacctgtgctagcgctgccgtacaaggacagacacaaacacctcttactggtagccagcaagcttatgagcattcatcctccaaacctaaaaaggtaatggttattggtggagatggatactgtgggtgggcaacagcacttcatctctcaaacaaaggttatgaggttgcgattgttgataatcttgtccgccgtgcttttgataaccaactcggtcttgattcccttacccccataacctccatccagaatcgtgtccgtagatggaagtctctcactgctaagacaatccagctctttatcggtgacatatgtgattttgaattcctctcagaagccttcaagtcttttgagccggatgccgctgtccactttggcgagcaaagatccgcgccatactctatgattgatcgttcgcgggcagtctacacacagcataacaatgtcattgggacacttaatgtcttgtttgccataaaggaatacagtgaagagtgccatcttgttaagctaggaactatgggtgagtatggaacaccaaacattgacatcgaagaggggtttatcactattactcacaatggaagaacagacaccttgccttatccaaaacaagccagctctttctatcatctgagcaaagtgcatgattcccacaacatagcatttacatgcaaggcttggggtataagggccactgatcttaaccaaggtgtggtctatggtgtcagaacagatgaaactgcaatgcacgaagagctatctaacagatttgattacgatggggtctttgggaccgcactaaataggttctgtgttcaggctgctgttgggcatccacttacagtttatggaaaaggtggtcagacccggggatatctggacatcagagacactgtacagtgcgtggagctagcaatagccaacccagccaaacctggcgagttcagagtcttcaaccagttcaccgaacagttctctgtcaatgagctagccaaactggtgactgcggcaggagcgaagcttgggctagaagtggagaccaaatcgatacccaacccacgagtcgaggctgaggagcactactacaacgccaagcacacgaagcttattgagctcggcctggtgccccacctgctctcggactccctgctcgactcgcttctcaattttgccattcaatacaaggatcgggtcgacacggcacagatcatgcccagtgtgtcgtggaagaagatgggtgccaagccacggacagtctctgtttag

SEQ ID NO: 22174 - DNA, 1100 bp, Zea mays
  Peptide Sequence Number=SeqID_65549
atggagcccaagctgtcttcggtcggcgttcgcgaccttcgccgtgtcgtcatgcccacccctgtcctcgtcgtcctgctcgacgcccgccacgacctccatcgtgtcatcatccccacgcccgtccggacccctatcgccagcatcgcagtgcctcccgcacgaggtcgctgcgcttgtcgatctgatggcggcccccatggcaaaggagcaggtcagtctcgtcccctagcctttcccgactccccctccaagcaagcacccgctccagatctccaactcatgtgtcgattcccagtgagcgagacccctcgcgtgtgcaactgcaggagatggacgatgaagcgttggatcaaggagatggaggaggtggccgccatggccaccaattccaggtcgattatgccctctagggccatccacaagggcaagccgttgtcggtgtccttggcatcgagaagaagtccacccctaagctctagaactccaggatccgtcatcgatctggcagagggtagagagagaacggggaaggaaacagttggatgccagagggagattgggagagatgcagggtcaacggcgtcgactcttgcccgtgtagtcgctcggtgttcgcggtgttccctgggtagttcgccgtcgtgtgctcggcgggtgctcggagttgtcggagttgggggcaagttggagtgctgccaatttcttgacggagctggcgcggccgcggtgccgcagaccatcgtcgaccggatcctctgcgataacgtcgtcggtaagatctcatccctcgcattcgccatcctcgcctcttcgtgtagcataggttggagaaagggctggtgcacttggctgagagaatggtgttcgccggtgggtctccgccgtgagggcactgcgccgccgccctgccgcccagaggaagaagaagtgactctggtcgtccgaatcgtgatgaacgaacgagatcatatctacgcataccggttcgacgcctcgccctggaccgttagatcgttggcatgcagctgcgatagggtggaggtgtgggcggtccctgggtcgttggatgaagatctgacgaaccacaaaacataccg

SEQ ID NO: 22175 - DNA, 129 bp, Zea mays
  Peptide Sequence Number=SeqID_65550
atggcgggcggaattaagctcgccggagctaaggggaggtggctggccggagaggagatatggagccaggaaatctggtctgtctccctgcccaaacccgaggcaaatcccaggttttgtcgtgtctag

SEQ ID NO: 22176 - DNA, 225 bp, Zea mays
  Peptide Sequence Number=SeqID_65551
atggcaggtgatatggacatttttgacccaaccgaacgttatattggaggcatcattcaacacttgccttcatatgccggtaaattcgatcctcgtgcatacattgattgggagctcaagccttgctacgactttattatgctcaggtgtttgggaggtgaaccatcttggagtggagaaaacaacaaagcaataaaagctgttgcacccgagataatttcgtaa

SEQ ID NO: 22177 - DNA, 213 bp, Zea mays
  Peptide Sequence Number=SeqID_65552
atgaacgtcggttcgactttctcccgcctcaccaagaaggtccttgaaaaccatgttggccgcaacatcttcacttatgtggacgacatcgtcatggcgatcccatccgaattgacagtcgataacggcaagcagttcaacaaccaagacttccgagaattctgtaattccatcggcatgaagacagtgtttgcctctgtctaccacctatag

SEQ ID NO: 22178 - DNA, 564 bp, Zea mays
  Peptide Sequence Number=SeqID_65553
atggtgcgcagcgcgcacacgacgccgtcgccccatccgcttatggacaccgagcccgacccgccgccgccgccgccgtttggcgaatggtcgtcgtactcaacgatctttgccgatctggccgcctcatcctcgagctggagccggagccgccgcccgccggcgcaggtcgcgcctcctctccgacctgggccgtcggcggcgcaggcggcgtctcccgtccgacctggacagccggcgcaggtccgagcgaatctgcagcggcagacgttgatctatgacccccttgcgtgttactcgccggctttctgggtacgactgacccacctcgagtacgaccagctggaatcgggaacgagcaagtccctgccgggtggccatgttgggccctggaacgtcgtgcttagatacacaaagattgtggacgacaaaggtttgcccgtccaggtgaccatcaagaggcaccacggcagtttcacggacaaggaatgcaagcgtatacggaaagagctcaagcgcatgtgcactctacgacacaagaaccttgtcaagctgcacgaatga

SEQ ID NO: 22179 - DNA, 855 bp, Zea mays
  Peptide Sequence Number=SeqID_65554
atgggccggattgcacacgggccccttatcgcattgagggagacaaagccttgtggtctttgcggcctcggtcatccgatccttgaagtcgttgatggtcttcgcctccgcttgtcgagcgaagggggcgcttgggccttcgcgtggacgacgtccgcggccaggccggcagagcctgctggcgtggccttcggcctgtggaatgttgatgtggaattcgacgagcgagggggaggcgtgttcgcctttgccccaacatttgccctccgaggggccagttcgaccaagtcagctggtgtcgaagactgccatgagattgtgaagacgctgccctcgctcgaaatgatcccgcaggggttttttgaaattgatctggcccatatcaagcaaaccgcgcgccgccgccgacggtacgtgacaatgtcatcttcttcttcgtctgctgcgatcgcgtcgccggccacgccattgtctgaggagacgttgagtgatttggcggtggttgaactgcagcccgaccataccgtcgagttcaggacctcgaggatttttttggtccacatgctggagatgcagcgactaggttattttgggaacgatgttgggcgggctgtatgggtagaagaggtctctgagccagagggggaattgattgtttttgaagcttttttcgctgctggtcttcacctcccgacgaattggtttgtagtggaggttttgcggaagttcgaggtacaggtccatcagttgacactgaatgcagttgtggcgcttgtgaagtacgtttgggctgtctcctcatacagcgggcaatcgtctgtggaagtcttcactaagaactattgtctgcactga

SEQ ID NO: 22180 - DNA, 720 bp, Zea mays
  Peptide Sequence Number=SeqID_65555
atggttggacactgggtgaggttaccccccgccggatgccaacaccggggccagctagtgcgaagtcctgtctttgccgtggatctgcgcaatcgagacactgtcgcatttgtgcatgaggttgaggccgaggccgtcaagattgttgggaagtacacaccgaagatagagactttgagaagttgggatatttgtggttccaacgctaggttgaaccgcgtttttgagctgaaccatttgacgtatggcggttacccagagggggactctgccaacattgctgatcgccgagggaagcaaacaaggcccttggccgatgaaggcccctcacgagagaaggctccagctcctggggaaacgatgtcttcgcctgagctccaggaaacttctgcgcgaatgctgaagcggaagaaacgctgggcccacgtccggttggcagacccgaggcgggaggtgaagatggcgcggtccagcacgaagtccgttgccctaggcgccggtatgcctccgcccaccgtgcctgccagtgcgcgaaggctcccctcgccaccacgcattgctgaggcggcagtggcgagggccgaaggagtctccatggagctatccgtggacgactacttggttggtggggtcgccatgtttgacgcccagatggggttacctcctgctggagagttttttttgaatggggcccatgtttctgacttgaatgtgatgtag

SEQ ID NO: 22181 - DNA, 519 bp, Zea mays
  Peptide Sequence Number=SeqID_65556
atggggttgaagggtgacacgggggcctcagaggacccgtgggctagattctgcgccgacggcgaaatcgcctccactgccgctgctacggggcgtggtcgccttggtcacaccacaactgaaatacaagctgatgctgcgcgcgctgaggctaatcttgccctcaagcgcgccgccgacaaggagttggagctaaaaatcctgcgtaactgctatgagaaaacagaagcctccacccgtgtcggtgtcgagcgagcgcacacgctgttcgtggaagcgtaccgcgtgctcggcgcacagaccgctccttttgatagatctagggaggaggtgggtcttcgctttctcgggtggctgcaggaggagctggagtcactcctgtccatcatgacgggcctcatgtcctatgcatctcttgtcacctgcgagggggcagcgaatgccttgtcccgcgaaggatgtaagcatttcgaagtcttcgaccgggcgagcgaggacttcgaccgtagaattttctag

SEQ ID NO: 22182 - DNA, 738 bp, Zea mays
  Peptide Sequence Number=SeqID_65557
atgccctcctccgccgcccgggccctcacatccgtctcccgcgcagccttctcctggaagccgacggggcggccgcagcaaacgctggcggcggcggtgagcaggtcgggcgtggggctccactcgggagcgcgcgtcaccgccacgctgtttccgacgcaagctggagagggtaggtatttcctcgtggagggtgatgaggaggcgagggtagcggcagaggtggggaacgccgagccactgtcgcagctctgcacgacgcttcgtcggggcgaaggcgcccacacgcgggtccggacggtggaacaccttctttcggcgatggaggcgcttggcgtcgacaactgccgtatcgaggttagcggcggggatgagttccctattttcaatgtgggaaggtgtagagttatcgttgtattttccatttatgtgaaagtgattaagcaatgccagattcctttgcttgatggatcagcgcaagagtgggtagaggcagtacaaggcgttggcttgtgtgcggcagaggatgccaatggggaaaagttggataaactggcgcctgaaattcaggagcctgtttacctacggaaacacgattgctttatagctgcattccctagcccacaaatccacataacctgtggcattgatttcccaaagatcctagcttcgcccctggtaaggatggctcaggaaaagatgatccaacaggagaagatgaagcatcagaaggattga

SEQ ID NO: 22183 - DNA, 405 bp, Zea mays
  Peptide Sequence Number=SeqID_65558
atgatcaaggagtgcaccgagggctcggagatgggcacggcggcgcactcggcgctcgggctcggcggcgctcgggctcgaggacggagacggcggcgcttggcctcggagacggtggcgcttgggctcggggacggggacggggacggtggcgcactcggagatgggcacggcggcgggctcggcgctcgggctcggcggcgctcgggctcggggacggggacggcagcgcttggcctcggagacggtggcgctcggggacggggacgggcgcccagctcggagacggtggcgcttgggctcgggctcggcgacggcgtggcgggcgctcacggctcggagacggggacgggaacggcggcgcagcagcctggcggcgtagtatcagctccgggcgaaaactaa

SEQ ID NO: 22184 - DNA, 2103 bp, Zea mays
  Peptide Sequence Number=SeqID_65559
atggcggcggcagaggcgcggggagcggacttccccgtggggatgaaggttctggttgtggacgacgacccgacgtgcctcgtcgtgctcaagaggatgctccttgagtgccggtacgacgtgacaacatgtccgcaggctacaagagcactaactatgttgcgagaaaataggcgtggttttgatgttataataagtgatgtccacatgccggatatggatggattcaggctacttgaacttgtaggccttgagatggatcttccgtatgttaacatgtggtgttggaacacatcagaaataattgctgatgaaattgcagtgatgtctgctgattcaagaacggatattgtaatgaagggaattaagcatggagcatgtgactatttaataaaacctgtcagaatggaggagttgaaaaacatctggcaacatgttgttaggaaaaaatttaatggaaacaaggatcatgagcattctggtagcctagatgataccgatcgtaacagaccaaccaataatgataatgaatatgcttcctctgcgaatgatggaggtgatggcagctggaaatctcagaaaaagaaaagagagaaagaagatgatgaaactgacctagaaagtggcgatccttctacatcaaagaaaccaagagttgtttggtcagttgagcttcatcaacaatttgtgaatgcagtcaatcacctcgggatagacaaagctgttccaaagaaaattttggaattgatgaatgtccctggcttaaccagggaaaatgttgccagccatttgcagaaattcagactctacctgaagagaattgcacagcatcatgctggaatacctcatccatttgttgcgtctgcttctagtgctaaagttgctccgttaggaggactggaattccaagctttggctgcttctggtcagatccctcctcaagctctggctgctttgcaggatgaactccttggtcgacctacaagcagtttggcattgcctggaagagaccagtcatctttgcgactggctgcaatcaaaggaaacaagccccatggagagagagaaatagcatttggtcaacccatatacaagtgtcagaataacacgtatggtgcattttctcaaagcagcccagcagttggaggattgccatcttttgcagcttggcccaataacaaacttggtatgactgattcttcaaacacattgggaaatgtgggcaattctcaaaatagcaatatgttattgcatgaattgcagcaacagccagacaccttgctgtcaggaacccttcacaatattgatgtcaaaccttctggtgtagttatgccatctcagtcgttaaatgtgttcccggctagtgaaggcatctcacataatcaaaatccattggttataccatctcaatccccaagctttctggcatcagttcctccatccatgaaacatgaatcccttcttggatcaccttcaccatcaaccagtctgttgggtgggcttgatatggttaatcaagcttcaacaagtcagcctttgattagtagccatggagcaaatcttcctggtctcatgaaccgcagctcaaatgcaatgccttcaccaggaattagtaattttcaaagtgggaatattccttatgtggttactcagaatgctatgggagttagctcaagaccaccaggtgttctaaagactgagtgcactgaatcgctgactcatagttatggctatattggtggtagcaccagtgtggactctagcttgctctcttctcaggccaaaaatccacagtatggtttattgcagagtcaaaatgatgttagcagcagctggttgtcttcacaagattttgatagttttggaaattctcttgggcaaggccaccctggttccacttcgtctagcttccagagttccgctcttggcaaattgcctgaccaaggacgagggaggaatcatgggtttgtcgggaaaggcacttgcattccaagtcgctttgcggtggatgaggttggatctccaactaacttgagccacaacattgtaaacagtggagacatagtgaacccggacatattcggatttagtggacagatgtga

SEQ ID NO: 22185 - DNA, 675 bp, Zea mays
  Peptide Sequence Number=SeqID_65560
atggagccgatacattctcctccagtcctcaaccaaacacaccctaagatcacccgcaagatctcatcgcaaggagtccttcaagggatatgcgcagcacagctcatggatccgcatgcgccgctgcatatacaacaacaaacagccaagcccaaacagagtcaggccaggccaggcgcgttagctcgagcccgggttgcggcttccgactggcagagaccgcaaacagagcgcagggccggaccacgacgagtcgcggatggagatgggtgtcagctcaggaccaccatctcaaccggtggctccaatgggggcgaagcagctgacccccctagtgcaactgccaacggatggacaaacccgttccggagggggaggagcaggaagccgcgcggcgagacggcggaactccagagggccgcgggcgcttgcactttcggtcgccttttctccatcagccgccacttcatcgtggtggccaaattttcccacgcgcgcgagaacgtcgctctccgggtccagtcgtccacccgcgcgtcgcagtgccacctcaacgctgttcgtggttatccacagggaaaaggaggggcgaccacgacgtggcgaccggcgaccccgagccacagccactgggtcgtcgcaatggatcctaatccaaatgtttcttcacaataa

SEQ ID NO: 22186 - DNA, 1572 bp, Zea mays
  Peptide Sequence Number=SeqID_65561
ctcaaggctgccctgggacgtgaccagaaaccggtaccgatgcttccaattgacatggctgctcatcaggttcagccactcttcgtgatcgatttcttcgtgctccagcttggggaaatggggagcagcgcggtgcaggtgcagcggcgtaggcggcagttgacgctggttctggtgaccacggcggcgctgctggagcgcgcggacgaggcgctgctgcccgcggtgtacaaggaggtaggcgagtcgctgggcgtgtcgcccaccgcgctgggctccctcacgctgtgccgcgcgctggtgcagaccctgtgctacccgctcgcgacgtgcgccgcggcgcgctacgatcgcgcgcgcgtcgtcgctgtcggggcattcctctgggccgtggccacgctgctcgtcggcgcctcgggcacatatctccagatggcgttggcaaggggcttcaacggcgtcgggctggcggtcgttgtgcctgcggtctactccctggtggccgactacagcgacgacggcacgcgtggcgcggcgttcgggtgggtgacgatggcgcaaagcatgggccacgtcgcggggaactccctcggcgtgctgctagcggctacaagcttcctcggcgtcccaggctggcggctggcattctacgccctcgcgctcgtcagcgcctcgatcgccgccctaacgtggctcctcggcgccgacccgcgccccgtcagcgtgaaggccacggctgcggccacgctggcccaactcgtccgagaggccaaggacgtggtgaaggtgccgacgttccagatcatagtggcgcagggcgtggctgggtcggtgccgtggtcggcgctcagcttcgccgccatgtggctggaactcgtcgggttcacgcactggcagaccaccgtcatcactagcctgaacagtctcgctaacgcgcttggctcgctgttcgcggggttcgtcggggacccagtggcgctgcggttccccaacacgggcaggatcgcgcttgcgcaggtgtgcaccgcgtcgagcatcccgctcgccgccgtcatgctgctggcgctccccgacaacccctctgcgggggccgcgtacgccgccatgttcttcgtcttcggcttcgtctcgccctggtgccccgcctccacaaacaacccaatttttgcggagatcgtgccggagaaggcgaggacgacggtgtacgctatggacaggtgcttcgagtcagtgtttgcctctttcgcgccgccgctcgtgggcatcctggcggagcgcgtcttcgggtaccaaccggcctcgtccggcacgagcgtggaggctgacagggagaacgccgctgctctcggcaaggcggtattcgcagagatcgccgtgccagttgccgtctgttgcctcacctacaccgcgctgtactggacttaccccgcggacagacggcacgcgcagatggccgctctgcaggcggcggcgggcgatcaggactgcgactgtgaagcaacttcagttgcccatgctgcaggagccgagggcttgaaccaggcgctacttgccgggacaagaacggagtag

SEQ ID NO: 22187 - DNA, 156 bp, Zea mays
  Peptide Sequence Number=SeqID_65562
atggctcgaagaagatcccaaaagaacaagaagaccaaggagaacaaggagttgactaaagaacatgaggagctaaagtgctctcatgttgatttggtccaaaggtatgaaactatttcaattgagcaagataacgctttacattgtatcgcttaa

SEQ ID NO: 22188 - DNA, 351 bp, Zea mays
  Peptide Sequence Number=SeqID_65563
atgccacgtggcagcatcggggctccgcctgagcggggagcagaagcgtatacggtgtcaaaggttcaacacaaaccaataaaaagtctaagaaagggttcaaataaaaagagtaaaagacaaccgaaggctgccatggtctggcgcacaggactgtccggtgtgccaccggacagtgtccagtgcaccagggagatcaactccaaacttgtcaccttcgggaatttgggaagccactccgctataattcaccggactgtccggtgtagcaccggactgtccggtgtgccaagcggagcaacggtcgccagcgcaacggtcgagttcaacagtcggttgacagcgctatag

SEQ ID NO: 22189 - DNA, 2389 bp, Zea mays
  Peptide Sequence Number=SeqID_65564
gggccggcgagccggcccaccctggcccgagtccggccccgagaaagcgacgccacgcggccaattggaagaccgcgtcgggggtcagcccacgcccgcccagcataataagagcgcctgccaattgagagacggagacaaaacgcccgccttggaaaccaagaccaccagagacgacggacggacggacggagaccggagcaaacgaggcggccggggtccggagcagaggacgcgtccaatactacaacaggagcgcccgatccttcccatcccccaagctcgcccgcctccgattcccgctgtcctgtcccctccaaacaccctcccgccgaaggcctccgatccaggccgcaaccgggatggcgcgtgccggcgggaggaggtcggcggcggcgccggcggcttcgggagagccctccgtcgagtgctctcgcggcgggtgtacgggtgtcgagttgttgccttggtggtgagcatcgtcaggatgtttggtgctgaatcaaatccactgaagatgccaagttctgaaccagacagtgatgatgttttctttgacgcatttgaagatgttcgatctgcaggggaaccttcatgttcagaggattgcagcaccagcgatgaagtttcagtggtgaaatttgagtatgagatttgggcaaacgagccgatgagcgttcaagaaaggcggcaaaggttcctcaagggaatgggattcgatgatttcgtgtctagtagaacagattcttttcaatgccatggtgaaatcacagccgttgagtcttccactggcatggaggtgagaacggccagttgccattcttccgtggattcatctgtttgtgacaatgaatcggagtttgacggtgcctgttgcataagggatatggatagtagaaagagagatattgtcaagggtggacatagcagtataactgacatgctcaaggaggttggatcagataaggtgatgtctcttctggagttccagagtttgcctggcctctctcgggctgttcaaaatttagttcggagggggtgtggtaaaagtcctgcaaaagaaacgaaaagtgctaagaaaatggatgccaaaagcttgtggaagaaattcatgataaagagaagctttggtagcgtgtgcaagtatgatgtccatgtgaaaaactgcacaaatagtataccaaccagaacaagagttcaacatcggaagaaaaatttccttgaattctctgctgtctacatggatcaagaaatcagagctcacaagggttcaattcgggtcatgaaattcagcccatctggctggtatttagcaagtggtggtgaggattgtgttgtacggatatggcaaatcatacaagtagaagcatctcctaagttgtataggggagaggacccctatgaaaaagtggagaaagttcaggtctttaagacaagtatagaaaaggggcagaaccaggcacttgcagttatacccaataaggtttttcgtatatcagagactccattacatgaattccgtggccatacaagtgatatccttgatctggcatggtccaaatcagattatctcttaacttcatccaaagataagacagtgcgcttatggaaacccggctgtgatggttgtcttgcagttttcaaacacaaagactatgtaacatgtgttcagttcaaccctattgatgagaaatacttcatcagcggttcagtagatggtgaaagcatccagctagagaaagaattgtttgtgcaagggaagaaaaagtcagctgcctgtcggatcaacagcctaaagctatgtgcaattggttccaacagggttataatcacatcaggagattccaaaatccgagttgccaatggtgataccatccaaaagtttgaagggccttggaagtcgaaggctctgtcattaccgtctctaacatcagacgagagatacctcatatcggccggcaaagattccaacgtctacatctgggacttggccaactcgagagacgacgcaaagccagtccactcgtgcgagctgttcttctccaaggacgtgacgaccgcagtgccatggccgggagtgcggcaacaagacgggcacgcgagcgcgaaacctgcctgtgtggccgagaaatccgccagcgcgcccatcctgcgccagtcggcccccgggccgtggccgttcgtggacggcggcggcagcagcagcaaggggtcggcgacgtggcccgaggagaagctcctttctgcagcgaagcctgtggaaagcagcccgcggctggacgactgcctctccatgctatccgccgcgtggagcacggtcatcgtgaccgccggccgcgatggcgtcatccggtcttttcccaactacggcttgcccgtcaggctgtga

SEQ ID NO: 22190 - DNA, 405 bp, Zea mays
  Peptide Sequence Number=SeqID_65565
atgactctgggaaaacagcgccgctcgccccgctccgactgttgtgccacccgccagagtgaggctggcaacagccaagttcagcctcaggcgcaacaggaagctctgcctcgcccgaccccagggctcggcctcaacctcggcctcggaaggaggactccgcctcgcccgaccccagggctcagcctcaacctcggcctcggaaggaggactccgcctcgcccgaccccagggctcggcctcaacctcggcctcggaaggaggactctgcctcgctcaaccccaaggctcggcctcagcctcggcctcggagggtggtttccacctcgcccgaccccagggctcggcctcaacctcgacctcaggaggaatcgcgtcctcgccctaccccgacctcggccttag

SEQ ID NO: 22191 - DNA, 945 bp, Zea mays
  Peptide Sequence Number=SeqID_65566
atggcctttccggcagcagtatacatagctggttcagtttgtgcagcattcgttgccaacgtagatggtcactctgataaaactgtcaccttcaatgggaggatgctcagccttgaacgagaggagcagcagatctcacagggccaggatttaaaaacagtaacagctttgcgtggtgctctgcatcttgtggaccttgcaggaagtgaaagggtggtacgatctgcagttacaggagacagggtcaaagaagcacaacatatcagcatttctttcattcactctactcttcatcagagtaaagggaaaatatatcatttgaaatattctccgccaaagaatgaagcgcttcaaggcttacgcaaaggtttgacgacagagaagaaaaggagtgtatttgtacaggtagtcccaccattaattgttatttgttgccgacaaatgtgggatacatcaatggaaggtctattaagtttaacaaagaaaactacaccatctaattactactacatttgtgaaaagaatggtggctcattgtgtgacaagatggatgaacttgcttgctttgcccctggtatgctggcattaggagcctctggttatgggccagaacaatcagagcaaattatgaatatggcaaaagagcttgctgggacctgctataatttctaccaaaccactcccacaaagttggttggcgaaaattattttttccatgctggacaggtgaacactggtgaaaaagataacatgatgcagagcttcttcctggcagagacgctcaagtacctctacctacttttctcccctccatcagtcatatcctttgaggagtgtgttttcaatactgaagctcacccattgagaattgctccagtaaatggtaacaaaggcattggaacatcggtccgtccattcgggagaaaacagggaaatcctgagtaa

SEQ ID NO: 22192 - DNA, 816 bp, Zea mays
  Peptide Sequence Number=SeqID_65567
atgcgcgcaaccgcctccttccccgctcatgtcgctctgcttcggctccttcccgtcgccgtgggctcctccgtcgaggtggtcgaggtcctcctcaagacccaggacctggcgtacctcgaccggccccgcatggcctgcggcaagcacaccgtgtacaactactctggcatgttgtggtcgcactacgggccctaccggcgccagctccgcgagctatgggtcacggagctgctcagcgcgcgccagctccgcctcacggagcgcgtgcgcgtcgaggaggtccgcgccatgctgcgcgacctgcacccggccacgagcaccagcacgacggcggtggtgctcaaggagcgtctactcatggtgacgctcaacgtgatctcgcgcatggtgctgggcaagaagtacgtgggcgaggatggcgccaggccgagcgccgcgaccacgtccgaggagttcaggtggatgatcgaggaaatcttcttcctcaacggcgcgctgcacgtgggcgacatggtgacgtggctcggctggctcgacgcgcacgggtacgtgggcaggatgaagcggctggccgcgaagttcgaccggctcattgagcacgtgctgcgcgagcacggcgagcggcggcggcgggagggcgacgcgttcgtgcccggggacatggtcgacctgctgctgtatctatgtttaataatcacatattttgccgtcactattgtactcacgccgcccgtcgtcagggctctaagtccattggaggattgcaatttgtgttccgtggcatcgcacgggcacgttcctagtattgtataa

SEQ ID NO: 22193 - DNA, 3405 bp, Zea mays
  Peptide Sequence Number=SeqID_65568
atgtccgaggattatcatcgtattactcagagcaaaactcatttgcagcagatggtcttgattgacattagaaacatgttgcagtcaatgggtaaagacataaagacattccctctccctgctatcatcgatagatatgacgattcacaaggtattgatagagagatttacgaggaggaaagtatcgaggcgacgacagaagatgttgctttgcacgaaaccctaaatgaggagcagaagtctgcctatgaaaagatcttatctgttgttgacaccagtaatggcggtatgttctttgtggatgggcctggtgggactggaaagacttatctgtataaggcattgcttgcggtgctacgtagtcagggcaagattgcagttgcaacagctacatctggggttgcggcttccataatgcctggtgggagaactgcccattcacgcttcaagataccacttactattgatgatggtgctatatgtaccttcacgaaacaaagtgggacatcaaagttgctacagaaagcgtcgctcattatttgggacgaggcatcaatggctaagagacaatcaattgaagcgttggacaacagcatgcgtgatatcatgggacgccctggtctgccctttggtgggaagactattgtgtttgggggagatttcagacaagtactccctgttgtacgtaaggggtcaagggctcagatagttgctgcctctctacggagttcttacctatgggaatcaatgtgccacctaaagcttgttcgcaacatgagagcaaagagcgacccatggtttgcagaatatttgttgcgtgtcggtggtggaactgaggaagtgaacaacgatggtgatgttcgtcttccagatgaggtatgtgtgccatataccggtgatgaccacgaccttgacagattgatagatgacatttaccccagtctaaacgaaaacatgtctaatacaagctacatcacttcaagagcaatattgactactcggaacgactgggtggatatgataaatatgaggatgatcgatcgtttccaacgggagcagatgatgtaccatagctttgacaccgcgatggacgatcctaataactattatccatcagaattcctaaacacgctgagtcctaatggactacccccgcacgttctgaagctcaaaattgggtgcccaatcatgttacttaggaatatagaccctgctaacggactttgcaacggtacacggctggtggtacgtggtttccaaaaaaatagtatcgatgctgaaattgtccttggtcagcatgctggaatgcgggttttcttgcctcctatacccctgtgcccttctgatgacgagatgttccctttccattttaaaaggaagcagtttccagtaagactaagtttcgccatgactgttaacaagtctcagggacagacgattcctaatgttgctgtgtacttgcatgaaccagtgttctctcatggccagctatatgttgctctctcaagggccacaactcgattgaatgtgaagggtgatcttgcactcatcgattggattaaagaaatcccttgtgaaccaagggtagaagtcgtgcttattgatgatgcttttgtggaaaggaagtggatggaatgcctatttcaaccggacgcatatctaggtgatgaggtgatagactgttacataaatttaataaaagctcaagagcatctaaaatgccgatctggaggtcgtgtacacatagaaaatgcttttcagttcaactttctaaagcgagacggtgatgttgaaactaaaacagatgagttatatccaagtaaagacatggcacaaatatctagcgctgaaagaagagttttactttatctagaccatgacatggtgtttattccaataaatatccgagaaatgcactggtatcttgctgtgatcaatgcaagaaatatggagatacaagtgctcgactcacttggtacatcatccggtcgcaatgacctcattgccactataaaaggactccaaagacaaattgatatggtatctcagcgtaaggagttaacagatcataggtggccagacctccgagttgcttcttggccacttaaagaaatagaaatggaatatgcaaagcaaacagatagctcctcgtgtggcctctttctactaaactatatcgagtactggacaggggatgaactatctgataattttacccaggacgacatgtcacactttaggaaaaaattggctgctatattactatcctcagatataaacaagagaaaggggtgtccgttatacaagtatgacaaagaagtcgatgctggatgctcctctgatgttcagatattagatagtcccacaaatcctaagaagaggaaactaccttgtgtatctgaagaaaacaaagtattgatggaagatggtgatggccccatcactcaagcagacttagaaaggtggtttgttcatgattgggataaaagaactcctataaaaatcccgaccgatgagtgcactaatgagtttttactgagtggcctttccacaaaggacatgccagtgaccaaagccgatttaatagatgttctatgtgattgcatcatgacaatccaagatgatacgacattagagatgacatgggtgcgaagtttcaacccttttaagatagaaatatctgtcaaagacctgcaaaacgtattaagggtaaatctagatatgactctaaaatgttttgacatggctgttcgattgttggccattaaagagtcacatatgtcgaaagatgaaatgataaaggataaaaaacattatatggacatgcgcttctggagaatggttggttttggtaaacttgcaaagtaccatcaggatcctacagcagaagagttagccaaaacactcgactgttggccttcattgaactattatatcactggttgtaaatatgttcttatgccatggaaattaaacggatgctacgcacttttcataatcgatcatggtaaaaagcacgtaacttttatggactttacacccactgaagattggtgtaaacacatgccatacaagaggtttgcagaagcaattatcatggcctctaagaaatataagattgcctacaataagaaacgttctggatgggcacatgatatttttaagtgggaacatacaattcggtctggtcttccattggacttaaaaggggttaatacaagctacttcgttctacaagctatggtcatgtgggggagtggtagacgaatggaatttaatagggatacaaagattcttcgaaggaactttgtaattgatctattaagttacgaggagaattcatgccgctatgctatccctccaaacatacaacaacgacttatcagtatcgctaaaaaagattag

SEQ ID NO: 22194 - DNA, 411 bp, Zea mays
  Peptide Sequence Number=SeqID_65569
atggatcttgacccggctgcagaggaggaggagcgacagcttgaggaccacaatgaggcgatggatgctagacaagccttaatgggtgttggtgtcactcatttagatcctatcgagcttgaggattttgtcggctctagaataggcactgctacggattccacgagcccaccagcatctaccactgcctctgttggtggcggctcaaggaagagatccaaagtttggaacaatttcgacgagttaaccaatctggtaaatggtaagcgtgtaaggctgcaagccgacactgttgtagctgtttggactgctgcagctgcaatccatagagagaaaaatactgtagaagccgcagccgcagccggattgcagccgcagcaagccgcagcgaacaagccgattaagtgctag

SEQ ID NO: 22195 - DNA, 357 bp, Zea mays
  Peptide Sequence Number=SeqID_65570
atgctgaagcgaagcagaggtgcacttcaggctattcttatcatctgttcttttccagatgagcagattgatgcaagaaaactgcaagagataatgcaggctgctcaaaaggatcgggaagaaaaacttgcagagacactgaaaaaccggctacacatcaatgtgcaaggaaataaggcagaattcatccagcatgctgaagcgaagcagaggtgcacttcaggctattcttatcatctgttcttttccagggacaaagggcattctatcaaatcccaagtaacagctggtacaggtaacatagaactaatcattgtttatcttggagttctttctgaaaatcttggaagcatgtaa

SEQ ID NO: 22196 - DNA, 609 bp, Zea mays
  Peptide Sequence Number=SeqID_65571
atggagccagccgtattgaaccgtgaaagagttgcattggacaagaaaaacaggatgcctaagttgttcgatgactatagcgatgaagatttttatggggtacaacggaagtatagtattgtcgctcgagttgaagttaaattcccgattgaaccacgttatcgtgacaggcaacattacattttatctgacatcaatggagccaagatcgaggccattgcaaatcggtatgagatagtcaaatacttcaacagtttgctccatgaaaagcatgtctacaagatgcacaacgtatggtttggtcttaatccgggtgcatttaattttcgacatctaaatggtaccatggagttgtatttcacccaccaaactgtcgtagagccatacgctgtcccagttcaaatgccgccatttccaaaacatatattcttgaaccttgatgatattgccgagctgccaaacaggactttagttgacattatggctattgtagtccacttggatacaatccatcgcacaatgtggggtacattcaggaagattgttataatggatgctagcaattcaaaaggctttggtggcgcgaaacgatcgtcagtttgctgttag

SEQ ID NO: 22197 - DNA, 702 bp, Zea mays
  Peptide Sequence Number=SeqID_65572
atgcgtaagtcggtggcgcggaggctaatgcgtaaccgctgccacaagttgttcgcggcgctcgagtccctcaagaagaagggcaacaagggcgcggccatgcccccgcccgagccccttccccaactctggattcagcggctaccggtggcggcgcgaggcgggcgccaggtgcagctgtccgaggcggagatctggcagctctgcgtagagggcaagcgggtgctcctctcccagcccaatctcctccgaatccacgccccagtcaagatctgcgggaagcctgaccacttcgcatcggcgtgtctggagcgtacgctcttcggcttcaaggatccggtccctgacgccgagcccgcctccacaggcgtcgaggtcgcggtggcgccgttctggaacagggaaaagtacatgttgtctctgctcccgcacgcggagaaggacatcaaggtcgagccaaagcagaacaaggggaacgcgctgaacgagctgatccagctgcctttttcttcgagtgattcctggcacatgcactatattgctgcacattatgttcccttagtcccgatgtcggtggggagtttgggccttatcgccagtcagaacggaattcacttcaagaagtatgccgagaagcttttggactctggtgcggtttaccgctacttttgctccaatgaggaatttgagcaaatgaagtag

SEQ ID NO: 22198 - DNA, 684 bp, Zea mays
  Peptide Sequence Number=SeqID_65573
atggtgaccaccagttcctgggtggggaggagcaagccgggctgcgatcttggtcccaccctcagcttcaaggatgctcatcatcctcgctggggtgggtgccgggctgagccggcgctctacctcccgcgcgggttcgtgggtcatcctctcccgcggcattcgagggagagggcgctcagtggccctgcggacggcccggacttcgacaaagcggggctggtcgacggcaggcgtcgtcacctccagcgtgtcgggttcgtcggcttggctcccggcggccccttctacaggagggcggctgtcgcgccgtactcgtctgttggttatctgaaccgcttcaccaagcatgagtcgccccgtgtcaaggtgacgagtgagagacccctcggccgctcttcgacgagccgaggccaggggtcgggctggcgcccttggaagatggttggccgaggcccctggggtaaccagccgagccgcctgctcgggccggattcccggggaagtccctgggagcggttgcccgggcgtggtgatgacgtcgtcgttcggagcggagaacctcggaccgcgtcaccgtccgaggctaggtcgggcctcgccgaaggtgtcgtcgatgccgagggtgttgctgcccccttccagcgtcaagacccgagcctgcaggatcagattgtcttgtag

SEQ ID NO: 22199 - DNA, 234 bp, Zea mays
  Peptide Sequence Number=SeqID_65574
atggaggccaagtcacaccagcaaccaatcaaggagtacaatggatcaagcagtctcattagctgcgagaagcagacgattcgaatcgagtttttatccttgcaagtgaccgcacttgtacccaccataaccggaatgggagaccacgtctcaggtcgcgtgaggggtaaagtccactgccaggttcaatcaggtatccgcacgttaatccttattccaatttccgtctcgtag

SEQ ID NO: 22200 - DNA, 231 bp, Zea mays
  Peptide Sequence Number=SeqID_65575
atggccagccgacgctgtggccaagcacggaggctccatgagcacctagcagaggtccggccatggctggatggtggagctcgggaggtgggcgtggagttgttcaacaaaaatttgagaacgcgagacgtcgacccgaacgacactgatttcagacttagaagaattcgaatcctgaaatcagatttttattctgtcttgatggcactgtttgggatacttagagattga

SEQ ID NO: 22201 - DNA, 504 bp, Zea mays
  Peptide Sequence Number=SeqID_65576
atgccgaccaccagagccgaccacaacgagtacaacatccagggcatgacaggggatgacggcgttgtgagatggagcaccgcggcgagcagggtaaacggcggccgagcaagagctggagctgagacggcgcgctgggcgaacgcgccagggagcttcggctggcgagcagagagggacgcgatggccagcagggagatggcggaacgtgcacgacgcagggaaaaccgagcagaggaggaccgagcgccatgggagagagaggaggagcggcttggggatgagcagagggagctccgagcaaatcccagggcgcggccatgggaggagcaagctgagggaagctcccaggaagagcaccggcaggaagagattcgagctgggcgagctgggacaagctggaggaatcgacggccaacaaagcaccgggagagagaacgacgccggggaagagagaagcaagggggcgtgcggctaccagggctcgaggaagcctccggctga

SEQ ID NO: 22202 - DNA, 1308 bp, Zea mays
  Peptide Sequence Number=SeqID_65577
atgcaggtggcatgcaactgcaccacggagacgcaccccttcaacttcgacgcatccagcgtggaggcccaggcccacacgtcatgtaaccggcacgccggttactacgtgcgaaaaactgcaccgccacttacgccaatgtcgcgccttctcgactgcggaaccggtgccgcgactcgaggcaaccctgcgcatggcccaacagtgccaaccaagcgcatcggtcacaggtcagtcagtcgcgggagaaagcgcgacggtcgatatggccaaaagtgggccggcagtaatggcggcagcaggcgggcggaagaagcagtcaaatcatctgcaggctcacgtcccctcctggagcagcaggggagccctctcccacggcgtgaagacgacgcgcccgtgttccgtccctcgaacggctcgcgcaacagctgccccgtgaaccacccgtcccgtcgcattaactttgcggcagggcaggcgacacctttggcagggaccgggaaaggggataccccgaaagggatccttctccgtgaaggaaacgggccccgagccctcctactgatcagggccgcctcagaccactcgggctccgcgcccactactgatcaggggttcgaaggctgcccccctgaagggttcgacagccgcctcagaacacgcagggcgagggatgactctggaggctcgggggctgctctcgcaaacccagctccggccaaaccattgacagcgtcaacataccagcccgagaactcggaacccgaccatgcacccgggctacgatcagatcgcatgagggaacaaccagaccggcctaggcatcacgaaaggcggattcatgcctcgcccgagggcctcctcaagcaacgggcgcaccctcgactcgcccgaggcccagctcgggaaaacagcgccgcgtgccctgctccgactgctgtgccacccaccaaggtgaggctgacagcagccgagtccagcctcaggcgccataggaagctccgcctcggcctcggaaggtggtctccgcctcgcccgaccctagggctcggcctcaacctcgacctcggaagacggtctccgcctcgcccgaccccagggctcggcctcaaccttgaccccggaagacggtctccgcctcgcccgaccccagggctcagcctcaacctcgacctcggaagacggtctccgcctcgcccaaccctagggctcggcctcggcctcgacctcggaggagtcaccgcctcgcccgaccttgggctcgggctgaccacgccacaggggggtacatcattaccctacccctag

SEQ ID NO: 22203 - DNA, 720 bp, Zea mays
  Peptide Sequence Number=SeqID_65578
atggtgaccaccggttcgatggtggggagaagcaagccgggctgcggcttctgccccgccctcagcttcaaggattttcatcatccttgctggggcggggagcgaggcgaggcggggcctgccttcgcatgggctggcgtcccgcttcttcctccggcatctgggggtggaaaccatcctccagctctgtggaggaggcatcctccagccatgcgagggaaggcgaactgctgctgcccggccagggtgcagcattccgtcctctgcccgggcgactatggccggccgcaccggagggtctcacaacatgtcgtacgccgcgagggcggtactcgtgttctgggacggtcccgttctcgttttcatggcgaggacgggagtgaggacctaccagtgcgctttggggtggccagcgcccattggtgcggtgtcggtgggcaggtggacgccgccgtcggtgctgaggtggtggcagccggagaaggtttctccgccgacgagatcgtcggcgccatctgcgctccgtgcctccggctctttggctttgatagcttgtccttgcccctcgagtggggacgcgggcgagggccttgtcgcagcagcgtctgccctgaggagtccctcggcttggtcgaccttgccacccaaggcttcttttgctcagttaaagaaaccctcggccgctctgcgatgagccggagccggaggcagcggtgttag

SEQ ID NO: 22204 - DNA, 387 bp, Zea mays
  Peptide Sequence Number=SeqID_65579
atggaggaccttagtgttcaagatgacctgacttatgttgagtaccctatcaagattcttgatactttgactcgagttacaagaaataagtggccccacatcgtcaggcgcatcctggttttgctgcgcgcgctgcgcgcacggttgctggcgcgtgggcccgggccgtcagggggtcactccaacaacttcgcccgacgatggcagaagctcgccgtcgattccggatccctggccgttcatctgcgaattagcgagcacgatttccccacggacgagcaagctactaaggatcctgaggttcagctggtagagactgctgagcaggagctcgtggaaggaaagctagtggatgactaccttacccgaaaggggcaagggcagtag

SEQ ID NO: 22205 - DNA, 324 bp, Zea mays
  Peptide Sequence Number=SeqID_65580
atgccgaccaccagagccaaccacaacaagcacgacatctggggcacggcaggggatgacggcgttgtggtgaatagaaaattgacggctgcgagcatgggaaacggcggccgagcaggagatggagctgagacggcgcgctgggcgaacgcgccaaggagcttcggctggcgagcagagagggacgcgatggccaggagggagatggcggaacggcgcggccatgggaggagcgagctgagggaagctcccaggaagagcgtcggcaggaagagatccgagctaggcgagctgggacaagctggaggaatcgccggccaatag

SEQ ID NO: 22206 - DNA, 750 bp, Zea mays
  Peptide Sequence Number=SeqID_65581
atgggtcggcacgagacggaacaaggagggggaaaccacggcttcgtgttgtcctgcgcccagggtggatgcgcttgcagtagggggttacaagcgttcgcgagggagagagagagagagcctgctcgtcagcccgtcctcccgcgtgaccacctttttcgtacgagggccctggaccttccttttatagatcccgagcccaaggtcgggcgaggcggtgactccttcgaggtcaaggtcgaggccgagccctggggtcgggcgaggcggagaccgtcttccgaggtcgaggttgaggccgagccatggggtcgggcgaggcggagaccgtcttccgaggtcgaggttgaggtcgagccctggggtcgggcaaggcggagaccgtcttccgaggtcgaggttgaggtcgagccctggggtcgggcgaggcggagaccaccttccgaggccgaggcgggggccgagccccggggtcgggcgaggcggaccttcctatggcgcctgaggctggactcggctgctgtcagcctcaccctggcaggtggcacaacagtcggagtagggcaggcgacgctgttttcctgtcaggcctctgtagcttgtgctgatggtgattaccagccgagtttaggagtcttgggggtacccctaattatggtccccgatagtacctatccaactaggaagcaaaatcttcaaaactacacttctaatactggggctagaaaaggtgaccattttgggaactaa

SEQ ID NO: 22207 - DNA, 162 bp, Zea mays
  Peptide Sequence Number=SeqID_65582
atggaactccccgccgcgactgttgccccgtccgcccggtccgcgctcaccggagttcttcctgtgcagccagagctccgccaccgtcaccctgaggcgtccctgcgcctccgtcgttgcctcgatactccagcgtttcctctcaaggtctcaacaaaatga

SEQ ID NO: 22208 - DNA, 1365 bp, Zea mays
  Peptide Sequence Number=SeqID_65583
atgctctccgccggccactggctccaccgcgaggtccgcctcgtcgacgacatccccggcgtcctcgtcggcgacgccttctactaccgcaccgagatctgcgtcgtcggcctccacaccgcgcctcaggccggcatcggctacatcccccgtagactcctcgacgtgggccagtccatcgccatgagcatcatctcctccggagggtacctcgacgacgaggacaccgacgacgtcctcgtctatacaggcagcgacgcccgccagcgcaaccgcgtgaacaactccgccgaccagacgctcgagcgtggcaacctcgcgctccacaacagctaccggtatggcgtggaggtgtgcgtcatccagtgccgcgacgtcgaccaaggcccccaccgcaaggtctacgtctacgacggcctctacagggtgaaatctgttttcttggatggcgtaccacctcactgggatgaagacaaagtgagagaaattttcggggaatttggtgaaattgatagcatacaacttgctagaaatatgttcacggcagcacgaaaagattttggtttcattggctttacagcaagacagtcagctttagactgcattaagatggtcaataaagatggtgttggtgaaggtagtggaaaggttcccataaaagctagtttacaaaggccaaggcatgctttcaagaagtattcccggcaaggctcaagttccttgctaggcgtcagaagaggatttgtagataaaagttctagtgctccaagctataaatatggaaggacacatctagagaccagaattagcgaagaatatgctgagggacgatacactagtaaatatccaaaacacagatacgcgatgcatggaaccatggagcgagatgcataccgcaggatcaagtatggacattcataccaggagagagcacatagaacttgcccagattgtaagttgtgtggtcaaaattacaattaccccaatggtgaggaattttctgcaatcagcggttgtcaggaggcatactaccagacagaccgtgatctgattccttcaacttctcaagtagcatctcattgcgagggttcttgctgcaaggttagatctctgacacttgatgtcagagtttgggagccatctgtaatcaatctctttcagttattagtctacatgtttgtcaacagtatttgggaagagacgctgccagatgataattcaagtaattccatgtctattgctctccagaatcctatcaatccgtatggcaaggcaaagaagagggtagaggacatcatcctagattttacaaaattaaagaagcaatcagacttggctgtcatgatcttaagatacttcacgtga

SEQ ID NO: 22209 - DNA, 270 bp, Zea mays
  Peptide Sequence Number=SeqID_65584
atggggttgagtagcgaggcagcgacatggaaatatggaatggaatcaaagacgactgaggagatggaatcggcagcaacggccacggcaggagatggaaacagcgacgactgtgccgctatgtcctcggtagcaatggcaacggcgagcagggatggatcagtcgtggtcgcagtgtgtcctcggcggcaatggcggcgacaagagatggaatcggcgacaacagcgacggcccgcggtggcgagcaggaactagccgaagggaagtag

SEQ ID NO: 22210 - DNA, 3150 bp, Zea mays
  Peptide Sequence Number=SeqID_65585
atggtgatggagtcgaagggttgcgtgggtgccatgatgttcaccaaagacccttcacatggtgatgatgaagttgaaggccccaaaacaaatggtgcgttctcgcactccggcttctcccacctcgccgaccacccgcttctcgcgcgctccgtccacgctctctctatccgccgcgcgctcccgctcagcgccttccactgcaacaccctcatcgctttctatttccgtcaaggctcctcccctgccggggccctccacctgttcggtgagatgccgcaccggacgtcttcctcctggtacaccgccgtctccggctgcgcgcgctgcggcctcgagtctacggctttcaccctgctgcgggtcatgcgggagcgtgacgtcccgctcagtggcttcgcgctcgccagcctcgtcacggcctgcgagcaccggggctggcaggagggcgcggcgtgcggcgccgccatccacgcgctcactcacagggcggggctcatgggaaacgtctacattgggactgcgctcctgcacctatatggctcccgcggcctcgtcttgaatgcccagagattgttctgggagatgccccagcggaacgtcgtttcttggacagcgatcatggtggcattgtcgtcaaacgggtgcatggaagaggcattggtagcctatcgtcggatgaggaaggaaggggtcatgtgcaatgcgaatgcactggccacagtggtcagcttgtgtggagcacttgaggatgaggtggctgggcttcaggtcacagcccacgtcgtcgtgtctggccttctaacccatgtttcagtagcaaattcgctcatcaccatgtttgggaacctcaggagggtgcaggatgcagagaggctctttgatcggatggaggagcgcgaccgtatctcgtggaacgccatgatatccatgtactcgcatgaagaagtctacagcaaatgctttatagtactttcagatatgcgtcatggtgaggtgaagcctgatgtgacgactctgtgcagcttggtatctgtctgtgcctcatcggatcttgttgccctgggaagtgggattcactccctgtgtgtcagcagtgggctgcattgttctgttccacttattaatgcgctagttaatatgtattctacagctgggaaattggatgaggcagagtctctattccgaaatatgagcagacgggatgtaatatcatggaacactatgatttcgtcatatgtgcagagtaatagttgtgttgaagcattggaaacattgggtcagttactccaaactgatgaaggtccaccaaactccatgacattttccagcgctctaggagcatgttcaagtccagaagccttgatgaatggcagaacaattcatgccatgatattgcagcgaagtcttcaaaacgtcctactgattggtaattctcttctaacaatgtacagtaaatgcaactctatggaagacacagagagagtatttgagtcaatgccatgttatgatgttgttagttgcaatgtgcttactgggggctatgcagcacttgaggatgttgcaaatgcaatgcgtgtgttttcttggatgaggggtactgggataaaaccaaattatatcacaatgataaatctccagggcacatgcaaatctttaggtgatttgcatagttatggaatgccactgcatgcatatgtaacacagactggattattatcagatgagtacattacaaactcattgatcacaatgtatgcaacctgtggtgatttggaatctagtactggtatattcagcagaatcaacaataaaagtgtcatttcgtggaatgccatcatagctgccaatgtgcggcatggccgtggagaggaagctataaagctcttcatggactcacagcatgctggaaataaacttgatcgtttttgtctagctgaatgtttgtcatccagtgcaaacttggcatcattagaagaaggcatgcagctacatggtcttagtgtgaaaaacgggctggattgtgatagtcatgttgttaatgccacaatggatatgtatgggaaatgtggaaagatggactgtatgttgaaaacgctgcctgatcctgcccatcggcctacgcagtgctggaacacattgatatcaggttatgcaagatatggctatttcaaggaagctgaggatacattcaagcacatggtctcagtggggcaaaagccagactatgtgacatttgttgctctcctctcagcttgtagtcatgctggtctaatagacaagggcatggattactataactctatggcacctacatttggtgtttctcctggaattaaacattgtgtttgcatagtggatctccttgggcgtttggggaaatttgcagaggcagagaaatttattgatgaaatgccagtcttgccaaatgatctaatatggaggagtttgctgtcatcaagtagaacccacaaaaatctggatattgggaggaaagcggcaaagaatctccttgaactggacccatttgatgactcggcctatgttcttttgtcaaacttatatgctacaaatgcaagatgggtagatgttgacaaattaagaagtcacatgaagactattaagttaaacaaaagacctgcctgcagctggcttaagttgaagaatgaggtgagcacctttggtataggtgaccggagtcatatgcacgcagaaaagatctatgtgaagttggatgaaatcttgctaaagctcagagaagtaggttacgtcgctgatacctcatctgcactacatgatacggatgaagagcaaaaagagcataacctttggaaccacagcgagaagcttgcgttggcatacgggcttcttgtcgtgccagaaggatctacaataaggatattcaagaatctcagggtctgtgcagactgccatttggtatttaagctggcgagcactggagcagcagcacctcacccaacggtgagggaggtggttgccaactactactcccccaaccgtcatcgccgatggctcccatcatcggtcagaggaagaggagttgctgctgcaaggcagattgtacttcggtcttacgatcatgatgaagcgcactgcgtggcagcggtagctggtgcacggcaatggtag

SEQ ID NO: 22211 - DNA, 162 bp, Zea mays
  Peptide Sequence Number=SeqID_65586
atgaacaggccgaggagtgggagtggccagaagaaggggaagcgcgggggaggaggaggcggtgggctcggcgcggcgctgaggaagcaggtggccaggctctgcatcatccgggaggtggtggtggtggtggtggatgttcttgttcttgttcttgctcac

SEQ ID NO: 22212 - DNA, 935 bp, Zea mays
  Peptide Sequence Number=SeqID_65587
cacccgctcgccctcctcttccctcactcgcgcactcgcagccctcagcactcgcctcgcaccacgcgcacaccctaggagttcttccgtcgttcgcggtgtccgcacgcccattccgccgctgtcgttggctgctcgccgcgcctgttgcctcggtaagcttcgccttgtcacccgcaactcgggacgcccttcggttcgccccctccccctttggttcgcctagtccacgctcatcggttcactgccacagctccgtcgccgtcgacccgtgtcctcaccgtgccccggacatcgttcgtgtgttcctgagacttccctcaagaccgacctctcgcgccctgggagccccggtctgtctcgcctccggcgacggcgccgccgtgtccccggggagcaccgcccctggctacccggcaaagatctgccgctcagatccactccctcacccgcgccctacagctgggcccggcctgtcaggccgcctcgcccctcaggccgccgctgacaccccgaacccacctacaacgagcagctcgtgcttcctgagtgtgttgctgaagatcttcctgagcaacaacctgccacctggacagactgcatcatcgtctgcccgaggagcaagagcgctaacgctagtagcaggagcagtaggactcttccccttgcctcagcaggaggtggagtctggaaggcagccttcccgtgcaccctcagccagagacccctctgcaccaccacagggcatcccggctgctagaggagaccctgatgaagacgacaacgacaccggtggcagttcgagacatagcacggagctgtcggaggagcaagagctggagggatggatcgctagacccatcactcatgacgtcgctcgcgggtgtcacttccacgatgctctcaacaccttgctgcgtcgggccttcgactga

SEQ ID NO: 22213 - DNA, 696 bp, Zea mays
  Peptide Sequence Number=SeqID_65588
atgccccctgcaccacctcagggcatcccggctactggaggagaccctgacggagatggagatgacgacgacgctggtggcagttcgagccacggcatggagcgctcagaggagccggagccggagggatggatcgctagacccatcactcgtgtcactactcgcgggtgtcacttccatggcgctctcgataccctattgcgtcgggccttcgaccgacacacttggtctatcgagtactgttgtgtagtctaccagcatcgttgcgggttatacccggaccagtgggaggctacttgcttggtgcgccgtccggatgatgatctccggggtgcagaggccttctcaaagcactattctatcactgagagggacactgccgagtactaccattgtcgttcgaccggcagtgccggaggtgtgattgtctcaccagttggtgagggcaatcctaggctgagcagcatggtcaacctggccgctttactcaacacagagttggaccacgcccttgtagagttgggcaaggttcgggcagaggttgcggaattgtgtgtggaatgcacgacacgccactatctggatggtggttctctcgcccctgtcaggattcagcacccttaccgttcaccgccccgtggtcgcttcgactatggtaccctagactgcaggacccgcatagatttagattcatag

SEQ ID NO: 22214 - DNA, 375 bp, Zea mays
  Peptide Sequence Number=SeqID_65589
atggcgagcggtggtgctactgcgcgcgggcagggtttcgacaatgggtggccagtccttggcgacgtacaggggctcgcgcggtcggtccttgcgcgcatggcacggtcggggtctggcgtcgcggtcgctgcatggcttctggcttgggcgcggcatcgggtggagtcgctgctcggtcctggcgcgggcgggtcggcgctggttgctcggcgcgtcgggctcggggtcgcgtcgaggcttgagctcggtggctactcggggtggcgcggctggagctcgtcggtgcgcaggggtgctaggcgctgcgcggtgaagcagaaagagagagaggttgggtggggtccgcgtctaagagagaagaggagagattag

SEQ ID NO: 22215 - DNA, 750 bp, Zea mays
  Peptide Sequence Number=SeqID_65590
atggtgccggaacaaactaaggacgtcgcgacggctggagatggcaaagggagcaggggcgtacgacggatttgggtcgggctcggcgagccggagatgaaggatgtgtggctgggcgttagtggccagattcgagcacgagtgagaagctcggccagccaactatggacggcacaggatgtcaatgcccggaccgagcgatgcgagcggctatgggaaacgacgagggagcagccaccagaacgaggagagacgcgcggcaaactgctcggacccgacgcaaatgaagccacggccagcggtgttgtgctggtggggagcgacgaagatcgacggagctcgtctccacgctcgtctgcgctcgtctgcccggcgatcctctcgagtgcccctttctcttccctggtgctcctctccctggtggtcggccgtgtagccgtaaatcttgagcagctcgtcgtaggttcctcccccacggccatggagaaatctccaagatccattcctatcgaatctggacctgctagggccgacacacgcaaagatgtcgcagaagctgcagatgggagtaggcgcacaggcatcgtcgacacaagcaacattgattattgcactagtagattacgtccgcgccatcgattatgtaggacacatgatccagcgattcggattatactttcggacccagtattatctgctataaaatcaaacgttaatctctttgtctcggataatatcgggttcggataa

SEQ ID NO: 22216 - DNA, 675 bp, Zea mays
  Peptide Sequence Number=SeqID_65591
atgccgccgcgcacaaggaaaactgcgcgcaagtctaccagacccattggcgtacctcgccatcaactagctccaaggcatgaggacagtagtaatggtagcaatgatccaatcggagatctggaagctcaagtagaacagtttcggtcggagctccgtcataggaacgaagtatgggtcgaggatggtcagcgaataaacgagttaagaactgacatccgacacttgcaagaccaacttgctgaacgagatttagcgctcgattgggctgttaactcatgttcacttgcttgggccaaggaagccaaagctcgagcccacgtggatcagcttagcacagccgtggacaacttgcaggtttattgtaatgcactacatgagaaagttcatgtattgtattcacaactccaccctaacgtgcctgcggatcctatcggaatgggagccggaccttctggagcagcgggtgaagcccttggtggggaactggaccttttcaggccccctccttctatgaacctcgctgatgaatggtctcctacgctcgacagtgaagctaccaaaagtgacaagaagctagagtacagttgcgaggccctaccatcatctggtggggaaattatgtggctatccagcctgctagtcatcaaattacctaggatgaattcaaactag

SEQ ID NO: 22217 - DNA, 150 bp, Zea mays
  Peptide Sequence Number=SeqID_65592
atggccatgatgggttcaacatcagaaaagatgtacctctgtcagcgaacatggacatccatccacaggaagatgaccgggggtatcactagactagcatccatggagctcagcatcatatctttatctgcaacttctgatcaaaattaa

SEQ ID NO: 22218 - DNA, 498 bp, Zea mays
  Peptide Sequence Number=SeqID_65593
atgccgtgggggcacatcgcctgtcagaagggtggacaggcggcatgtcctttccgcaataaatgcgcggcccagagcccttacgtcatgctccgcccgctggcctacgtcacagacaataagccatgtggcagcattagaccctcgaccgagtggggagcggaggcgctccggatagagcctggacacgcgtcaataccggacccatgcctaggtcacgacacttcctctcccggatccttgttatgggtggttcggagctcacttggtggggtccgaaccctatccaatggctacaggctgcttaactccgggggtccgggttgtgcgtacaggggtcctgtgctttctgggcccgatggcattgtctctaagaatgccaccttaactgctcatgagatactcctggggctgttctccgcgcggctaagggtagccgcacaggcatcatgccttcataccgtagcaaggggtacccctaatccagggtaccgatag

SEQ ID NO: 22219 - DNA, 300 bp, Zea mays
  Peptide Sequence Number=SeqID_65594
atggcgcacgcattgaggcggccatcactgctgtcacgtcgttctggaggactccgcaaggacagtggccgcggggctttccagcgcgactccgctggcgtctggcttacggtacgggaccaggctaagcggctacactgctccagaccattccatggaacgagctcctgttctttggaatcggcccccaggctgttggaccaaactgcttttcgtaaaggaggtcctaaactgcaagccttgctgctcaattcggatgtcgtcatgtcaggacagatgggaactgtgcgggtgggttag

SEQ ID NO: 22220 - DNA, 342 bp, Zea mays
  Peptide Sequence Number=SeqID_65595
atgagggtgggctcggtgtatgcggctcgctctgccgagggtggattgccccttagggaggagtgcggtaaaggagaagaaagtgtcgaggcggatctccaggagttccaggacgtcgaagagttcgaggatcaggctagcgacctcccccagtcagctgcctatgtagcaacttcgccgacatctggtgttgtggattatggaggcctctgtggcatcgggaggactaatgacattgtcaacaccaaagtcaaggcactaacaagcccactaaaaggaccaatgctaggaggaactttcatgtttaagagtcgccttgtctttgatctaatgagaggctag

SEQ ID NO: 22221 - DNA, 456 bp, Zea mays
  Peptide Sequence Number=SeqID_65596
atgtcaggatactttccacccgcctactcatcgttggtatattgttctattcaaatgtggaatgtcatgattcgtcgagccacagtgcaccatgtccacgtgcactaccggaatcagctcctttgccgtgtgtctgagacacatggcaaaggctattttacactcggcaaaggctttgccgagtgtgacactcggcaaagaacgctcggcgaactgtacatcggcaacagcctctttgccgagtactttttgtcgggcactcggcaaagactttgccgagtgccatttggcactcggcaaagaaaagtcaccatcacggcgccaagtgacggtgacggatcctttgccgagtgcctactagagcactcgacaaagaggccaattttgccgagtgtttgctcgacaggccctcggcaaagactggtccagtggaccccacgccagtccctgtgctga

SEQ ID NO: 22222 - DNA, 591 bp, Zea mays
  Peptide Sequence Number=SeqID_65597
atggagaacgatgaagaagctagcatcgtcataacgacacaaggagatgataacgggagaagtgaggcgcggggccgcccggataggcggggtccacctatcggcgacccaaggaggggaaagggaggtggcgctaggaggctgatggtgggccgtggctatcagggtcactgtcttcctctgcccgtgcttggcgggggaaccatggcccgcgctggcggttttgtgcgtggagaggggaacatgggtggtggcggttggccggagaaccctggcacgacggtgcagtgccgtcgccggccttcactagcggatgcacaacggagaagagaaaatggggagagagaaaagaaagttcagccgacggtcttacctcgagtggagctcgaccggggtggggctttggtcggcggtggcggtccttgggccagaacattggggtggactcgtcgtggggctctggggcgtgtgcggcttggcgggcacacgtcaacggcgagctcagagtggcggtggttctgtgcgaggcagactgcgggcgagggaaatggggcaaggtgtgggggaaccgcccgaattattccaacttaa

SEQ ID NO: 22223 - DNA, 159 bp, Zea mays
  Peptide Sequence Number=SeqID_65598
atggcccacgaaattatgaagaaaagtgagaaagatattcacgacactcgagcagcagcaaaacaagctgtggaagctgtagaacgcgagagacacatagctgcattatcttcgccaccggaaccattcgatccattagctgatccagcaatgaagtaa

SEQ ID NO: 22224 - DNA, 153 bp, Zea mays
  Peptide Sequence Number=SeqID_65599
atggcgagctatggcgccggggaggtcacaaacgaggctccgatgatgcagatcaggggagattttggaccttacagcttcactagggtggtccagtgctcgggtggcttggcaggcggcgcagagttcgctggagctaagtgctgggtctga

SEQ ID NO: 22225 - DNA, 627 bp, Zea mays
  Peptide Sequence Number=SeqID_65600
atgggtcggcgcgagacggagcacgaaggggggaagaaacaggcaaaggggaaacccgcggccttcgtgttgccctgcgcccaggtcgggcgtaaggagagggtccagtccggacccgagtttgggcgaggtggcgattgctccgaggtcgaggttgagtctgagccctggggtcgggcgaggcggagtccatcgtcttccggagccgaggctgagtccgagccctggggtcgggcgaggcggagtccatcgtcttccggagccgaggctgagtccgagccctggggtcgggcgaggcggagttcgtcgtcttttgaggccgagactgtgtccgagccctggggtcgggcgaggcggagtccgtcgtccagcgtcgaggttgagcccaagccctggggtcgggcgaggcggagtccgtcgtccagcgtcgaggcgatccttgcattaaatgctcctgcgatacggtcggttggcgtggcgatctggccaaggttgcttctctgcgaagactgggcctcgggcgagccgaagctttgtgctgatgggggttaccagctgagattaggagtcttggggagggaaggggtggtagaatttcttggaatatatggtcttttcatggaatag

SEQ ID NO: 22226 - DNA, 543 bp, Zea mays
  Peptide Sequence Number=SeqID_65601
atgacttcacccaccaccatcaatggaggagacactcattttagttccgactacctttcttacgagggtttcccttccatcttctgggaggtgctttgctccgccggttaccctacactccctctgtatacggtgcaactatacaaggagcatcgggtgccacgttgcagggtttggctgaccttggaggctcaccctctgcagctgggttggcgttcccttgactccaagactattgggtgcagggcggacgacaccaccgaggccgcagctatgaagaccctaacaactttctgtggataccatcccttggagatggtaatgcacccgctgggactcttccccgctgagaagagggatgaccccatgtggtgcaacagaatgagccacgtgaaggacgtgtgggccatgcaccccgaccaggttgggaggatcactgttcagtgtatgagcgcactgtaccgcctacaggccctgcggatcgacgcggtggcacacctcactagccttgctcagaccactaagctcaccctcgacatttga

SEQ ID NO: 22227 - DNA, 366 bp, Zea mays
  Peptide Sequence Number=SeqID_65602
atgtccggtgcaccagaggactccaactcaaactcgtcaccttcgggaaaatccagaggcaactccactataattcaccggactgtccggtgtacaccggacagtgtccggtgctccaaggaagagcggcctcaggaactcgccggcttcgagaaactgcaacagttgctccgctataattcaccggacatgtccgccctcaccgaccccatggttcaaacgaaatggtcccatgtaccactcaccttcggcgcaagatatgtcgacctccttagtgcaccctacacatatgctttggaaaagggacttttccacttcggcaagatagagctgccactttcactcggcatggccccgaacgcgtga

SEQ ID NO: 22228 - DNA, 1089 bp, Zea mays
  Peptide Sequence Number=SeqID_65603
atggaggtgcttatcttgatcattaagtcagtttcattccttgcattaggaggtaattcaacagaaggtgacgctagtgtgaatacaagttgctcccatgacaaaggatgccgatcctatatatgtgatacaagctataggcattcaaattgcctagataggttcaagaaaatgaaagtgaatgatgaggacagtccttcacagccaagctcgtccatgcctaggggtacaggaaaccaaaatgttgtccagagatctcgttttggtctcactagagagagccccaggctacacatagacatatctgtacccgatgaaacttccgatcatcaagatgccagccatagacctgctgccatagttggagaacaggaagaaaacatctacaatgaaggcccagatttgacattggaaactcacgaggttgggatcaatggttcttcagtgtcaagtgacgtgtcaagcttaaaccaattgttgtgcccactgtgcagaggggcggttagtggctggaagatcatcaaagaagctagacagtatttggatgggaaatccagagcttgctcacgagaagcctgcatgttttctggtaactacagggagatccgtagacatgccagaagggtgcaccccacaacaaggcctgctgatgttgatccctcaagacgtcgtgcgtggcaccacctggagcatcagcgggattatgctgacatagtaagcgcaataaggtccgctatgcctggggcagttgtgcttggtgattatgctattgaaggcggagaaatattttcacatgaccgggaaaccagtgaaccaagtgggtctcttctgacaacattctttctatttcatatgctcagcagtagtccgattagatcaggtgatgagccaagaggcacatcaaggggcctgagaaggcagaggagacgctatctgtggggagagaatttgttaggtctccaatatgatgatgatgatgacgacgacgataacgaaggggaggaggatgaagtggatgctgtggatgaagttcagagaccaaggagtcgtcggaggttcataagatcaagatcagaggagcgggcctaa

SEQ ID NO: 22229 - DNA, 513 bp, Zea mays
  Peptide Sequence Number=SeqID_65604
atgggtgctactggtatattatgcgattctacccatgatgcagtcacaaaagaatgtgttgctccagtatcaaataagacatttgcagaatggtacttaactgaaaacgtacctagtgccactcctggagtttcctggactgtgtcggcctccaagtggttcacctttccatactgggcacgaggttgcccacggttgttgcttccttgctgtattgcattctgtctgactgggcattgggagctggctgctgctgagctgctttctttgggcaatgattcacccaatggccttgttccccacagtggaaacatgcacgacttcctccttgagctggcgctacttggttgttctggttggttgctggggcaggaagactggctgcctagttgttctaacactggtactgatttcctccttgctggttgttctgacgatactactgctgctgaggaaactgcctctggtactactgcggctggttctgatgctggtgctggtgaccttgcttga

SEQ ID NO: 22230 - DNA, 339 bp, Zea mays
  Peptide Sequence Number=SeqID_65605
atggctcaccggagttaccccggcccgcctgagaccttctcaccgtcgttctcccctctctgcccgtggattcatggccctttccccgcaatcgagttcgccatggcaccctcttcctctctgcccaactccggtgaccccggagccaccgtagcccgcgcctgcctcaactccgccgacctcaccgccgcagagaggagcagcgccgcccgcagccatctattttccctcgacaacgagcagtccgaggttcctgagtgtgttattggagaccaccctgagcagcaacctggtgaaggcaagtgtcctctgacccattatgtcctacatactctataa

SEQ ID NO: 22231 - DNA, 288 bp, Zea mays
  Peptide Sequence Number=SeqID_65606
atgacgaaggtcagggcttgccgaaggtggtcgaatgagttcaccggaggatataataatcttcagacgaaggtcctgaaggacataccttcatcatcacgttatacttttccaaatgtattgaatgtatgctcgctttacttagacaacgagcagtccgaggttcctgagtgtgttgttggagacctccctgagcagcaacctgggggcttaggcctttttcctgagtacctcttcgagtgctcaggaggtgatgctggcaacatggatgacttcgaggagttctag

SEQ ID NO: 22232 - DNA, 885 bp, Zea mays
  Peptide Sequence Number=SeqID_65607
atggctcaccggagttaccccggcccacccaagaccttctcactgccgttctcccctctctgcccatggattcatggccctttcgccgccatcgagttcatcgtggcaccctcttcctctctgcccaactctggcgatcccggagctaccgtagcccgcgcctgcctcaactccggtgacctcaccgtcgtggagaggagtagcgccgcccgtagccatctgttttccctcggtctgattccctccgtccaattcagattgaacggcccggaccgtgggataccgcttcgcgtacgcacgcctgacgccctagcccgcctgtcagcgccacccgcatccgctcatccgtcccggtctgacttttccccgtccgatcttgatcgaatggctcagacccgctcggacccgctcggacccccctcggacccgttcggacccccttcagacccctccccgtccgatcttgatcgaacggttcggaccccctcagacccctgtagccgtctgtttcccctttggcgcagggcccgctcgattttcaagctctttgagcttcggtttaaaagacgtgttttcaccatttctgaagaaaatatgtctcacgaaaagaaggttgttgctgagacgaagctgactaaagaggagaacttatttgaggagaagaagactgtggatccttatattgctggatttgtcgagtcgatggcaaaacaaacacagagaaaattactaaagagatactggaaggcttatctaaagatgctggtgacagcgatagctatgatgtggaaagtggggacgaagattctgaggatcggccctggaggccaagtcattcaatcttcggaaaatcaaccatcaaacagagtcatcttgagaacatga

SEQ ID NO: 22233 - DNA, 975 bp, Zea mays
  Peptide Sequence Number=SeqID_65608
atggcctgtatcaggtgcactgcacgtaagtctgtgatcccctttttgccttctcgcctggcggagcgtcccttgtgtcgtacggtgccaggtcagtccagtcacctcgagagactgcatcgtcgcctgcacgaggagcaggagcaccaacgccaggagccggagcaggagcagcaggactcttccccctcgcctcagcaggaggtggagtctgagaggccgtctcccctgacccaaagccagagatgccccctgcaccacctcaaggcatcccggctgctggaagagaccctgacagagacggagacgatgccgacgctagtggcagttcgagccacggcatggagctttcggaggagccggagccagatggatggatcgctagacccatcactcgtgacgctgctcgcggtctaccagcatcgtcgcaggctatacccggaccagtgggaggctacttgcttggtgtgccgttcggacgatgatctccgggctgatggcctcgacctgaagtactaccctcgccgttcgaccgatagtgctggaggtgtgattgtctcgccagttggtgagggcaatcctaggctgaacagcatggtcaacttggtcgccatgctcaacacagagttggaccacgcccttgacgagttgggcaaggttcgggcggaggttgcggaattgcgcgctaaatgtgcggcacgccactatcttgatggtggttttcccgcccctgtagggattcagcacccttaccgttcactgccacgtggtcgcttcgactatgagtcaggtctgatatgtgtgtggtttcaacagatgtctgagaacagacacagaggtgcgaggcgtgctcagccagaacagcaggcaccccaagaggaggcagccccgcagcagcagttgccactgccacccccgatgaccattgagcagatgttcttgatgcagacccaggcagttcaggctattggttag

SEQ ID NO: 22234 - DNA, 630 bp, Zea mays
  Peptide Sequence Number=SeqID_65609
atgccgccgtgctggcagaacgaatcaagagggagagagaaaccacaggtcgcgtcgtcgctcggggtcgacttgggaccgcaactgggcgtcgggcgccttggctccggcgagctcctcgccatcggcaccaagtgccgccaatgcctggggttagctgggcaagagtgcacatatgtgaatcgcgcccgggtttggacacctaaatccgggtgtgacaagacttcgggggaagtagcggagattgtgccctatgccaagaataagtggggcaaccggtgggacttttggttttacgtgacactagaggacattgaggggggtatggccgctttctcatggctgggatctgggtgcagtaagaccacacccgatgcccttttgaataatcggatggtattgagccctgccttcgctattgagccgcgggggcgagatgcggccgcctttatcagggaggtagaagcgaaggcagtaataattgttggaaagtactcagcgaagatagaattgctaagaagctgggatataaggggttcaaatgtcaggttgaactgtgtttttgaattgaatggccttcggtatcgcccatatcctgaggagggctccgctgatgccggggatgattga

SEQ ID NO: 22235 - DNA, 444 bp, Zea mays
  Peptide Sequence Number=SeqID_65610
atggcgaggcttaggaagcgcctcattggccatttggtcctatttgtaagccccttcccggggtgcataaagttcatatacatcaataaggaaaatgacacatgggccaattctataagtatggggcaaatcagacttgcaccagcctatggtgcaccagactgtccggtgcccaggctggagtgcccaacgaacaagccgctctcgggaaaacgcaacactcttcggctaaaaatcgccggactgtttggtgtgtcaccggactatcagaaagcacaaccaacagctagaatgttggttggggttataaatacaccccaaccaccaccattcaatgcagccaagctttccactctccacactcaatacaagagcaaaggattcattccaaagacacattcaaagcttccaatcctctccaagtcccacaatttaggcaagtga

SEQ ID NO: 22236 - DNA, 255 bp, Zea mays
  Peptide Sequence Number=SeqID_65611
atggcccacgaaattataaagaaaagtgaaaaagatactcacgatgctagagaagcagcaaaggcagatgaaaagactgcagaacttgaaaggcggatagccgaactatctcctcccccggagccctttgagtcactggccgaccccgaagcaaaaaaggaagatgaaattactaagatggtcgaagctattatggacgaagatgttactcgactactaaacgaagctgcagaagcagttttaaaagaagaatag

SEQ ID NO: 22237 - DNA, 765 bp, Zea mays
  Peptide Sequence Number=SeqID_65612
atgaagctgtggaaggagacttccaggagttccaagattacgacgagttctaggtgtgggttagcggcaacccccagtcggctgcctgtgaaggccgcgttatctacgtttcttttccgcactttgatttattgtaagaactatatggacgtctcagacatggctcgacttagacacactgcacgtaagtcagtcatccccttcttaccctcccgccttgctgagcgtccgcttcgccgtcccgtggccggacagtccagccacttggagagactacaccaccgcctgcgtgaggagcaggaacgtcgacgacaggagcagcagagctcttctttctcgctccaccaggagatagagtctgtgaggagctgctcccctgtgcttcctctggagccgccccctgcaccaccactgggcgccccagcttctggagtagctgctggaggagacccagacgacggagatggcgacgacagctcgagccacgacaccgacttctctgctaaccctgagccggaaggatgggttgctcgacccatcactcgcgacgctgctcgcgggtgtcacttccacgatgcgctcgacaccctgctacgtcgggcatttgaccggcatacttggtccgtcgagtatcgctgtgtggtctaccagcatagtcgcggggtctacccggaccgctgggaggcgacttgcttggtgcgctgcccggagaacagtctccagggttgcagaggcctgttcagagcactatttcttttctcttga

SEQ ID NO: 22238 - DNA, 1773 bp, Zea mays
  Peptide Sequence Number=SeqID_65613
atgtcttcgcccgagctccgggagtcttcggcgcggatgctgaaggttaccgggggttggtggcctaagaatgttcctatcccccgtgcggccggcgaagacttttttacatcttgcatggttcgcgactggagagtgtttccttatggacgaaatattgatgctgttgtgtcggcagtgatggacaaggatcgtcagggagctgcgcagaagcgccaggcggtcgtcaagcttcctgaggctaggccgaagaggccatgggggactgcgaaggctgctgcccccggcggcagccagccgacgctggcggcgaagtctgccgtccctgggtccagcagggtgccggaggccgtgaaggcggccagcgccggcgggaccaagcctgccctggccggagctgcgaaggcccgagaattgcctccaccgggcaagcacgttgccgacttcgccatcgagattagcgtggacgattatctcattggatcgggcgaagggcaacttgttgttgttccgcctgcggtggcgaccgcggcatctgccgtggtgcctagggagaggggtagcgctctcagcgccggtggtgagattccggcgctcactgccgtcaaggacgaggcgggcgctgtgtcccgccggctgaaggaggcattgagtcaggcggctgacttcgctgaccgcgtggcgtcgggggcccttacggtggttgtgtctgccgaagtcgagagacttcgggcgcaacatgctgacgccgtccgggaaaagtcggccgccgacagcaagtgccgcaagctggcggataaggtggccgcgctggagggcgagagggctgaccttcggcgccaactggtggaggagagaagggaggctaatgaggccctcgtcaaggcgcagtctgcgcaggcggaggccaatttggcgcaggtggagggtagtctagccagacagcgcgccgaggaatgggaggagcggttcaacgctctgcagactcgtgtggagagggctgaggcttcgacgcgctcggaggctgagcggacgcgcaaacagcttatggactcataccacgagctgggcgcgcggaccgctgactttgaagtgccagaccaagagcccggacttcgctgcctcgagtggctgcaggaggagttgctggcgctccccgccattgtggaggggtttatgtcctatgcctccctggtcacctgcgaaggggcgatgaacgcgctgtcccgcgaagggtgccggcactatgaggtcttcgaccaatctgatgaggattttgagcgcgagatttacaaggttgaggaccctatggtgaaggaatccacgggagccctcttcgaccggatgtggggtccccacggtcgggaggtggtcagggagcggtccgacacagcgaggggtcaggcggcgcataacgataaagtggaggacttcggggctttgaacagcgcgcagcctgattcggagtcgaactcggtggcggctgtgtccgaggtcaccccggcaccgcccccagaaaccgtcgaaggcgcccctgatgcccccgcagccattgcggccggcggtggctcatcgccaactgctgcgtcgagggctgaggatcctgtgaagatggcggcggagtcggcagcggaggatcccgcgacggctgggtctttgcaggttcaagattttgggcctacgcacgcaaccgctactgctaattttttggcggctcgaccgtggatgatgggaatgaattggatgaatctgcgtctaagttttctgatttaa

SEQ ID NO: 22239 - DNA, 306 bp, Zea mays
  Peptide Sequence Number=SeqID_65614
atggaggccaagtcacaccatcaaccaatcaacctaagaagtacctgcaaaaattatgccacaagcaaggctgagtatactaatactcagctagacttacccgtgaccgcacttgtacccaccataaccggaatgggagaccacgtctcaggtcgcgtgaggggatatgtctgcgggcaggttcaatcaggtatccgcacgttaatccttattccaatttcatctcgtagaccacgcatccccatggatccgtgtccacagaccaatcatcaatatgatatgaaagtgggtacaaccaattcctga

SEQ ID NO: 22240 - DNA, 175 bp, Zea mays
  Peptide Sequence Number=SeqID_65615
ccgtgctcgcggttatgagcggccaagggagctccagagattagtgatacttgatcagagatactttggtacaggtgacaatgagattgatggttctgattacgattatggtattggcgaagatgaagctgtggaaggagacttccaggagttccaagattacgacgagttctag

SEQ ID NO: 22241 - DNA, 63 bp, Zea mays
  Peptide Sequence Number=SeqID_65616
atgtcctccgcccgttctatggtcgccgtggaactccccgccgcgtttgttgctccgatttag

SEQ ID NO: 22242 - DNA, 312 bp, Zea mays
  Peptide Sequence Number=SeqID_65617
atgctggtagactacacaacggtactcgatggaccaagtctcctccagcagtcgggatgccctgaggtggtgcagggggcatctctggctgaggtgcaagggaaggcggcctctcggactccacctcctactgaggcgagggggaagagtcctgctgctccttctcttggcgtcggcgctcctgctcctcatgcaggcgatgatgcagtctctccaggtgactggactgacctagcaccatatgacgcagtggacgctccgccaggtgagaaggcaaaaaggggatcacagacttacgtgcagtgcacctga

SEQ ID NO: 22243 - DNA, 708 bp, Zea mays
  Peptide Sequence Number=SeqID_65618
atgacaaaggaggccagtttccgaggccacaacacagctcaaagtcttcaggacagcagcaaagctcctttaggccaccagctccaaggggccgaggcggcaggggcttcggaggaagatatgaggatcagcccagaaaaatctattgcttattctgtggtgaagataagggccacactacaagagcatgtcatatcaccattcagaagcaaaaagagattgccgaagcagaagctcggtagaatcagccgaagcaggtcttacatactgcttcgtgccattctccttacataccagaatatgtgggcaatcaacctgcagcttttgttgcttcgacaagccattcacaagcttcctggcctcagcttccaccgccaccaccattgcaacctacttatacctgaagccagtagccagaagggcgccagcactcccaacaacaacatttacgaagctcaaaagtcgttcctaatggaatgcagagccaacataaacaaagctacaaaaatggttcctaagagagcgcagcgtaagttttttgctcaaaagtcgttcctaagggaatgcagagccaaaattgatgaagctacaaaagtcgttcctaagggagcgcagtcaaggggatcgtacggcttcggaggcaaggatagttcagctgaagtaggtaaacaaattagttcgaagccacaaagcaagttccgaagctaa

SEQ ID NO: 22244 - DNA, 292 bp, Zea mays
  Peptide Sequence Number=SeqID_65619
atggatatgcggttcacttttgtaggtgctgggttgcctggttctttccatgacatggcagtgctgctcaggagttgtatgggagaagcaaactatccacacccaccagcagggaggtattatctagtggatgctggttactcaattcgcgaagacagaaggtggttccgtggccaaattgatatccttcacgcttgcaagctagtcaagctggacgctgagtgctcggcgaaaggccatactacctggaccttgacctggacctggaccgagcctccgcccgatgcccagg

SEQ ID NO: 22245 - DNA, 678 bp, Zea mays
  Peptide Sequence Number=SeqID_65620
atggcgacatcaccgagtgattcctctgcttcttttgtctcccattcctctagccgtgaaccaaccccagagtgggatcctataccagcatatgagaaacatgcacctttgcactgggatgcagatggatgggactttgaggttgcatcggaatccgacggcgacctcaccgacggggacgacctccagctcctcgttgacggggagctggactctgacaccagcactgactggcgcacgacggagaatcgtcagatgtggagtccttcgacaacgatgacgacccgatgtctggacattggatgggcatcgtctcctcggacgatgaagatgacgagaacaacagcggcaacggtgactacggcagcagtgacgaggacagcgatggtagtggcgacgatgacggcgatgatgatggctgggcaatccaatgcgatgagatgccctccccagcaagcgtcgtcggctgctgcatggtctttccagcattggcaatacttgcagaaccatactgggcttggccttgactcaaggactggtgatatagagactgatgattcgtactgggggacccagaaaggggatcctagtcctcagggcagtcgaggaaaccaccaccctttcttgatgagctttacactttatttggtcgagccacacacgaccggggcaatttga

SEQ ID NO: 22246 - DNA, 1021 bp, Zea mays
  Peptide Sequence Number=SeqID_65621
aggttctagtgacaccgtgacagtgaactccagtgatgtgcaggcgccagtgagggtaacagcaacaaggcaacaacgagggagcgacaacgagcgacgcaaggggctcggacaggggaatcagctgcacgatgaagtcgtggtgctgatgagcgggaaggcagcaacggtgccggaatcacggcatcgcgggaggaaggatgctggagcagtatgcaggacgcaaagctcccgcgacattatggcgatgaacttcggcgagcagtgcaagatgcagaggaacgacgcaaacaaggagagtcgactagactccagcggtgtcatgacggtgtctgggcgcagatgctgcgatgaacaggcgcgaggttctagtgacaccgtgacagtgaactccagtgatgtgcaggcgccagtgagggtaacagcaacaaggcaacgacgagggagcgacaacgagcgacgcagggggctcggacaggggaatcagctgcacgatgaagtcgtggtgctgatgtgcgggaaggcagcaacggtgccggaatcacggcatcgcgggaggaaggatgctggagcagtaagcaggacgcagagctcccgcgacattatggcgacgaactccggcgagcggtgcaagatgcagaggaatgactcaaacaaggagagtcgactagactccagcggtgtcatgacggtgtctgggcgcggatgctgcgatgaacaggcgcggtgcgaggcgttgcgtaggagtagagcgagaagcagcagaggagtatgcgaggagagggaattgctggcgtgttcaatggccattgaagctgataaacggccgccattaatggaggagaaaatgccaacagttatagcggtggggaaaaggaaacggacggacacagtattccatgtcgccgagacgacagcggcatgggctcgaatgtgggcgtacgcgacggcgaggtgctgtgtgcggcagctgcatagacgaagagagtacaacagcatcgcctgggaacaaagcgtttaa

SEQ ID NO: 22247 - DNA, 432 bp, Zea mays
  Peptide Sequence Number=SeqID_65622
atgaagtcggccaggacctgtgatttgatcgttgttctgggttcgaaggtgatgtggtacccgaataactcagctgcccattttgcaattcttgcagatgcctccgggttcctgaacaactctcctagacccctgtccgaaccggagttgtgtgtcgtgcatgttggcaaatgtttctgcgagatcggccaggtgatccactttgtttctgccggtgacgacgatgtcgtccacgtaggtgaaaacattgtggtcgacatggctttagaggaccctcttggtgaggcaagagaaggtggatccagcattcttgagtccctccggcattcttacgaagcagtatgtgctgaagggtttgatgaagcttgtgcttgccttgtcctgctctttcatgtaaatctggtggtacccggagaagcaatcaaggagtga

SEQ ID NO: 22248 - DNA, 567 bp, Zea mays
  Peptide Sequence Number=SeqID_65623
atgcagaggtccattaagtccttcgatgaagtgttcctgcttcctctcatcctcaagcacttcatctgcagaaatatgatagtttctgaactgattagcaaattctgcctaggtgatagtatcagcagcatcgtgggcagcggtgtcaaaccactatcgatcaagtatgggcttggtataccagaccatgatactgaagggagggttgtgactgtagagtttgataacttctacctgttaactgcttatgtaccaaactctggtgatggtctaaaaagattgacttacagggtcacagagtgggatccatcccttggtaactacatgaaagaattagagaaatcgaagcctgtcatactaactgtcctacgtggcccatgcgccgctgtgtacggcaagctccgacgtagccgccgcttggacgcggtccagagcggctgcatcgtgctgtccatcgtcaaacagggggacctcatggtcgtcgccaatgccgacgactctcgggttgttctgggcaccgcaaccgacgacggcgccatcacgccgtctagctcatcatccacctaa

SEQ ID NO: 22249 - DNA, 318 bp, Zea mays
  Peptide Sequence Number=SeqID_65624
atgttggtgttgtacctcgcgcttccgcgcgcctgtgcgctctttgctcagcgggccacacctatcggcgcctccgcccattgcaacagtcgcacgcctgtgtcaccatcttgcgggccccgcttccggagagccgccgccgtcaacccaagccctcgtcgtgcccctgtcgtcgttcaaggatcccggaacctcctctcaaggactatagttgagccaccaccgcgccgccccgccacggacggttgtcctccggtgcctcaacgccgttgttatgcccatgaccgtgttcggcacgtcccccctgaacctccctga

SEQ ID NO: 22250 - DNA, 405 bp, Zea mays
  Peptide Sequence Number=SeqID_65625
atgtcgcgcgcgttcgatgactacaatatcaaggattgtggcgtcatctcggcgtcgaagaaaagggttaagaacgtgggtacccacgttcttaatgttaagaatgtggacccacgcaggacacataagttcgacgaccacgtagccccgtcgaacttaaccgtaagaacgtgggtgccgtcgaacttatgggaaaaaattcgacggcccccgtcgaacttaaaaacacacgttcttaatgttaagttcgacggtacccacgttcttaatgttaagttcgacggtacccacgttcttaatgttaagttcgatggggccgtcgaagttacttctctaagttcgtccaaaaatcgccgtcggctatattcgtcggtaaacccacgttcttacgatggtcttaaataa

SEQ ID NO: 22251 - DNA, 396 bp, Zea mays
  Peptide Sequence Number=SeqID_65626
atgctgtccactgggcttcacaaaacagcgagccggcagcgcgcggagaagtcgtggctgctgctcaaggggaagggcgtcgaccataggggctgctcaatgcgcgccatggacatggacctgaccgaggccgaggtcggcccagggagggacgctgagttggggaggctaggcgcaaggaggaaggagctgctgttggtagcgccagctccaggggagctcagccatggagggagagtgcaaagctgctgctcggcaggaggaggaagaaatgtgctggctgctgatgccgtgaaggagatggagacagggaaagggaatgtggcggctatgggggaaaatggaaaaatttcagaatgcaagggagggaagctcatatttatagaggagtcctag

SEQ ID NO: 22252 - DNA, 630 bp, Zea mays
  Peptide Sequence Number=SeqID_65627
atgcggaagcgattacataacttacatttatttaaaaaacggagacactacaccgagactctcttctcgtgcaagtcacccgcccggtctcagcttaatcttttcaacccaaaaacttggtacctggcagagggtttcaaggaaggtaatcaagttcaaggaaggatttttctacaatttataacaaatttccaaagctctactgaaaaagaaaaaggaaaaaggttgaacaggactgggccagttctagcccagtcggcccaacccaaagggaaaggcgtgcccgcgcccgcgcactggcaactttgcacaggggcccttgcatttctgtctaacagcgaacgagttctttcactgtttaacagagccactgacaacttgcaaaagagacccccggtttctgtttcttcgcagtgggaggtccccgacggcgttcatgcacgaccgagctccggcgagcgtctgtaccggccgaatggggctatgactggcgctcccgagcggcggacatcaaatcggacctaccccgagtatttcccccaacctaattgcacgaatggcaacctattaagctctgtccgcatgaaccgaacgggtggcggacagatgagtgtgttcccggtgatctag

SEQ ID NO: 22253 - DNA, 378 bp, Zea mays
  Peptide Sequence Number=SeqID_65628
atgcagagcttacagcaaaaaataaacgctgattccgtcgaagtagaaggcgaagaagctcctaagggaggcttacagcgaaaaataaacgctgattccgctgaagtagaaggcgaagaagctcctaagggaggcttacagcgaaaagtcagcgctgatacaccgaaaaataaacgagaaggcagatgcttcggctatgaggataaagcttcgggaaaaaacagaaagaagaaattttcgtgcttcgttgtgtacgaaaagaagggaagcttcatcatcctgtacatattaaaatggaatgagaaaagtgcagagttcaaggagaaggatattcctcatgatgcaacttcgaccaataatttctttgagctactttag

SEQ ID NO: 22254 - DNA, 222 bp, Zea mays
  Peptide Sequence Number=SeqID_65629
atggagttgcgcggattgtggtggtcatggcgcgccggtcagaaattagagatgaccagagagtccgcgtgcccggccgatgatactggaggtttcaactcacgaagcgtgttggacgaagggtggaaactgccggtcgctttgcctccgttggtgcagcgagattggcgaaggcatcgagcaaagggtagtgtcttcgccttcgccccaacagtcccctga

SEQ ID NO: 22255 - DNA, 429 bp, Zea mays
  Peptide Sequence Number=SeqID_65630
atggctagcatgaccgttgcgggcagcagggaggctcgacgtcgcagtggagtggacaaggcagaagagctcggtcagcagcgctacacgggacgagctcagcatcaggggcaagcgccggcagggagggaggagcatggggaacgtcggccatggaagggaggtgcaggggagctcgcaggggatccaacgccgggagctaggctgggcgagctgaggatgatggagaagaggccgaccgtgagggagctcaactccagggagaggcgcgcagtgaagctcaagcagagacggtggtgcgcgatggtggaggagggcgcgaccagacgccatggctgggcagaagacgaccacatcagaggagatgggcgcgtggggataggagcgattgaaggagacaccccgtggcggagcacgacccaaaaataa

SEQ ID NO: 22256 - DNA, 255 bp, Zea mays
  Peptide Sequence Number=SeqID_65631
atggccagagtaagatccactgcaaggctgtcccgcgagggagacgaaaccaaaatgactgaggcagcaacgatcttagaaatgatgaggcggacggggctggttgtgcagggaggagttattaccgaaggtacctctactgccgaagctgaacaagccatgactgaggttgagagtgataatgaaagtgaagatggtgatagcattctttctccaaccaagcctagtcatgtagaactgaagatcagattgtga

SEQ ID NO: 22257 - DNA, 219 bp, Zea mays
  Peptide Sequence Number=SeqID_65632
atgtctatgtcgtggcccaacaagccatacaagtgtattatctctcatatgcttgccaaacaaaaaaacatcttaagggttgggatgttgcgtataaggttgttggacaaagatggtggacgatgggaggaggaggcgcaacaggacgacgacactcaacaggaggtggagaagcaggccactgtcgatgtggcgcagcaggatgacgacgatgcttag

SEQ ID NO: 22258 - DNA, 1800 bp, Zea mays
  Peptide Sequence Number=SeqID_65633
atggaccgaaggtccatgacacctggtatcagctccaggttatcctcaccaccaccagccgcccatccctcaccaccaccagccgccgcgccatcagccgccgcaatgccctcccacccgccctctccaattccagatgcattcactcggctcaaagagagttttggccgcttcgcagagcagtgggatcagttcgttgtgatgttccaccgctacaaggagaagacagagaaggaactccaagcagcggtgcggcttcagacggcagcgcgagggttcctggcacgccgccaggtacagtcccttcgtggggagaagcaccttgttgtggcctccagggccaccccatggccgtcatcacatgagcaggccgtggtgcacctgcaagccgcagtgcgcggcttccttgttaggcgggcggtgcggaagctgcacttgctgatcagctcatcgctgcaccaactcgcagcttgcgcgcccaaccaccaggtctcgtctatactttttgaaccccctgcagaagtcgagatctgggtatgcagcccccctgcacggccaaagagggtcgtctccttcattcgggaacctgccttggtgttggacagacccaacataagaacgggctggttcctcctccacctttcatccaacgtgaaggccgcagttcagctctttccttgggatccaggaggacaggaggacatagctgcagttcaaatttatattttagttccacaattattttgtattttcgtcttaaataataaagataagccgagatgtaaaaggcttaaccttaagtcgtgtcaggtaagtctatggcagctcgaggacgagctggtcctcaagggagggggagatgtcatgggcatcatagggagcgatcactcatgtggggccgcacctatgtgcgccaaaagcgagaggccgcagggggcgctggcagcagcgcgcgcaaggaaggcacgggcgctggcagcaacgcgcagcagcgcgcgcaaggaaggcgtgacaaaggaaagcgcgcacaaggaaggcatggaaaaggaaagcgcgcgcaaggaaggcatggcaaaggaaatcatttcatcgagcaagagaagcgcgggacagcgaggaggtcaccgcggattgacgacatcgcgacggggactgcgagatcgacggcgggtggcccgtcctggcgagcgcgacacatcggagggcgtcgccgctgttgctgctcgagcggggacgcagaccggtggaggagcacgtgaggaggagctcggcgtgtgctccagcccggtgccgagggatggcagcggccagacttgccggagaagaaggtcggcgtggggagaacttggactgcaagaacagcagggggaggaggtcgacggctactggctgagggagacggtggggaaaaagggagcctgcgctagtgcccacagggggaaacgcagcagcggcgcgcgccggccatgggggattcctcgcgcgcgctggaccagaggagcgcccgcgtcgtgggaggcgccatggacgagtaggagcaaaggggctcgcagcttgtcctgggcgcctgcacttggagaaaatggcggccaggtggtgctgccgagggggaagccccttgtgcctggaccagcgactgggagcaggaagggagcgccgaggaagctggagtcgagcctccatggatggggagcagaaatgaatggcgtcgtgggagttccctgcgcgctggggaagaagactccacggaagagacggctgggagaagagagaaagggagtggcggctgaaaaagaatag

SEQ ID NO: 22259 - DNA, 1743 bp, Zea mays
  Peptide Sequence Number=SeqID_65634
atgtactggggcaggcctgcgcataaacagattggatacctactgaaatggatacaaatagttattttttcttggattcgtattttggtgcaaatagtgttgactgctattcttcagaatctgccatcgccgctgccaaacgcgaatgcaaagcgctgctgtcacatgagatttcaagcacctgtaggagaaaatggtaggatccatatggcagaaaacagtctaggacatcattactcatcctccgatattggatcacaaaggatcaacaattccaaccctcaagtatttgaagcacagtactgcactctggaatcatcctcagcaaatggtgtttatcctgcacaaagctccacatcttctcatagcatctcccctttaagtgggagccccctgtctcagcatgacagccactcagaccacacatatagttctcctccaagtgcttcctgtctaactgaggttgcagatctcctgattaaacaaaaagaattagagaattccattgttggacctggactggacattagttctgactgctctcggagcttgttgcaagcccatgttccagtgagaccagacaactggagacaacttctgggaattaatggaggagacttgatgcaagtagtcatagcatgtggtaaggctgttgcagagaatgatgtctttgcaacagaactgttaatatctgagcttggtcacctggtatctgtatctggagatccaatgcaacgacttggagcctatatgcttgaaggaattgttgctagactttcttcctccggcagtatgctatataaatctttgaaatgtaaagaacctacaagctctgagctcatgtcatatatgcatctcctttacgagatctgcccattctacaagtttggttacatgtcagcaaatggtgccattgccgaggctattaagggcgagaactttgttcacataattgatttccaaattgctcaggggagccagtgggttactctgctacaggcccttgctgcaagacctggggggccaccatacattagaatcactggtatagatgactcaaattctgcttatgccagaggaggcgggcttgatatagttgggaggacgttgtgtgatgttgctaattcatgtggtcttccttttgagttcaatgccgttccagctgctagccatgaggttgagcttcagcatcttgctataagacatggggagattattgctgtgaattttgcctatcagctacatcatgttcctgacgaaagtgtaagtacagaaaatcatcgggataggattataagaatgatcaagagcatcaatcctagggttgttactctcgttgaacaggagtcaaatacaaacacagctccattcttcccaaggtacatggaaactctcaactactatacagccatgtttgagtcgatagatgttgctctcccaagggatgataggaggcggatgagcgcagaacaacactgtgttgcaagggatattgttaatttaatcgcatgcgagggtgctgaaagggttgagaggcacgagctgtttggaaaatggaagtcaagatttgcaatggctggatttagaccgtacccactgagttcagttgtgaacaacactatcaacacattgttgcatacctacaacagctactacaggcttgaggagagagatggttccatcgcactttggcctccatctgacgtttctaaggcaccattatgcttgtctgatgtgctgtaa

SEQ ID NO: 22260 - DNA, 354 bp, Zea mays
  Peptide Sequence Number=SeqID_65635
atggctgggaagctgcacacagcccattgccttgcccacacccacctcacagcagctgccctagatgcagtgcgcctgctgccaaggccgacagccttgatctggtctgatcctcgcagcagatggcctagaactacttgcattcgtggcgccgacactcacggctcctgccatgtggccaccgccgccgccgctagggcagatatgggattggtctttcaaagtaagggcaaacggcacattcaatttcaaaacatgagggcaaaatcaccaagttgtaaaacaaggacttgtgaggtatggaagttaactcaagaaatcttcattgtgcttccagacatgaacaacaattga

SEQ ID NO: 22261 - DNA, 180 bp, Zea mays
  Peptide Sequence Number=SeqID_65636
atggctcacgaaataatgaggaaaactgagctacctcctccactggaaccattcgaccccctggccgacctagaaacgaagaaagcaatagagatcatcaatatggccgaatctattgttgacgaagttgttaccaagttgttaaatgaagttgcggagaaggtcctgaaagaggactag

SEQ ID NO: 22262 - DNA, 219 bp, Zea mays
  Peptide Sequence Number=SeqID_65637
atgacgaaggccctcggatactattcgtttgagtctatgacaccaaaaaccccttcccttctcctctattcttacctgatgcccttcttctggtttacaaacagagggagggagagaacgatggcgttcggctcggggcttaccgacggtagaggaaagctgggcgaggaggcatgggggttgatgacgaatccgacgatgtcctcgattcaacagtga

SEQ ID NO: 22263 - DNA, 523 bp, Zea mays
  Peptide Sequence Number=SeqID_65638
cctcacatcctccgcgctgggcgtcaccaggacgctatgcacgctgctcccgcatctggagctcgcccaccctagtcgatcatcgtctgaccatgcgcactcgctgtcggtcgcgctcggctgctcgtcgttgtcctaccgcctcatccaagccgcagtcgtcatcgaccctctccaacctcatctgcgttgcgacctccatcctgcctgctcgcgttttcccctctgctcaaacgtcggcgcccgtggtgaagcggtgctcctctccctcgccgtgcagctcccgcgcgagctcctctgctggccgctgctgctcggcttccagctcgccatgtccatctccctgctgccgctcgcccatagcgccctcgccttccaacagccagcgacgccagccctctccctgcttgcattcgtacagaaccgcgcagctcctgtgctgagctctgcagccgtgcttcctccaacagcagctgcgtcaccaggccctcaacgtcgtgctgtgcgctgggacagtccatag

SEQ ID NO: 22264 - DNA, 819 bp, Zea mays
  Peptide Sequence Number=SeqID_65639
atgaggaaaaaacacggctccatgccaaaattacatacatgttcaggcctcgacagccacaatgaacaaaaacactggcattcaaagtgccattacaaacggaactccggttccacctccgcaggtacgaacaaccccactcgatgggggggcctgcggagcaacagaagactaaagggcggctcgccgccgcccgccctgacagcaacaacaacgacccccgctctgggttgccgaactgcagcagcgcgggcctcagggcgggtgctgctgcaatcttgccctcgcccacgccgacgctcgaggggcgaggacaactacaaagagccggaggcccgaagcacggatggtggcggtgatcccgtcagcgacggggacttctcgagccgcctccacctcggcaccgacgacatgggccgtcagccctccggcagatcctcactcagatcctcccggacgagtggggcaccgacctccgcgtggaggcgccataccggtgcaaaggcaggaccgccccagaacacgaacgccgccctagcaacgcgcgacatcttgggcggtcctcccgtgcacacggcgcggcagccgccttccggcaggagggggcaccgggagccaagccgacgagctcgacacgctggggctgacgacgcccgccgtcgaccagccccgcgttgtcgaagtccgacccgcccgcagggccagcgagtgccctctccctcgaacgccgcaggagagggtgacccacgaacccgcgcgggaggtagagctccggctcagcccgacctccaccccagcgaggatgatgaacatccttga

SEQ ID NO: 22265 - DNA, 456 bp, Zea mays
  Peptide Sequence Number=SeqID_65640
atggcgccccgcatactctgtgacgacggcggctctcagcccccttacggaagcaagaggacgtcagcaaggactcaaccgctccgacagctgtccctccgccgggctccagcactcctccgacggccacgacatcacaccagctgggtgccaaaatctctccggctgccacgacggcatggtctcttccagcagcggggatgccctgaggtggtgcagagggcatctctagctgaggtgcagggaaaggcggcctctcaaactccacctcctactgaggcgagggggaggagttctgctgctcctgctcctggcgtcggtgctcttgctccttgtgcaggcgatgatgcagtctctccaggtgactggactgacctagcaccgtgcgacgtagtggactctacgccaggcgagaaggcaaaaagggaatcacagacttacgtgcagtgcacctga

SEQ ID NO: 22266 - DNA, 174 bp, Zea mays
  Peptide Sequence Number=SeqID_65641
atggcgggcggaattgagctcgccggagctaaggagagggggctggccggtgagagatatggagccaggaaatccggtctgtctccctgcccaaacccaaggcaaatccaaggttttgtcgtgtctagggctcgcgtcccaatgccatcttctggcacacgacagaggggttag

SEQ ID NO: 22267 - DNA, 258 bp, Zea mays
  Peptide Sequence Number=SeqID_65642
atggcacccaagagagctagctcgaaggcagccccatctgtcgacaaagcagcgaaggcagcactactgcccgagaaaaagggcaaggcccctgcagacaccacccaccaagaagcctacgaagacgacacactcagcaagagacagcgcaacaaccaacccactcccgaaggctccctccgcacctgcagctccggaggacagccacaagaaccacccccaggcttcgctccaccaaagggcgaggacgccatataa

SEQ ID NO: 22268 - DNA, 747 bp, Zea mays
  Peptide Sequence Number=SeqID_65643
atggcgcatgccgaggacgtcgaggaccttggtggtctggacggcgctttgcccgaggccgcagaggtcgaactggtgccgccatttgatgccggcgagggcccctcggtgactgcagccggcgaagaccccgcaccagcccctgcgctgacgggcgaagacgccttgaaggtggtggccgagccggctgtcgagccggcagccgaagaccccacagccacggccgggccttcgcaggttctgaggtttgggcctgcgcacgcaaccgctactgacaatgctatttttgtggcggcttcgaccgtggctgccgatgacgattcgtttggctctgtgtctaagtgttttgagtctgatgattctgggagttcgattgcgtggacggaggagtcttcagatgaggacttggattattttgtagcattagatgtggttgcagcggagcattcaccgcgcgcgaaggattctgaggggctcccgggtgcgagtactgggtataggcggcgaagggcggtggcaaaacggagagtgagtggattgtcgcaaagtggtaggcgtcatcgtagtgagatggagagtggtcgtcttcgcgtggatgggactggtaaacgagaattgctgtcctcgccgattggggtgagtgtaggtgaaggagagctgcgaaatctttttgagggtgaggaattgaggatgatgctgttcaactacagggagatgggtatcatcccgaaggttgagccaatgtaa

SEQ ID NO: 22269 - DNA, 474 bp, Zea mays
  Peptide Sequence Number=SeqID_65644
atggaggccaagagggcggatctccggtgccagctggcagaggagaggagggaggcgaacaaggccgtcgctgatgcgcaggctgcgcaagccgaagccaaagtggcgagggtggagggcagtctcgcccgccagcgcgccgaggagctggaggcgaggctcaacaccctgtgcaaccgtgtggacaaggccgaggcctcgatgcacgcggaggaggagctgggggtgctcccgaccattgtgacgggtttcatgtccttcacctccctcgtcacctgcgagggggccgtgaacgctttgtcccgtgaggggtgcaaacattacgaggtctttgaccaagcggacgaaaactttgaatgtgaaattttcaaggtcgaagaccctatgctgaagcagtcggcggggcgctcttcgataggatgtggggcccgcacggccgagaggcggtcagggagcgatccgaccgggcaatag

SEQ ID NO: 22270 - DNA, 435 bp, Zea mays
  Peptide Sequence Number=SeqID_65645
atggtgcctttggccgggcctgactgcctgtcagtctcactctgtcaagtggcaccgcagtcggagtggcgcaggcggtgctgtccttctgtcaggccgctttatgctgatgggggttaccagctgagaattaggagccttgagggcagtgctagtggtgtgattgtctcgctagttggtgagggcaatcccaggctgagcagcatggtcaacttggtcgccgtgctcaacacagagttggaccacgcccttgacgagttgggcaaggatcgggcggaggttgcggaattgcgtgctgaatgcgcggcacgccactatcttgatggtggttctccagcccctgttgggattcagcacccttaccgttcaccgccccgtggtcgcttcgactatggtaccccaaactgcaggacccggatagatttggatccctag

SEQ ID NO: 22271 - DNA, 831 bp, Zea mays
  Peptide Sequence Number=SeqID_65646
atggggacgtgcgcaaccctcgggggaaggatgtcttcgcccgagctccgggagtcttcggcgcgaatgctggaggttaccgggggtcgatggcccaagaatgttccgatcccccgcgcggctgacgaagacttctttacatctcgcatggctcgtgacttgaaggtttttccttacggacagaatattgctgctgttttatcggcagtgatggagaaggaccgtcaagacgctacgcagaaacgccgggcggtcgttaggatcgctgatcctatgcgccaggcgaagaaggcgcgggggagcgcgaaggctgctgcccctggcagttgcaaaccagtgccggttgtgaaactggccgcccccgggcatagcaaggcgtcggcgagtgcgaaggctgccgcttctggtgcgagcaagccacccccaggcaggcctgtgaaaggacgaaggctgccttcgccggcgcgaacggacggggcggcgacacgtgttgccgactttgacacgaacatcagtgtcgctgattattttgttgggtcggatggggggcaactggttgttgtcccgcctcctgtggcaaccacttcgccaacgacggtggttgaggcgaagggtgccacacgggacttgtgggccaccttctgcgcgattggcaagattctgtcagccgctgtcgctaaggacgtggcgggctccatgtctcagcaactgaggcaagggtcacaacagctgtcacagcagctgaagcaagcggccaacttcgccgaccacgtcgcgtcgggtgccttgactgcagactttgctgccgaggtcgagagtctctgggcgtag

SEQ ID NO: 22272 - DNA, 426 bp, Zea mays
  Peptide Sequence Number=SeqID_65647
atgccctatcgtagtatagccctcccctgtcccttccatggatgtgcgcttgtgagtggagagctagagggcggcaagccactacggctgcggaaggcgccgacgagggccaaccttctccggtcatctccttccccaaggccccaagccaggtcgagcctcaagcgccaggcgcgccaccaccgcggagcagccaagccttcaggtgcaacgccgccgccctcaactctaggctcccaggggcgccaccagccaccagaatgcagcatagcggcggcgacgataaggagagaggagagagtcagcgatgggctagagaatatgagcagcaacaacgtgaagaaggtggtcgatggggcggtgagggccagcaaggtgatcaactgtgacaacatggccaagttgcttgtctctgacgagttgtga

SEQ ID NO: 22273 - DNA, 834 bp, Zea mays
  Peptide Sequence Number=SeqID_65648
atggctgcccgcccctttcgcccgttggtctgggcaaaagtggagagtcacttcccccgcgccgcaggggaggaccttggagcgtgttggagaagactcagcccgcaacggctggggacgcaagtagggagagttgcctttaaaaggagggtgacccccttagaaggcgaccatgtcttcgtgctcccttatgcatcgtgtctttccaccttccaagcccccggatgggggatacccgccgtctttccgcctcatcgttggaggaatgcaactccgtgggagttggtacctttcagccatcgttcggcttcaaggattttcatcagccagcccggctgtaccccccgccggcggtcacccaagacggtgaccaccagcccctggttggggacaagcaagctgggctgcgatcttggtcccaccctcagcttcaaggatgttcatcatcctcgctggggtggaggtcgggctgagccggagctctacctcccgcgcgggttcgtgggtcaccctctcctgcggcgttcgagggagagggcactcgctggccctgcgggcgggtcggacttcgacaacgcggggctggtcgacggcgggcgtcgtcagccccagcgtgtcgagctcgtcggcttggctcccggtgccccctcctgccggaaggcggctgccgcgccgtgtgcacgggaggaccgcccaagatgtcgcgcgttgctagggcggcgttcgtgttctggggcggtcctgcctttgcaccggtggaggcggctcgagaagtccccgtcgctgacgggatcaccgccaccatccgtgcttcgggcctccggctctttgtag

SEQ ID NO: 22274 - DNA, 909 bp, Zea mays
  Peptide Sequence Number=SeqID_65649
atggaggcccaggcccacgcgtcatgcaaccggcgcgccgaatgcttcgtgcatgcaactgcaccgccacttgcgccaccaccgcgcctcctcgactgcggaaccaataccgcgactcgaggcgacccagcgcatgacccagtagcgccagcctggcgcgacggtcagtgcggccaaaaatgggccggcagtaatgacggtggcaggcggacaggagcagcggtcacgtcgagaagcgggcgacgcttcgccttcgccataatgaccgcgtcagtaaagggatcaggaaagggggaaaccccgaaaaggatccttccccgtgaaggaaccaggctccgagcctccctactgatcagaggttcgaaggctggcccctcggaagggttcgacagccgcctcagatcacgtgggccctacacccactactggtcagaggttcgaaggccggcccctcggaagggttcaacgaccgcctcaggctactcggctccgcgcccactactgatcaggggttcgaaggctggcccccgaagggttcacagccgcctcagacacagagcgagggatgaccatgggtacgttcgatacataaccaaggctcgggctgcgctcccgagctcaccggagacaccatgttcggcgcccatcgagggcaacatggcgctttcccccctcctccttgcggaaaggcgatgcaggggcgtatataaaaaagtcgagtctatccctgatcgccctctcgccctgtgcagaggctcgggggctgctctcgcaaacccggctccggccgaaccgttgacagcatcaacataccagcccaagaacttgagacccgaccgtacacccgggctacggccagctcgcatgagggaacgaccagaccagccgaagcattacgcgaggcattaa

SEQ ID NO: 22275 - DNA, 282 bp, Zea mays
  Peptide Sequence Number=SeqID_65650
atggactcagcttcgatcgagaccaatatgaaaggcatcccctacctgaacacctacgacggccgcaccatccgctaccccgacccgctcatcaaggccaacgacaccatcaagattgatctggagaccaacaagattatggacttcatcaagtttgacgtcggcaacatggtgactggcgggaggaacaccaggcgtgtaggagtcatcaagcacagggagaagcataagggcagctttgagaccatccacgtgttgcttggagctttttgctatgtctag

SEQ ID NO: 22276 - DNA, 654 bp, Zea mays
  Peptide Sequence Number=SeqID_65651
atgcatagtgacctcgcttatatatgcataacgttcgggattcagggttcgacgagatcgagcagggaagaacgaggttcgacaggctcgacgacaccaacgaggtcaacaacgagccaatcaaaccaaaactccacgacgctgaccgacacaccggttagagaacggcggctgacgagatctaagctgggaaaaagaacacatgactgggtattaacagctggatccaagcatgagggagaaaagaggggcagccgggcgctcggccatgggacggacaccggggaaacgttgagcagagggcagggagatggaaacttggccatggaagatgagaagtcggcgcgggggctgcgcacgagctggacgagccgagcaggaagtcaagatccgagctgggccagtgggaggaacagggagctgggcactcggccatgggggcaggggagttcggctgtgcgcggcgtgtgcgcagggaagaacgacgagctgggagcctgcgcgctaagggagttcacgaatgggagcaggagggggcgaggacgagactctccatgctgtcgagccgagtcgtgttgcgcgacgccggagagcgagcttgagggcgagcgcacggctggcaatttgagggggcacgacgaccaggggaattga

SEQ ID NO: 22277 - DNA, 237 bp, Zea mays
  Peptide Sequence Number=SeqID_65652
atggatgaagatgtcatagtcaaggctgtggactgctcgaaccaatcagaggttcacatgttaatgcatgcaactaaagtgcattaccaatgtcccaagagggttaaatatcctatttatgatcaaacagtgtaccttaacgattatcataagaagatgttgaaggatcaatatggctctaggggtggtaatggatcatcgtctaaatgtttcttcacaatttgtttcaccccttaa

SEQ ID NO: 22278 - DNA, 885 bp, Zea mays
  Peptide Sequence Number=SeqID_65653
atggatgataagaacaaagtcaagaaggaaatagatggcccccttggacccccacctcgcaaggttggcatttccttggccattcgtcatatagtttcgctctatgctattcttactactgttgtgttgtttttaaatttatttgtgtctacaaacttcccatttgagaattggttgatgtataaactaatagttcatttctctgttggcatagcaagaagtggtacacaggttgcatttggacaaggaaactcttattatgcaagaaattttcccatgcccaaaaaggattcttcagcaggtggagcttcgaagttaccaaaagaatatgcagaaccatgggactatagccatgattatcctgttactctcccactaaggaagccctactctggaaatcctgaaattctggatgaggaagaatttggagaatcttctgccagcaggacccaagatgatgaattatctgcagcagagcagcttggattaatggatatgtcgtcggaatcacagttcctcttcttccagttgccatcctctcttcctttaccgaggcagccacaatcaggtgctgaccctaacgaagtccgcgatgagaaacgtgaggacatgaggccatcatcgcacaatggctcgaaactcaaagaggttcctgaaggctatatggggaaaatgctcgtatataagagtggtaaagtgaagatgaagataggagacactctctttgatgtttcatttggctcgaattgcatgttttcccaggaggttgcagcaatcaacatcagagaaaaacattgctgtacggtgggagagatcagcaagcgtgctatcatcaccccagatattaactacatgttgggttctgttgacaagatggaagaatag

SEQ ID NO: 22279 - DNA, 1263 bp, Zea mays
  Peptide Sequence Number=SeqID_65654
atgacttctcatggatcctcgggtgaagggaatgcacagtcccacactgacgggcttgcacgagagggtttcccccgtatcttatgggaggtacttcagggagctggttacacgacgcctccccagtacgcggtgcagctgttcgagaagcaccgagtgccccgctgtagggtgaggatgaccctggagcctcatcccctacagccaggctggcgttcgctggactctaagtcttttggatacatggctgaggatactatggaggcaattgctcttcatggactgaccaccttctgcggattccaccccttggagctgtccactcaccccattggcttgttccccgcggagaaggaggacgacccaatgtggaaggaccgagtggagcatgccaaggatatctgggctatctacccagggcagaatgctcacttgacggtgcgttgcatgaatgccctgtatcgtctgcaagtgatgcgtggagaggcaatgtcccatctgatggcattgttgcaggctaccaaaattaccttggataacagagaggaacttgtggtagacttgtccactgagatggtggaaaaagacttacaagtggagcaactgtcaaatgagatccaagagctggaggagttggtaggaaccagggagaacaccatcgaggttctcgaggatcagttgatcaacacccagcagcagcttgcagaggctaaccagcacctggatatgcaccaccaggagatccaggacatggaggccaatgaggatgtcgacatcgagggaggagaggagcctgccgccagcttggacactgctggctcagggagaccaccttcccccgagtcgagcgttgcctccgtcagccgccacctcagcattatggtggtggtgatcatccgcgtcaccgcagcagccacttatcaggagttcctcagtacccagccaccgttgttcaccagggccgaggacccacttgatgctgatgccttcaatgacctgtgccagtatgccggatatcatgcagacaccgatgagaagagggacaagttcaggagagggctcagcactaagctctgtgaccgtctcaacatagtcagggccaacaactacaatgagttagtcaacatggccatttcccaggaggactgtatcacagctcgtcaagcagaaaagaagaggaagacccctgtggtaggaccttcagctcagccacagcgcttcaggatcgtatctgacactcagagcagaggacctcagcagtag

SEQ ID NO: 22280 - DNA, 1104 bp, Zea mays
  Peptide Sequence Number=SeqID_65655
atggcggcggcaggcgggcggaagcagcagtcaaatcgtctgcaggctcacgtcccctcctgggacagcgagagagccctctcccacggcgtgaagacgacgcacccgtgttccgttcctcgaacggctcgcgcatgcacaacggctgccccgcgaaccactcgtcccgtcgcattaactccgcggcagggcgggcgacacctttggcaggcaaagcgggcgacacttcacctccgccatgatgaccgtgtcaaaaaagggaccgggaaaggggacactccgaaagggatccttctccgcgaaggaagcgggccccgagccctcctactgatcagaggttcgaaggctggcccctcggaagggttcgacagccgcctcagagcactcgggctccgcgcccactacaggtcagaggttcgaaggctagcccctcagaagggttcgacaaccgcctcaggccacccgggctccgtgcccactactgatcaggggttcgaaggctggccccccgaagggttcgacagccgcctcagaacacgcagagcgagggatgactctgggtacgtccgatatatggccgaggctcgggctacgctcccgaggtacctaggacatttccgagaccagcaggagcgattctgtaacggaatcccatcagagggaggcatcgagccctcggaccctatcaaacgggaccgggtccggcaaatcacctgcagtcacttcgcccctccactggctgacctgacaggaaaacagcgtcgcctgcgctgctccgcctgctatgccacccgtcaggggctcgggctcaacctcgacctcggacgacggtctccgcctcgtccgaccccagggctcggactcagcctcgacctcggaggagcctccgcctcgcccgaccttgggctcagaccgaccacgccgcagggggggaccccccggggtcgaaacgccgacaggtgtagcaccggactgtccggtgtgccaagcggagcaacggtcgccagcacaacggtcgagttcaacggtcggctgacaaagctacagtgcgcggactacgcgcgcagaagtcagagcaggcgcagatggcacaccggacagtga

SEQ ID NO: 22281 - DNA, 1143 bp, Zea mays
  Peptide Sequence Number=SeqID_65656
atggcgacgggacgactcgggcaggcggagggtgaggggacgactcgggcacagtgcgagggggcgcatggcaccaaccgggctggtgagcgcgttaatggcgaggggatggggcggacggtggtcggcggtgaacgtgccggtggcctggtcacgggtgaggggagggagaagctgacaggcggggtcgggctaccagcgggagcggcgcacgggaggggagcgcggctgacgggtggggctgggcgggaccacaaggagtacaagagagacctccagagggtgtgcgccagggagctggaggcgtcccagagggagaagaaagtggccaggagggaggaggccgtgtcccagagggaggccctcacgacaaagtaccaggccaagctgagtgctctggaccagactctggaagcccagcgggcccagcaggtcaaggctgtggaaaggctgcagaaatggcagcaagagctcgagggcaaggctagcgacgccgccctcgtggaggaaaacattaaggcgaaggagcagtccttggacaggcgggagacggacctcgctaggcgagagacagatctcgccttcagggaagaaatgctcaccctgcgaggcgagttgctggccgagcacgagctcaaagcagaggaaaaagagaggaagctggaggagcagatccaccagttcaatgcggcgcaggcggcgccgggtccccaggcgatggaggccaccaggaaggcccttgaagatctccaggcagagcaccgcgtcggggttcagcacattgccgagtgggccggcgaggcaagcacgacactggtgccaatagggatgagccccatcgcagtgtcggagctgccggtgtcgatctccgatgccctcccgatgctggactccgccgctgatcgccttccacgcctggatcagatcctcggggcccgccttgaggcagagggcagcaagctctgccggacggtggttgaatacgtcctgacgtgcttccggagtcacgaccctgccatatccttggcaccgatgatcgatggtccagtatctgccacagaagacgccgcccgggagagtgtacaagatgtcgtggagatggtggccgcgcgcttccagcgtgatcctgccgacgctgagtag

SEQ ID NO: 22282 - DNA, 318 bp, Zea mays
  Peptide Sequence Number=SeqID_65657
atgaggaaatgggcaaggcctagcccactactcctcatgctcctctcctgccggagcaacatcccactcgaccgtccaacctggtggcagggtggtaggccaagtcacaccatcaactacatcctgcatggtacctgcaaaaatggtaccacaagcaaggctgagtatactaatactcagctagacttaaccggttacaaggaatcaagcagtctcattagctgcgagaagcagacgattcgaatcgagtttttaaaccttgcaaggtccttgctcggggatgagcacgtactctccgtcggcaagattacaatctaa

SEQ ID NO: 22283 - DNA, 270 bp, Zea mays
  Peptide Sequence Number=SeqID_65658
atggcgggcggaaatgagctcgccggagctaaggaacggtggctggccggtgaggaaaccctaggtgacactagggtgtcacagccttccccccttaaaggaatctcgtcccgagattcgggccagagtcctttcgaggtgaagcgaaggattcgaaaggcaggaggaggggttgggggtgattacataccagcttccttaggtaggcaatcggggaagttggatcttaagaattcctcggtttcccaagtagcttcctcctctgagtga

SEQ ID NO: 22284 - DNA, 393 bp, Zea mays
  Peptide Sequence Number=SeqID_65659
atgctctttgttcttggtcgagctgggtgcctcaatgatggtggcatcgaccaaggtgccttgagtcatcatgacgcctgcttcggccagccagcgattgatggtcttgaacaattggcgggccagttgatgctgctccagcaggtggcggaaattcatgatggtggtgcgaatctgctccatgcgggacaagaaaatctcttttctggtctgacggcgcttactgctgaattcactgtcggcgaagattgtaatcttgccgacggagagtacgtgctcatccccgagcaaggacctgtccaagagaaggaccaggagcaggcttcagaggctgctattgaggatctccccgcaaccccagcaattgaaggcaagccccggttttatgcataa

SEQ ID NO: 22285 - DNA, 318 bp, Zea mays
  Peptide Sequence Number=SeqID_65660
atgaggaaatgggcagggcctagcccactactcctcatgctcctctcctgccggagcaacatcccactcgaccgtccaacctggtggcagggtggtaggccaagtcacaccatcaactacatcctgcatggtacctgcaaaaatggtaccacaagcaaggctgagtatactaatactcagctagacttaaccggttacaaggaatcaagcagtctcattagctgcgagaagcagacgattcgaatcgagtttttaaaccttgcaaggtccttgctcggggatgagcacgtactctccgtcggcaagattacaatctaa

SEQ ID NO: 22286 - DNA, 627 bp, Zea mays
  Peptide Sequence Number=SeqID_65661
atgggtcggcgcgagacggagcgcgaaggggggaagaagcaggagggagacaggcgtaaaaggggaaacccacggccttcgtgtttgtcccgcgcccaggtcggttcgagccctgggttgggcgaggtggaggctcctccgaggtcgaggtcgagtctgtcttccgaggctgaggtcgagtccgagcccctgggtcgggcgaggcggagaccatcggctgaggtcagggctgagtccgagccctggggtcgggcgaggcagagttcgtcgtcttccggggccgagcccgagtccgagccttggggtcgggcgaggcggagttcgtcgtcttccggggccgagcccgagtccgagccttggggtcgggcgatgcggagttcgtcgtcttccggggctgagcccaagtccgagccctggggtcgggcgatgcggagttcgtcgtcttccggggctgagcccgagtccaagccctggggttgggcgatgcggagtttcctatggtgcctgaggccggacttggctgctgtcagcctcactctgtcgagtggcacagcagtcggagcggcgcaggcggcgctgtcctcttgtcaggacgggtgtatgcttgcagtagaaggttgtgaatga

SEQ ID NO: 22287 - DNA, 711 bp, Zea mays
  Peptide Sequence Number=SeqID_65662
atgaaggccaagtcacaccatcaaccaaatcaaggaggcctcaccgccttggcatacaatgctccactgaccccggccgccgccgtgcagtggccgcacttgtacccaccatatctagaatgggagacccagtctcaggtcgccgccgcctgcgccgctccgactgctgtgccactcgacagagtgaggctgacagcagccaagtccggcctcaggcaccataggaaactccgcatcgcccaaccccagggcttggactcgggctcagccccggaagacgacgaactccgcatcgcccgaccccagggctcggacttgggctcagccccggaagacgacgaactccgcatcgcccgaccccaaggctcggactcgggctcggccccggaagacgacgaactccgcctcgcccgaccccaaggctcggactcgggctcggccccggaagacgacgaactctgcctcgcccgaccccagggctcggactcagccctgacctcagccgatggtctccgcctcgcccgacccaggggctcggactcgacctcagcctcggaagacagactcgacctcgacctcggaggagcctccacctcgcccaacccagggctcgaactgaccacatcacaggaggcgccatcattaccctaccccaagctaactcaggctacggggaacaaggccggcgtcccatctggctcaccccgataa

SEQ ID NO: 22288 - DNA, 666 bp, Zea mays
  Peptide Sequence Number=SeqID_65663
atggcagagcacggagatctcgcgccaatccttcgaggcaccttggccatgtccgcgtccttaaagactccagaattgctcaacagcgtcacatcctgccgtgaaatcgccccatctatggccgagaacctccatggcggggcctctagtggccgtcgatcccagatccggtggcggaagatggttatgcggttcattaaaatcgtgccaaagatcttaaatcgtgcggtctgcatagaatatcgattcaagaaggcgcaagaactggggcagattaacacggccacgtgttcgacgcgccctggcaacgccagagcacgccccggcgctcagccccgcgcgtgccgcgccgcgccgcgtcaaccccatgcccacgcccgcgcccgcggctataaagacaacaccgacctcagcctgaagctcctcaagaccgcagaccaagcaccacctcaccggagacgccggattgacgccgccggacttcaaccggccgccatcgcacgaagaccgagctacacggtcgagcacgcgtcgctgacaagcccgaccgcctgcgcactcggccagccctactctggccatcactgtcggcgatccgcccctcgacgtgaccgccaggacctcgcggacctcacccaaccctccatcggacctctcccgccgccg

SEQ ID NO: 22289 - DNA, 378 bp, Zea mays
  Peptide Sequence Number=SeqID_65664
atggctgcagcctcggtggtgtcgtgggcttggaaaccaagggtctcagaatccaacgaacgccacccggggtgcaagggatggggctccaagactagccacaccttacagcgaggcactccatgcttgaggaacaactacaccgtatactgtggagcatttgagaacaagtccccaacattggcgcccacctccggtgaactcacttccactgttgagacgatggcttcgttcaacaaacaagctatagcaccttcggtcacgaagctggtgctcccaatcaagggcggttcaagttcagagccagccaataaaaaagcagaagaaggaagcacagagaagagtgcagcatgttggggtgcaaggccccttcgttag

SEQ ID NO: 22290 - DNA, 1509 bp, Zea mays
  Peptide Sequence Number=SeqID_65665
atgaagtctatgctgatgtcttcccatttccaagaaggtataggaagtggttataaggatgcatggagaattttgagagatgagcctcatccaaaatcttcttcctcagggcttgatctttgggaacaacaagacggtcttcgaaccataatactcccttactatcttgacagaaacaattgtacttctccactctccggatgttgcatcgggatcccatcaagtaatgcctccagatctttagagcgtgaactactgctgctagttccaagtcatgagtggggttatgctagcatgggtgtggttgttaggtgctaccttaagacgtttgaacaagggcagaaagaaacctccacgtgttcgacgtgccctggcatcgccaaagcacgccccggtgcccgaccccgcgcgcaccgcgccgcgccaagccaaacccgtgcccgcgcccgtgcctataaagccaaccgaggcttcaaccgtacgcccccgctcgctctcaacctcaccggagtgccagatcactggcgtttgctctgcgcacggcgtgccagcggccacccgagacccgaccaccgtagaccagccaaccgagccattccccgccccgtccgaccctcgagagagcctcaacatgtcttagtgaagctcccagagtcgggaatcgagctctacctcgccggagacaccggatcagcgtcaccggacttcgcccgatcgccggcgaacatagaccgagctccacagccggaacacacgccaccgacgagcccgaccgcctgcgcacgtggccccaccgattccggccatcaccgacgacgagccgtacctcgacgtgaccgcaaggacttcccggagctaaccccgccctttgccggacctccctcgccgccgcctatggcgtctgccatcctcttcggtgtgggcggtgccctccattccacgacggcgcgccgcgacgacattggcggcgtcctcccctcgctcgtgaccccgcgctcgaagccccaccgtgcgcccccgcgcgcgccccgactgcgcccgcgcacccacatgtacgccatgcccccgccccgaggaggttcggagcccctcaagcgagtgctcgtccgcgtttgcacgcaccgaaggaaccgaggccagccaagtcggggcttggctctgctggcaccactcgacgtcacgcaggcaagctccgagacggcatccattcccttctcgtcggcttccattctccacgtgctccctcctccatctctcatcgtgtccccttcctctccacgagcttccatgaaccctacagcttgctcgtccatggagtacgggctcaccagcatcggatccgtaggtcatacctactctagaaaccctagcttgactgctcctgatcccccaagttctaccccaatctacaacctctgctcttcagtatcacacatgctcgacctaaaggtgttcgatgaaatggaaaaaggtccagttgcaggtgtttacttctctacacttcggtag

SEQ ID NO: 22291 - DNA, 300 bp, Zea mays
  Peptide Sequence Number=SeqID_65666
atgaaggatattttggctattaaggctgaccagattcagtgtcccagctgcccctatgatcctgtgctgtgctggtgcatgggagccacatcattgggctcatatgttggtggcactcaaggaaacacccttccctgcatgttgaacatgtgtagggacaccttgccccatattcagctatttatagggcttggttttggacagatttccctccctgccttaagctccagccatagtccactatgggggcgtggggatcctggtgttttgctggtgttaaccttccccacagcgacctag

SEQ ID NO: 22292 - DNA, 441 bp, Zea mays
  Peptide Sequence Number=SeqID_65667
atggaggagcacggccgcccgaaggagggttcccagcgccatggatctgtgtgggaaaggggcgcctgcaccagaagagtccggccatggaggcgagctgctagaaaggggtcgccctggccaaggaagctcgtctgcgcctggggaagaagggcagggagcgtcggcgtcgagggagttgtagaggcgagcggctgctccctggaagctcctgcgcgttgggagagggagccgagcagggcagaggaggccggtgttggctgggatgtggaaggagaaagggagatggctgtagggagcctctgcgcgcgggggaagaagaatgccctgcctggcccattggcgcaggatttggtggccagccactggccgggggctggcagtggcagactagtgctgtcggctggagaagaagacagggagatggtggccgctgattga

SEQ ID NO: 22293 - DNA, 642 bp, Zea mays
  Peptide Sequence Number=SeqID_65668
atgcatcgcgggaaagtcgagttactgctgtggatgttgctcaaatctgttgggccgtctgggctcgagttggtccgatcttgtgttgatccacttcgccaagcgttcctccctaggcccacgaaggaatggccttgcgaaacatcgagcccagagcctttcgcgaggtcttctaaccttctagtggacccgggggatatctgtcccccacggctttcccattcagaaacaaggagcgaagagaaaaatcgcaacttcaacctctttcggcgcgccgaagcgaaaaaagttaaagttttgactcatcggtcaaagttgcactctttagagaagactgctgcagcgcctgctatagagaagatggaaattgaatatgtcaaagctaccccctcggcttcggagataatagctgctgctaccgccaaagctactgtccgtccggtagaagaaatagaagcaaagacagaggatcatctgaagctgcagagtcccccaaccacgacgtggttatcaaaattagcaattgctccagcagcaactcctaggaaaggaaggagaatggccagcattctggacgctgttatgaaatctacgaagatgccaactcctatttctactaaagcttccgaggacaagatttaa

SEQ ID NO: 22294 - DNA, 228 bp, Zea mays
  Peptide Sequence Number=SeqID_65669
atgaagtttcgggcttctctcagagggagcccctcttggttgatgtccaatagtgcaagggcagccgctggtgctattgccttcttcggctgcacgtcgaaggtggtcgctcgagctcctggtgacgaaggtggtcgtttgagttcaccggaggtgggcaccaattttggtaacttgttctcaaatgctgtgaatccagaacaaggcaacacaattgttaaggattaa

SEQ ID NO: 22295 - DNA, 1197 bp, Zea mays
  Peptide Sequence Number=SeqID_65670
atggaggacttgagtacaatgaccccgaccattgtgattggaaaaattgcggcatttgagatgtcaataaaaatgggtcgacaagtggagccaacttcttcaagaccatatgcttttgcatgtgatgaaagaaaaggcaaaaagaaggatcccactccaagttcctcaagtgaagaagaggagaaaaagcaaagaaagagaggatgctacgcatgcggggagaagggccactgtagggacagctattcaaatatggtcgaacccacaaaggggaggagcaaaggcatggcgcttacaagtgtcaaaacttgtgatgactctttaagcgaagatgaacctccaaggacacgcagccaccgatcctcatcacactcatcatggtcaacacgcaagtgctttatggcaagaggtaaaatgagcattccatcctctagtgatgatagcggtagcgatgatgaaggtttgctagaaaaatttgaaacatttgcaaatttgaattttgagctatcaactaaaattgagcaattagaatctaatgctccatcctcagctaccgatgatggccttattaaaaagaatgaaaaacttaaggctaagttagctagctctcaagaagccattgaaaatttgctagagaaaatggaaattcttagcatacataatgatgagctgactactaagctagaaaacaatggtagcaccccaggagcatctttagttgaaacaactgaaattattaagaaagatgcttctacttcttgttttgatttaattgatgatgctaaccccttcaatcaagttcttgttaagaatgttgttatagaaacatgttcggatgagattgcaatggagaatgagcaattaaagcaagaggtggctcaccttggcaaggccttgtatgacaagaaaggcaaagccaaacaaatccaaactcctcaggataacaccactgagggagtgaacaagcttgtggatggcaaaactgtgatttgtaggatatgtcacaaagaaggccacaagtctttccaatgtaaggcaaagtccggggataagcaaaagctcaagcaaaagccaacaagcaaaatctccaacacatacatcaacaaggtggataaaaagactactacaccatactttatcaaaaagaaaaagaatggaaaggtgatagtgttgatcacttgttctcaaatgctataa

SEQ ID NO: 22296 - DNA, 195 bp, Zea mays
  Peptide Sequence Number=SeqID_65671
atgacgaaggtgatgcctgccgaagatgttcaaaactcaaaaaatggaaattgcaatctcgctgatggagagtacgtgctcatccctgagcaaggagctgtccacgagcaagaccgggagcaggctcccgagactgccatcgaggatctccccgcagccccagctattgaaggcaagccccagttttatgcataa

SEQ ID NO: 22297 - DNA, 99 bp, Zea mays
  Peptide Sequence Number=SeqID_65672
atggcgcaagagacgcggcagcaacacccgcggtgccagaggagggttgagcaccatcagatcgacgccgacggcttgagttcctccacgacggcgtag

SEQ ID NO: 22298 - DNA, 255 bp, Zea mays
  Peptide Sequence Number=SeqID_65673
atggtggagccgcccaccacccgcggcgggccatcgccggagcaatccccatcaagagtccccgggcacaaaacgttgatcccgaccgagctacgcaaggcgagaatcaaggagtgtattatgaagggccttaccagcggctatgtcgcagtgcgctttgcaagcgtggatgaagaagatgaccagtggggcctgggcgacagtgacattagggttcacgagtgtcaggccagtggtccaacgattgttcactaa

SEQ ID NO: 22299 - DNA, 384 bp, Zea mays
  Peptide Sequence Number=SeqID_65674
atggctctagcactcggcaaagtacctgacatggggacccctctgacggattctttgtcgagtgctgtcaggcagacactcggcaaagtgctggaaacaggagaaatcaagttggagaagagatggctttgttcagccaaagacatctcagtttgggtgcaccggactgtccggtggtgcaccggacagtgtccggtgcgccaggccggcgtctgtcaactgactcctctcgggaagaaattaacggcgtacggctataaatcaccggactgtccgggcgagagactccaagttgtggagattccttgcaaacgagaaaagagtaaagtaaagaagaacaccgtggtattcaagttgatcattggatcacttgagaggagttga

SEQ ID NO: 22300 - DNA, 303 bp, Zea mays
  Peptide Sequence Number=SeqID_65675
atgcaggcggtatgcaactgcaccacggggacacaccctttcgacttcaacacatccagcgtggaggcccaggcccacacgtcatgtaaccggcgcgccggttactgtgtgcgaaaaactccaccgccacttgcgccagtaccgcgccttcttgactgcaggaccggtgccgtgactcgaggcaaccctgcgcacagcccaacagtgccaaccaagcgcatcggtcacggggaccgggaaaggggatactccgaaagggatccttctcttgcgaaggaagcgggccccgagccctcctactga

SEQ ID NO: 22301 - DNA, 684 bp, Zea mays
  Peptide Sequence Number=SeqID_65676
atgactgtagctgttgtagtgaaaattctaccaccaaattcagggcgttacagaatatgggtacgaggatgtaggcatcttggatggtctgccgacgccaagacatacactaggatctctcctccccgacgggtccctcccgggaggcaaaatctagatccgctgcgaagaagacgatgctctgcgccatcgtggatcgtccgaaccccaggcgcggaccgtccggacgtacgcagaggaggagccgctcctgcgccatgtcgcagaccgctcggccctgtggtgcggaccgtctgcgcctccgcagggagcaccgacaggtggttcgttctagtctttggcgaccagatcggcgccaccacactttttggcgattatgctaggaccaagtgtctagatctaaaatcaggctcccaaatgaccggttctaaagatcacatcgatatctccccagacaatatccttagaccggctatcgaaagcctgtcggtcgatgagcaacaactatatgaagaaatgatgagtcgaatgagggaggatgcacgtcgccaaatcgccaaggctgaggagggggcgacggagaaattcttgtcatacttcacggtggatcgccacgagaaaattgccaagcatggagagatcgagattgcatccctattaccttgcttgaaatctcaaatgtaa

SEQ ID NO: 22302 - DNA, 1317 bp, Zea mays
  Peptide Sequence Number=SeqID_65677
atggcgagcaagaaacctcctggccttaggctattcggaggtgccggttcgctgagaacctaccagacgctagtcctggtcctcacattcttcgcatacgcatgcttccacatgactcggaagatcacgagcatcgtcaagagcgcgctggacccccagacgaagatggggttctcccactggggacggctgcacctgcacacgagcgaggctccggctcttaacactggctggctgccgttcaacaccgctgacggctcagcgttgctcggcgagatagacgtcgcgttcctcgctgcgtattccatcgggatgttcttcgccggacacatcggggaccgcatagatctaaggatctttctgacgatcggcatggtcgggactgccgtgttcacggctctcttcggcgctggatactggctgaacgtccacagcttctactatttcctggtcgttcagatggtttccggcctgtttcagtcggttgggtggccgtcggttgtcgcggttgtcggtaactggttcgggaagagcaagagggggctgatcatgggcgtatggaacgcgcacacttctatcgggaacatagctggctcgctgcttgccgccttcctcctcgagttcgggtggggctggtcgttcgccgtccctagccttgtcatggctcttgttgggttggtggtgtatgtttccttgccggttagccctgaggtgatggagatagacattgctggcagtggtgaattgaactgcatcggtggcgtgtacctctccgatgcaatggccggcagcttatcgacgatcttcgacgtcggtggcgtgttgggaggagtcctcgccggccacatctccgaccgtctaaacgcgcgggcgatcacagctgccagcttcatgtactgcgcgatacccgccctcttcctgtaccgcgcgtacgggagcacgtcgatggcgtggaacgtctgcctcatgttcgtcaccggaatgttcgtgaacgggccgtacgccctgatcacgactgcggtgtcggccgacctcggcacccacagctccttgaacggcaactcccgggcgctggccaccgtgacggccataatcgacgggacggggtctattggagctgccattggaccgctgctgacagggtacatctcgtccaagagctggagcgctgtgttcaccatgctgatggcggcggctctccttgccgggctcctcttgaccaagcttgtgtgcgccgagctgcaagggaaaacacctaccagtgcgagcaaggacgttgctgatgcgcaaggtacttattactcggatgaagtgtaa

SEQ ID NO: 22303 - DNA, 522 bp, Zea mays
  Peptide Sequence Number=SeqID_65678
atggcgctcggcaagggccatttgcggacgtctacagctgacggccgtcagcctttaccgatggccgaaaagccagcactcggaaaagcagattctttgtcgagtgtcaagtatctggcactctgcaaagagagtgtctgccgagtgccttctgaggacgctcggcacagtatgttgaacacatctctgtcgagtgcccgtccgcggtcactcggcaaagacatctttgccgagtggcaattgacagacactggacatagatgtgttctagattcttcgccgagtgtccacagaaggctctcggtaaagaccatgtttgccgagagccagatatttgacactggacaaagaattctgctttgccgagtgctggctttcggccctcggcaaaggctgacggccgtcagctgtagacggccgctaacggccctttgccgagcgccatctttgccgagtgtttgccgctcggcaaagcagtattttccgagtgtttctctgtgccgagtgtcccgcactcggtaa

SEQ ID NO: 22304 - DNA, 351 bp, Zea mays
  Peptide Sequence Number=SeqID_65679
aaccctgaggaaatcccgtgggatgaggctggtgctgagtatgtcgtggagtccatcggtgtattcacttacaaggataagactattgcacatctgaagaaagtggaacaagagaagctggagaagctcgcacgcaagggccccagcttaggtgagcaaccctcgtcaaccacaggctctgcagcaagtgatgtgaaggccgatgctgggccaacggagtcaacatctgcaagtgtgtcgaccgacaagaacagaaactatgctgttctggcaggcgtagttgctgccctgggtgacctgggttggtatctattgtcaaagcctaagaagtcggaggtggttgtggactaa

SEQ ID NO: 22305 - DNA, 99 bp, Zea mays
  Peptide Sequence Number=SeqID_65680
atggcccaagggcacatttccctttcagccactcgcagcggtagtggcggtggatgtactcgttgtcccgcagggcggacccaactaagctctgcatga

SEQ ID NO: 22306 - DNA, 1000 bp, Zea mays
  Peptide Sequence Number=SeqID_65681
atgagtgactcccaagcccaaatcaccgtccgccgccgcaagcgcgcgatccttctcgggctgggtcccacgttctcctcagaggatggcatgatgaaagtgggctcgtgctcacgaaccatacttgactccgggtttgtgcagtgtactcttagcggcgtcggtcagaccatccgcctctctccttccagcatcaagcatttgtgtcatctgagtttgtgtcgcgtcctcttcgaccgtctcggggaagaggttctgtgcgagcttgttggggtcgacggtggggtagagggagttgcccgtggcggcgccggtggaggtggtgggtgcggagaagaaaggggtgttgagatcagggtgggactggtccacatccgggtagaggctctgcttggcattcgaggaagcgaaagccatggttgcgtagctgtacttgatgatgaggccgtcatgaggaaacaactccacgaggcgagagaacagctggtgagacaaaggttgttgcctcccaagactggccctaggtggctaactataatggcattatccgtgcacaaggtcaccgtcaagagctcatcgatgggctggaaaacattgtcaaagacccaagcagctgatcttctacaggcatggacagctctttacaatgagaagccaaagatcaccttcgtagtggtgcagaagaggcaccacacaaggctcttccccagcaaaccaaaggatcgccaatacgcggacaagagtgggaatattcgagctggcaccgtagttgataataatatctgccacccaacagaatttgatttcttcctgtgcggccatgctggggccaaggtgtccacacccacatgggtctgccgcgcctccgcatccgcccacattcgcccgtggtcgcaccccgccccgcatctcgccgacagccccaccgccctcccgcgctccatccctccatccatccaccgacagccccgcatcctcgcctcgctcacctcctccgccg

SEQ ID NO: 22307 - DNA, 2352 bp, Zea mays
  Peptide Sequence Number=SeqID_65682
atggcgacaaccatcaccaggctcttgcaccacctagcgctgttcctcctcattgtcgagttcgccgacgcagttctcatcccaaagaccaagaaccacgctgcgttgaagcctcaggcatcgagcaccacctacatcgttcatgccaacgacctcgccaagccgccccactttcgctccctggaggagtggtaccgttccatggtgatcacccacgcctcttccactcgggcggcgagctccagcagcatcctgtacacctacgacaccgtcatgcacgggttcgcggtccagctcactggcgacgaggcccggctcatgtccagcgcgcccggcgtcatcggcgtgtacgaggacagggtgctctaccctcaaaccacgaggtcgccggggttcatgggtctcgaacccggcaacggcgcctggaagcaggccgacttcggtgacggcgtcatcatcggcttcgtcgacaccggcatatggcccgagagcgcgagcttcgacgacagcgggctcggccccgtccggtcgagctggcggggcaagtgcgtcgacgcccacgacttcaacgctagcttgtgcaacaacaagctggtcggagccaaggccttcatcactcctgctgcggacgccgtggaagagaggaagagccgtggcgtctcctccccgagggacaaggaaggacacggcacgcacgtggcctcgacggccgccggtgctgaggtccggaacgccagcctctacatgttctcccgggggaccgcgcggggaatggcacccaaggcgaggatcgccatgtacaaggcatgcggcgtgggaggctactgcaggaatgcggacatcgtagcggcggtggacgctgcggtgaaggacggcgttgacatcatttccatgtccgtcggaggagctcgtcccacagccttccacgacgacgtcgtcgcgatcgccctcttcggtgcggagcgcaaaggcgtcttcgtcgtcctctctgctggcaacaacggcccgcaggcaactacggtgatcaactcggcgccgtggatgaccaccgtaggcgccgccaccgtggaccggcagtacccggcgcagctcacgctcgggaacggcgtcgtgctcgccggtcagtccctttataccatgcatgccaagggcacacacatgatccagttagtgtccacggacgtcttcaataggtggcacagctggacgcccgacacggtcatgggaaaaatcatggtgtgcatgcacgaagcaagcgacgtggatggcatcatcttgcagaatgctggtggagcagggatagttgatgtggatcctcaggagtggtctcgagatggttccgtggcatatgccttcactcttccgggtctcacgcttagctacaccgctggcgagaagctcagggcgtacatggcatcggtgccctatccggtggcgtccttcagcttcgcctgtgagacggtcattggccgcaacaaccgggcgccggtggtggcgggattctcgtcgcggggccccaaccttgtcgcactagagctcctcaagcccgacgtcgtcgcgccgggagtgaacattcttgcggcctggtcgggcgacgcatctgtctcgggatattccgacgacggcaggagagccgactacaacatcatctccggaacgtccatgtcgtgcccccacgtcgctggcatcgcggcgctgatcaagaagaagcacccaagctggacgcctgccatggtacggtcggcgctgatgacgacggcccgtacggtcgacaaccgaggcggatatatcctcgacaacggtcatagcgtcatcgtgggccgcagaatcgacaacttcagggtcgcgacgccgctggtggccggggccgggcacgtccagccggacctcgcgctggacccgggcctcgtctacgacgccggcgagcacgactacgtccacttcctgtgcgccctgaactacaccgctgagcagatgcggcggttcgttccggacttcgtcaactgcacaggaacgctcgccggcggccccgccagcctcaactacccgtcgttcgtcgtggccttcgagaactgcaccgacgtacgcacgctgacgcggacgctgaccaaagtgtccgaggaggcggagacgtacagtgtcaccgtcgtggcgccggagcacgtgaaggtgaccgtcacgccgacgaccttggagttcaaggagcagatggagacgaggagctactcggtggagttcagaaatgaagccggagggaacccggaggcaggcgggtgggacttcgggcagatcagctgggagaacgggaagcataaagtcaggagcccggtggcgttccactggaagaactga

SEQ ID NO: 22308 - DNA, 414 bp, Zea mays
  Peptide Sequence Number=SeqID_65683
atggcgcacccgatgtacggctccggaccgctccgatccaggaacgcggcgagctcggacgaaatccagctgcggatcgacccggtgcacggggacctcgacgaggagatcgacgggctgcactccagggtccgcatgctcaaagggggtccttggttatccgcgatttttgaactagaaaacatattggttggggtggcccaggagataaattctgaagccaagttccagaatgattttcttcatgaactgcaaatgacccttgcaaaagctcaggctggagtgaagaacaacatgcggagattgaacaagagcatcatccagcagggctcaaaccatgttctctatgttgtcctctttgcactgttttgcttctttattgtctacctcttgtcaaagttctctagaagatag

SEQ ID NO: 22309 - DNA, 108 bp, Zea mays
  Peptide Sequence Number=SeqID_65684
atgacggcatcggatccaacaccaaatatggagatacggttgacaggtgtacttagcaatggtgcaaatcatgcccatccacgagatcttggcctcaacgccgattga

SEQ ID NO: 22310 - DNA, 948 bp, Zea mays
  Peptide Sequence Number=SeqID_65685
atggccaccgaactagatgtgagcaagtctcgccgcttcgacattgccatgtcgaggcgaacccggcgatcgacaagcctggtagcctgctttcaagatcagtatacaccatccctggcacagcatcgccaccaagagctgaaggcgtttctgcaatgccaggatgaagagctgaaggcactccagcgatgcgaggatgcagagcacaagacactgtgtttgaatgaagacgaggagctgaagattccacaagtaccaatgcagtatgaagatgacaagcaagagacgccagagcaatatgaagatgggcaggagaaggagtcgcagcaatatccagaccaagagcaggagataccagattcatacgaagggaagatgctagagcagtatcaagatgaagatgatgagctgccatcacaataccaagaccatgagctggtgacacagaagctacctgaggaagatgaggggactgcatcagagcgattccaagacgaggagaggaaggaacttcatcagcaccaagaggcagatgagcagacgtcacagtctgaggacgaggaggagcccaagtctcagcaggaacgccatgacgtcgagcagaaggcaccgaagcaattccaagtcttgaagaaggtagccgcgccaccacgtcctgtggagaacgtgccccggttctccctccaggagcttatacggcagaagcagcagcttccaaccggcgaggcgatggctaccagcaaggtaggcggccgtggggagagtgtcctcgctgaccatatggtttcaggagcaggtgcagcagccgcagagggcacggcactggcgatggtgataaagcgacccgagggagggaagaagcccatgggcatgatacgccggtgcgtcaaggccctgaaccagatgatcaaggccaagcacgggtccaagaagaacctgcatttctag

SEQ ID NO: 22311 - DNA, 246 bp, Zea mays
  Peptide Sequence Number=SeqID_65686
atggccagaataacagagaacagtgaaatccccttcaaactagaagcgtcagtgtgcagtgtgcaggttccagtcttccagagatgccgcgcaggccaggctgcgtttctgtggtctcatctcctgtgggcacctgggttcgtcggacttagagatggcaatggggacctgattctcgatttcccgcggcgaattcctccattagaggatgaggatgggaacgaaacttccctcgtggggatataa

SEQ ID NO: 22312 - DNA, 1274 bp, Zea mays
  Peptide Sequence Number=SeqID_65687
atggcaggttccgtggcaatcgtgggcatcttcgtcgccctcctcgccgtggccggcgaggcggctgtgttcacggtggtgaaccagtgcccgttcaccgtgtgggccgcgtccgtgccggtgggcggcgggcggcagctgaaccgcggcgagagctggcggatcacggcccccgcgggcacgacggccgcgcgcatctgggcgcgcacggggtgcaagttcgacgcgagcgggcgcgggagctgccgcacgggggactgcggcggcgtgctgcagtgcactgggtacgggcgcgcgcccaacacgctggcggagtacgcgctgaagcagttcaacaacctcgacttcttcgacatctccctcatcgacggcttcaacgtgcccatgagcttcctccccgacggcgggtccgggtgcagccgcggcccgcgctgcgccgtggacgtgaacgcgcgctgccctgccgagctgcggcaggacggcgtgtgcaacaacgcgtgccccgtgttcaagaaggacgagtactgctgcgtcggctcggcggccaacgactgccacccgaccaactactccaggtacttcaaggggcagtgccccgacgcgtacagctaccccaaggatgacgccaccagcaccttcacctgccccgccggaaccaactacaaggtcgtcttctgccctctccttagagggctctccatgttcactgaaggcttcgacgcgacgacctttgcttgtcggtttgggaactgcttcatggtgccaaagtttcaactcaaaaccaatacaaagattaaaaagagttcaagaagaaaggagcaaaggaaaccgaagtgctccctggtctggcgcaccggacagtccgatgagccaccggacagtgtccggtgcaccagagaggatcgacctcaaactcttcagcttcgggtttctcaggcgcagctccgctataattcaccggactgtccggtgcaccaccggactgtccggtgcaccaccggactgtccggtgcaccaccggactatccggtgcgccagcggagcaacgactatctgcacgcaacggtcgactctgacagtgatcagtgcagaacagtacatgcggcagaagtcagagcagaagatcagaggggcactggactgtccggtgtggcatcggactgtccggtgccgcatgaggacaaagcctccaacggtcgaccagctccaagccctaacgggaggatgacgtggcgacgcaccggacactgtccggtggcgcaccggactgtccg

SEQ ID NO: 22313 - DNA, 408 bp, Zea mays
  Peptide Sequence Number=SeqID_65688
atggagcctggcggagggacagctgtcggagctgttgagttcttgctgacgtcctcttgcttccgtaagggggctgagagccgccgtcgtcacagagtatgcggggcgccatcattgcctatctggcggagcgagccagatgggacgccggtcttgttccccgtggcccgagtcagctcagggttgggcgacgtggaagctcctccgaagccgaggtcgagtctgtcttccgtggccgaggtcgagtccgagcccctggttcgggcgaggcggagaccgccggctgaggccggggcggagtttgcccctcggtcgggcgaagcggagttcgtcgtctttctgggacccgagcccgagtccgagcccttgggtcgggcggagcggagttcaccatcttccggggcttag

SEQ ID NO: 22314 - DNA, 471 bp, Zea mays
  Peptide Sequence Number=SeqID_65689
atggcgcctcctgttgacgtggctggtctacgccctaggttgggcgacgtggaagctcctccgaagccgaggtcgagtctgtcttccgtggccgaggtcgagtccgagcccctggttcgggcgaggcggagactaccggctgaggccggggcggagtccgagccctggggtcgggcgaagcggagttcgtcgtcttctgggggccgagcccgagtccgagccctagaatatttgttgtgcgtcggtggtggaactgaggaagtgaacaacaatgatgatgttcgtcttccagatgaggtatgtgtgccatatattggtgatgaccgcgaccttgacaaattgatagatgacatttaccccaatctaaatgaaaacatgtctaatacaagctatatcacttcaagagtaatattgactactcagaacaactgggtggatatgataaatatgaggatgatcaatcgtttctaa

SEQ ID NO: 22315 - DNA, 456 bp, Zea mays
  Peptide Sequence Number=SeqID_65690
atgacggttgttggaaagcacctctccattgttcaggtgaacgaaagaccaccatcgcaagagacggacgatgagcaaatgatagcatttaatgtacaccgtgtcagagcatcagctatttttctagcagctttcccatcgctcctaaggaagtatgttaaggctctgctccatacctgggctagaggacgaggtgcaatgcctcttgtttcttttatgttccttcgagacttgtgcattcaaataggttcagattgccttgatacttgcctcaaggtctattttcttatatcatttcgctatggaacacacctttcgaagaagcttgtaacatttttcttttcttggcaggttgacaagaaaacagatgtaaagattcttcgaaaaaactttgtgattgatctattaaattacgagaacaatccgtgtctatgtatcatccctgcaaacatataa

SEQ ID NO: 22316 - DNA, 393 bp, Zea mays
  Peptide Sequence Number=SeqID_65691
atggaggtggcccatggaatgacgggcagctcctcagcggtgatggtcgccgccacctcgccctactccttttccatctccggctccacggtggagaccatcaagaccgtgcccacccgccgaggacccgttgcgcaggaaagacttagcaaagcggcagatctagtgagacattgtgtggagacgtgcgctgactcaccatgccgcttcaaggacggagatgccgatggcagagaaggtgctggaggcggcggaaggggcacaagccatggagcgccgcgtcgccgtcaccatcccacgcgagcatcgtcaggaggtggttgcagtgtgcagggagggccgaggacggaggcgctgatggagacgatgatgtcgatggcggagaaggtgtag

SEQ ID NO: 22317 - DNA, 1089 bp, Zea mays
  Peptide Sequence Number=SeqID_65692
atggccgcctcctcccgccgcgcgtctcaattgctggggtccgcggcctcccgcctcctcctcgggcggggcttcgccgcggcagccgccgcggcgccctcgccggcggtcttcgtcgacaagagcacccgtgtgatctgccagggcatcacggggaagaacggcaccttccacaccgagcaggccatcgagtacggcaccaacatggttggtggagtgactcccaagaaaggtggaactgaacatttagggctcccagtgtttaactctgtagcagaagctaaggctgaaacaaaagccaatgcatctgttatatatgttccaccaccatttgctgccgccgctataatggaggcaatggaggctgagctcgaccttgttgtctgcattacggaaggaattccccagcatgacatggtgaaagtgaaggctgcactaaatagacaatctaaaactcgattgattgggccaaattgccctggtatcattaagcctgcggtgtttcaaacaacagctgtaggcttggggcagtcaacttgtgtaggcattggtggtgacccattcaatggcacaaattttgttgattgccttgaaaaatttgtcgatgaccctcagacagaaggcattgttctcatcggtgaaattggaggtacggctgaggaggatgctgcaacgttcatccagaatgttggtttaaaaaagactacatgtccaacaaataagtgttacagaaatgatgatatatgtgataggcttggggaaagcaaaacacaaaagcctgttgttgcattcattgctggacttacggcacccccaggccgtcgcatgggtcatgctggagctatcgtggcaggaggaaagggtactgcccaggacaaaatcaaggcactcagagaggctggtgttaccgttgtcgagtcaccagcgaagattggttctaccatgtttgaaatcttcaaacagcgtggaatggtttacttttctgtttgcttgtattatattatcagcgctacattgcccacacagctgtggaagattgctttgcttgtgtcatgtttaataggtttctcacgactccgtgttggctga

SEQ ID NO: 22318 - DNA, 657 bp, Zea mays
  Peptide Sequence Number=SeqID_65693
atggcggaaagtagattggacactggtcctattgttcctgtagccatcctgtcttcagcggggttggcgggagaggaggcggcctcacacctttctttgttggtacagttggccgaggccaggctcgggcgagacaaagatttctcccgaggcaggggccagccaaggtcgggctcgtgccgggacctcgcccgagatgccctcgggcgaggtggactgatggacatgtgtttctcgctcaaaggtgtccttggaagagcaaagtgggaaccgaaggccctctggtctgggagcaccggactgtccggtgtacaccggacagtgtccggtgcaccagaggactccagctcaaactcgccaccttcgggaatttccagaggcgactccgctataattcaccggactgtctggtgtacaccggacagtgtccggtgcgccaaggaggagcggcctcaggaactcgccaccttcgggaaaactccaacggctagtccgctaaaattcaccggactgtccggtgtgcaccggactgtccggtgcaaccccggagcaacggctatctccgcgccaacggctctctgccgcgcatttaatgcgcgctctgcgcgcgcagatgtcaggcgcgcccactccggcacaccggacaaggaacagtag

SEQ ID NO: 22319 - DNA, 1131 bp, Zea mays
  Peptide Sequence Number=SeqID_65694
atggccgaggagctcccactgtcccgcacgcgcgcgcccgttgcgttgcttctccgtctccccgaattctccctccgtctcggccgtcggcactcatctactgtccagtgtccacacaccaacgcgcgcgcggcgcggcgcacatggaaatggaggggctacaacattcgctaccagcacgctgggacagcaggccctgcattggttctggttcatgggtttggggcaaacagtgaccattggcggaaaaatatgtctgttctagccatggcacacagggtatatgctatagatctaattggttatggctattctgataagcctaacccacgtgagatcgaagagaacttttatacttttgagacatggggagaacagctgaattcattttgtgctgaagttgtccagagtgaagttttcttcatatgcaattcaattggaggagttgttggtctgcaggcagctgttatggaacctaaaacatgtaagggaattgttttattggatatttcactaaggatgcttcatatcaaaaagcagccatggtttggaaagcctttcatcaaatcttttcaaagtctcctaaggaacactattgttgggaagctattttttaatgctgttgctacaccagaatctgtgaaaaatattctttgccagtgctatcatgacacatctgcagtgacagatgagctagttcagattattctacagcctggtcttgatcctggagcagtggatgtattccttgagttcatctgctactctggaggacctctacctgaagagttgcttccattggtgaagtgtccagttttggtagcatggggggagaaggacccatgggagcctgttgagcttggaagagcctatgcatcttttgatacagttgaagattttgttgtcttgccagatgttggacactgccctcagggcctcgtgctggaaaatgtgaacgtaaggttatgttatttacaaatgggtcctgttatagctacttacttgcatctgagagccgggggcaaacatcatttgacagattataatttgattataagagatcatgaagaaatatttgatttcataacagcaaaagaacatgtcatctcagagcagagagaattcctataa

SEQ ID NO: 22320 - DNA, 513 bp, Zea mays
  Peptide Sequence Number=SeqID_65695
atggcgcctcctgtcgacgtggtcggtccgtgccctaggttgggcgaggtggaggctcctccaaggtcgaggtcgagtctgtcttccaaggtcgaggtcgagtccgagcccccgggtcggacaaggcggagaccgtcggctgaggccagggctgagtccgagccctgggttcgggcgaagtggagttcgtcgtccttcaaggctgagcccgagtctgagccctggggtcgggcggagcggaagcggagttcgtcgtcttccggggccgagccagagtccaagccctggggtcgggcggagcggagtttcccatggcgcctagggctggacttggctgctgccatctttgcattaaatgcccctgcgatttggtcggttggcgtggcgatttggccaaggttgcttcttggtgaagactgggcctcgggcgagccgaagctttgtgctgatgggggttaccagctgagatttaggagtcttgagggtacccctaattatggtccccgacagtag

SEQ ID NO: 22321 - DNA, 246 bp, Zea mays
  Peptide Sequence Number=SeqID_65696
atggccatccgattgaggatcaatgtctttgagtttaagacgctgcaagccaacctggtgattagaaaagcatgggtatatatgggtatagccactttattatgcaggataaatgatatctttaaagcatttataggtttggtcttggtctttggtgtctccatctgggtttgggacaagaggctaagatacatctgttatgtaggtcaagttgttgggtatggccgagttgatctaggtcactag

SEQ ID NO: 22322 - DNA, 57 bp, Zea mays
  Peptide Sequence Number=SeqID_65697
atggccatccgattgaggatcaatgtctttgagtttaagacgctgcaagccaacctg

SEQ ID NO: 22323 - DNA, 972 bp, Zea mays
  Peptide Sequence Number=SeqID_65698
atgaacgcgctctcccgcgaagggtgccggcacttcgaggtcttcgaccaagccgatgaagattttgagcgagagatctacaaggttgaggaccccatagtgaaggaatccgccggagccatctacgaccggatgtggggtccgcacggtcgcgaggtggtcagggagcgggccgagacggcgagggctcaggcggcgcgtggcgagagggtagatgacttcggggcgttgaacagcgcgctgcctgacccggagccgaccccggcggaggccgtgtccggggccgccctggagccacccccggagactgcggaaggcgcaccggatgcccccgcatccgctgcggccggtggagacctgcccctagagaccgccgaaggcgcacctgatgcccccgctgccgctgcgccgagtgctgaagatcctgcgacggtggcggcggaggcgacagcggaggcaacggcggaggcaacggcggaggcaacagcggggtcttcgcaggttcaagatttcgggcctgcgcacgcaaccgccactactaaatttttggcggcttcgaccgtggatggtggtaataaatgtgatggttctgcctctaagttttctgattttgctaactctgggagctcgattgagtggactgaggagtcgttggaggaggacttggactactttgcggccttggatgtggctacgacggaggcttcaccgcacgctgcagacacagaagatgtgcctggtcctagtaccgggcgccggcgacgaagggcggttgcgaagcgcagagtgagtgaagcggagggaggtcggcttcgtgtgagtagggctggccggcaggaactattgactttgccagccgccgtcagtacaggtgaagggaaattgcgaagtctttttgcgggtgaggagcttaggataatgttatttaattatagggagatgggaattattcccaaggctgagccgatgtag

SEQ ID NO: 22324 - DNA, 396 bp, Zea mays
  Peptide Sequence Number=SeqID_65699
atgggcacccggtcccaagcaggtgtccccttggccggcgtgggctgcgtcgctctcgcggatcatctccatgcgacgtcatggccatccaaatttcggtcgcacttgccggaaaagtacgacgtcgggtggctcaagtgccgtccccgggatggtaggaagaaaaagaagaaggaccgcgactaccagaagtcgcggtccatcgctctggtcgttgcagccgcgaccgggggccggggcgaccgcaacaaacgcccacggtcgcagaggggtaacagcggctcatgtcctatgcactcctacggtcgccactgtaccgcggagtgtcgtgagatcattgacctcgcaaaacgcgtcagagagcagcacgagcagtcttccaaggacagcgtgtag

SEQ ID NO: 22325 - DNA, 192 bp, Zea mays
  Peptide Sequence Number=SeqID_65700
atggaggcagccggcctcggtctccgatccccggtgtggcgtggccagccagcgcggcccaccagcacagacttccaccggcgagccttcttctctggtggtgacgaggatgatgtttatgattatggtaatggagaaggtgaagccgtggaaggagacttccaggagttccaagattacgacgagtcctag

SEQ ID NO: 22326 - DNA, 306 bp, Zea mays
  Peptide Sequence Number=SeqID_65701
atgccgccgtggataggccggagcacacgccgccgacgtgctcgcccgcctgctcacgtggaccgggcgattccgacaatccccgacgacgagccgtacctcgacgtgatcgccagaccctccccgagccaaccctacccttcgccggacctcctcgccgccgactgtaatcttgcggacggagagtacatcctcgtgccggagcaaggagctgcccaggaggttgcccccgatccagcaccagagccagcaccagaggacctgcctgccactgctttggaaggcaagccccggttttatgcataa

SEQ ID NO: 22327 - DNA, 327 bp, Zea mays
  Peptide Sequence Number=SeqID_65702
atgggtcaagtgtttgaactaggtagaaagaattctagttgcagatccactcttagtaagcatttctgcaaaacagagtctttgattattgagaagccttaccttgactcccttacaaccagcatacccttgagagtcttttctttagtcgggttgccgctgccggaggtcgctgcggctgtcctccaccatgctactgagggtggggctggcgctgcaagagctgtcacagaatctcgttctactgggccattagctccttttacactgtgggagctggaggaggtggcgggggaacttgctcattttgcctgtgacgctgcctag

SEQ ID NO: 22328 - DNA, 950 bp, Zea mays
  Peptide Sequence Number=SeqID_65703
cgtcagcgtccacaccctgcccccgcccccagccccccaccccgcccgtcctcatcccgcgcgctccgctcgactaccaaaatcccaccgcccacctctgcaatggccacctcccgcgcccccaccccaacgtgcggtgtcatcctccctccccccaccccaccccgctccgtcatcctccctcggtttcccttctatctgccctccgaatcccgctcacctcgctgatcatggtggagcggagggcgaagaagcggatggtgttcgtgatgaacaagctcatgtggctggcgtgcctcttcatctcggtggccttcatcgcgctgacctacgtggtggtggggcgcgacgactggtggctggcctggtgcaccatgggcatcggcgccgcgatcatgctcaccaccctcggctccatgtgctactgcatcatcgcgcacaggctggaggagaagaacaccaggaagatcaggagggcctccgcgagccagtcccgcggctcgtggtcccgatcagtcgactcggacgaggagatacttaacagcgagtacaagacgaagataggttgcggcaccacatcagtcttcttcaaccaaaggactgaaggcccttcctgcggaaccaagttcaagtcacttgaccgcgcgattctcgcgtcgcagcgccgcacccgcccatctcggcgcgaccgcgttatcgccctcgaccctcgcaacgtcgccctgctcatcttcaaggccctcgcccttgacctacagggccaccacctccctgcgatgcacgcagtgaggcgcggcgcctacaagcagtgtgtcgacttcagcccctcgctattgggagatgttgtggttgctggtgggagatgttggggaatgctctctgttcgtggggatgagttccatgccatggttaactatttcccaaaaaatcagcaggtttacctggcgtaa

SEQ ID NO: 22329 - DNA, 2187 bp, Zea mays
  Peptide Sequence Number=SeqID_65704
atggacatggcattgcccgttgtgaatgccacagcggcggtgctcgcccgtgtctcggctgcgttcaatgccccacttgcccgtgcagtcgtcttcggggtccatatcgatgggcacttggtcgtggaagggcttcttattgcagtcatcgtgtttcagctctccaggaagagctacaaaccaccaaagaaaccacttactgaaaaggagattgatgagctatgtgatgagtgggagccagagccgctatgccctccagtcaaggagggggctcgaattgatactccaatgttggaaagtgctgctggaccacatacgattgttgatggtaaagaagttgtgaactttgcatcagcaaactacctcggtttaattggcaatgagaagattattgattcttgcattggttcactggagaaatatggtgttgggtcttgtggtccacgtggcttttatggaacaattgatgtccatcttgactgtgagtcaaaaatagctaaattcctgggcactccagactccattctgtattcatatgggatttctacaatattcagtgtgatacctgccttttgtaagaaaggagatatcatagtcgctgatgagggtgttcactgggcagtgcaaaatggtctccatttatcaagaagcactgtggtgtacttcaagcacaatgatatggtttcacttgcaagcactttggaaaaacttacacatggaaataaacgtgctgaaaagattagacgctacattgttgtagaatccatttaccagaattctggccaaattgcccccttggatgaaatcgtcaggttgaaggagaaatatcggttccgtgttattctggaggagagccattcttttggtgtgcttggcaagtctgggcgtggccttgctgaacattatggagttcctattgaaaaaattgatataattactgctggaatgggaaatgcattagctaccgatggtggattttgtacaggaagtgtcagagttgttgatcatcagcgtctaagcagctctggatatgttttctctgcatctctgccaccttatcttgccactgctgctgtttctgctgtcaactacctggagcagaatcccgcagttcttgcaaatctaaggagcaatattgctcttttgcataaagaattatcagatactccagggctagaaattttcagccatgttttgtcacctattgtcttccttaagctgaagaaatcgacaggttctcctaccactgacctagaccttcttgaaactattgctggcagggggttcagcaagtcgctggccatgacggtgctctccgagatcagggacaagaccttcttcgccgtcgcggtgcaggagtgctacgagctaggatgttgcgacttcgccgacagcgaggttgttgccctcaccgagaacatcggcaagccgctcgccgaggtgctcaaggagctcgggaagagggtcccagactcccttgtgaagacccgcatcgaggatgatggcttcactatcaaaatgttcgaggtgatcaggatgctggaaggagacaaactcatagagagatgggaggtgtcacagaacgtggacacgccagagttcgtctcatcggagctcctacttcaaaagtacatggattttgcagcagacgaatgctcacttggtgtagatgccatggagctctctggaccaagcttctggccaccaaaagctgctgcgaactaccaaacactcggcttttcagccagcttctataaaatccgtttggggctccggcgcggtccggccagcacgtggttccccctcggcaacgactccgacaacgacgccgacgctgcattgttccacttccacatgcggaagagtcctgggcaaacattgaccacatccacgccagccgcagagccgctgcgcctgcgtgcgtcaaccgtccaccgtgcacggcgcacgaggtcgtcgtcgtcctcgcccgctccgcatacacctgccggccggccggtaaagcgcacccatgacccaacccaacgccgccgggacccggccgggtctggatcgcagcgaatcgcagctactcggtcctcggtgtggacacggggaggcccagagatcgtttccagtaaaaggcacacggccacatgccaggagtggggacggccgggcggtgctgatccgcggtcggagccgtga

SEQ ID NO: 22330 - DNA, 243 bp, Zea mays
  Peptide Sequence Number=SeqID_65705
atggtgtggagcagcggcgagggagagagaaccgagaggagggagcgagctcgggatagggagagagaagtctggctccattttataggcaagggcaagggggatgagagggcggccggctatggcttcaagctgtcatcaacgccgtctatgaagagagggattaatgggaaagtagaaaccgacgaaatgaagcttccaataacacagagcagagaagaacggtcgcaattacttcattaa

SEQ ID NO: 22331 - DNA, 288 bp, Zea mays
  Peptide Sequence Number=SeqID_65706
atgccatggagtcgcgcccagccgccgaacaccgccaggaccccggcagcacccgcgcccctgcagcgcgacgcgctaggaaacccgcctcgagccgtcccggtgcccctgcgtccgcaaccccgacggccacgctctgtgccctgcttccggacccgtgccaggccttggccacgcagcgagtgcccaacccgacgccctgctcatccgcaagaactggcagcgaagcttgtcgttaagccgattcattcccagcggcaacaaccgcatccatcctcttctttgtga

SEQ ID NO: 22332 - DNA, 66 bp, Zea mays
  Peptide Sequence Number=SeqID_65707
atggcggcggctgctaggagccaggggcggccggctcatgggcctaatgggccaaggtggggataa

SEQ ID NO: 22333 - DNA, 678 bp, Zea mays
  Peptide Sequence Number=SeqID_65708
atggtgcagacaaaaaatgtctcatcgtcagggggaggagacgacgaggaccctcctcgcccctttaggcaggtcaaggggaagacggtttatcttgagcagcatgagggcatgaagaagtgccgcatggaaagagccgctcctgcagcacttgcagcgacaacagcagtagagcaggctgagcagggaggacatttgaagatctcttctgatcagatagcctacagagttcttcgcctcacatctcggcctcgctccactgctccctccacaccttccgccattgtgtctactccacctcccacttcaccagctctagttgctccggagccatccaccacttcctctatacccaccacctccaccactctagcttccattgttccccctctcgctcctatttctgctccgcctattccaccacctcgcttcagggagcgtgacgagactgaggtgcgaccaatagctcctgatcctcgtctgcttgaccttcagcgtgccactgcaacctggactattcaagaccatcaggacactcttcagcagcagctcttggcagacagggccaagcaccgggcgtctatgacacatatccttcagcacaccggtgttaagctcccaccagtccagtctgcccctcctccagctcttcgggcagctatcgtaccagcactttag

SEQ ID NO: 22334 - DNA, 186 bp, Zea mays
  Peptide Sequence Number=SeqID_65709
atggagacggcgcgggcggacggctccgaggtggctgagggcgatgtggaggagagagaggagaaccgcacggggggagagagaacgtgggcaccaccagacgatggcggcggctgggcaactgcccacacgcgcacgcgcgcgggcgatctgttgagggggcggctgggccgtgcggaggactag

SEQ ID NO: 22335 - DNA, 1137 bp, Zea mays
  Peptide Sequence Number=SeqID_65710
atggcgcccgtagcacgtggccttgcccgcggcacagctcgtcgtgcccggcacgatgtgaggcgcgcgaccccctcgcgtggccgtggcgcccccgcgtggcgcgcggtgctcggcgtgcggccctggcatgcggcggtccccctcacgccccctggtctggccatggcctggccgatgctccggcgcggctcagcccgcccgctgggtggtgatgaggatgatggttttggttatgactatggtaatggagaagatgaagccgtggaggaagacttccaggagttccaagaccatttggagagattgcaccaccgcctgcatgacgagcagcagcgtcggcgacaggagctggagcagcagggctcttcttcctcgcctcagcaggaggtggagtctatgaggagctgctcccctgtgctcccgctggaggcgccacctgctagagtagctgtcggaggagaccccgatgatgaaggtggcgatagcagctcgagctacagcaccgacctttcagccgggcaggagccggagggatgggttgctcgacccatcactcgcgacgccgctcgcgggtgtcacttccacgacacgctcgacaccctactgcgccaggcactcgaccgacacacttggtccatcgagtatcgttgtgttgtcttccagcacagttgcagggtttacccggaccgctgggaggcgaattgcttggtgcgccgtccggagaacagtattcggggtgcggaggtttgctcagagcactactctatctctgagcgggactcagctgaggcagccatgcaagatgtcgcacggcgtgcgctttcgcactactgctcagtgctcggcgggatagccgatggtctcaaccagaggtattacccctatcgtccatctggcagcacaggagtcaaccaagccgtcgtgctaaacacggagctggaccatgctttagacgacctgagtagggctcgtgctgagatcgcccagttgcgggctgagcgcgcagagagttgtcacttggaggatggctcccccgctcccgtcgggactcggcacctgtactgctcaccgcagcgtggacaacatgcctacgacaaccctgactgcaggaccaggataaatttagaaccatag

SEQ ID NO: 22336 - DNA, 981 bp, Zea mays
  Peptide Sequence Number=SeqID_65711
atgggcgcgactcgtgtcagggctcagtccactcaagggacacgatctcgcctcgcccgagcccagccttgggcaaaggcagccgacccaggaggattcacgtctcacccgagggaaaacagcgccgcctgcgctgctccgactgctgtgccactcgacagagtgaggctgacagcagctaagtccagcctcgggcgccataggaagctccgcctcgcccgaccccagggctcggactcaacctcgacaccggacgacggactccgcctcgcccgaccccagggctcggactcagcctcgacctcggacgacggtctccgcctcgcccgacgccagggctcagacttagcctcgaccttggacgatggtctccgcctcgcccgaccccagggctcggactcagcctcgacctcggaagagcctccgcctcgcccgaccccgggctcggaccgaccacgtcacaagggggccatcattatcctacccctagctagctcaggctacagggaacaagaccggcgtcccatctggctcgccccggaaggtccagggctctcgtacgagaaggttggccgcacgggagaacgggccgacgcacaaggctctctctctccctctcccacgcaagtgcttgtaaccccctactgcaagcgcatccgccctgggcgcaggacaacaagaaggccatggtttccccttgctgtttctcccccctttgtgttccgtctcgcgccgacccatctgggctgggacacgcagcgacaatttactcgtcggtccagggaccccccggggtcgaaacgccgacaaggggcatgtaagggtgctgaaacaagagagcagaggacaagatcggacctgaaacgagctagccacagtgaggacctttttacgatggcggaaacccgatctgggggaagtgagcaattcgggggctcaagtgaacaattggagacacgagtgggtgtgctgggtgcttga

SEQ ID NO: 22337 - DNA, 165 bp, Zea mays
  Peptide Sequence Number=SeqID_65712
atggccatgatgggttcaacatcggaaaagatgtacctctgccagaataagataacacgcaatgggagtggagagatgacgagagtagcgtgtaccctctatggcaagaggctcgacggtggtgtatctgtgctctcggttagcgtgaacatgatctggtcttaa

SEQ ID NO: 22338 - DNA, 141 bp, Zea mays
  Peptide Sequence Number=SeqID_65713
atggccatgatgggttcaacatcggaaaagatctacctctgtcaggtgaagaagcaacaaacttttgttgcttctgttcaaaggtggtacccaaagaagagaaccaagactaaggctgcgagagggaaggccctccgttaa

SEQ ID NO: 22339 - DNA, 141 bp, Zea mays
  Peptide Sequence Number=SeqID_65714
atggccatgatgggttcaacatcgaaaaagatgtacctctgtcaggtgaagaagcaacaaacttttgttgcttctgttcaaaggtggtacccaaagaagagaaccaagactaaggctgcgggagggaaggccctccgttaa

SEQ ID NO: 22340 - DNA, 945 bp, Zea mays
  Peptide Sequence Number=SeqID_65715
atgagcttgacacaacttaaagagaagtgcattgctcaaccttctcaagataaccgtgatcacatggtgaagaagcttgagacggagacaaccgtggcatgcactaaatcccttgaagaaaatgtcaaggacttgaggattgccaataggagggaacaaaagaagaaaatcaatacctcttctaaaagcctcaaccgtgcctccatgcaaggggccacgcggcctagaggccttacgtcaggcttcgcccactggcttacgtcacgggcagtaggccacgtggctgcatcgggtctcctcctgagcggggagcagaagcaatcccgggaccttgctgtgagtggcccggaccccacacagaggggtccgggacccgtcctaggggtccggttcacgctcgtggaggtcctggaccttacccggaggtccggtccgcacgtacatgggtccgacactttcccatgggggtctggactcgctgctgataccttggagtatatcttcttctccggccgcgtggcggccctggagccgtccacgtgggtaccaacagtggccctcgggcccacctcaggggaggatatgagcctgcaggtggggccaaagcttgattggcgattggcacgctgcttccgtgcgcttgctgacgtaattactgccagtccgccttcggtcacgccaactgccacgtctgtccgcgcggctgaccgacccgcaacccccatgcctgatgggtttgccaggccacgcgcgaggcgcctcgataccgctgcattggttttgaaaaatctcctttctgtcttctgctacggccccgaggaggcgcagtactggcgcgagtggcggttcgctctttctgcacctaggaaccaacgcccaaggagcatgacttgtgggcctgggcccccatgtcatatactggaccgttgttttcgacggagatga

SEQ ID NO: 22341 - DNA, 930 bp, Zea mays
  Peptide Sequence Number=SeqID_65716
atggaggtggcggcggccgcgacggcgggcgcgggggttgtggagctgcagctcgacctactcgaggcggcggcgccgacggagcgagaggccaagaggcgccgggtgcacccggttccagcgggcccaccggccggggcagcagcgccgggacgccgcagctgcagccgcaggcgccgcgccgtgcagcgtctcttccaggcctgccgccacgtcttccggggccccggcaccgtgcccagtcccggcgaggtccagctgctccgccacatgctcgacaggatgcggccggaggacgtgggcctgagcccggacctgagcttcttcagggctcgagacgccacacgtggcggtggcaccccgaccataacgcacacgacgatatacaaatgcccgaatttctcgatggtcatcctcttcctgccgcgaaacgcggtgatcccgctccacaaccaccctgggatgacggtgttcagcaagctgctcctggggtcgatgcacgtcaagtcgtacgactggctcaacactgctgaccccgatccttcttccgccacgagcaccaccagctcttcgtcctccgatggcccatgcctgaggctggcagaactggtggtggacgacgtcttcacggcgccgtgcgacacctccgtgctgtacccgacggcgggagggaacatgcaccggttcaccgccatggcgccctgcgcgatcctcgacgtcctcgggcccccctactccatagaggaggacagggactgcacgtactacgcggaattaccgtacgcacaccactcgctggtggctgcgggcgaggacgtggagcggggccagggccaaggccatctggcgtggcttgaggagatcgacatgccgagagagctcaagatgtgcagcgtccactatggtggaccgccgatctccgacgagtga

SEQ ID NO: 22342 - DNA, 1113 bp, Zea mays
  Peptide Sequence Number=SeqID_65717
atgggtcctatgggtgtgctactaacgctcccgagccgaagctatgtacaggtccaggtcccagtcgaagctacctcttggggggcgggtcaccaactctttcttaggtatgctggtatccagcctcgacacatcgagcctacatcccagggggccaagtaccaggagaggagttgggtcgcgctggaagtgtgcggccgctgtctccacggcatcttgtatgacctcccgggcggcgtcttcagtgtcggcaaccgggccagcgatcactactaccgcccgtgggcatcctccctcagcaccgccgggcgcaggcctaccgctcaccctgaacacgatggcggccactgggaacagcagtgccagcggcaacctggtgctacagcttgccaacggtggcagcctcctcgatgcgtgcgtcaaggcgaaggagccctcatcgttggaggtgacgtcgaggccatcaaagccaaagagatggaggcacggcagcgcacgacgctcggcggcctggccactgagacggagccggagctggaccagttcatggaggcgtaccgcgaggtgctggtgaagttcaaggaggagctaacgaggccactgcaggaggcaatgaagttcatgcaaaagatggagccgcagctcaactcgctttccatctctagaaggtcgttgcgcaacaccctttcgtccgggcgctggtggaagaagtgccacccccacgaacatctcgcagaggtgggcaaagatggccgcctggaggatggatggaggctggaagaaaggcgagatcggcagtgccaacccgcaggagaggtaggagaggaagagcacgaactccccggtggcgaggtcgccgaggggagtgacgccgacgcgctccaaccgagcaggttgcgcaccaggttgagtgcccccttggactggaagcgcttgggatggactagcgaagccatggcgactacggcggcggaaagcggaagagtgcggatgcagaggggcgcagagagctcgaaggcgaaagggcacaacgattggagagaatgcaaaagcgtaaccactacgcgtggggtgaatcccttttcaaggcagactctcccgctcgtgccctga

SEQ ID NO: 22343 - DNA, 281 bp, Zea mays
  Peptide Sequence Number=SeqID_65718
atggcgtcatccaccccctccccgatcgatcccaacctcatagtcatagcagcgatcgacacggagttcgacaagcggatctcatcgctggacaccaaatgggagcaacgcttctctgcgctggagaagtccgtcgcgggctgcaacgctgggttcacagcgttcatcgaggaaatctccagcgatttcaccaaccagatcgttctctccgagtcaacgactttagcatccatcacccgcacagagcagaccatctacgagcacatcgaccgcgtggaagg

SEQ ID NO: 22344 - DNA, 1227 bp, Zea mays
  Peptide Sequence Number=SeqID_65719
atgaagtccgtggatcatcctccggctaatcctaaacgtataaccatcgagttaagccaagaattcttcagtgttgagataccgcgttcggtctctactggagatcctccaaacacaaagcattctgttcatcgtcctgcacccgtcgagagaccatatgttattcatgaagccaatgaccaaattggatctggtgatgacgacgatgattttatgacacctacaaagaagcgtaatgctactggaagtcctatcaaaatcttacagaagacatgcacaaagaggatgaaaacaatgcagaaactcaatgttagatgcaaccctcaggatattattataaccattaagatattgaatgagaggcaacgacaagccgttgctagaaaaggtttttccaatattcttgacatgacccttgatgcactgggtagccgatcttatcttctttggttgatggataagttggaccacaaggatatgacacttcgccccggtcaaggcaaggaactaaagattacgaaagaaattgtccaccttatccttggcctaccgaatgctggcggtggtaagccactaggcatcgatgaagcagtggcgggcaataacttgagggctgaacttggcttgcctaaggatgagttcgttgttgcatctcttcaggaccgtctgagaaaaggagacgacgatgacatctctatcatatgcttctttttgatattattcaatagattgttgttccccacttccagctggggcatatctaaccatgaggttttacttacggaagaaatggatcgtttccatgagacagactggtgccacttaatttttaacgacatctgcgaagctgctcaaaagtggcatacaagaagcactactaacgtgtccacgacgatatatggatgctcaattgtcatactattccgaagcacttcagaaacttgctattctgttgtccctagtgtctatgtacaatcagagctcccattgatcaaggatatgctttcaagtaagatcaagcagctccaaccacgtgaccggccaaaattcatagaaaagtttgttgagtacgattctgaagttggcaaagcgtgttccatcataaaaaatactcttaccaagatggttgtgaagcaaggcacgcatccattctggtacccaaaatacttcggacctgactatgccatcttcgcaaccgactacggagttgacaggcacccagtttga

SEQ ID NO: 22345 - DNA, 288 bp, Zea mays
  Peptide Sequence Number=SeqID_65720
atgggggcacatgattcgttctttcctacaacaatccatggtggcataatagtggccatgggcagagagagtgaaactttagctatcggttggtggcacaggtccgtggggaagacatctgccatgattctagctgtggaaaaaagggggcttgggcgtgtatgtgctgatgaattgaaccaaagcatggagttacttttgtgtgctgtggacttgcgatgtgaagacgatacagaaggtgatgctatctatgtggtagttaaaaagagagataagaagaacaagtga

SEQ ID NO: 22346 - DNA, 606 bp, Zea mays
  Peptide Sequence Number=SeqID_65721
atggaggcccgggtccacacgtcatgtaaccggtgcaccggttactacgtgcaaagaaaccgcaccgccacttgcgccaatgctgcgtcttctcgactgcagaaccagtgcagcgactcgagggcaagcgacacctctggcaggcaaagtgggcgccgtttcacctccgtcatgatgaccgcatcaaaaaagggatcgggaaaggggatatttcaaaaaaggatccttctcagcgaaggaagcgggccccgagccctcctactgatcaggggttcgaaggttgcgccctgcggggctcggcaaccgccccagagcactcgggctccgaaccgtttactgatcaggggttcgaaggctgaccactcggaagggttcgacagccgccccagaacacgcagagtcaaggatgaccttggttacgtccgttacatggccgaggctcgggctacgctcccgaggtaccctagaacatttctgagaccagcggaaacgatttgtaatggaatcccaccggagggaggcaccgagccctcggaccctatcaaatgggtccgggtccagcaaatcacctgcagttacttttggagcgtgcctctgggccactag

SEQ ID NO: 22347 - DNA, 346 bp, Zea mays
  Peptide Sequence Number=SeqID_65722
atgaccgtaggcctcgtggtggggaagagcgagccgggccatggcctctcccttgccctcagcttcaaggatgttcatcatccgtgctggggaggagggcgcgccgagttgggtcccgcctccgcgtgggcagcggcccgctccttctctcagtgttcgggggagaagggcgttcgccgtccgtggcgctgtcagctgtcgcgtgtctggctccccggcctgagcggctctggtgctgcttccggtgccgcctcctatcgctggggcggagcatggctgcccgtccgccgcacgggtgtcggtcgcgccgtgcgcggggaagacaaggggagatccttatcaagct

SEQ ID NO: 22348 - DNA, 752 bp, Zea mays
  Peptide Sequence Number=SeqID_65723
atggcgaacgggccaaaaacggattttcggccacggccgcgaaaacgggcacgtggaagggcacgggaccctcccgtggtccccccgcgtgagacgtggaagttcggaactccccgaagtcctgggagggggtatggccctcaggtctcctcggccgagccccgcaccccctcgcggcctagccgtggccggtcggcaccctaccgcgcccagctccggctggcgctgttggctgcctggccggccgtgcggctacgctggcgcatgagttgtcttggacccgtgactgcttggaggacccccgctgccgtgcggccgactcccggcgcccgtgtcccatcgctcgtgcgggcatcccgtgcctgctgcgttgagaagtgcttgcgtgctgctacccgtcccacgggaagccgtgctcgatacacgttgccttcgtcgagctcaccccccggggtgcggctcgtcggctcgagagcgcccgcggcgtttgcctcgtgccgccgtcagcctatggccggcggcaccgaggacacctcgctggcgcttttggtctcggatgtggctcacgctgaaggccggagacgcgttggcgtcacgcgcccaagaatcggtccgcccgaacgaacgacggccagcccggcacgacgcctccgcgcggaggccggcgctggcccgtctgcgaggacgtgctacctggttgatcctgccagtagtcatatgcttgtctcaaagattaagccatgcatgtgcaa

SEQ ID NO: 22349 - DNA, 147 bp, Zea mays
  Peptide Sequence Number=SeqID_65724
atgataggaagagccgacatcgaaggatcaaaaacctacgtcactatgaacgcttggctgccacaagccagttatccctgtgatgtgcccccccagccaaactccccacctgacaatgccttccgcccggatcggttcatgatctga

SEQ ID NO: 22350 - DNA, 438 bp, Zea mays
  Peptide Sequence Number=SeqID_65725
atgagccacctcaagaagaaggcatcgatcaagggggagatgaaattgatcaagaaaaggaggatgaacaagagattcaagatcaaagaccatctcacccaagagtccaccaagcaattcaacgagatcaccccgtcaactccatacttggtgacattcaaaaaaggaggttgtacactttacccacaagtcgtgacccctttccagcctgggttgtacagacccgatcttcactaccaaggtgaatggttagggatacactatgtagcctttacaaagactcccctagtgcatagctgcttgttaggtttcgtcagtcgtacaaacgcattacacctccccaaggtccttacggagaggtactcaggaaaaacgcctgagccccctaaggtatcacaagatcatccacaatatcaggataacaatatcgtatcataa

SEQ ID NO: 22351 - DNA, 462 bp, Zea mays
  Peptide Sequence Number=SeqID_65726
atggctcaccagagttactccggcccgcccgaggctttctcaccgccgttctcccctctctgcccgtggattcatggccccttccccgccaatgagttcgccgtggcgccctcttcctctctgcccaactccggcgacgccggaacccccctagctcacgcctgcctcaactccggcgacctcaccgccgcggagaggagcagcagcgcccgcagccattcaaccccctcggtctggtcccctccgtccgattcagatcgaatgacccggaccgcgggtaccgcttcgcgcacgcgcgccctgactccttggcccgcctgtcagcgcccaaaccctttggcgctgggcccgctcgacaacgagcagtccgaggttcctgagtgtgttgttggagacctccctgagcagcaacctggtgaaggcaagtgtcctctgacctattatgtcctacatactttataa

SEQ ID NO: 22352 - DNA, 555 bp, Zea mays
  Peptide Sequence Number=SeqID_65727
atggagagtctattggctaaagattatcatgtattcgagaagatcaagaagcagctaatcaaggaggctgggcgaaatacctatccaatttcaaggtggacaagcattagaaagtcatccagcaatgggagactgacatggcatcgtttcgacctactacgactacccctaatgtgtctaggtcagcctgctgaccctagacaacacctagactctctccaccccgatgaggtccctcccgggagcgagattcaggcgccgccgacgaactccgccgcccctgcgcacgcgcggaccatccggcctgtcaagcagggaacccgagccctgcgccaggtcgttgaccgtccgacccctggccgcggaccgttcgcgcctgtgcagagagcaccatcgcaggttctcaacgcagtgattggtgcctggatcggcgccaacaacggggtccctcccgggggtcgagatccaagtgttgttggcgactgccgccgcccctgcgtgcgcagaccattcggctcaacgcagcgaagacccactcctgtcgcaggatcatag

SEQ ID NO: 22353 - DNA, 225 bp, Zea mays
  Peptide Sequence Number=SeqID_65728
atggccaagtcgaccgcgatgtttgtagccgccctggccctggtggtggtgatggcgacgacgagcacaggcggtggcagggcggcagcggcgtgcgatcccaagccgctggtggaggcatgcttgtgcgtgtacgccaaagaccccaagtttgcaaaatacatcaacaaccccaacaccgccaaaacctttacctcgtgcggcatagccatccccaaatgctaa

SEQ ID NO: 22354 - DNA, 2418 bp, Zea mays
  Peptide Sequence Number=SeqID_65729
atgcccgctggaccgctggcgctggagccccttgcattctctgctcatctgggagtagctgtgccacacattgagttgaagcatgtggttgctgctacaattggtcttaagggtcttggaagcctcctttttattttgagcagctctctcggtgcttatctcctactgttgtaccttgctttgatcactcctatcatccatgacttctacaactacgatatggagaaggcagaatttgcaggcctctttgcgaagttcacccaagatttggcgctgatcggagctctgctcttctttctgggcatgaagaactccatcccgaagcgacagggcggcaagaagtccccaaggcgaagacgaactagcttactcgaggtagcaggcaactggcgactggtgaaaccacagactggtgccaccaaagtggaagaaattcactcaaagaaccatcctgtcagtctccttatcatagagtattcaccttttcttgcagttgtggagtccaaggacagaaggatctcagttgctttagcatttgctggtcatcaagaaggtgatgttgttgtctcctcactcactaaactctctacttgtctcgtcaccatttcactgcatggcatggcattcaactttcaaataatacaatttatgcattcaagtatatggaacaatctgaaatcaccaaatgtgaacagagatagatataatgatggtagcatcaaacattcactcttgaagcagtcatcattggatctattgacgattgagactcctggtttgaagaaaaatgacagcttttcaagatggatgagtaaagaacttgaagaggttgttgatttgggtattaaatccacttctgatgctttctggagtagcattgagacagtgaaggtgcctcatggttctaatgttctgactaatgaacagctggatgcttatgtagtgaacccttcactttctcaagaccaactattcagcattctcgatgtttcaccaggttgtgcatatattggtacaaatacaaaggtgtctgcacagtttagtcaaggaaacctgtgtaaacgatttgtaacaggtgcaggaatagctgaagcagactcttgcgcctcaggtgcaggaatatccttaggtagaattccgaacttcattttcagcaaaatgtgtacaagcaagcagcattctgccttagctttctttcattgtttactaccttgtgaagtttctgttctgtgctgtaaggaaccgacttctttgttttctctttatgtggatgtggttacaaggctgttgacaaaatattactactccatcgtcctccctctcatccataaggtatttgatatattactttgtccagtcgatgcagcttacaaggctgttgacaaaataatccagattccaaccattctcccgcaatacggtatgacatcaatcatagaaggcattgatgcaattgcgacaacttgggttgttgtcactagagatatgagcaacaacagacgctgcagcggtaggggaggaggaggcagaggcggcgttcccggcgacgctgccctggcagggtgcgcttctggatcctcatggcccccgtcttcatgccctggctcagctttctacatggagggtccatgggcagctatgaccacaacaggcatcttccttgctgtcgcagtcactgattggctagatggttatattgctagaaagatgcagctaggaacaccttttggtgcatttcttgataactccaacaagtacaggcactgcagaagcatcaccaatattgcaagggcctcatctaccatcccactttcagtctccatgagcagttctggtagtataggtaccaatccagctctaacagccttccccttgttgccctgcacatttaatcaccagcttcatggggtatttgaggttgccagtttcggtgggtctaatatagatcccactgcatgggaggataagaagtgtaaaggtgaatctagattcccagcgcaggtgaggatccgcgttaggaagctttgcaagccgttatgtccagttttacaccactatgatggcccaaagtttcgccttgagctctccatcgcggaggaccgtcgaggattgatcgggcggcgccgccgtcgggcagaagcggtcatcgctggacaaggcgcacaggtccaccatggacgccgtctaccaccaccaccactaagagtcgccgttgacgggcaacgatgccgccaccgccaccgtcggcgagaagctaggcgtggagcgaaggagaaggacgacgatttccttgcgatgaagggcaccaagctgccccagcggcccaagaaaagggccaagaacgtggacaagaccctccaatttatcttcccggggatgtggtggggttggggctataggatggatttgaatttatga

SEQ ID NO: 22355 - DNA, 1326 bp, Zea mays
  Peptide Sequence Number=SeqID_65730
atggctccgccggcacggccgccacgtgctggggaggacttggaggagggcacaggcgagagctccccacctcctcggtcgccacgtgcgtccaaccccgactgccacgaggtgcagaggaagatctgcgagcgcctccgccagacggggcggcacgaccgtacgctcgccgaccccaccttcaacgcccgcttcgcccgccacctcgagaggttgccgcggaggtacctactcgacctcgacctggacgacaagctcgaggatgtcttgctgcactgggggattctcgacgagtgcgccgaccccaataagcgacccgtctttcgcgcgcggttcataaagtataagacagttcctagggaggatgacggcattggtcatgatcaagatcacgaggagccgtgtcaaaagttgttggaggacctcagtttggaaagaagaaagatcgcggacagaaatgattccctgtctatctcctctaggggcgatttgaaaactgtcctccttcatgagatcattttctcctccatcgacaagcccaagctcctaagtcggatgttggttcaacagctaactgcgttgctctctgaggttggactgaatatccaggaagctcatgtgtactccacgaaggatggtttttgtttggatgtttttgttgttgatggctggaagacagaggagactgatgagctgatcgcggcgattaaggagacattaacacaaaaaaatgcatcaccatctaattcaacaaattcttcgacgccggagaaaatagttgacctacaacaacaggttggagattatgaaattgacttaagcatgctaactaggggggacaagatcgcatctggatcatccgcagactttggtgttaatcatgaaaatattctgcaattttatggggcatgcacaaaacatccaaactattgcattgtaacagtcacaaaaggtagcaacataggggctgcattacctagaatggtggttgttaagatcgcagactttggtgtggcgcgacatggaagtcagcaggggcagatgactgctgaaactggaacctaccgatggatggcaccagaggtcccatatgacaacatgacacccttgcaagctgcattaggagtaagacagggattgcgcttggacattccgggcagcgtgcacccaagattgaccaagctgattcgacagtgctggaacgaagatcctgatgcgcgtctgacttttgcagagattactaaagaactccaagatagtctacaccatatcgaggcacccaagggagccagccgtcgatctagagcaaagatgcagaagaaataa

SEQ ID NO: 22356 - DNA, 567 bp, Zea mays
  Peptide Sequence Number=SeqID_65731
atgcgcgcggcgaattggaaaatggtgcagaggcttacccggtccatgtgcgccggcgggtttttgaactccggcgagcacgattgcgctattccggtgatgcgggttctcggttcaagcttgagcaagcttcacggcctcaccaggaagctatctgagggcttggatcgaacggaggaggacgggaaaggggctgtccacggtggttgctctcgggcggcactggcgggtcgcggggaggtcgccggagctaagggctggctcgggaaggtcaggcgagcttcaattagggttcctattgcccaaaaggggtttgctttagggttttggggaaattcccacttagatgtgcatgacaagctagggcatgatatccaagatagtttgcacttgcttaggaccttgaattccaagtttgaggattcctggccacaactcccacccctaccaccactgcaaccgacctattcccaaagccagcaaccagaagggcaccagcactcccaacaacaacgtgaattcagtgaggaatccgaaactcgcacagtcaacagtactgtgccataa

SEQ ID NO: 22357 - DNA, 387 bp, Zea mays
  Peptide Sequence Number=SeqID_65732
atggagaatttcggcagcaaaacagtgcaaatagcaatgaatgctgtggtaacttcacaactacttgtcagtttatatagtgctgcagtggaccgcaaggatcaaacagtaactctgcaaggtgggaccgacacgcgcttggaagtcggatcgtttctccgcaacgagctcagggaaggtgttttttggaccttcggcttcccgaagctgaagaggcttttttcacgggtcaagctcgttacgaagaacgatctagcaccgcgaaaggggctactgttggggtcgtgcttcggtgcgccgaaggtctcacacgaagaagcagcttcggctgaagtcgtctccgagagatggccgaaggtcccttttcatggagcttcggcgttttaa

SEQ ID NO: 22358 - DNA, 819 bp, Zea mays
  Peptide Sequence Number=SeqID_65733
atggcaggacgagaagcggacaaagacccagagctgaaggtgctcggcgtgtggtcgagcccgttcgttatcagggcccgcgtcgcgctaaacctcaagggcctcgcctaccgatacgtggaggacaacctggacagcaagagcgagctcctcctcgcctccaaccacgtgcacgggaaggtgccggtgctcctccacgacggcaggcccgtctgcgagtcccgggtcatcgtggagtatatcgacgaggccttcccggccagcggcccctgcctcctccccgccgacccgtaccgccgcgcggtcgaccgcttctgggcctcctacgtcgacgacaaggtattaattaccgtgccgcccctcccctgcactgcacggctgcaaatcaacttcagatttcgtactggtcgactgaccccggtagttgtgcgcggcttggataatggattgcagctctttcccacctggatacccgtctacaacggcaggacgagcgaggacagggtcgcggcggcgaggcaggtagtggccgtgctggagaagtttgagcgggcgttcgatgagtgctccggaggcaaggcgttcttcggcggggacgctgctggcctcgtggacgtcgtgctaggcggcttcctcgggtggctgcgcgcgtctgaggtgatgtgtggcgtgagggtcatcgaccccgccaagacgccgctgctggcggcgtgggcggaccggttcgccgcgctcgacggcgtcagggaggtgatacctgacgtgcagaggctgctggagtataacaagattaggcgagctcgtcgtgggctgccgtag

SEQ ID NO: 22359 - DNA, 861 bp, Zea mays
  Peptide Sequence Number=SeqID_65734
atgcccccatcggacctcgtcacgccgtgcgtggcggtgccggtgatggacgcggcgttgctagccgtcatcgtcccgcctcgacgttcgatccatgctcgccacggttggtgctcgcacgcgatgtggcgtggcgaggttaccgcgggcgccgcggaggtggagggggaaggggaggatgagggcacgggcaagagagatccagacaaccgcccttgtgagcctgccttcctgcctactacctgcgtacatacaggagggaccttgggtgatccgggcaagggccagcggcggccacgacctaaggaccagttccccgtcggcatgcgcgtgctcgccgtcgacgatgacccgacctgcctcaaggtccttgagaacctcttgttccgctgccagtaccatggtacttcccttgacaacaatgggacaggcaaccacgaccttgagctgctgagggagaaaaaggaccagtttgaccttgtgatcagcaacgtccacatgctggacatggacggcttcaagctcctcaagcttgtgggtctcgagatggaccttccggggattaggtactttcaccacttctggtatggttctgtctgtaatgtgccagggattattatattgtttttggtttggatttggaatggtttggggtccacaacgatgatgcgtcagagctgttccaaggattggatgatttccattcccctgctgccaattcgactaggctcgccgtctccgctctgcccaactggcaccaagcagccaatggaacttgagcagccaatggatgatttccattcccctgctgccaattctctgaactgcttcgacccttcaactcaatctgcatgtacccag

SEQ ID NO: 22360 - DNA, 174 bp, Zea mays
  Peptide Sequence Number=SeqID_65735
atggagagtcatgatctccgggcagaatgggaatcacggcttgtgggtggcaatgagactgatggttttggttatgtctatggtactggttgtcagcattgcaaccactgctcaggagaagatgaagctgtggaaggagacttccaggagttccaagactacgacgagttctag

SEQ ID NO: 22361 - DNA, 234 bp, Zea mays
  Peptide Sequence Number=SeqID_65736
attgagagtaagaagacagagatcgtgggcggtgacgatgaggactcggggactgtgactgcggcgcttgggctccgggactcgacgatcgggctcggggacggcgggctctggggctcggagaaggagacggcggcgctcgggctcggggacgacgactccgggtctcgagctcggtcaagggcacgccgactctcgggctgggtgaagggcgcggtgtttcttgctcgctga

SEQ ID NO: 22362 - DNA, 330 bp, Zea mays
  Peptide Sequence Number=SeqID_65737
atggccattcataagcactcctctacaccaagattcttcaacaacttatccggtgatgatggtttcattcacatttgtctcatgacaaagggtgagaagtcctgcaaatatggaatatatgaggaaggaaatcaatggctcaataagttcatggcaagtgggtgcatggagttcgcctggacttctttgccgagagtcacactcgacaaagactttgatgctcggctgtcacacccagatttaagggataaagccgggtgcatctcatatatgcgccaaacactagtacaatttggctctatacaagcgaaatatgcaaatacaatttaa

SEQ ID NO: 22363 - DNA, 600 bp, Zea mays
  Peptide Sequence Number=SeqID_65738
gtcgaggacccctgtgctgaagcggtcggctggggcgcttttcgattggatgtggggccctcacggtcgagagactgtccaggagaggtccaatcgggcgatggatcagatggagtgtgatgaagaggtcgaggacctcagtgatctggacagcacactgcccgaggcatcgggggtggagctggcgctgccatccgatgctggcgagggccccttggcgacccccgcgccgactggagctggcgaagaccccgtgccggccactgcgccgacggcggagtcttcgacgcgtgtggaggtcagcgaggtggctaatcttcctagtgcaagtgctaagtacaggcggcgaagggtggtgtcgaagcacagtgtgggggcttttgctgagattgtcaatgttctggagagctttaagtcttcgctgttgggcgttgctagcctatatgcgctgggggatgccttcatcttgacgatgaatggacccactcatttcagcttctgcttgccccatgattctttccgggcgaggacgcggtctcccttcaatgagggctttaatgttgtttcgcaacttcgggaacccttgatggcttggtcggg

SEQ ID NO: 22364 - DNA, 183 bp, Zea mays
  Peptide Sequence Number=SeqID_65739
atggaaggtgccatgaatggcggctgggggctcgccgagattgccgcgggggagaggggagcgcttgccgagggagatggccacgaaggtgcgcacgtggtgtggtcgagttgggatggacgaaggtgggccagcgtcgtgtttgctggtcgggaagttggttcatactcgtgtttaggctag

SEQ ID NO: 22365 - DNA, 225 bp, Zea mays
  Peptide Sequence Number=SeqID_65740
atgacggtgaggtgggagcagctgcgacatcggatcccgagggcacggacgctgtggcagccccatgaggctgaaggggtatcggcccataggagccgtgtgatcacagatggagggctaagattaaatcgtcctcatcctcaaccgggagctcacagggaaggtcggaggctcacagggaaggtcggaggcccggccgccaaggaagaggagcaggggcactag

SEQ ID NO: 22366 - DNA, 1374 bp, Zea mays
  Peptide Sequence Number=SeqID_65741
atgatgatcctcgcctcagttgccgccaccttgtttgccatcctgcttcttttctctttcccctcatgcctccgcatctacgccaccccattctcggcagagggcgtgggagcaggcgcctcctccccgtattcgttcgacaccagccccgacaccgacctcgggcagtggctattgcacgtccacgaggacattttacatcatgcgcgcaccatcgttttcgccgtcattggacgtcccgttcgtcttcccggccttcaccctgttcttcatccccaacctactgctcctgcccacggtcgcagccgcgagctgaccgacactcgtcgacgtgactgccccgcctccccccacccccacccacccgcaaaccccgaccaagccggcctacaccgcaagcaagtcgccgtcttccgtgatgctcgcgccccctgctccgtcgcccctgctccccttgctccgcctccccctccgtacacggccctgcttcccgctggcacgccgcgggagctccacatgcactgcaacctccgccatgtcgccatctgcgcccaatcccccgctttccacacacccgcctcccccacttcgcgcgagcctcgcctctccctctccacgaaattcgacgtcaacttgcatccgcgaaacctccgcacaccatccgcgcgtgctctcgccccgcctagctgctacctccgtgaaatccctcgcccagctgctaccttcgcgcactctacactgtcttgccgacgctatcatgcctgcgtcgtcctgttgggcaccagagccgtgctgacatccgcgcccagatccagcgtacaggatgcccccgcctccccctctccacgatccgcgcgtgccctcacccagctgagcgcgccgcgaaatctacaccgacatccacgcgggcgaaaccgctgcacacctgcatcaaatagccggccttcgcagacctcctatggaagtttcgcgaaatacgacaccgtaaaagctccgcgacctctacagcttcctgccgggatcgtgctgctggtgtcggtctgttgggcaccggagatgcgaaagggcctctgcggcatcaacaggatggcctcctacacctaccacatgtgcgttgtgcggatctcggaaatgcttgccatcttcctgcctctcgggaataaaaagcatctgcttcttcatatagcagaggcacttgtggatgcccctgatatggtcaagtgccaaattaacttcaagcgactctcacttactgacatcaagattgacatcaaaagtgtccccaagaagacaactcggatcaaggcgatggaggaagctgatgtgaagaccaagtgggagaacagctcatggggcaagaagctgattgtctag

SEQ ID NO: 22367 - DNA, 462 bp, Zea mays
  Peptide Sequence Number=SeqID_65742
atggcccgcgcctgcgcctataaagcaccaaggaaccttgaccgtacccctccgcacgcgctcgacctcaacggagcccaaacccaccggcgtttgcccgtgcacgatgtgcccgcggccgcccgattgccctgccaccgtagaccggccaacagaacccttcccaaccccgtccgaccctcagagaagactgtgcacacctcggtgaagctccccgagcgaggaatcggagtttgcttcgccggagaggccagtccgcgatcgccggactccacccgattgccggcgagcgtagaccgggttaaagaaaataggaaagactgcaacctcgctggcggagagtacgtcctcgtgccggagcaaggagctgctcaggaggtagcccaggatccagcaccagagcctgcaccagaggatctgcctgccactgctttagaaggcaagccccggttttatgcataa

SEQ ID NO: 22368 - DNA, 420 bp, Zea mays
  Peptide Sequence Number=SeqID_65743
atgggcacgaccaccatgtggtctcactgcctaagggctagcaacaagaggcaaagaacctctagccctcacaggacatctttgaacaggctgggcatggacaccatgagtggggcatttcatgtttttcttgctcgactcggaagcctgtgtctcatctctcttcctcctaaagcaaaaatcggccagatgctcatccctctcacaatactcacaatgaaacttcacctctttcttaggtggaatttgcttgtgggaggaggctttctttttggatggctaaggggctctaggaaggcgatcactagagatgtcaggaaggacatagacataaacatctttgaattacaaatgtaccttcaactggaaggagatgatagtacaagtgtgacgcaaaaagcgaatgccaagtcagcgtga

SEQ ID NO: 22369 - DNA, 282 bp, Zea mays
  Peptide Sequence Number=SeqID_65744
atgaaggctctccggggcggatccggccacctcgtgtcgggacaaaggcacgccgtggatctggccaaccgcgggccgaaagggcctaagcaggaggaggctgcgggaaggcgccgatctggcgaccgggtgggggaggaggcagctccctttcatggactacaatggtccagaaagcacagtaacgagattaccaggcggacaaaggagcatgctatgtggactgtggagggacgtgggagcaacaaacgaaaaggagggaagggaaataatatactgtag

SEQ ID NO: 22370 - DNA, 924 bp, Zea mays
  Peptide Sequence Number=SeqID_65745
atggagaagtgcaaaccaatcaagacacctatgccaacaaatggacatctcgacctagatgagggagataggaaatttgagaaatttcaaaatcccatctgtctgggctcaccggacagtccgtcttcaggtcaggatggtgcgcacgaagaatgtgtcggcaccaggggggagacgacgaggaccctcctttcccctttagagtttgatgtggttgattttcttatatgtgagattgaggacactgtcttggatggtcttcgtgcccggtgtcagccaccgcagttccagggcacttttgaggcctcacgcctccactttggctcctaccgtccagcccctgaggatcaagtgccagtacctgatccagtgacagacattcagatagaggatacatctttccatcagttcgagactcagggcacaatagttcctgatgatgatgatgattttgggattccgcctccgcctcctatgcctccccgctcacatgatcatgagtctcttgcgcagcagcaggatcttatggtatccgagcaggctcgtctagtagccgagcaggctcgacaggcagctgagcaggctcgtcaggcagcgcataccggtgttcagatccctcctgttcagtctgcaccccctccagctcttcaggcagctattgtgcagacattcaggaaggaccccctctaccttcactcggtccttctacctcttcgatccggccggccagtctggacttctcgttgccggttatcagctccggcagctcctgcagcgcagcctcagttcgagtcagtaccagctccagcttctacgacagatcctggatccgagactgactctgtccctcagctggtgtttgctcttctgccacgaccacgaccggatgcgcccccacctcctccttccttttctggtctgtag

SEQ ID NO: 22371 - DNA, 1749 bp, Zea mays
  Peptide Sequence Number=SeqID_65746
atgccccaagtgctcggcgaaaggacagaacaaggatcatcgtcgtttattcgtattgctagtcgatatgccgtcgcgcccaggcgtggagcttcctccctgctgcagttcggcctccaggttgcctccaccaccgcgctctgcttcttccacggtagctgcacctctctcctccccaagcttctttctcgcgacatgcctccaagccctggccagctcgcttgcccctggtttccccggcttcttcctgcgctcgccgagcggctctctacgtcgcgcaacttccccaagatccctggtgctttctcctctccagtgccgagctcctccctaaagctttccccccatggcgcgcccaagccctctccttcctccgcctctacacgccgtgattccgagctcggctcgcccatccgctgttccctctttccggatctcgcgcgcccctggtcgcctgcccctcagctgcttgctctgctcgccgcgcgcactcctccctgcacgccgctcatccttgtcgtcgccctatgcacgttcttctctgccatggccgcgccctgctccctgcgcaagcgccgccatcgaaccccctacgtcctcgccccttcttcttgctccgtctcggctgtctggcaaatccggattcgttgcgctactcgcaaagcacgtgggggcctcgccggccatcctgcttccttttatgcgctccgcttgccgtcatcctccatgcgccggatggctcgacttagacacactgcacgaaagtcagtcatccccttcttaccctcccgccttgctgagcgtccgcttcgccgtcccgtggccggacagtccagccacttggagagactacaccaccgcctgcgtgaggagcaggagcgtcgacgacaggagcagcagagctcttccttctcgctccaccaggagatagagtctgtgaggagctgctcccctgtgcttcctctggagccgccccctgcaccacccctgggcgccccagcttctggagtagctgctggaggagacccagacgacggagatggcgacgacagctcgagccacgacaccgacttctctgctaaccctgagccggaaggatgggttgctcgacccatcactcgcgacgctgctcgcgggtgtcacttccacgatgcgctcgacaccctgctacgtcgggcatttgaccggcatacttggtccgtcgagtatcgctgtgtggtctaccagcatagtcgcggggtctacccggaccgctgggaggcgacttgcttggtgcgctgcccggaggacagtctccagggtgcagaggcctgttcagagcactattctatctctgagcgggactcagctgaggcagccatgcaagatgctgcacggcgtgcgctttcgcactactactcggttttcggtggggcagctgacggtcttgacctgaagtattacccccgccgtccatctggcagcacaggaggcacgattgtctcacctgtcggtgagggcaatcctaggttgagcagcacagtcaacctagccgccgtgctaaacacggagctggaccatgcattagacgagctgagtagggctcgtgctgagatcgccctgctgcgggctgagcgcgcggaacgtcgtcacctggatggtggttcccccgctcccgtcgggactcagcacccgtaccgctcacctcagcgtggacaccagtcttatggcaatcccgactgcaagaccaagataactctagaaccatag

SEQ ID NO: 22372 - DNA, 357 bp, Zea mays
  Peptide Sequence Number=SeqID_65747
atgggcgagccgagccgggaatcacggcgcgcagaggaggaggaaggagagggcttgggcacgccatgggggggaaagcttcaaggaggagcccggcacaggagaggagcaagcaccagggagcttggggaagctgcgcgacgcagagagccgctcggcgagcgcaataagaagccgaggaagccaggtgcaagcgagctggccagggcttggaggcatgtcgcgagaaagaagcttggggaggagagaggcgcagctgccgtggaagaagcagggcgcggtggtggaggcaacctggaggccgaactgcagcagggaggaagctccacgcctgggcgcgacggctggagaagataa

SEQ ID NO: 22373 - DNA, 288 bp, Zea mays
  Peptide Sequence Number=SeqID_65748
atggaggccgtcagtgcccttgccccggcctcatccgtcgtagcattagcgctacggcaggaagcactgagtgccaggccacgaagatgctctattattgttgttcatgatgcaggattgggtgggattggcactgatgttcttgctggtgcacattgtgaaacaatggatgttgttgctgttttggattcctctgctccaagtctgaatttgggattttcggatcctacggctattactggaattgaggtccctaaaattgattggggtcatcaagtgaatgtgtag

SEQ ID NO: 22374 - DNA, 336 bp, Zea mays
  Peptide Sequence Number=SeqID_65749
atggactcgacggcggcggccggatgcgcacctgtaggcggtcggacccgcggctggcggcagagcgtctgtggctcgcggccgagcccgcggctggggacgggcctcgcgacgacggtcacacctgagcccccaggcgactatggctgctgctgttccaaaactatgggcgcacacagatttgaggtcgggtgctttcacggcagcatcacaaatggtttccgaaaggtagcaaggaatggtccagacgagaaactattaagcaggatcgggatcaggtcacctgaagctggagggtgtgtgcccatgcgttgcaacgggagtacgctgggatga

SEQ ID NO: 22375 - DNA, 156 bp, Zea mays
  Peptide Sequence Number=SeqID_65750
atggccagggaaatccatggtcgccagatctgtgcctacttattcctctccagtccccagcgagagattcaggtgaaacatgaagagctgcttgagtatgcccaaagtatcatttcaggattgaagagaaatgatgaaattgtgaggtggtattaa

SEQ ID NO: 22376 - DNA, 459 bp, Zea mays
  Peptide Sequence Number=SeqID_65751
atgagagcacccgcctgcacacgtggaccggacgattccgaccacccccgccgtcgagccgtacaccattgtgaccgccagaacctcccggagccaatccgcccctcgccggacttctctcaccgctggaaagactgcaacctcgctgacggagagtacgtcctcgtgctggagcaaggagctgctcaggaggtagccccggacccagcaccagagcctgcaccagaggatctgcctgccactgctttggaaggcaagccccgtggactttacccctcacgcgacctgagacgtggtctcccattccggttatggtgggtacaagtgcggtcactgcacgacggcagtcggggttctctagaggacatggttgctggagtgacttggccgtccatcttgccaccgggttggactgtcgagtgggaccctgcctcggctgaggaggagcatgaggagtga

SEQ ID NO: 22377 - DNA, 183 bp, Zea mays
  Peptide Sequence Number=SeqID_65752
atggagcagaggattacccggtctacgctcgccggcggtcgggtggagtccggcgaccgtggactggcctctctggcgaagcaaacttcgattcctcgttcagggagcttcaccgagagcgcgtcgaacacgtggctctttgcttctgcccgtgttcttccctctgctgagcggccaaaatga

SEQ ID NO: 22378 - DNA, 297 bp, Zea mays
  Peptide Sequence Number=SeqID_65753
atggaggctcacctccacgcagtgaggcaggaacccggagaaactctccgggccttcatctcccgcttcaacaaggacggcaaaaagaaaaagaagaaccgcggccatgagaagccacagtctgctgctccgattgtcgcagccgtgactgggggccggagcgagcgcaacaagtgcccccggccacagggaggcaacagcggctcatgccctgtgcaccccaacgcccgccacagcgcctcggagtgccacgagatcatcaagctcgcgaagcgcgtcagcgagcgacacgagtag

SEQ ID NO: 22379 - DNA, 888 bp, Zea mays
  Peptide Sequence Number=SeqID_65754
atgtcatcctcttcttcgtctactgcgagcgcgtcgccggccacgttgtctgagaagacgttgagcgatttggtggtggtagaactacaacccagccacaccgttgagttcgggacctcgaggattttttcgggccacgtgctggagatgcagcggctaggttattttgggaatggtgttgggcgggctccagtggtagaagaggtccatgagctggagggggaattggttgtttttgaagcctttttcactgctggtcttcgcctcctgacgcatctgtttgtagtagaggttttgtggaagttcaaggtacaggttcatcagttgacaccaaatgcagtggtggcgcttgctaaacacatggttggacacttggtgaggttaccccacccccaccggatgccgacacttgggggccaactggtgcgaagtcctgccttcaccgtggatctgcgtggtcgagacgcggctgcgtttgtgcgtgaggtcgaaaccgaggctgtcaagattgttggcaaatacgcaccgaagacagagactttgaggagctgggatattcgcggttccaacgctaggttgaaccgcgtttttgagttgaatcatttgtcgtatggcgcttacccggagggagactctgccgacaccgctgatcgccgagggaagcaaacatggccctcgactgatgaaggcccctcacgggataaggctccggttgcggccaccagaaagagaaaattaggtacatcggctgaggatttggggttgagggcttctggtcattttgttggggaattgctagagacgtgcgcagctcctggggaaatgatgtctttgcccgagctccgaaaaacctctgcgcgaatgctgaaggttaccgggggtcactag

SEQ ID NO: 22380 - DNA, 351 bp, Zea mays
  Peptide Sequence Number=SeqID_65755
atggaaggagcttcggcggctctgaaaaatggagctcgctccatggagaggagggtcgagatgcggcaatccatggaagaagaaggggcgctggggagggaatggagcagcggcgctgcgcatggctgctgctgggcgcttccatggagttcctgctcgccagcagggagtagggaaggtgctgtgcaggtcgtcagcctacacccaggaagctcctgctcctgcgacaaggggcagagggaggaggacaccggcttgaggaggaagaagggggaggagggcgccatggataagagctcacagggtcgagctgctgctgtccgtggagcaggggagggcgctagagaatag

SEQ ID NO: 22381 - DNA, 1020 bp, Zea mays
  Peptide Sequence Number=SeqID_65756
atggcagtggcggggaccagaggagtctccacgaagctgtccgtggatgactacttgcagcttgagggaaggattgaacgcctccgcacacaacataccgaggcagtgagggacaagtcggcgacggagaataaaagccgcaatctgcttgagaaactctcggcggcggagaaagagagggaagacctcagccgccgacttgccgaggaaaatgagggcacagaaagagctcgcgcgaaggcccaggtcacccgcgcagaagctgacgccgtgcgcgctaaggctaaacttgccctcaagcgcgccgccgacaaggggtcagagctgaagagcctctgcagttattgtgagaagacggaggcctccacccgtgccggtgttgagcgggcgcacacgctgtttgtggaagcgtaccccgagctcggcgcacagactgctccttttgataaatctggggaggaggtggatcttcgctttcttgggtggctgctggaggagctagagtcactctcgtccatcgtgacgggcctcatgtcctatgcatctcttgtcacctgcgagggggcgtcgaatgccttgtcccgcgaaggatgtaggcacttcaaagtcttcgaccgagcgagcgaggacttcgaccgcggaattttccaagttgaagatgatgtgttaaagcggtccactgcgacgctttatgataagagtggggtcctcatgatgatgaatgaagaagaagtttacgacctcgtcggccttgaaagctcgatgactcggatgggtggcgcggaggaggcgggatttgaagggcactcaacacctcaggatggctccggcgaagaccctgcgacggcgtctgctccagcgcatgttgaagaggtttcgacgtccgggcctgcgcaagcaaaccctgatgatgttgatactaatgatgtttcgatggctgcaaatgcaagtgtgatgtggtggcttgaagtgtactcaaccctgggattagggcatgtgggtaatgggaagccaaaatga

SEQ ID NO: 22382 - DNA, 495 bp, Zea mays
  Peptide Sequence Number=SeqID_65757
atggctagtataccagttttacactctgcagaggttgcgcatctttacccacaagtcatgttacccatctgccaagggatcgcaacttcccatacacctctaccgaggaggcgaggcagggtaacactacgaggcctttacaaagttccactagcttcagaaaacccgctacagtttataggaagctccaatgcatggatccctcgcatgatcgccatcgcagcaaaatcatcccaaggacctccctacactgaccactcccctactgcccttgcccctttcggtcactggactaagcacactaattcagggaagcccggggttaaatttgcaaaagtataccagactcagactactcccgtggggatggcgcaatccctggtgagccggcgagcaacagcctcagcgtgtggatcaaagcgggaacagagactgcgcatagcggagatgatagcgaactataggaacgtgctcttacttgcgattgaggcgtag

SEQ ID NO: 22383 - DNA, 210 bp, Zea mays
  Peptide Sequence Number=SeqID_65758
atggcgcaatccctgggttcacgccatggttttatagccagggatgggtacgccaatggtcggcccgactctgagatcagcgcgggattggaggtggtctgttgcggacttgcgatgaactcggtggaggacagctccgggcgaagttttcgccatactgttgaagccagcgccgagaagacggcgtggataacgcaaggaccaggttga

SEQ ID NO: 22384 - DNA, 570 bp, Zea mays
  Peptide Sequence Number=SeqID_65759
atgggtagaggcaggaggggtcgtggttggcctcgccacactgatggaaagcacaagcatgctccgagttccccctcagatgacttcggggactcggagtactcggaggaggtctcctccgagtctgatcgctcgcctgctccgatttctccctcgacatcatctaaggattcggatgactccatggggctctccaccgtggcctgggcgtactggcgctccatcgagcgtgccgggctcggtgggtcggatgagccggaggtctcctcggatgaggcgaactccttcgactcctccaaggagtggagcggcggtgacggcgacgacgaggacgaggacgaggacaacagcggcagcgacggcgacaacgacgagggcgacagcagcaaaggcggtggcagcaagggcgacggtggtagcgacggcggcaagggccacggtgacgacagcagcgatggcggcaagggtgacgacgacagtggcgacgacgacaagggcgacgacggtagtggtggcagtgacggtggcggcagcggcggcaaggccagtggcataatgccactggtttaa

SEQ ID NO: 22385 - DNA, 732 bp, Zea mays
  Peptide Sequence Number=SeqID_65760
atgaagctccaaagtcatcctcaccctacagcgaggtacctggtgctcctcgaacaactacaccgcatactggggaggcgtagcataacctgctccctgcagtacctcccacaagatgaggggaaagccctctcgtgcgagacccggaaattaactaacggtaaagaaaaggaggatggggaagcctggtccatcaatcctcatgctcctcacctgctgaggcaaggtcccactcgactgttcagcccgatggcagggtggtcggccaagtcattccagcaaccatatcctccagagaaccttacaatggatcaagcagtctcattagctgcgagaagcagacgattcaaatcgatttttaaccttgcaagatgggtcgagctcgccggcgacacgtgctccggcctgctcacagcaatagagtttaatcaaattgcttggggaggttccctagaggtcaatggtgctgtaggcgcaaagaatcgaaggctcggggagcttcaccgtgctccgaggaggctagccgagggattggacggcgtggaggagggctggagtggccagtccacggtggtcgggctcgggcggccgctggcacgccgtgtgcagggcacggaagcgggcgtgggcgcggggccgagcgtggcgcgcgcggggccaagcgtcgtgacgtgctctagcattgccagggcgtatcgaacacatggtcgtttcattctgcccgagttctag

SEQ ID NO: 22386 - DNA, 522 bp, Zea mays
  Peptide Sequence Number=SeqID_65761
atggctctgcacgtgctgaccaccttttgtggatttcaccctttggagatgtcaacccaccccattggcttgttcccctctgagaaggaggacgaccctatgtggaaggatctgtgggctctctaccccagacacaccgctcacctgatggttcggtgcatcattgccctgtatcgtctgcaagccttacgaggtgaggcgatgtcccagcttatgagaaggatctccaggtggagcagatggccaaccacatacaagagctcgaggatcaagctggaagctagggaaaacactattgaggttctagaagaccagctccagaacacccaacagcagcttgaagaggccaaccagcacttggatttacaccatcaagagatcgaggacaccgaggcagaaggggccgatgaggacgtggatatcgagggaggcgaggagccggagcccgcatctagcttggacacttctggctcaggaagaccaccttcccccgagtctagcattgcctcgtttgctcgttag

SEQ ID NO: 22387 - DNA, 858 bp, Zea mays
  Peptide Sequence Number=SeqID_65762
atggctaccgtcggaacagtcgaaaaggcagtagtcgcatgcggtcatgaagtcccgcatggcactggggttgccaagtccggagaaatcccaacagaagctgggctcatcgtcttcctcggacccagagggcccgtaggtcgagacgttcgtcagccggtcccaaggtacgagggtgacgtccagcaagcctttcgcgagcgtgccggcgtcatctgtttgctcggaattggcgtgtcgcggggagacggcgctcgccttcgtctcaaacgcgaggtcgatgcccgacgcgccccccgttggggcgctggggccgtcgactcgctcgacagccgacgaggcgctgcctcccgcttggccttggttgccccgcctcctcctccgttggcgagggagaggacggggcgagctcgaatgttgttcttccaccacgcggcgaagacgtcatcgattccgccgccggccggcgggctgtcggccgccattgtcgctgtcgtccggcggtggaaagagtatcatgtcgtagccgccgtcgaaggacatgaactcaaggctcccgaaatggagcaccgtcctgggtcggagaggttgctggagactgcccatctagagcttgacgggaagctgttcgtcaacacgcagcaggcccctacctggcgcaccaactgtcggcgtttcgagaccgggaggtccctaagccgacgagtgaaatgtcgccgcgtgccccagcccagatgggtcggcgcgaggccgagcgcgaaggggggaagtgaggtggccggagatgggcgtgagagaggtggaaatcccgcggccttcgtgttcgtcccacgcccaagtcgggtgcgcttgcagtag

SEQ ID NO: 22388 - DNA, 1836 bp, Zea mays
  Peptide Sequence Number=SeqID_65763
atgacttcgtacggcggacagccatcggttgaagtcttcgcgaagtactattgcctgcactggcagaaaaggatgattggaagtaaggttgcccagtttgggtcctgtacatttacgccaaagaccagcaagacctcgatggaggtagttgagttggttccttgcgcccgcaacaaatggggcaactggcatgagttttggttctacgttgcggagggcacagtcgaagaccattcggggctccccgtggccgagatgtgctcgcattattactccgcatacccgccgtttgaagtggcggaggaggatgcagacgaaggggcccttcggtgcgccgccggcctgagcagcgggcgcgatttggttgaggagtttgtggcatatggggtgtggcctttggcgcatggctgggcgctgggcgaagtatgccctcgccagatgccttcccgtgatgggatggtggtgcgaagtcccgccttcgcactggatctacgtagccgcgatccggcggcctttgtgcgtgaggcggaggatggggcagattgtcgggtcttcgagttgaaccgtctgccgtatggcggttatcccgggcaagacgatgtggatcatcgagggaagaagccggcggtagagactggagatgaccccgcgccggcggccgccccatcctctaagaagaggaagctaggtattggtacgggaggactgggggtttctgatggttttgttagggaattgatgaggacatgtgcggccccggggggaaggatgtcttcgcccgagttccgggagtctttggcgcggatgctgagggttaccgggggttggtggcctaagaatgttcctatcccccgcgcggccggcgaagacttttttacatctcgcatggttcatgattggagagtatttccttacgggcggaatattgctgctgttgtgtcggcagtgatggacaaggatcgtcagggagctgcgcagaagcgccaggcggtcatcaggctgcatgaggttaggccgaagaggtcgcgggggactgcgaaggctgctgcccccggcggaagccagccgacgctggcggcgaagtcggctgcccctgggtccagcagggagccggaggctgcgaaggcggccgccgccggtggtactaagtctgtcccggcgggagccgtgaaggcccgagagttgcctccaccgggcaagcgcgttgccgacttcgccaccgatattagcgtggatgattatcttgttgggtcgggcgaagaccaacttgttgtcgttccgcccgccgtggcgacagcggcggctaccgtggtgcccagagcgaagggtagtgctcttagtgctggtagtgagattccggcactcactgccgtcagggacgaggcgggcgctgtgtcctgccggctgaaggaggcattaagtcaagtggctgacttcgcagaccgcgcggcgtcgggggcccttacggcagttgtgtctcccgaagtcaagagacttcgggcgcaacatgctgacgccgtccaggaaaagtcggccaccgacaataagtgccgcaagttggcggataaggtggccgcgctggagggtgagaggactgacctccggcgccaactggctgaggagaggaaggaggctaatgaggccctcgccaaggcgcagtctgcgcaggcggaggccaatttggcgcgggcggagggcagtcttgcaagacagtgcgccgaggaattggaggagcggctcaacgctctgcagacccgtgtggagagggccgaggcttcgacgcgctcggaggatgagcggacacgcaagcagcttatggactcataccacaagtag

SEQ ID NO: 22389 - DNA, 270 bp, Zea mays
  Peptide Sequence Number=SeqID_65764
atggagatctgcgagggcggtaagctcttcgaccgcatcgtcgcgcgggggcactacaccgagcgcgccgccgccaatttcactcgcaccatcgtcgaggtcatccagctctgccatcggcacgacgtcatccaccacgacctcaagccggagaacttcctcttcgccaataagaaggagaactcaccgctcaaggccatcgacttcggtctctccatcttcttcaagcctggacatcggttcagccgggctctttcttccctattatag

SEQ ID NO: 22390 - DNA, 1014 bp, Zea mays
  Peptide Sequence Number=SeqID_65765
atggctagagctcggctgagccgacccggacgccccgttcttctccgtcccgtcgttccgtcggtcaagcaccgcagcccagccgtcgtctcgccggtcggcccctgcgcaacactcggtccgcgcatccagcagccccgcacgccctcgttcggtgagcagaggccgccgttgcctagcgtcgacgtagcagcagcgtcccttcgccgatggctcgacttagacacactgctcgtgccccctgcaccaccgcgggacgccctggctgttggaggagctactggaggaggtcctggaggagaccccgacgacgacgactcagaccacagcacggagtcctctgagccgcaggaggcggaaggatgggtcgcccgacccatcacccgtgacgccgctcgcggttgtcacttccacgacgcactcgacaccttgctgcgccaggctttcgaccgacacacctggtcgatcgagtacagttgtgtagtctaccagcacagtcgcgggaggtacccggaccgctgggaggctacctgcctagttcgtcgtccggaggatgatctccggggtgcggaggccttttcggagcactattccatctccgagagggacactgcagaggcggctatgcaggatgcagcacggcgtgcactctcccagtactgttccttgttcggtggggtggccgacggtcttaacattaggtactacccccgccgtcctactggtaacacagagagtgtggttgtctcacatgttggtgaggataaccctaggttgagcagcacagtcaacctagtcgcggtgcttaacactgagctggatcactctctggatgagctgagcagggctcgaacggagattgctgagttacgtgttgagctggcagagcgccgccaccaggagggtggttcccccgctcctgttgggactcagcacccttaccgctcgccgccacgtggtcaccacacttatggttcccctgcctgtaagaccaggatagatctggatccttag

SEQ ID NO: 22391 - DNA, 435 bp, Zea mays
  Peptide Sequence Number=SeqID_65766
atgggcaagaacaacaagcacaagcgtgagccaactcctccatcggaggattttggtgactcggaatactcagaggaggagttctcctctgagtctgaggggtctccgactcccatccccctgcgtgagtcgtctgacgactcccaggggcttgcggtggaggtctggacgtacatccgggccgtcgagcgctccgggctcgagggctcggatgagtcggagtactcctcggatgaggaggactcgtccgaggaggacggtggcggcgacggcgaggacgacgacgacgacgacgacgaaggcggtggcggcggtgacggtgacggtagcggcaggggcggcagcagcggcagcaaggatggcgacggcggcagcagcaggggcagcaataggggcggcagcggcggcagcagcagcaacagggccagtggctag

SEQ ID NO: 22392 - DNA, 1272 bp, Zea mays
  Peptide Sequence Number=SeqID_65767
atggtgcgaagtcctgccttcgcgctgaatctgcaaaaccgtgatccggccgcctttgtgcgtgaggcggaggatagggcggtgcggctcgttggtcgttacgtgccgaggacagaggtccagcgcagctgggatatccgcgggtcgaatgaccgtttgaacagggtttttgaattgaatcaattgccgtatgacggctatcccggccaagacgatgtggaccgccgtgggaagaagccggtggtggagactggagacgtccctgcgccggcggccgccccatcctctaaaaagaggaaattaggtactgctatgggaggacttggggtttccgatggttttgctagagagttgatgcggacatgcgcggccccggggggaaggatgtcttcgcccgagctccgggagtcttcggcgcggatgctgagggttaccgggggttggtggcctaggaattttcctatcccccgcgcggccggcgaagactttttacatctcgcatgcagagtgccggaggctgcccgagtgttgccgtcggcaggcaagcgcgtcgccgacttcgccaccgatattagtgtggacgactatcttggtgggtcggacgaaggccaacttgctatagttgcgcctgccgcggcgaccacgacggctgccgtagtgccgaaggcaaagggcggggcccttagcgccggaggcgagatgttggccctcgcggctgtcagggatgaggcgggcgctgtgtcccgccggctgaaggaggtgaaggaggcaataagtcaggcggctgacttcgtcgaccgcacagcgtcgggggcgctcacggcagttgtgtctgccgaagtcgagagacttcggacgcaacatgctgacgccatccgtgaaaaatcagccgtcgacagtaagtgccgcaagctggcggacaaggtggccgcactggagagggagaagactgacctccggcgccaactggtgggggagaggagggagaccaacgaggccctcgccaaggagcaggctgcgcaggcggaggccaaattggcgcgggcggagggcaatcttgccagggagcgcgccgagcagctgcaggagcggctcaccgccctggagagccgcgtggagagggccgaggtcgcgtcgcgcgcggaggcagagcggatgcgcaaacagcttatggatacataccatgagctgggcgcgcggaccagtgacttcgaagtgccggaccgagagcccggacttcgctgcctggagtgggtgcaggaggagttgtag

SEQ ID NO: 22393 - DNA, 276 bp, Zea mays
  Peptide Sequence Number=SeqID_65768
atgagtcaagcgtttgaacgtactgagcacatgccgagaaatatggtaaatcgtggacatatcccctcacgcgacctgagacgaggtctcccattccggttatggtgggtacaagtgcggtcactgcacgacggcagtcggggtcagtggggcattgtacgccaaggcggttctctggaggaaatggttgctggagtgacttggccgtccatcttgccaccgggttggactgtcgagtgggaccctgcctcggctgaggaggagcatgaggagtga

SEQ ID NO: 22394 - DNA, 1002 bp, Zea mays
  Peptide Sequence Number=SeqID_65769
atggggctcggtgtatgtggctcgctctgccaaggtggtgacaaggatgatggttttggttatgcctttggtaatggtgaagatgaagttgtggaggaggacttccaggagttccaagagtacgatgagttcaaggcatggatggctcgtcttagacacactgcacggaagtcagtcattcctttcttgccttctcgtctcgctgagcgtccgcttcgccgtctagtgactgaggcgccccctgccccaccactgagcgccccagccgctggaggagacccagacgacggaggtggcgacagcagctcaagccacagcactgacctttcagaggagcaggagctggaaggatgggttgctcgacccatcactcgtgacactgctcgcgggtgtcacttccacgatgcgctcgacaccttgctacgccaggcactcgaccagcgcacttggtctatcgagtatcgttgtgttttctttcagcatagtcgcggggtttacccgaaccgttgggaggtgacctgcttggtgcgccgtccagagaacagtctccggggtgtagaggtctgttcagagcactattctatctctgagcaggactcagctgaggcggtcatgcaagctgccacacggcatgcgctttcgcactactactcagtgctcggtggggtagctgatggttttaacttgaagtattacccccactgtccatctggcagcacaggaggcgtggttgtctcgcctgtcggtgaggacaatcctagattgagcagcacagtcaacctagccgccctgctaaacatggagctagaccatgcattagatgagctgagtagggcttgtgctgagattgtcgagctgcgggctgagcgcgcagagcatcgtcacctggaggatggctcccccactcccgtcgggactcagcacccgtaccgctcacctcagcgtggacaccatgcttatggtaaccctgactgcaggaccaagataaatttagaaccatag

SEQ ID NO: 22395 - DNA, 321 bp, Zea mays
  Peptide Sequence Number=SeqID_65770
atggcacagaagattcacttcacatgcaaactgagacttggctgcttagagactgaaattggttgtggttttggaaacaaacttctagagaaagtaatggtatgttttcaaactgacactgagaatgagttcaaggctattcagtcaaagattgtacgtctacgagcagaaatttcaggagccattgatcatggggatcctcctcctgtggtagatgagaatgatttatccttgaagagattagtggaattgaaggagcatcttaatgatcttcagacagaaaaaaatggaaggctgcaaaaaattgacatccacaagtaa

SEQ ID NO: 22396 - DNA, 330 bp, Zea mays
  Peptide Sequence Number=SeqID_65771
atggagtcccatatggtcattatactgccatgccatctaaagaatgtcacatggcaaaaggtatgggtgtatgatgtctcaaagttgatgggaacatggaaaacctttagtcatatgttgtaccctgcttacaagagcaaccgcactccaacacctgacaccgttgttcagggcatgcaatacttgaaggcatccattaaggcaatgtcaataaaagtaattgaggttccaggcgttgaagctgatgatgttattggcaccctggccataaacagtgtttcggctggttacaaggtgaagaaaagatctgaccaagaaaattacaactaa

SEQ ID NO: 22397 - DNA, 2754 bp, Zea mays
  Peptide Sequence Number=SeqID_65772
atgcaatgcaatccttccttagaaggaaccttgcaagtacttgtaaggtttgatagtaagagattttgccgagagtgtcgaaggaatgttatccgtgaattcaaggatctgaaggaactgaagcgcatgcaaagggaacctcgctgcaccagttggttttgtgttgcagatactgcttttaagtgtgaggtgtttgaggatgctgtcgtaattgattggcaccagtgcttatcagagccagatgaatcttatgaccactttgaatgggctattgggacagatgaaggagaatccgatatttttggctttgaaaatgttggaatgaatgcacaagtccacagaaatggaatcgatcttgatcagtttgaggactacttcataacgttgcgagcttggaggcttgatggccagtgcacagagctgtgtgtaaaagcacatgcattgaagggtcaatcatgtgctcaccacaggctagtggtgggtgatggctttgtgactatgacaaagggtgaaagtattagaaatttctttgagcatgctgaagaggccgaggaagaggatgaagacgatgccatggacagggatggaaatgattttgatggtgatgatgcccattcacagaagcatgccaagagccctgaactggcaagagaatttcttttggatgctgctgctgtgatattcaaagaacagattgagaaggccttcagggaaggtacagcacagcaaaatgcacgtagtgtttttgtgacccttgctttaaaacttttggaacagcgagttcatgtagcatgcaaagaaataattacgttggaaaaacagaacaaacttcttgaagaagaggagaaagaaaagcgtgaagaacatgagcgcgggatgaagaggagaacaagagagagagaaaagaagaacagaagaaaagaaaggctgaaagaaaaggatcatagtaaaggaaaaagactagttgaatcaaagtcaccagacaatatttcatcttcagctccaagcaactccacagcatctatcaatgattattcgacaaatactctggactcaagagattcagtgacagaattttctccaatggacaacagtgacatttctacatcagatcaacccaagtctttgagacgaagtccaagatcaagagattattttcctcaagatcagtcatgttggtatgatgactgcggagatgagtctggaagaattggtgaattacgatggaagtcaagggaaaagacaagaggtactgatagaagttgcaacacagcatccacctcaaataacaagacaagagagaggcactcatacaatttttgcagctgtggccatccagaagactatggagttatggacagctgtttcttgccaacagttagatctgtcagagagatgaagatagcaagaaaatcaggagttgagaaacctaaggtgcagtacaacagatgctatacattggatagctttatagtgccaaaaggaaaccatgctggttgtacacagaaaaatgctatcccaaagcaagtatgggagcctatggatgctcgaaggaagactaacttacacaacacagttcatgattcaggttcaattaacgatgttgatccactgaaacatgtggtttttgataacagcggatctcataagttcagtgtaagatgtgaatcacagcctcaggcttctgaaagttccagggatgtttgtaattcagatcaaagatgtgcaaatggtgggagaaatcaaactacttcctgtgctagtactcttatggtaaataaacaaaattgttactcagaaaatgatgaaggctccaggcatgatgtagagctgatgacgaactctgctagttctgatagcacctcgtcatgcatgagccagggagatagggaaagcagctccagcagtacaacctcttcgagcgctcaaaatccggaatcatcttctgaatctgaggaatcaccggagagaataaacagcacagtaggtacaccatcatcaagagctgcttcacggtctttgcttgaagcatgtgcaggaaatggtttcagagaataccaacccaagacaacccgcccagctcacaatgacatgtttgggtacaatgtatcccctgtccaagaccagctgctgcattaccaaatcacgcatccacctcaacaaccgccaataacaatgggatttcatgaccgttcttgggctgcaccaacgaatggaaactttcagtatgctcgaccatcccacttatattctagtccgctcgtattcggagtacctggaaatcattttattgattatccttacatggctcctgccttcagccatatacctccagagcctattcacaaggccgcaggcagctttagagccgtgcctctgtcactgccttttcaaaacggacatcggcaggttgctgagcatactcagagagacatgaatctagagaggcacccttcgaagttgactatgctgacaggcaaggatcccccagaagacaagaacaagtcgggactaaagtatctcccagaagacaagaacaaatcatgggaggcggatgcatccttctcgttgttccaattcaacttgccaatagcttcgcctgtaacaccatcatcgaaagataagagcggaaagttggctgcaaggacgccactggttgaggttcaacctcagctttgcttgagggaacaggcagatgtgaagcagtataacctcttctcctcgaaagataatggtatattttcgtttatgtag

SEQ ID NO: 22398 - DNA, 261 bp, Zea mays
  Peptide Sequence Number=SeqID_65773
atggcttctacccaattaggaacagtgagtgctttatctactaattatggttttcttattgcagtaaatagagaacggggtgaagccagtgcagaccgtgatgttcggctcaagctcaaagtacgattccggcagcaactacacgtccaacatggaccagttcaggaaggtggttttctagagcagtgcgagtacaccgggacgagcgagtacgacactgactccagggatgcggcaaccaggcgccaacaacatcgatga

SEQ ID NO: 22399 - DNA, 456 bp, Zea mays
  Peptide Sequence Number=SeqID_65774
atggcctgctgcttcgtccgcgtcgctgcggcgccccgcctcctcatctaccgcgccgccgctccgcggcagctcccgtcgccgctcaacgtattcaggaagggtttttccgagcagtcagttctgccagtcacagattcgattgagtgtttccaaggaccatcagtgccgaatactccacggattccactgtatgatgacagcgtatcctcaagcatattggatacattgtcgaatccgactgggggtgtccctcatgctgatccttcaaagagcagaataatgctagttgatggaacgtcgatgatgtatagatcctactacaagatattagcacagctgcagcacggccagttggagcatgctgatggaaatggggattgggttttaactatattcaaagctctatccctgagtaaatggactatgagcatcaatcctgtcctcgctttctga

SEQ ID NO: 22400 - DNA, 867 bp, Zea mays
  Peptide Sequence Number=SeqID_65775
atggactgctcatccggcgacgtgaaggcggagaccacgcggcccgcggctgttgctgccgctgccgctgccgccgccggcggcggcacgccttcgctgctgcgggggtggcgggagttccggcggagcgccgtgccggcgaggttcctctgctttgaggacggaaagtgggtcgatgtcgccggagaggcggcggcgcagctgcggcgggcgttccaggagaggagggtgatggccgacgcctcgtgcgggggcaaggcgtacctgttcgacttcctccgcatggtcaggatcgacgaggccacgggcgaggagaccgggctggcgtggatcgaccaccgcggcggctgcttcttcccggcgcccgccgcttgcggcgggggcaggaagcgcgggagggacgacgacggcgcgccggcggaggacaaggccgaggccgagtcgtcctcggccgcctcgggcgtggacgaccgctcagggggggagagccgcggggcagacgccaagaggaggaaggcattggggaacgcggcggcgagcctcggggagaaggacaggtcctaccaggtcgtcagcaagctgttcctcgaatacgggatggcgcaacgcggcgcggcggtcacggcggtgcgcaaggtcgcgtgcggcgcgagggccgcggcgttccgggaccaggggcggctcctcgccgacgcgcgcggcgccgcggccggctccgccaagttcgcgtggtacggcgcctccgcggacgacgtggccgccgtggtggaccgaggtttcgcgagcaacaacgcgccaaggctcggcgctcacaagcatggcgatggcgtccacctttccccgccgcattgcccttacaggaggtga

SEQ ID NO: 22401 - DNA, 306 bp, Zea mays
  Peptide Sequence Number=SeqID_65776
gtacggattgtctctcctgataaagacttcttccaaattttatcaccttctttgcgtctgctcaggattgctccacgtggatcagggatggtttcatttggagttgaagacttcgtcaagcgatatggaccattgaaaccctcgcagtttgtggatgttgttgcactttcaggagacaaagctgacaatatacctggagttgaggggattggagatattaatgcagtaaagctgatatctaagtttggctttgatttctcactcggaacaggcaatcctttgcaaaaacctggtatcctttattga

SEQ ID NO: 22402 - DNA, 267 bp, Zea mays
  Peptide Sequence Number=SeqID_65777
atgaaggggaaagaacgactgtggaaccgtagaaccatgcgggaaagccgctacaaaaagaagcactttcaagcagattctatatgctcgtacagaaaacgtgtcgtagaaagtgaagggtacctcgaccggtatcaaaatcaaggttccgatctgattggtttgattgatgagtggcgaatcggattgaagcgagacgaggctgcatggtttccgtgctccgaggcttctgatctgcgtgtttgctccgagactattggtgcctga

SEQ ID NO: 22403 - DNA, 606 bp, Zea mays
  Peptide Sequence Number=SeqID_65778
atggaaaaattggtaataggcccaatttcagtttatcaacttcaattcttgatgacattcctgacctgcagcgcagcggacactgtccggtggcgcaccggacacggtccggaggcgcaccggactgtccggtgcgcctatcgccagcagccttctccaacggctacaatttggttggtggctataaataccaccccaaccgaccacttcaaggcaaccatcttaacaacaaaagaggctcgtacaatcgcacctgcaactgctaaaccacttgtgcatgtaaagtataaaaaaggaggccaaacacatgttgatgaaacatctaaaaaggtaataaggatgccaaatctgcagctttgccaacatgagcagtttatactcgcttccccgtaccctccacttccttgtcgtcgtgctgattccatatcaaggggtagtgatctggaagatggctatgtttttgtaagtacgaggctcaagatcttgttcaaggaaggtggctgtggtacttttgatcctttggctgtgcgctataaccagattgacatccaatctggtgctagcatgacacctatatggaccccctgtaatatgtgtatgagttaa

SEQ ID NO: 22404 - DNA, 405 bp, Zea mays
  Peptide Sequence Number=SeqID_65779
atgctgaatatgacttgttgcagcatcgtcgcagtggacataactgtgagggaagggtgtacctggttttgctactcagggcggaccgcggggcatgggcacacagccgccgccacaacacgcgcgcaggtcgtagtgcggtgggggcgatcagagggaggcacgacagccctgcttggttggcgcgcgttcgatgtcgagatgtgggcgcgcgacgacgacgcgggagcaagggtcggctggagccgtggacacagctgcgacagaagggtgtacctgcttttcctacttcgagacaggacaaccgcggtcacgacgcacgcaagtcatagcgcggtgggcggtgggtggtgcggaggcacagcagccctgctaggtcgggtcgcagtcgacttcggggtgtag

SEQ ID NO: 22405 - DNA, 528 bp, Zea mays
  Peptide Sequence Number=SeqID_65780
atgatccaggcggtgatggtgatcagcacccaggccaagccccgccttctcaagttctacagtttccagccacccgagaagcatcaggacctcgtccgctgtgtcttccaattactctctgcaaggcccgagagcgcgagcaattttgtcaaggtggactccatctttggcccggtaatggctgatgcagtagtaaatcttatgctaatgggacagctgggaacaaaaatggtctacaagcatttggccacactatactttgtttttgtctttgatagctctgagaacgagcttgccatgctcgacctcgtacaagtgtttgttgaaacattggacagatgcttcaagaatgtatgcgagcttgacatcgtatttaacttcaacaagctgcacaccattttggatgagatgatatcggggggacaggctggagaaacaatcgagcacaaccagcttcatacccaagtcgattacagagcgttttacccgttgagcttccactcgtttccagaacaatgtgacatttaa

SEQ ID NO: 22406 - DNA, 516 bp, Zea mays
  Peptide Sequence Number=SeqID_65781
gtaccctgccgttcgtcaggcggttcacgcccaaggtggtggaggctgccacgcgcggctttaccgcggtgctcgacgccaccagcacggcccacagggcgcttcgccggcggccttgtcaccaccgtcgtcaggctccgccgcgacgacgaccaccgccagggagagggaggagggcccacggacgccttctacctggagctgcagctgctggcccgcctcaaccaccgccacgtcgtcaggctgcgcggcttcgcgctagcccaccacgcaaggcccgtgcccttccgccctccgaccctttcttccttccctccccaccgttctctgtctctgcttctgcggattggtgagattcacctttggatatggctgggctggggtggaacgtttcaggttcctcgtcttcgatcacatggagaacaggagcctcaacgaatgcctccacggttggtgaatcaaagaccactgcagtgcacactcgcctaccactatcatatcactctctgtggataa

SEQ ID NO: 22407 - DNA, 408 bp, Zea mays
  Peptide Sequence Number=SeqID_65782
atgggcaagaaacgcaagcgcgagccaactcctccgtctgaggactttggtgactcggaatattcagaggaggagttctcctctaaatccgaagggtctccggctcccatccctctgcgtgagtcgtctgatgattcagacgactcccaggggcttgcggcggaggtctggacttacatccgggtcgtcgagcgtttcgggctcgcgggctcggatgagtcggaggactcctcggatgaggaggactcgtccgaggaggacggcggcgacggtggtgagggcggcgacgacgacgacgacgacgacgatggaggcggcggcggcaggggcggcaacggcagcagcaggggcagcaacagcggcaggggcggcagcggcggcagcaggggcggcaaggccagtggctaa

SEQ ID NO: 22408 - DNA, 516 bp, Zea mays
  Peptide Sequence Number=SeqID_65783
atgcaggtggcatgcaactgcaccaagggggcgcaccctttcgacttcgatgcgtccagcatggaggcccaggcccacatgtcatgtaaccagcgcgccggttactacgtgcgagaaactgcaccgccactcgcgccagtaccgcgccttctccgctgcgaaaccggtgccacgactcgaggcgaccctgcgcatggcccaacagtgccaaccgagcacatcggtcatgggtcagtcagccgcgggagaaggcgcgacgatcgatacggccaaaagtgggccggcaggaccgggaaaggggatactccaaaagggatccttctccgcgaaggaagcgggccccgagccccactactgatcagaggtttgaaggctagcccctcggaagggttcaacaaccacctcagagcactcgggctccgtgcccactactggtcagaggttcgaaggctggcccctcggaagggttcaacggtcgcctcaggccactcgggctctgcgcccactactgattag

SEQ ID NO: 22409 - DNA, 288 bp, Zea mays
  Peptide Sequence Number=SeqID_65784
atgacagatgagagtgaggtgcggtggtggctcgtcgacatcagccattggcacccttcccctgcccagttcgatgatgcaccttccctcctactacttcacgatggcaccaccatctccaggtaccgtgccgatggaggaaaggagaaacaaggtattttgaaggacacaaatacaacaaaggtttcaattttcctaattcactacagcatattacagaagaacagagctgagaagccagatgtctgcagtactattagagaagctgcgaaatgcaataaatactga

SEQ ID NO: 22410 - DNA, 1005 bp, Zea mays
  Peptide Sequence Number=SeqID_65785
atgacctcagggtggacgctgctgcgacgagctcctcgcccacgcccccactcgaggggcgaggacaagctatcaaagccaaagagccagaggcccggagcatgcatggtggcggtgacccccgtcggcgacgaggacttcttcaaccatcgccacctcagcgctgacgacataagccatctgcccaccggcagattcccgctcggatcctcccggacgagcgaagcaccaacctccgcgcagaggcgccgtaccggggaaaaggcaggacagccccagaacacgaacgccgccctagcagcgcgtgacgtcttgggcggtcccccggtgcacgcggctcgacaaccgctctcacggcgggaggagacaccgggagccgaaccaggccagccgagccagcgagcccaacgcactgaagctgacgacgctcaccgccgaccagccccgcgttgtcgaagtccggccctcccgctaggtcgcgaggggaagcagccgggctgcctgacgaaaatccttgaagccgaacggtggctgaaaggtaccaactttcgcaaagttgcgttcccccaacgacgacaaggcggaagaaccgactgcaccccccatctgggggctcgaaaggacagacggcacctttggcaggcgaagcaggcgacgcttcccctccgccataatgaccgcgtcaaaaaaggggtcgggaaaggggatactccgaaagggatccttctccgcgaaggaagcgggccccgagcccccctactgatcagaggttcaaaggctggcccctcggaagggttcaacagccgcctcagagcactcgggctccgcgcccactactggtcagaggttcgaaggccggcccctcgaaagggttcaacggccgcctcaggccactcgggctccgcgcccactactgatcaggggttcgaaggctggcccccgaagggttcgacagccgcctcagacacagagcgagggatgaccctgggtacgttcgatacataa

SEQ ID NO: 22411 - DNA, 732 bp, Zea mays
  Peptide Sequence Number=SeqID_65786
atgggtttcagatgtcctaataggaaaggtgttgcagatttcctgcaagaagttacatctaggaaggatcaataccagtactggtgtacaagagatgaaccatatcagtacattttagtaaatgactttgtagagtccttcaaagcattccatgttggccatgcattgcagtcggagctcgagctgcccttcgatcgaaccaagaaccaccctgctgccctcacaacatcaaagtttggtatcagcaagatggagcttctcaaggcatgcttttgtagggagtggctgctgatgaagaggaactcatggacgaaggaaaatccacttctgagattaacagttgagaactgtgagttgtccagtattggtgtgattacacttctggagtgcctcacaaatgtgaagcaactccttgatgtgctatctattgcagacaatcatctagggagttctatggcagctgcattggccagattcttgggttcacatgtacgggctttaactgctacagatatcggcttgggaatagtaggcttccaaacacttgaggaaacattgccaacagaagtagctctttcccacatcaacatcagaatccaccaagaatcagcaggacaatctgagcaaatgagccaaatgtgtctgcaacaaccatctctcttcctactgcaacaagaagtcagatctattaaagcatcaacattaattttacaagcttttggtcagatctaa

SEQ ID NO: 22412 - DNA, 588 bp, Zea mays
  Peptide Sequence Number=SeqID_65787
atggccggagtcggtcggtccacgcgcgcaggcggggatgctcgtcggcggcgaggagtccggcctggtcacgagactcaatggatagctcggtccacgcgcggcggcggaagaccgaagtccggtgaggtcgatctcgggcctcaggtgaagtccggccgggtccgagggcttggcaagcttcacgggctactggcggagctagccgaagcactggctcgacttgaggatggctggagtgggctggccacggtggccgaagctctagcggcaatggcgggcggaattgagctcgccggagctaagggaaagtggctggccggtgaggaagggaaggtgtttttcgccttcggctcaaaaagtattaatttcgtccacaccaaagcatttcatacattggcggaaaggccattcgagcttcggcagcatccatggagcttcgactttttattttgcagcttcagcttcggcttgatcaacctcagcggtgccctgagaagctaccagggcacaaaagtcgccgtgtctggcaataacatcatcgaggtcatcaatctcaccttcgatgtgttcgaaggctcctgctag

SEQ ID NO: 22413 - DNA, 461 bp, Zea mays
  Peptide Sequence Number=SeqID_65788
ggatcgagaaaagggatattcgaaggatccttctcagcgaaggaaacgggcctcgaaccctcctgctgatcaggggttcgaaggttgcgccctgcggggttcggcaacccgcctcagagcactcaaggctccgagcccttactgatcagggggtcgaaggctggcccctcggaaagggttcgacagccgccccagagcactcagagtcagggatgaccctgggtatgttcgttacatggccaaggctcgggctacactcccgagcaaatcacctgcaggtacttttggagcgcgcctctgggccactagctgacccttatcgaacggggctcgggcgtccgctcggatcacccaatagcaactcactggaaacaccatgttcagcacccaccgagggctcggaggctgctctcgcaccaggctacggccaaattgttgaccacgtcgacaaaccagcttaa

SEQ ID NO: 22414 - DNA, 638 bp, Zea mays
  Peptide Sequence Number=SeqID_65789
ggggggacgtggggggttttccttccggaagcccgagggttggagttttgcctttttgtttgccggtggccgaaccccctagccaaggggttcgggcggaggcggaaattcgtttgggccgagggccagggcgggagtccgagccctgggggtcgggcgaggcgggagtttcgtcgtctttccgggtcttagcccgagtccgagccctggggtcgggcggagcggagttcgccgtcttcccggtcttagcccgagtccgagccttggggtcggggggagcggagttcgccgtcttccgggtcttagcccgagtccgagccctggggtcgggcggagcggagttcgccgtcttccgggtcttagcccgagtccgagccctggggtcgggcggagcggagttcgccgtcttccgggtcttagcccgagtccgagccctggggtcgggcggagcggagttcgccgtcttccgggtcttagcccgagtccgagccctggggtcgggcggagcggagttcgccgtggcgcctttggcaaggcctgattgcctgtcagactcactctgtcgagtggcactgcagtcggagtggcgcaggcggcgctgtctttctgtcagactggccagtggagcggtggagtga

SEQ ID NO: 22415 - DNA, 476 bp, Zea mays
  Peptide Sequence Number=SeqID_65790
atggatcaagcagtctcattagctgcgagaagcagacgattcgaatcgagtttttatccttgcaagatcagggctcaccgccttggcgtacaatgcctcactgaccccgactgccgtcgtgtagtgaccgcacttgtacccaccataaccggaatgggagaccacgtctcaggtcgcgtgaggggtaaagtctactgccaggctctggtgctggatctgggctacctcctgagcagctccttgctccagcacgaggacgtactctccatcagcaaggttacagtctatcgaaatgcaatgaacattgcccgcaagaaagaaaagggtggcgcggcttaccggtggcgagataggtccggcgaggggcggcgttggctcggggaggctctggcggacacagcgatgtacggctcgacggcgggatggccggaatcgctaggtccacgtgcgcaggcgggtgtcctcgtcggcggcgg

SEQ ID NO: 22416 - DNA, 741 bp, Zea mays
  Peptide Sequence Number=SeqID_65791
atgacgacggcggcccccagctctcttacggaagccggacgacgtcagcaaggactcgaccgctccaacagctgtccctccatcaggctccgccgcacctccgacagccacgacatcacgccagcagggtgcccagatctctccggctgccacattggcatgaatgaactacctccacaccagaggggctgcgagataacaaactccaagcagctcgccggcaaccattgcaccagcagcgacaatgacctccgcctcgggcggctagacaacagcagcaattgccccagggcaaacgctactgtgaaaaggccctcgcccccgtccccctacgaggggcgagaacaagccattaaagccaaagagccagaggtccggccgcaggtggcactgacggtctcgtcggcggaggcaaccccctctatagtgggaagcctcacctatggcggccaccacctcagcaccgacgacagcggccgcctgcgcaccaacgccgcatcggcgaatggcggccgccccagcgcgcacaaggaggtcctcactcccgtcctcgctacaggagtggggacaggaccatccaagaacgcggacaccgcccccgcggcgtacgacgtcttgtacgaccccctggtgcggccggcagcacgggaagggtcatggacgtggctgacctacgcacgacacgaccgtcgcccgtgcggtggacggacagccacaccccaaccaggcagcaggtggtag

SEQ ID NO: 22417 - DNA, 786 bp, Zea mays
  Peptide Sequence Number=SeqID_65792
atggcttcccacggatcctcagacgacggaaatgcactgtcccacactgacgggcttgcacgggagggctttccccgcattttgtgggagcagtttgagaagcatcgagtgccccgttgtagggtgaggatgaccctggagcctcatcccctacagccaggctggcgttcattggactctgagtcttttggataccggactgaggacacgatagaggcgattgctctgcacgggttgaccactttctgcggattccatcccttggagctggctacccaccccattggcttgttccccgccgaaagggaggacgacccaatgtggaaggatcgggtggagcatgccaaggatatatgggccatctacccaggtcagactgcgcacttgactgtacggtgcatgaatgctctgtaccgtctgcaaagggtggaaaaggattggcaggtggagcagctatcccatgagatccaggagttggaggaattagtggggaccaggaagaacaccatcgaggttctcgaggatcagctccttaacacacagcagcagctggctgaggctaatgagcacctggatatgcatcaccaggggatccaggacatggaagccaacgaggacatcgacattgagggaggagaggagcctacctccagcgtggacactgctggctccgggagaccaccttcccccgagtcgagtgttgcctcatggccgggagacagcgccgtggccagaatgagcgcgttcctccaccgccaccaccgcctcccactctgcaggagctaa

SEQ ID NO: 22418 - DNA, 123 bp, Zea mays
  Peptide Sequence Number=SeqID_65793
atgtccaagaagggcagctgcgaggcggacgtcgagggtggcagcaatgcactggaggtggacgacacggaggcaatgctcatctacgcattagtaggaaagaaagaaccagctaacaagtag

SEQ ID NO: 22419 - DNA, 290 bp, Zea mays
  Peptide Sequence Number=SeqID_65794
atgccggggcacaagggcgcggggtcacggggcgtgcaggcgcgaggccgccggggcgccgaggcatggacgtgcaggggcgcgggcgcgggggcgctgggccgccagggcgccgaggccgcgccgcgggggagcaggggcgcgccgggggagggggctgaggccacgccgcgggggtggccgggtccacaccgtgggagggaagagagaaagggagagggagaggggaggtggagctcaccttggggtccaaatccagtgatcaccattccaaacctagggtaccacag

SEQ ID NO: 22420 - DNA, 359 bp, Zea mays
  Peptide Sequence Number=SeqID_65795
atggggggctcggagcccggttccttcgcggagaaggatccctttcggggcggttattgggacgaaggtgaagcgtcgcgcgctcctcctaccaagggaccagcgtgtcctgccgcggagttaatgctaggcgtcaattgtttggcggggccgccgttgctcgcctgggacccgttcgaggaacggtgcaggggtgcaccgtcgtcacgccgtgagaggaagctctctttgcggcccccggaagggacccttgattcgtggctaatggttcccaacggaaaagggccgatggtggccaagtggccgagcggtatcttgcctgcagcaatggcacggccgttgtctcaagctggggaagg

SEQ ID NO: 22421 - DNA, 687 bp, Zea mays
  Peptide Sequence Number=SeqID_65796
atgacctcagggcagacgctgctgcgacaaggccctcgcccgcgtccccgctcgaggggcgaggacaagctatcaaagccaaagagccagaggtcggtccgcgggcggcgccgacggtctcgtcggcagagaagccttctccagctgccaccacctcagcacataccccggcggcggagtcggggcggccccactcggaaggaccatccactccggctgcgggtcaccagagaggggatggagcaagccatcggcgacaagggctttcagatcgtccttcgtgacggtggagaaaggccacgggtcgcgcggcggaacaacggttacccgttcggccatcaccaagcgaagggggtggcggcggagcggacaagggaccgggaaaggggatactccgaaagggatcctcctccgcgaaggaagcgggccctgagccccctactgatcatgggttcaaaggctggcccctcggaagggttcgacagccaccccagagcactcgggctccgcgcccactactggtcagaggttcaaaggctgacccctcggaagggttcgacagccgcctcaggccactcgggctccgcgcccactagtgatcaggggttcgaaggctggcccccccccgaagggttcgacagccgccccagaacacgcagagcgagggatgactctgggtacgtctga

SEQ ID NO: 22422 - DNA, 753 bp, Zea mays
  Peptide Sequence Number=SeqID_65797
atggacgatggagctgacctcccctgccagttgctcttctcccacccggagatgcctcacagcttcgacgagttcttcagcagcgccacgaccacgaccacctgcacccacacgcacagctgcgaccctccgggcccctcggccgccatgcatacccacacgtgcctgcacacgcacacccaggtcctgggcagcggcggggaggacgacggctcagcgaagccgcggaggcccctgggaaacagggaagccgtgcgcaagtaccgcgagaagaagaaggcgcgcgcggccttcctggaaggggaggtcaagaagctgcgcgccgccaaccagcagctcgtgcggcggctgcaagaccacgcggctctggaggcggaggtggcgaggctcaggggcctcctgctcgacgtccggggcaggatcgacgccgaggtcggcgtgtccccgtttcagaggccatgcagcgcgggctctgtggagtgcggcgctgatccagctctgcgcttcgatggcagctcggaggtagtaggaggtggtggctgggagaagagctcaagccctcaagttgcggactgcaggatcgatgaagggggaggagggatgtcacgggaacttgatgttctagaaggtttgcgtcactccattgatgctggggcaacctttgagaatgaggaaccgacaggtacagaatactttcatatgagcactgaagaaatcgaaattgacaatgtttcatgcgaaattgtactgcgg

SEQ ID NO: 22423 - DNA, 696 bp, Zea mays
  Peptide Sequence Number=SeqID_65798
atgtacgacaagctctggcgcagccaccgcttggacgcggtgcagagcggctgctccgcgctgtccatcgtcaagcagggggacctcatggtcgtcgccaaccccagccaagagacatcagtactcggtatgtcgcgcacgttcgacaactactatatcgaggactgtggcatcatcttggcgccagaggtgatgcagaggaggaccgacaataatgaccagttcgtcatcctcaccaccgttgggtcactcaatctgaactcgtacggtccaaaccccagggttatgaaggctgggaagcaccgggaggataaggaggggaaaaaggagatcggcttttgccagaatgaagatggtttccccaagttgatgagagcatgcacagttcgcctcagaatcaaaagtcagccagagtatgatggtcgtgaattcgtcgagcatggcacagagaagatgcgtgcattggaagggcaacaactgcttgaggatgaccccacagtcgtgtacctcactgcatacctgctcactctagatgcacagtatgatttcttggctcggcaccaccgtcagatgattgcccgagcagaagatgcagagaagcgcaaccatcagctccatgtggatctcaccacagctcaagcccgtgtagctgccttggaaggtcgtgaagtcatcgctattgaagccctgaagtaa

SEQ ID NO: 22424 - DNA, 633 bp, Zea mays
  Peptide Sequence Number=SeqID_65799
atgcctcccaagaaaaacactcgcctcagctcaccatcaaacgacgaagacgtcagggttgccctcgccgctaagaaaggcaagggcgaggccgctaagaaaggtcaggtcacccttgcctctgaccactctccaccacctaacccgaaggcctccaccgacctgcatggcgaagcccttactgcaaagcaaaagcaaaaggcagtaaacactgaagaagaaggcgaagtccacaccacaatctcagagaactcgcaggacccttcgccaaacccaaaaaaaggcatcacatacctccaagacagccaggacctcggcataaacaccaaggaacaacttttaataaaaagcctatgcatgcacagctcaaacctcaaaaagcaaagagatgtcctcgcaaccaagcagcagcgtagcgaggcccaagccagggtatgtctcctcatcctcgctcagccttcgcaaggtcgcgtaaggttgagcagctttgacgaagtcagacagcccctgcaggattatgcttcccagaccttcaacttcaccgacaataggttcccactctctgccagactgcaagcaacgccttggccaaacaattacatgcccgaaatctgtccaaaatacaatgggtag

SEQ ID NO: 22425 - DNA, 381 bp, Zea mays
  Peptide Sequence Number=SeqID_65800
atgcctccgcctccgctccacacattctcggcagagggcatgggagtaggcgcatcctctccatattcgtccgacatcagccccgacaccgacccgcgcagtggctattgtacgtccacgagggtgtttcacaacatgcacacaccatcgttttcgccgtcgtcggacgtcatattcgtcttcctgaccttcgccctgttcttcctccccaacctgctgcccctgcccacggtcgcagccgcgagccgaccgacgctcgtcgacgcgggattggatccgatctggtgtggggagttcgtcatgttcgcctggactcggaggcaggcccaatcatctcccggtggggtaccaccagaaattgtcacttggacatggatttga

SEQ ID NO: 22426 - DNA, 1053 bp, Zea mays
  Peptide Sequence Number=SeqID_65801
atggctgcgccatggcttcttgcttgcagcttgctgctgctctccctggcgacctttcacggagctgagggcgcgatcggcgtgaactacggcatgatcgccaacaacctgccggcgccggagcaggtcgtctccatgtacaaggccaagaatatcagctacgtgcgtctgttccacccggacacgaccgtgctgaacgcgctccgcggctccggcatcggtgtcatcctgggcacgctgaacgaggacctcccgcgcctggcgtccgacccgtccttcgccgcgtcgtgggtggccaccaacgtgcagcccttcgccggcgctgtccagttccggtacatcaacgcgggcaacgagttcggattaccactttcatccctaatcccgggggacccggcggcgcaggtgctcccggccatgaagaacctggagtcggcgctccggtccgcgggggtcgcgggcgtccccgtcacgacggccgtggccaccagcgtgctcggcgcgtcgtacccgccgtcccagggcgccttctccgaggcggccacgacggtgatggcgccgctcgtctcgtacctgtcgtccaggggcgcgccgctgctggtgaacgtgtacccgtacttcgcctactcgggcagcggcgggcaggtggcgctcgggtacgcgctgctgtcgggcgccggcgccggcgccgcgtcgacggtgacggacggcggggcggtgtacactaacatgttcgacgcgatcgtggacgcgacgcacgcggcggtggagaaggccggggtgcaggggctggagctggtggtgtcggagaccggctggccgtcggccggcggcgagggcgccagcgtggagaacgcggcggcgtacaacaacaacgtggtgcggcacgtcgacggcggcacccctcggcggcccgggaaggccctggagacctacctgttcgccatgttcaacgagaacggcaaggccgagggcgtggagcagcacttcggcctcttccagccggacatgagcgaggtctaccacgtcgacttcacggcgggatccccctag

SEQ ID NO: 22427 - DNA, 1017 bp, Zea mays
  Peptide Sequence Number=SeqID_65802
atggtagttcaattttgccgagcggaaaggttccttttcctcagagccatagagggggttgtctactggattgagcaggttgtggcttatgcccatacggtcgaaggcatacaagaaaatgatgtctgcatggctaccattatcgacgagtactttgtgcaaatcccaccatgcgattctacaatttatcaccagcgcgtctacatggggtgcactgcggaggtcgacatctcttgcatcaaagtggtgggggaagtggtaagggttggtttggatgttgaggtggtggaggtggcaatgatagaatttcttgatgttgaaggcgctgttgatgtggaaaaagattgtggttttgatgctgggggtaatagtggtgttcattttgaatttgatgctggttggttggtaggtatgagcgatgactctttggttgttagctggagcggccctagccattcggtcctttgttgctttagtctctgggcagtccctggtcaggtgcctgctatgaagatttgcggcaagggggaggcctggagctgtggtgcaagagggtttcgttcatcaagcacgcacaattttagctggtcttcagttgagatgcctaggacctcgccatcctcgatgatatcgttagcccggaggcaaagcctggcggagggttccgatggaggccttcagagctacacgtgcgaacggtgccttcagtgggccctaagtgggaatgctcaagtgctcaacaaaacagtgggtagggaattgcagcgtcttgttaagcacccatcaatgtacaatgcgatggtatttataggtaaccatgtgggtgggcacaccctcctaagtataattatgcccccggttacctgctttagcccgggaatattcccccttgggggtcattacaacgaggttaagtacaacatgattaaatacaccataagccttaccccaggaaaggggcttacaaatgggcatgaatggccagcggggcgccgcatgggcccatcccacagatga

SEQ ID NO: 22428 - DNA, 1434 bp, Zea mays
  Peptide Sequence Number=SeqID_65803
atggcgtccgcggccgccccgccaacctccctctccctcgcggcccgtgcggcaagcagggcggccgccgccccgctccgcaggggaggcctcgccgcggcgcgccagccggcgcggtcgctggcgttcgcggcgggcgacgcgcggctcgcggtccacgtcgcgtcgcggtgccggcaggcgtcctccgcgcgcggcacgcgggccatggccaccatggcgaagaagagcgtcggggacctcacggaggccgacctcaaggggaagcgcgtcttcgtgcgtgccgacctcaacgtgccgctcgacgagaaccagaacatcaccgacgacacccgcatccgggccgccatccccaccatccagtacctcctcggcaagggcgccaaagtcatcctctcaagccacttgggtcgccctaagggttttacacccaagtttagcttagccccccttgttgcacggttgtctgagcttcttggcattcaggtgcaaaaagccgacgatgttattggccctgaagttgagaagctggtggccgccttgcccaatggtggggttttgctccttgagaacgtaagattctacaaggaagaggagaagaatgacccagagtttgcgcagaagcttgcctccgtagcagatctttacgttaatgacgcgtttggaacagcccacagggcacatgcatcgactgagggagttacaaagttcttgaagccttctgttgcagggttccttttgcagaaggagcttgactaccttgtcggagctgtttcaagccctacacgcccatttgctgccatcgtgggtggttcaaaggtgtcatccaagatcggggttattgaatccttgttggagaagtgtgatatccttctcttgggtggtggtatgatcttcacattttacaaggcacaaggtctttctgtcggtgcttcgttggttgaggaagacaaactcgatcttgcaacatctctacttgcaaaggctaaggaaaagggtgtctcccttatgttgccaaccgatgttgtcatcgctgataagtttgctcctgatgctaacagccagattgttccagcatctgcaattcctgatggttggatggggctggatattggcccagattccattgctgcattcaacgcagccctggaaacaacccagactgtcatctggaacgggcccatgggtgtttttgaatatgacaagttcgctataggaactgaggctgtggcaaagaagttggcagaacttagccgcaagggtgtgacaactatcatcggaggtggagactctgtcgccgccgttgagaaggtcggagttgctgacgttatgagccacatttccaccggaggtggtgccagcttggaattgttggaaggaaaggagcttccaggagttactgcattggatgaagcagccactgtgactgtatga

SEQ ID NO: 22429 - DNA, 1254 bp, Zea mays
  Peptide Sequence Number=SeqID_65804
atggtggggagctacgcgaacggtggcggggctgcgccggcggcggtagcggcggagaagctcgacgagctgcggctgctgctggggaagtcggacggcgacacgctgcgggtcgtcggggtgggcgccggggcgtgggggagcgtgttctgcgcgcttctgcaggacgcgtacggccggcaccgcgaccgggtgcaggtgcgcgtgtggcgccgcgccgggcgcgccgtagaccgcgccgacgccgagcgcctcttcgaggtcatcaactcccgcgaggacgtgctgcgccggctcatccgccgctgcgcctacctcaagtacgtcgaggcgcggctcggggaccgcacgctgcacgccgacgagatcctccgcgacggcttctgcctcaacatgctcgacaccccgctctgcccgctcaaggtcgtcaccaacctgcaggaggccgtttgggacgccgacatagttataaacggccctgccctccacggagaccagggagctggagttcccttggagaacattctatatcttggaggcccaaacattgcttctgagatttataacaaagaatatgcgaatgctcgcatatgtggagctgacaagtggaggaaacatcttgcaaatttcttgaggcaacctcattttattgtatgggacaatagtgatctcattactcatgaagtcatgggcggcttaaaaaacgtatatgccattggggccggtatggtggcggcccttacgaatgagagtgcaaccagcaaatcagtatacttttcactttgcacatcggaaatgatatacatcactcatcttctagcaccagagcccgagaaacttgcaggacccttattagctgatacatacgtcacactgctgaaaggtcgcaatgcatggtatgggcagaagttagctaagggagaactgactctagaaatgggggacagcatcaagggcaaagggactatccagggtgtttctgcagtcaatgcattttatgaactgctgagccagggaagcctaagcgtgatgcatccagaaaccaagaaggctgttgctcctgttgagctatgcccaatactcaaaacactatacaaaattttgatcaagagggagcttacgaccaattccatcctccaggcaatacgtgatgaatcaatgtatgatccacgggaaagaattgagatggcacagaggcagtctctttaccggccatctcttcttggcctgcctaaagctgatgcgaaggcctaa

SEQ ID NO: 22430 - DNA, 240 bp, Zea mays
  Peptide Sequence Number=SeqID_65805
atggggctcggtgtatgcggctcgctctgccaaggtggtgatgaggaggatggttatgttcatgactatggtaatgtccactacagccaaatgggatatattgctgagtatgttgatgtgtactcacccttgctttacacaccaaaccccccaggttttccgcgttgcaaccactggtcaggtgaagatgaagccgtggaggaggacttccaggagttccaagattatgatgagttctag

SEQ ID NO: 22431 - DNA, 366 bp, Zea mays
  Peptide Sequence Number=SeqID_65806
atgaagccgtggaggaggacttccaggagttccaagattatgatgagttctaggcgtggatggctcgtcttagacacactgcacggaagtcagtcattcctttcctgccttctcgtctcgcggagcgttcgcttcggcgtccggtggctgcacagtcgcggggtttacccggaccgttgggaggtgacctgcttggtgcgccgcccggagaacagtctccggggtgcggaggtctgctcagagcactattctatctctgagcgggactcagctgaggcggccatgcaagatgccgcatggcgtgcgctttcgcactactgcttaatgctcggtggggtagttgatggtattaacctgaagtattga

SEQ ID NO: 22432 - DNA, 210 bp, Zea mays
  Peptide Sequence Number=SeqID_65807
atgccggggcacgagggcgcggggcgcgcagggcgtggggctgccggggcgcgagaccgccagggcgcgagggccgccggggcgccggggcacgggaccgagccgccgccgggacagggaggggcacggggcgcgcaggggtcgccggggcaaggggtgcgggctcggaagacgctgggggagcaggggacgcgcagggaactctcgtaa

SEQ ID NO: 22433 - DNA, 342 bp, Zea mays
  Peptide Sequence Number=SeqID_65808
gctaagcccacaaagagtgcgaatgggcaggtctgccagatttgtggtgactctataggtgtttcagccactggctatgtctttgttgcctgcaatgagtgtgccttccctgtctgccacccatgctatgagtatgagcgcgaggggaaccaatgctgccccagtgcaagactagatacaagagacaaaaatgttggtttcctggcaacttctttgagggactacagggacaaggatggtgtcaagggcctatatgcgtctaagaacatcattgcatcatgccactgggcatacaagggtgttgaggaagactcaaccctagaagatccctatttcttataa

SEQ ID NO: 22434 - DNA, 897 bp, Zea mays
  Peptide Sequence Number=SeqID_65809
atggagcttaagactactcttgttttcaaggacgagatgatgagaggcgcaggcgcagctcacaagatgaacctgggcgacgacgaacctgccgccgggccagttctgtcacttagccttggaccggcggcgaacgcgaaccgcgcaagtttccgcgcggaaggacgacgaggggagatcagcgccagtaacgacgccgacgacgggaccggtctggccctcggtttgcgctgcggcggcggctctggcgccaagcggcagagggtggtaattgtagacaacgacgacggaggaagcagcgagaaggcgctgcggcggctgccgggggcgcccccgccgccgccgcagcagaggccggaccgcgtcaccgtcaggacgcggtgcagcgcggccacggtcaacgacgggtgccagtggaggaagtacggccagaaggtggccaagggcaacccgtggccgcgcgcctactaccgctgcacggccacgcccgactgccccgtccggaagaaggtccagcggtgcgcgcacgacacggccgtgctggtcaccacgtacgacggcgtccacagccacccgctcacgccctacgctgccgccgccgccgccgctcgacgcgcaagctgcgacggcgcgccgccgcggctggccttcccgctcgccgcgctgccgcaacgctactgttcgcccagcggcgccgtggccatatccggtctgccggctgcggcgtcgagtcacggtcacggcaacgtcgtcccgatggctagcatcatgcagaaggcggtcgcggaccccaacttccgtgcggcggtcatggccgccgtcgccagctacgtcagcgagcagtgcggtggaagaaatatcgacgacggcgccttcaccttgccacctcccggctaa

SEQ ID NO: 22435 - DNA, 744 bp, Zea mays
  Peptide Sequence Number=SeqID_65810
atgggcgagcgcagcggcacgcaggccgagctggagcatcacggtctgctgcgcagccatggagacgagcaaatgggagcagggcgccgcaaggtactcgacgacggcgcgacagggaaggagttggagactgggcacacggctgacgagctggagggatgcgagctagaagctctggccgacgagcacgcgcaggaaacttcggttgggcgcgagcacagggagcgagcagggcccgagcgcgcagagttccacggcgcggtggccatggcgaacgccagggcgctcaagcgcgcgcaacagggagagaaacggactgagggaggagcgaggaaaccgcgtgcgcgcagcagagaagccaggggccgagctcggcatgggggcaggcgcgcagggaatttcacggctcgcggtgaccatggccgggcgcaggggactccagggagcaggcgccggcgagcgcagggactttgcgcgcgcagggaggacgccatggaagggagcttggggaagaccacgacgcgctgggaaatgggaggaggaaagaggagcggccgctggggcgagcaggaccgagcgagggagctcagccgccatgggagcaggggagctcttggcccgcgcgaggagctcggcgcacatccatggcgagcaggggagggcaggatgggcgagctactcggtgcgatggagcttgaggggcgctgggagcaggaaccaggcatatggaaggatggagcttga

SEQ ID NO: 22436 - DNA, 255 bp, Zea mays
  Peptide Sequence Number=SeqID_65811
atggcggttgccccagagcgtgcgcgcgcggtggacccccagccggtggccgcaaatccattacctcgacgcgcggtggcggaggttccccgatccggagtagtggcggcggttcccaggttggtggcagcggctccccgatccagtgggcgagcggcagcgtccccgaggccccgaggaggcggcacttccaaggccgacgagcaagagacgctcgtcgacgtgcgagtagcaacgacgacacatgagacgtga

SEQ ID NO: 22437 - DNA, 495 bp, Zea mays
  Peptide Sequence Number=SeqID_65812
atgaccacgtcaaaaaaggtacgccacgtcgttcaatttcgtatccttttcctcttcccctttctctctcttgctacagggaccgggaaaggggatactccgaaagggatccttctccgcgaaggaagcgggccccgaacccccctacagatcagaggttcgaaggctggcccctcggaagggttcgacagccgcctcagagcactcgggctccgcgcccactactggtcaggggttcgaaggctggcccctcggaagggttcgacaaccgcctcaggccactcgggctccgcgcccactactgatcaggggttcgtaggctggcccctcggaagggttcgacagccgcctcaggccactcgggctacgttcccgaggcgtccactcggatcacccgttagcaactcactggagacaccatgttcggcgccctccgagggcaacatggcgctttcccccctcctccttgaggaaaggcgacgaaggggcgtatga

SEQ ID NO: 22438 - DNA, 198 bp, Zea mays
  Peptide Sequence Number=SeqID_65813
atggacgaattcaggcgagttccctacgggccccacatgtggcgttgcatcaagtataacgggagccctgggcttctaatagttaaaggaagcacaggccgaccactctgcaacgtggttcaacccaacacgcagactcaaccagcctgttgggtgcgccacctgccctatgggcgcaaaaaaggaatgaatgcatga

SEQ ID NO: 22439 - DNA, 222 bp, Zea mays
  Peptide Sequence Number=SeqID_65814
atgcaggcgacatgcaaccgcaccaagggggcgcaccctttcgactccgacacgtccagcatgggggcccaggcccacatgacaggtggcacctttggcaggcgaagcaggcgacgcttcacctccgccttaatgaccgcgtcaaaaaagggaccgggaaaggggatactccgaaagggatccttctccgtgaaggaagcgagccccgagccctcctactga

SEQ ID NO: 22440 - DNA, 3018 bp, Zea mays
  Peptide Sequence Number=SeqID_65815
atgcacgccgaggcgctcgacgtctcgctctaccacgaccgccgcttcaacccctccggcggcggcgggggcagcggcaagaaccacttcctcggccgcgtccgcatctacggctcccagttctcgcgccgcggggaggagggcatcgtctactttccgctcgagaagcgcagcctgctcagctggatccgcggcgaggtcggcctcaagatttactactacgatgagcctgcaatgatgccgccgcctccggaagacaagccgcctgagcagcaggccgacaacgcgccaccgccggaggtgccgccggaagcgccgagagagctcccagagatgcccgcaccgaccgaggccgccgtcgaagtgcagcagccggcggcgcaacctccgatcatcatcgtggaggaagcgcccatgcacccaccgatgatgatgccgccgatgcacgggccacacggcccccacggtccgatgatgccgccgatgcacggccctcacggccccatgatgccgccaccgatgcacgggccacacgggccaatgatgccgccaccaccagaggcgccgcagccagagccagagcccaaaccggagccggagttcggcgaccagtaccctcccgaggtgcgcaagacgcggatggcgtcgagcacggagcgcgtccgcgtcgtgcgccacccgagcggcgggttgggcccggattactatgcgccgtctccccgcgtcatcccggggaggtttgtgtccaccggcgagtccgtggagccggtgcaatcgtcgtcgtacgacctggtggagccgatgcgctacctcttcgtgcgcgtcgtgcgggtgcgcggcatacgcgcctgcgagggcccctacgtcaaggtccaggctggcccgcactcgctccgttcgcggccaggccgggacgtctccggcaccggcaatcccgaatggaaccaggtgttcgccatcagcaacgccaagccggagcccacgctcgagatctccgtgtgggacggaggcgcgccctctcctgccgaagccttcctcggcggcgtgtgcttcgacctctccgacgtgccggtccgcgaccagcccgatggcccgctggcgccgcagtggtacaggctcgagggcggcgagccgggcatggtgacgggggacatcatggtggcggtgtggataggcacgcaggctgacgaagcgttcccggaggcgtggaacaccgacgcgccgtacgccgcgtacacgcgctccaaggtgtaccagtcgcccaagctctggtaccttcgggcgtcgatcatcgaggcacaggaccttcgcgtcccggcgccgccgccggggctgccgttcgacgtgcgcgtcaagatacagctcggcttccagtcggcgcggacgcgccggtcggtggccagcagcagcggctccgcgttcgcgtggtccgaagacctcatgttcgtcgcgtccgagccgctcgacgacaacctcatcgtgctagtggaggatcggtccatgatcaaggaacccgcgctcctcggccacgcgactatccctgtgacctccgtcgagcagcgcctcgacgaacggcagatcgtcgcgccgagatggttcaacctcgaaggcgggacgtcaggcatcggcatgccccacggctacgacggcggcccaccggctttctactccgggcggctgcaccttcggctctgcctggaaggcgggtaccacgtgctcgacgaggcggcgcacgtgtgcagcgactaccggcccacggcgaagcagctgtggaagccgcccgtgggcgtgctggagctcggcatcatcggagcgtgcggcttgctgccgatgaagacgaagggaggcgccaaggggtcgaccgacgcctactgcgtggccaagtacggcaagaagtgggtgcgcacgcgcaccatcaccgacagcctgaacccacggtggaatgagcagtacacgtggcaggtgtacgacccgtgcactgtgctgacggtcgccgtgttcgacaactggcgcatgttcgccggcgccggcgacgagcggcaggactaccgcatcgggaaggtgcgagtgcgcgtctccacgctggagagcaaccgggcgtacacggcgtcgtacccgctgctggtgctgctgcggtcggggctgaagaagatgggcgaggtgcagctcgccgtgcggttctcgtctccggcgcagctaccggacacgtgggccacgtacacgacgccgctgctgccgcgcatgcactacctgcgcccgatcggcgtcgcgcagcaggaggcgctccggggcgcggccgtgcgcaccgtggccacgtggctggcgcggtcggagccgccgctggggccggaggtggtgaagtacatgctcgacgcgaacgcgcacacgtggagcgtgcggcgcgccaaggccaactggttccgcatcatgggggtgctcgcctgggccgtgggtctggcgcggtggctggacggcgtgcagcggtggcgcaacccgtcgacgaccgtgctggtccacgcgctctacctcgtcctggtgtggtacccggagctggtggtgcccacggcgtcgctgtacgtgttcatgatcggcgtgtggtactaccggttccggccccgggcccctgtcggcatggacgcgcggctgtctcaggccgacacggtggacggcgacgagctggaggaggagttcgacccggtgccgccgcccgaggtcctccggctgcggtacgagcggctgcgcacgctggccgggcgggtgcagcgcgtcatgggcgacgtggcggcgcagggcgagcggctgcaggcgctggtgagctggcgggacccgcgcgccagccggatcttcgtgggcgtctgcctcgccgtggccgtcgcgctgtacgccatgccgcccaagatggtggccgtggccagcgggttctactacctgcgccatccgatgttccgggaccctatgcccccgccggcggtcaacttcttccgccgcctgcccagcctgtccgacaggttgctctga

SEQ ID NO: 22441 - DNA, 543 bp, Zea mays
  Peptide Sequence Number=SeqID_65816
atgctcctcttccaaacactaggggaaagcctttccattggtaaagatggaaagaagatcgagaaagaagctggggtggaagaaaacaaagaagatagtgatgagaaactggattttggtgacagtgaagaagacctccttagctctcaagagttagaagggttagttaaatatatgggggtggatattggtgatcctcatgaggatgtgttaagccccaaagaagatgacaatgttcaagaagacttgcaaatggcaaaagtcaagaaaggatcacctattcaccgccctctaggtgctctcataaggccattaacagagatgaagccaaagatgccttcctcaacaaagaatctggaaagggataggaccaacttgattcatacttcctctgttaaaatctctgagatgcttgtagatgacaatgattcaactttctgcttacctgaacctatggacaaaatgatcaatgatttgtttgacagtgaacatgaaaaagaggtagaggcacatgtgttatttggaattgtcaaggattggtga

SEQ ID NO: 22442 - DNA, 774 bp, Zea mays
  Peptide Sequence Number=SeqID_65817
atgtcccacctacatcctagtactacaagcagcaaatcaggggagatcaaggtcgggtggccacatgctaggtgggcttggacattggcacgatgggaccttgccccctggctgtctgtcctggcacgtggtgacgcgcctgactatggtggattgaagcctcggatgacggacgacaaacgatgcaacaacgaggccagatgcaacgcaatgatagttagccggtcaagtctagaaccttcacccttgcacacaacaacaattgtggagaagtgcactcttaaactggtcgatgactacaagcacatgctgtgccaggccactgaaccactatctacattcttgcaatatataacattggttctagtcgatacaccactggccccttatttctcagagtgcattacatccgaggatttggatgacatgaatattgagattatgaggaatctctctacaaagcatatcttgaggacttctaccaattttgctaggtacccatatggtcacgaagaactggtcgtttgtgaagatgttgaccaggttcgtagtgcaatggagaaatacccaccataccagtctatattttccaggatttcatatggaaaaagccagatgttggataaggcattttatgaggaggaagttaagaggctatgcttgtcatttgagcagctccgcgagcaagagatcaggaacctgatgtggatctctgagtgtgtcgctcagaaccagaagtcccaggtccacgacagtgtcgtgttcatcttctga

SEQ ID NO: 22443 - DNA, 189 bp, Zea mays
  Peptide Sequence Number=SeqID_65818
atgtacaaccggctcaagaccatggtgaaccagtgcgcaacctcgggagcaccaaatgggatgaacatgaaatggtcaagactacaaacacattgtcaacttggagcaaggtgccacctctacacccgaggtgcaacccgtcgcattcaaagcgacgaaagaaaagaaggaggagtctacaccaagtag

SEQ ID NO: 22444 - DNA, 1551 bp, Zea mays
  Peptide Sequence Number=SeqID_65819
atgtctacgtctcgtatagctcgtggcttgaggattttcccttacggacggaatattgctgctgttgtgtcggtagtgatgaacaaggaccgtcaggacgctgcacagaagcaccgggcggtcatcaggatcgcagatccgaggtgtgaggcgaagaaggcatgggggagcgcgaaggctgtggcccccggcagcagccagccgatgccgactgcgaaaccggtcgcgcccggatccggcaagtcatcggtgagcgcgaaggctgccggcgccggcgggaccaagcctcccctggtcgagggtgcgaaagtacgggagctgccctcgccgggaaaacgtgttgctgacttcggcatgaatatcagcgtggaggactattttgttgggtcgggcgagggacaaatggttgttgtcccgcctttggtggcgaccacttcgccatcggcggtggtaagggcgaaggggaccgcgcaggacccgtgggccaccttctgcgcaagcggtgagatcctgacagccgttgccgctaaggacgtggcgggcaccatgtcccagcggctgagggatgcatcgcagcggttgtcgcagcagctgagtcaagcggccgacttcgccgaccgtattgtatctggcgtccttactgcggacgtggttgtcgaagtcgagagacttcgggcacagcacgcggacatcgtatgggagaagtcggctacggagagcaaaaaccgtaggctggcggagaaagtggccgccttggaggccgagaagacggacctccggcgccagctggctgcccaggcggaggccaaggtggcgcgggcggagggaagtcttgccagccagcgcgccaaggagtgggaggcgaggttcaacgccctgcgcggccgcgtggacaaggccgaggcctccacgcgctcggaggttgagcagacactcgcccagttcgtgaactcgtaccgtgagctaggtgcgcgtactgctgacttcgaggtgcctgaccgggaagcaggccttcgcttcctcgagtggttacaggaggagttgctggtactcccgaccatcgtcgagggtttcatgtcctttgcctccctcgtcacctacgagggggccattaatgtgttgtctcgcgaaggctgcagacactacgaggtcttcgaccagtcagacgagagctttgagcgcgagatcttcaaggccgaagaccctgttgtgaagcagtcagcgggggcactttttgataggatgtggggggcacatggtcaggaggctgtcagggagcgctccgaccgggcgagagagcagatggagcgtgccgaggacgtcgaggaccttggaggtctggtcggcgcgtcgcccgaggctgcaaagggcaatccgatgctgcccttggatgccggtgaaggcccctcggccgtgcccgtgcctgctatggccgtcgaagaccctgcgtcggcccctgagccggcggtcgaaggcgccccggaggcggtggcggagccggtagtcgaagaccccatggccgcggtcgtgccctcgcaggtggctaagtag

SEQ ID NO: 22445 - DNA, 354 bp, Zea mays
  Peptide Sequence Number=SeqID_65820
atggcacccaagagagctagctcgaaggcagccccatccgttgacgaagcagcgaaggcagcgctgttggctgagaaaaagggcaaggcccttgtcgacaccacccaccaagaagcctgcgaagacgacgcactcagcaagaggcagcgcaatgaacaacccacaaccgaaggcagtcttcgcacctgcagctccgaaggacaaccgcaacttcccccaggcttcgctccaccaaagggcgtggacgccactgaggacggtgaagtcatcggcgtctcagcagaagaacagctacagctgcgggccttgcgcatcaagaaccacaacctccaaaagcagaaggagatcctatag

SEQ ID NO: 22446 - DNA, 399 bp, Zea mays
  Peptide Sequence Number=SeqID_65821
atggcatcaaagaaagggggcagcttcacctccacaaggctccgctactgggccagcaaggggcctagaagccaaaggcgcatgcatgcataccaggtcgcaatagaacttggagcgacagtccagagttggtgctgccaaagaagccgcagctgttggtgcacaggtggtggccctcctgccactccgctattgctcctccgccatagccgccagaccaaatcaggggagcgcaagtatcaagtatggctgggttgggagattgagaagcagagggcagaagggattaaaaaggcacagcgtaaagtgttgaaccgctcaaagcttaggaaagaagcatacatagagaggataagggaggtggatcagataggagtgaattactgtaatttcaattga

SEQ ID NO: 22447 - DNA, 1380 bp, Zea mays
  Peptide Sequence Number=SeqID_65822
atggacgaggtccacagtcaacagattcaaattgttgaattcatctctgtgctgcttacaattggaagtgaaactgcagaaaaggagctagtaagacagtcagcaataaagcgatcgattgatttgttctttgagtatccatataacaactttttgcaccatcatgttgagaatataattgtttcttgcctggagggtaaaagacctgaagttgttgagcatgttcttcatgaatgtgatattgttggtaaaattcttgtttcagaaaggctttcatctttgtcgactgagtctaatgggcctactgttcccactgaaggaaaaacacatccaagagttggaaatgttggccacatgacaagaatagccaataagcttattcagttgggcaacagtaacaacacaatccaggctcacttacaggaaaataatgagtgggttgaatggcaaacaaatgtgctggtcaaacgtaatgaagtagagaatgtttatcattgggcttgtgggcgcccggcgtcattacatgaccgtggtagggacagtgatgatgatgacttccgggacagggactacgacgtggcagctcttgctaataacttaagtcaggcatttcgttatgggatatacagcagcgatgacatcgaagaggcacaaggatcacttgaaagagatgatgaggatgtgtattttgatgatgaatcagctgaggtggtaatatcttctttgcgtctgggagatgaccaggaagggctgatagattatgcatctatgtatttcagctccctctttacaaattcaaactggttcacatttgatggagagagaggcattgatgaccgatcatctgcctctgttccttcatcatcccccaattctgaggagacatcactaaagactgaggaagctgatgatggtaaagtcattggcactgaggatgaaatggaaacagtgtatcttggaaatggtagtgttgaggaggtaaaagatgtagcaaaatgcactgaacagcccaattgttgtactgaggaagagcgattgaaaaatgaagaagggatggaatggcatccaaatgcttcaaataacgataccgaggctgaggctgccgcagagtcttcagccccatcagttgagatagtggcagagaaaacagtagatgaaccattagaggtgggaagaaaattggatgaaccggcagaatcatctttggacagttctgtctctgtagctttgccagctcctgttaacggtagtgagcctgccaactcggaagtatcttctgaacaagtagcccatgccactgatgtgcagcaaccagtgaaggaagctcctgccgaggatgatgatgcaaagaaaactgatgcagccaaaacaaacgagtga

SEQ ID NO: 22448 - DNA, 1237 bp, Zea mays
  Peptide Sequence Number=SeqID_65823
atggagaaggatcgtcaagacgtggcacggaaacgtcgggcattcgccagggtgggggacccgaggcgtgaagtgaaaatggcgcgggcgagcgtgaagcctaccgctcccggcgccagcatgtctccgcctggcgcgcccggcgccaccatgccactgcctaccgcgcccacacatgagcgaaggcctccctcgccaccgcacgctgctgaggcagcggtggcgggcgccgaagtctccatggatatttctgtggacgactaccttgtgggcggagtcgcgatgttcgacgcccacacaggacggggtcctgctacggcggtgacggctggtccgatggccgtggcaaccatggttaagtggtcttcacaggacccatggttcaagttctgcgccagcgacaaaattgcctctactgccgctgcgaaggacgtggccacatcagttgcacagcagctgaaacatcgcttccgaacgcaacatacggaggctgtccgagacaaatcggcggcagaaaataggagccgcaatctgcttgaaaagctgtcggcggtggaggctgataaagaggacctcggccatcggcttatggcagaaagggaggacgtggaaaagtcctacgccgaggcccaagcagcccacgccgaggccagccttgccctcaagcgcgccaccgacgtggagtcagggcagagaaacctgcacggccatctagacaaaacagaggcctccacccgcgctggggttgatcgagtgcacgcgttgctcatggacgcgtaccaccagcttggtgcccgaaccgcccccttcgacacatccgacgaaggggtgggcctttgcttcctcaggcattttgaagtctttgatcgggcaaccgaggacttcgaccattgcatcttccaggtcgaagatgaggtgctaaagtggtcttctggggcgctttacgaccggatgtggggccctcatggccgtgacactgtccgggagaggtccggtcgggcgctggagcagatgatgaacgatgaagaagtcgaagacttcaatgccctggaaagctcggtgacccgggcagaagatgcaaggacgggggctgaagagcaaccggcgccacaagccgaccctagcgaagaccctgtagaggaggctatgccggctggcagagaccctgcaacggtagctgcgccgactggcgaagaccctccagtggcggctgctccttcgcaggtggtggggtcgt

SEQ ID NO: 22449 - DNA, 165 bp, Zea mays
  Peptide Sequence Number=SeqID_65824
atgcagcgccgttttgaacaaactgctttgaaggaagcttcggactttgggatgaagaatttctattatgaccgaatgaagggagataaagagtgggcgacgaggctagaagccaaggaccttcgacttaacatattgacgaagctcaagcatgatgatgactga

SEQ ID NO: 22450 - DNA, 204 bp, Zea mays
  Peptide Sequence Number=SeqID_65825
atgggtgtactgtttgacaacggactgaacagaggccgcgcggccaagaggccttacgtcaggctccgcccgatggcttatgtcacgggcaacaagccacgtggcagcatcgggtctccgcctgagcggggagcgcaagtgttgggggccttcggcttacgaaggtcctcaaaaacaggatttaacagtatttctggagcataa

SEQ ID NO: 22451 - DNA, 255 bp, Zea mays
  Peptide Sequence Number=SeqID_65826
atggccgatgaagctataaaaaagagtgaaaaagaatctcacgatgcccgagtggaggcaaaggaagctgaagaagctgctgaacgcgcaatgactatagccggacttttgccaccaccagagccatacaaccttgaggcggatccaattatgaaagaggctttagatgtaatgaagattgcaaatgaagttgttgacgaagtcgtcgacagacttttacatgaagccgctgaaagaatactgaacgaagtctaa

SEQ ID NO: 22452 - DNA, 354 bp, Zea mays
  Peptide Sequence Number=SeqID_65827
atggccttgctagacccttgcgagcgcttccagcctgaggtggcactcaacatggtgcgcaacccgctcggatggggtgtgctggcatttgccgggaggacttgtgctggtgtctctcctctcggcgaccttgccgcccaagagtttgtgttctttgtttccaaactctccagcgggttggctctgccgatcccatctttctttgcgcagctgctggaggggcttggcctccagcctctacccatggtgtcctgcttcatccttcaggcggccatcatcgcctacttccgcgggatgtccgtggaggcgacactccttcctgcttcttcctccagcattcagggggaaggatga

SEQ ID NO: 22453 - DNA, 267 bp, Zea mays
  Peptide Sequence Number=SeqID_65828
atgtatcagttggaccagacctccaagagggagcaccggacccttgtacatacgacccggacccccgattacggcttgggactccaaagtaagcatgccgagtcccttggatggggtccagatcccatccaagtaaggtccgggccacaacaaggtcccgggacaggggatacccaggccttggaaggagatgaaaatacaggtgcgacacaaaagcaaatgccaaatcagcgtgaacagtacggggtactgctcacctatttatag

SEQ ID NO: 22454 - DNA, 423 bp, Zea mays
  Peptide Sequence Number=SeqID_65829
atggcggcgtcggttggctctggagaaactaggctcacgcgaggaggtagaaggggaaggaacgagtcatgtgcgtgctgttatacggagcgggcgaggtccaaggtggtcagcagctccggcgttctcgcggcggttgttgcgcgtccgcgggcgaagaaaggggaagcgctgtcgctactcgccgtcggggggcaccaccgtcgttcatgggttagggtgtgccaccgtagctcaggtctgggcgggcgtagccgcttgcccacccgccttgggagtgtcaccgcctctcgcgcgcctcagggtcttgggttcgccgccgctagcctgcaccgtggccctgtcgttgctcgccctctagattggggagacggccgccaccgcgccaccgatctgagaaccaccgccgctacctcagattga

SEQ ID NO: 22455 - DNA, 366 bp, Zea mays
  Peptide Sequence Number=SeqID_65830
atggggagcgcctgcgttgccttcgtctcgctgttgttggaggagcgcaacttcgtgttagttggcacctttcagccatcgctcggcttcaaggattttcatcaggcagcccggctgcatcccctcaccaatgccggagaaggcttctccgccgacgagaccgtcagcgccacccgcggaccgacctccggctctttggctttgatagcttgtcctcgcccctcgagtggggacacgggcgagggccttgtcgcagcagcgtctgcccagaggtcatcgctgctgctgtttggtcgcctggagcggaggtcgttgtcgctgttgcagtggttggcggcgagccaactggagtttgtcgtcccgtag

SEQ ID NO: 22456 - DNA, 612 bp, Zea mays
  Peptide Sequence Number=SeqID_65831
atggggatgcaccctttcaacttcgacgcatccagcatgaaggcccaggcccacacgtcatgtaaccggcgcgccggttactacgtgcgaaaaactgcaccgccacttatgccaatgtcgcgccttctcgactgcggaaccggtgccgcgactcgaggcaaccctgtacatggcccaacagtgccaaccaagcacatcggtcacaggtcattcagccacggaaggaggaccgggaaaggggatactccgaaagggatccttctccacgaaggaagcgggccccgagccctcctactgatcagaggttcgaaggctggcccctcagaagggttcgacaaccgcctcagagcactcggcctccacgcccactactggtcagaggttcgaaggctggcccctcggaagggttcgacagccgcctcaggccactcgggctccgcgcccactactgatcaggggttcgaaggctggccccctgaagggttcgacagctgcctcagaacacacagagcgagggatgactctgggtacgtccgatacatggccgaggctcgggctacgcttccgaggtaccctaggacatttacgagaccagcaggagcaattcagtaa

SEQ ID NO: 22457 - DNA, 387 bp, Zea mays
  Peptide Sequence Number=SeqID_65832
atgctggtagactacacaacagtactcgatagactaggtgtgtcggtcgaaggcccgacgcaacagggtatcgagagcatcgtggaagtgacacccacgagcggcgtcacggggtctcctccagcagctaggatgccccgaggtggtgtaggggcatctctggctgaggtgcaagggaaggatgcctctcagactccacctctcgctgaggcgagggggaagagtcctgctgctcctgctcctggcatcagcgctcctgctcctcaagcaggcgacgatgcagtctctctagctggctggactgacctgacaccgtgcgacgcagtggacgctccgccaggcgagaaggcaaaaaggagatcacagacttacgtgcagtgcacctga

SEQ ID NO: 22458 - DNA, 585 bp, Zea mays
  Peptide Sequence Number=SeqID_65833
atgcaagatgcagcacgacgggcactttcccagtattgctcgttgttcagcggggtaactggtggccttgacctgaagtactaccctcgtcgttcgatcggcagtgctggaggtgtgattgtttcaccagttggtgagggcaatctcaggctgaacaacatggtcaacttggtcgccgtgctcaacacagagttggaccacgcccttgacgagttgggcaaggttcgggcgaaggttgcggaattgcgtgctgagtgcgctgcacgccactatctggatggtggttctcccgcccctgtcgggattcagcacccttaccatttgccgccccgtggtcgcttcgactacgagtcagatttgatacatgtatgcgatttccacagatgtctgagaataggcgcagaggtgcgaggcgtgctcagccagaacagcaggcaccccaagaggaagcaggcaccaccgatgaccattgagcagatgttcttgattcatacccaggcagttcaggcaattggtcagacattagcagcgatgcagcaggctcagcagcagccaccaccacctcagcctctagtgcaagtgtag

SEQ ID NO: 22459 - DNA, 585 bp, Zea mays
  Peptide Sequence Number=SeqID_65834
atgccgccgcgcacaaggagaactgcgcgcaagcatactggcccaattggtgtgccaagttatcaactggccccaagacacgaggatagcagtagtgggagtaatgatccgatcagggatcttgaagcgcaagtgaatcggcttcaaacagaactccgacgcaggactaacatatgggtcgcagatggcgacaaaattaatgaattgataagtgacgtccgccgcctgcgagatcagctcgcggaccgagatttagcgctcgactgggtagttcaatctcgttcgcttgcctgggccaaggaggcaaaggctcaagctcgagtagaagagctcagctcagccattgatgacctgcaggcctattacaatacattacatgaagaagttcatgtactgtattcacaattgcaccccagtgaacctgcggatcctgttgggacagaagccagaccttctcatgtagcgggagaagcttttggtggcgaattggaccttttcaggccccctccctctatgaggttggtcgatgagtggtctcccacgcccgacgacgaggctaccaggagcaatgggaagcaggagtaa

SEQ ID NO: 22460 - DNA, 552 bp, Zea mays
  Peptide Sequence Number=SeqID_65835
gggcaccaagacccgggcgcgaacataatcaccaggtgtgctgggaccaagtccgagccctgggtcgggcggagcggagttcgtcgtcttccggggctgagcccgagtccgagccctgggtcgggcggagcggagcttcctatggtgcctgaggtcgggcctgactgcctgtcagcctcactctgtcgagcggcacagcagtcggagcggcgcaggcggcgctgtccttctgtcaggccggccacctttgcattaaatgctcctgcgatctggtcggttggcgcggtgatttggtcagggttgcttcttggcgaagacagggcctcgggcgagccggaactttatgctgatgggggttaccagctgagaattaggagacttgagggggaccagcctttctcggttgcgttttgttccggtgggtgcgcacgagcgcacccgccgggtgtagcctccgaggcctcggaggagtggtttgactcctccgaggtcttaatgccccgcgtaatgcttcggctggtctggttgttccctcatgcgaactggccgtag

SEQ ID NO: 22461 - DNA, 684 bp, Zea mays
  Peptide Sequence Number=SeqID_65836
atgtcgcctcctgtcgacgtggtcggtccgcgccctaggttgggcgatgtggaggctcctccgaggtcgaggtcgagtttgtcttccgtggccgtggtcgagtccgagcccctgggtcgggcgaggcggagaccgtcggctgaggccaaggctgagtccgagccctggggtcaggcgaagcggagttcgtcgtcttctggggctgagcccaagtccgagccctgggtcgggcggagcggaagttcgtcgtcttccggggctgagcccgagtccgagccctgggtcgggcggagcggagcttcctatggccggtcagtggagcggcaaagtgactgcggtcacttcggctctgtcgactggaggacgcgtgtcaggataaaggtgtcaggccacctttgcattaaatgctcctgcgatctggtcggttggcgcggcgatttggtcagggttgcttcttggcgaagacaggcctcgggcgagccggaactttatgctgatgggggttaccagctgagaattaggagacttgagggttactgggccgccgagcagggtgcaggcaggtttctggccgcggcgccgaggatggtgagcactgactcactgagccgccagagaaggtaccaggatgatcttcaggtgactcgtgacctcactgctagtcgtagcaatacaacaaacatg

SEQ ID NO: 22462 - DNA, 948 bp, Zea mays
  Peptide Sequence Number=SeqID_65837
atggggggtatccgccgcctttccgcctcctcgttggaggaacgcaactccatgggagttggtacctctcagccatcgttcggcttcaaggattttcatcgcgcagcctggccataccccgccaccggcggtcacccaagatggccaagatggaagatgaggcgagtcggggggccgcctccgcgtgggtcggctgcccctttcttccccctgcgcccgggggtgaagggcgtccttgagccccacggagacttcctccagccatgccaggatatgcagggcgctaggggccctgggtccccatctccctgcctgaatggctggttctcgtcctcagcgggggggggggagcccttctgccgtgacacctcccccaaggctgctgcttacgctgcttcgctgtctggggcaggggtggtggccgtcgcggttggaacgggcggcagcgagccgcccatcgttcttcagctactccgcaggccttccccttcggaggggggttgcctcggatcgggctggcgcccttggaagccggttgaccgaggccccaggggtaaccggttgagccgcctgctcgggccggattcccggaggagcccctggaccgcggcgccgcccgaggctgggtcgggctttgctgaagacgtcgtcgatgccgagggtgctacagctcccttcggcgtgaagacccgagcctgcaggatccgatcatcttgtagcgtgtgcttcctgcggccgccgaggccagaagaaaacaccctcgctgcacttgcgaagctgcgccttttttcctcctgtttcgagcatctggactctgtcggtaacagggatgtttgtgtgagcgagagtcgcttttcgcggaagggacgagtgaggagtccctcggctcggtcagccttggctgcttacgtgtacctcgtcgtttccaggatccgctttccgaagtag

SEQ ID NO: 22463 - DNA, 1184 bp, Zea mays
  Peptide Sequence Number=SeqID_65838
atggccatggccgcccccgctttcctcctgccatcactgttccccaagcccactctcctcgccgcgtccctccactccagcttcccacgcggcctctccctccgctgctcgcccaacggcgccgccgtgccggaattccctgaacctgcctcgcgccgcggccgcaaaaagtcaccgtccccgtcggcgccgaagccgagggctacgaggaggagaaccaagaaggcggaccgggatcccgactcggagggcgaggaggagccggtgaagcggaccaaccgccggacgaggaagtccaagggagaggctaaacaggaggaggtggcccaggcggcgaatcacgggacgggggatacgattcaaaaggccaacgaagaggaggatgcggtggaagtgggtagcgacgacgacgatttcgcgaacgagtggccgccgctggtgtgctgcttcggcgcgccgcggtgggagttcgtacccacggtgcgggtgtcggaccgccagatgcatcccgacatgtactccacgtggaggcacctgcaatgggaaccgcccgagttcgcgcgcgcgccggggagcgcggcgagcaacgtggcgattgcgctcacccggctcggcgggcgcgccgcagtgctgggcaaggtcggcgacgacgacttcggccgcgagcttgtgtaccgcatgaactgcgagcgggtgcagacacgtgccataaagttcgacgacaaagcggtcaccgccacggcgcgcatgaaggtgagcttccgggaccgggaggacggcaagggcgggacgaaacttgtagccgagacggtgaagagtgccgccgaggactccctccgcaggactgagatcaatgtagacgtgttgaaagaggctagaatgttccatttcaattcagaagtcctgctaaacccctcaatgcatgacacgctcttcagagccattgagctgtccaagaaatttggaagcaaagttttcttcgatctcaatttgccattgccattgtggacttccaaggataaaacaaaggaggtgataaacagggcgtggaaagaggctgaaatcatagaggtgtcaagggatgagctggaattcctcctagatcatgagtactatgaatacaagagaaacacccctcctcagtattatcttgaaggatttcattttacaagaaactggccaca

SEQ ID NO: 22464 - DNA, 951 bp, Zea mays
  Peptide Sequence Number=SeqID_65839
atgcctgagtgcatctaccgggggtccgtcgaggggcagcttgctatgatcgcgcccccgcgcggagagcgcgaccgcggccatagtgccgagggcgagggccgagcactttcgcgccggaggcgagacgctatccgtgagaagtcggcctccgacagcaagtgtcgtaagctgacggacagggtggccgccctggagagggagaaggctgacctccggcgccagctggcggcggagaggagggaagccaacgaggccgttgccaaggggcaggctgcgcaggcggaggccaagctggcgcgggcggagggcaatcttgccaaggagctcgccgaacatctgcaagagcggctcaccgccctggagagccgcgcgaaggaggccgaggccgcgatgcatgcggaggccgaacggacgcgcacgcggcttatggatacatatcgtgagctgggtgcgcggaccggtgacttcgaggtgccggaccgagagcccgggcttcgctgcctgcagtgggtgcaggaggagctgctggaacttccagccgtcgcgggggggttgatgtcgtacgcctccctggtcacctgcgagggggcgatgaacgcgctctcccgcgaagggtgccggcacttcgaggccttcgaccaggcggatgaagaatttgagcgtgatatctataaggtcgaagaccccgtagtgaaggaatccgccggggccctttatgaccggatgtggggtctgtacggtcatgaggtggtcagggagcgggccgagactgcgagggctcaggcggagcgcggcgagcgggtggacgacttcggggctctgaacagcgcgctgccagacccggagccgacccccgcggaggctgtgactggggtcgccctggagccaaccccggagaccgcagcaatcgcggcggcagcccccgaaggtggccgaaggcgcccctga

SEQ ID NO: 22465 - DNA, 705 bp, Zea mays
  Peptide Sequence Number=SeqID_65840
atggattggctgctcgaggagtgcattacttgcatcggcccggaccactgctccaggacttgggatttatggcccttccagagcttggccaagagaaagtggagttttcacccttttgtttatcacagcaaacgcttttacactgttctactatggcgtagggtgctggcatttctagtggcttcacagtttttaaggattatgacattctattccactcaacttcctggtcccaattatcactgtcgtgagggctcaaaactggccactctcccaccaccaaataatgcacttgaagtgctcctgattaactttcctcgcggagtgctttttggttgtggcgatctgatattttcatctcacatgatcttcaccctagttttcgtgcgcacgtaccataaatatggctcaaacaggtacactgttaatttggttgtgttctttgttgataagaagctgcctgaaatgccagatcgtacaaatggattatctttgcttccagtaaacacaaaggataaagacgggaggatgaaggaagaactccataagcttgagaaggacgggaggatgatggatgagttccataaattattaaatggaaacactgtcgatgctacagattggcgacaacgagtgcagattaatggaaagcacggagaagacacgaaccacactgtctctgatgccacccctactggaacatga

SEQ ID NO: 22466 - DNA, 687 bp, Zea mays
  Peptide Sequence Number=SeqID_65841
atgcaggcggcatgcaaccgcaccaagggggcgcaccctttcgacttcgacgcgtccagcatggaggaccaggcccacacgtcatgtaaccggcgcgccggttactacatgcaagaaactgcaccgccactcgagccactaccgtgcctcctcgactgcggaactagtaccgcgactcgaggcaaccctgcgcatgacctaacaatgccaaccaggcacatcggtcacgggtcagccagtcgcaggagaaggcgcgacggtcgatacagccagaaatgggtcgacagtaatggcagtggcagacaggcggaagcagcggtcacgtcgtcagccaagctcacgtccccttctgggacagcgagagaaccctctcccacggacaggcgacacctttggcaggtgaagcaggcgacgcttcgcttcctccgtaatgaccgcgtcaaaaaagggaccgagaaaggggataccccgaaagggatccttctccgcgaaggaaacgggtcccgagcccccctactgatcagaggttcgaaggttggccctcggaagggttcaacagccgcctcagagcactcgggctccgcgcccactactggtcaggggttcgaagaccggcccctcggaagggttcaacggccgcctcaggctactcgggctccgcgcccactactgatcaggggttcgtag

SEQ ID NO: 22467 - DNA, 309 bp, Zea mays
  Peptide Sequence Number=SeqID_65842
atgggcgagatcatagagatgctcgagtgtggcactcatggcctgggcctgcaaatgccttctaggccattcttctgtgatgatgatgatcctaatatgcctgcaacagattcttaccatttctcatcggagcttactgcaatatctgaggaagatgattccccgacgaggatagggacggaagaaaaagcttctcaagacaaagatggagacagagatggagagccattcctcgacagaacatttcgagttgccatccctaatctaaacggatgtgggggcaacccaaaaaactacatggggatgtaa

SEQ ID NO: 22468 - DNA, 705 bp, Zea mays
  Peptide Sequence Number=SeqID_65843
atgtgcacctgcagcatttattcactcttctgcatcctggcaagctttacttgtcttttttatttctgtgactgcagtagtgcagttcgtgctgtagatgctggaggccaagatgctggtggccaaggtcagtgtcctgatttctcctgtggtgatcttggcaacatatccaaccctttccgtaggccaggtgacccagaagagtgcggtgtaaaagcatacgagctggtctgtagcaacggcaaggctacaatccgcatcaacacggggacatattttgtcaccagcatcgactataccaatcgttccttctgggttgtggacgccaatttggatatgcacaacagctgccctcttcctcgctgggatccgttacttgcaatatgcatgttggatacagctccgtatacaagggcctactactcgcagcaggcaatatgcatgttgccatcaagatgctgggcaactccaactgcaatgggggcgagttcattctccaccatcggtaggattcaccacatcaatgtggttcgccttgtgggcttctgtgcagagaaaatgaggagggcactggtctgtgagtacatattctcggccgaaagaagtttttcttgggatatgctcaacgagattgctttgggcattgcaaggggaatcaactacatacctgcatctagggtgcgacatgcagatccttcactttga

SEQ ID NO: 22469 - DNA, 585 bp, Zea mays
  Peptide Sequence Number=SeqID_65844
atggcggatagaggaagcattggccgaggatcgtgggagagggaaatagtggatcgagctcgctggcctggccgaggctgggcgctgggcttccgcgcaggtgccacggaaccgcgaccagggctaggcagtggcaggactcgccggacggaggccgcaccggggcaagcgccgctggaactggagagggcactagccgtccatggggaaggttcggcgctggggatctcgatcgactggggtgaaggctaccggctaggcaactgcggctcctactcgccaagcgagagcacgcgggactgctcgaccgatggggatggagagagggatgtggggatgaaggactcacctgcgcacgcgagaagaccaataaccgcctggatgggatgtctgctcctgcgcgatttggatctaggagggagacaggggttatgggacaatggggtgggtgttacaccggggctcggactcgacctcgacctcggaagacagactcgacctcgacctcggaggagcctccgcctcgcccgactcagggctcggaccgaccacgtcacaggggggccatcattaccctacccctag

SEQ ID NO: 22470 - DNA, 885 bp, Zea mays
  Peptide Sequence Number=SeqID_65845
atgtactcggcttcggcggtagaaagagctacggaattttgcttctttgaagcccaagacaccaaggatcttcccaagaactggcaagtccccgatggggttacaagcgtccgcgtgggagggagcgagaggcctgcacgcgccgtcccgtcctctccgcacggccaacccccgtacgagtgccctgggccttccttttataggtgtaaggagatggcccagggtaatgatggcccccatgtgacgtggtcggtccgagccctgggtcgggcgaggcggaggctcctccgaggtcgaggtcgagtctgtcttccgaggtcgaggtcgagtccgagccccgggtcaggcgaggcagagttcgtcgtcttccggggccgaggccgagtccgagccctggggtcaggcgaggcggagttcgtcgtcttccggggccgagaccgagtccgagccctggggtcgggcgaggcggagttcgtcgtcttccgggaccgaggccgagtccgagccctagggtcaggcgaggcagagttcgtcgtggcgaggcggagcttcctatggcgcccgaagccggacttggctgctgtcagcctcactctatcgagtggcacagcagtcggagcgacgcaggcggcgctgtcctcttgtcaggccggtcagtggagcggcgaagccatctttgcattaaatgcttctgcgatacggtcggttggtgtggcgacctggccaaggttgcttcttggcgaagactgggcctcgggcgagccaaagctttgtgctgatgggggttaccagctgagattaggagtcttggggggcgccgaacatggtgtctccagtgagttgctaacgggtaatctgagtggacgcccgtgccccattcgttag

SEQ ID NO: 22471 - DNA, 861 bp, Zea mays
  Peptide Sequence Number=SeqID_65846
atggtctttactcggctaaaactgcatgtgctggtctcttccatggttcaagctcctttcaccatcataaaaggatctagaaatcatggatgcctcccaagtgccgtttctttctgtggttggtggctcataacaaatgttggactgctaataggctggcaaaagaggaacaaggtggtgtttgatggcaggaccccttgtatctccgtcctcctgcaggctgctggtgaggaaagggagaaatggcagatggctggtgccaaaggtctatcctttttggccgcccagcttcctagtacctacggatgttctggttctaacttttcactatctggcactgacatcctgttcattgctgaccagtggatgcaggactttgaggcatttcagacagctgtggaatctgacaaatcatactccgctacatatacccgaagcctctctctggttcttgacgaattctacaataatttgcgctctgttggagtatctgcgatttctggttctggagtcaatacattttttgaagctatagaagccagcgccaaggaatacatggaaacctacagggctgatcttgacaagaggattgctgaaaaggaaagattggaggaagagcgcaggaaggagaatatggaaaaattgcagaaagatatgatgaaatccaaaggacaaactgtggtgctcaccactggtttgaaggaaaaaaattctgtttcagacatgatggatggtgctgatgaggaggaagaagaggaagcattggaagattttgggttttctgaggatgatgaagacgaagacgaaggagaagatgaggaggtggctcattttggctttttgagttgttacttgacctag

SEQ ID NO: 22472 - DNA, 396 bp, Zea mays
  Peptide Sequence Number=SeqID_65847
atggcccatgcaaccaaccatgtagccggcctgtctgagaggccagtcggcccagacatatttatggtggcggcccatggcgcgcaggggctctccggcggcatgcgcacgatgatctcgcggctcgggggcgcggcatccggctggccggacgggcgggcccccccggttcgcgcgagcaggcagcctaggcgcgtgggcgcacttcggggcgcggcggcccagcagcgcgcggcaaccggcggcgcgggcgcggctgctcggcggctcagtgcaggccggcagcccggcgcacgagggcggcacgacccctcggcgtgggcgtggcatcccggcccctacagcgcgcggcgacgcgggctcgcggccaagcgcgtgagcgtggatttgtccctg

SEQ ID NO: 22473 - DNA, 378 bp, Zea mays
  Peptide Sequence Number=SeqID_65848
atggcaactgggccgcagaccacctattcggcccaccagaggaaatacatcgcgcagcccactccgcgctcaccggccacggtcactgaccggcgggacccgaatcccaggatccttcggggcacaggggggcggcgtgcaccagaaccttacgccatggcagagcctccacccatcggccccaggtctggacactgcataatacaaggagggggttcggttctgcgctgctccggtggcctcaccggcgcttgggcggagaatcgtgcgcacgccgacgagctcgccgtctgggactgctcgggcgccgccgctctaagcgctcaatggggaagacaggggatggccctagacttcgagatatgcggctgggattag

SEQ ID NO: 22474 - DNA, 1677 bp, Zea mays
  Peptide Sequence Number=SeqID_65849
atggaatctctatttgtaggcttgtctcataacaagccaaaaaattcggtggcaaccgcaatagttcgagaagtgttatctcatgactggttgctcctagactatatttgcacgcaaggtgatcttgctctcatcgattttattaaggaaatcccttgtgaaccaagggtagaagtcgtgcttattgatgatgcctttgttgaaaggaaatggatggagtgtttatttcagccgaacgcatatttaggtgacgaggttatagactgttacataaatttgataaaagctcaaaagcatttaaagtgccgatctggaggtcgcgttcacatagaaaatgctttccagttcaatttcctgaagcgagatggtgatgttgaaattaaaacagaagagttatatccaaataaagacatgacacaaatatgtagcgctgaacgaagggtgttactttacttagaccatgacaaggtgtttattccgataaacatccgagagacgcactggtatcttgccgtgattcatgcaagaaatatggagatacaagtgctcgattcacttggtacttcacaagatcgcaaagacctcactgactctattaaaggactacaaagacaaatagatatgatatctcaacgtaaggagttgaaagaccacaggtggccagacctccaagttgcttcttggccgctcagagaaatagacatgggatatgcaaaacagacagatagctcttcatgtggcctctttcttttgaactatatcgaatactggacaggggatgaactgtgtgacagttttacccaggatgacatgtcacactttaggaaaaaaatggctgctatattactatcttcagacctgaataagagaagagggtgtctgttatacaaaaatgaaaaagaagatgactctggaagcccatcagatgttgagatattagaaaacccaacagattctaataagaggaaactactccacatgcttgatgatagcgaagtagtgtatgaagatgaggaaggccctattactcaagcagacttgcaaaggtggtttgttgatgattgggataaaagagctcctgtaaaagtctctaccgatgggtgcacaaatgactttttaatggttggtctttccacaaaggacatgccagtgaccaaagccgattcaatagatgttttatgtgattatatcatggcaatagaagacgatacgacactagaatatgttctcatgccatggaaattcaatggatgtcacgcccttttcgtaatagatcatgttaaaaagtatgtgacttttatcgactttacaccgactcaagattggtgtaaacacatgccatacaagaggttcgcggaagcgattatcatggcctcaaaaaaatataagattgcttacagcaagaaacgttctggatgggcggaggatatctttaagtgggaacatacaattcagactggtgttccagttgacttaagagggtttaatactagctacctcgttctacaagctatggccatgtgggggaatgacagacgactgaaatttgttggggatgcaaagactcttcgaaagaactttgtgattgatctgttaagttatgaggataattcgtgccgatatgccatccctgcaaatatacaacagagacttatcgatatcgctaaaaaggattag

SEQ ID NO: 22475 - DNA, 327 bp, Zea mays
  Peptide Sequence Number=SeqID_65850
gaactatcctctactgatggctacatggaaggattaggtcctgatgctggcgctcctttgtcagcacacccagatgttgacaaggtcacttttactgggagttttgaaactggcaagaaaattatggcatcgacagctcctatggtcaagcctgttacactggaacttggtggaaaaagtcctatagtagtatttgatgatgttgacattgacaaagagaatttaaccgatgagaatgctaaatgcctaaacccttcaaagcccttcatcggtttctgggattttcatagaaatactcagctgagcctgatcaggctactacaataa

SEQ ID NO: 22476 - DNA, 768 bp, Zea mays
  Peptide Sequence Number=SeqID_65851
atggccgctggagccagcgactatttgacggtggagtaccactccagagactcccctctttcccctccgacgacgagagagccaccggcggcagcggcgtcctcgtacaccacggtgggcacgccgggtcgtgcggggtacggctccttggccgcgtccttcaacggcggcctgctcgccgcagccagccccgagctgtacaggggcgccgtcggctgcggcgcctgcttccagggacagcgagctgtgcatgtgacggaccaggcgcggacgtcaaaccgcacgaccctggtgctgagcgccgcggcgtacgcggccatggccagcgccggcaaggccgcacgcctcagggaccggcgcgttgtcgatgtcgagtacaagagggtaccttgcgggtacatgaaggaccgcaacctatcgatacgcgtggaggagaagagccggccgccaagcaacctatccatcaggttcctgtaccagggcggccagaccgacaccgtcgccgtcgacatcgccactgtggggtcgtccaactggcggttcatggcgcgggaccatgggccggcgtggagcacgacgcaggcgccgccggggccgctgcagttccggctggtggtgacaggttgctatgacggcaagtgggtgtgggcggagttggaggtgctgccgcgccggtgggaggccggccgcgtctacgacgccggggtgcaggtctccgacgtctcgcgggaagggtgctacctctgcgacacgcacaagtggcagtga

SEQ ID NO: 22477 - DNA, 360 bp, Zea mays
  Peptide Sequence Number=SeqID_65852
atgtttctgcgacggatcctgaccggcggaggtggcctggcggcgctgagggcggcgcgcgccgtgaaggagacgacggggatcgtcggccttgaggtggcgcccaacgcgcgggaggttctcatcgggctctacacgcgtacgctcaaggagatcgaggccgtccccaaagacgagggctaccgcaaggccgttgagtccttcaccaatcaccgcctccagatctgccaggaggaggacgactggaagcgcatcgaggaccgaatcggatgcgggcaagtcgaggagctcatcgaggaggccgaggacgagctcaagctcatcgccaaaatgattgatgaagaaggcagattaaactaa

SEQ ID NO: 22478 - DNA, 237 bp, Zea mays
  Peptide Sequence Number=SeqID_65853
atggctagtggcttggtgccactgacacaacaccctttcttcctcgcgtccgaatgggatccgtggggtgtccctgatgactacgaatgtgaggtgattgaagacgacaccccaattcctaagcatgttcctcagcaccggcccgttgctcttcctgaggagttcttcaagacactagatgccgtcaaatcagatcccgccctccaaggcgatgctcctcctcaagtgaaggcgtaa

SEQ ID NO: 22479 - DNA, 762 bp, Zea mays
  Peptide Sequence Number=SeqID_65854
atgcaggcggcatgcaactgcaccacagggacgcaccctttcgacttcgacgcgtccagcatggaggcccaggcccacacgtcatgtaaccggcgcgccggttactacgtgcgaaaaactgcaccgccacttgcgccagtaccgcgccttctcgactgcggaaccggtgccgcgactcgaggcaaggaccgggaaaggggatactccgaaagggatccttctctgcgaaggaagcgggccccgagccctcctactgatcaggggttcgaaggctggcccctcggaagggttcgacagccaccccagagcactcgggctccgcgcccactactgatcagaggatcgaaggctggcccctcggaagggttcgacagccgcctcagagcactcgggctccgtgcccactactggtcagaggttcgaaggctggcccctcggaagggttcgacagccgcctcaggcctctcgggctccgcgcccactactgatcaggggttcgaaggctggccccccgaagggttcgacagccgccccagaacacgcagagcgagggatgactctgggtacgtccgatacatggccgaagctcgggctacgctcccgagaggctcgggggctgctctcgcaaacccggctccggccaaaccgttgacagcgtcaacataccagcccgagaactcggaacctgaccatgcacccggactacgatcagatcgcatgagggaacaaccagaccggccgaagcgtcacgaaaggcactaa

SEQ ID NO: 22480 - DNA, 630 bp, Zea mays
  Peptide Sequence Number=SeqID_65855
atggaggagtgcttgacggtgaccaccagttcgatggtggggagaagcaagccgggctgcggcctctgccccgccctcagcttcaaggatcttcatcatccttgctggggcgggggacgagctgagccggagctctacctcccgtacgggccggcgggccacctcctccttcagcattcaggggagatggcgctcaccggcctagcggagggggcagacttcgacaacgcggggccgattggccgcaagcgtcgtcagctccagcatgcctggtttgctggctcagctggctctggcgcagcttccggtgccacctcccaccgctgggcggagtgtggctatctgcccgccgtacaggcgactgttacgccgcgcgcaccgggggaccgcccaagacgtcgcacgctgctagggcggcgttcgtgttcttgggctgtcctgccctcgctccggcacgatgcctccgcgcggaggtcggtgctcgcccgtccgggaggacttgagtggggatctgccggtaggcaggtggctgccatcgtcggtgctgaggtggtggcagccggagaaggcttccccgccgacgagatcgtcagcgccacccgcggaccgacctccggctcttggctttga

SEQ ID NO: 22481 - DNA, 639 bp, Zea mays
  Peptide Sequence Number=SeqID_65856
atggcgatgccgtcgagtacaccgtcggcagcagtagaggaggacccaactgcgcccacccccgccatcgagggtgacgcgaggggcgcatctagctccaacccgccgcccactctggaggagccagaggtggttcttgggcgacggctccgatccggcgccgagccagaagcagcgccggttcccctccctcggctgctgtctcgtgcccatcggtctcttcaagagaccgaggcgaaggtgtactccagggagctggaggcgagccggaaggagaagaggttggccaagagggaggaggccttgaaccagagggaggaggtcgtcatagagctgagtgccaagctgagtgccatgaacgcaatcttggaagagcagcggacccagcagaccgcgactgtggagaggctgcaaaagttgcagcaagagctcgacgacaaggccagcgtcgccacgctcgccgaggagagacttaaagcgaaggagcaatccttggataggcgggagatagaccacgccaggagggagaaggatctcgctttccgggaagagatgctgactcgacgaggcgagatgctggccgagcacgagctcgaggcggagcagaaggagaaggagctggaggatcggatctggtag

SEQ ID NO: 22482 - DNA, 2847 bp, Zea mays
  Peptide Sequence Number=SeqID_65857
atgaaaagcggcgtcatggttctcggtgtcggcagccctgaagaggcccctgaccgcaacgatgcggagccacggcgcgatatgggccaatcgcagatgcaggtcggtggccccgttgttctcaaccgatcagctgagctcgggtcaggtgattttatggctatcgatgacgctccagttcaagcaccatcgggccagccggcggcggcaaaacatcagtctcctgctgctctgacggacaccatcatggaggtgcagaagcaactgaagcgaaagagggcttctaataacccagtgattgctgccgcggacaaggacgctctcgctgccgggtgccggcaagagcttgagggtctcttccagttttacaaggaggtttctgaccgtaaggtgcagcttgacggtggtaacctgtccgtcaacggaatggttggctgcttgcttgaggagagcagccttgggctgaccaagttggtggacgggatatatgaaaagttgaagggattggatggtgtgtctgtggcttcagtccgtggctctgtgctgctcgttgggcagaggatgatgtacgggaaatcatccttggacgctgatgtgttggaagatgatacagagtcggctctttggtgctgggagacaagagatctgaaattgatgcctgtgaaagcacgcagtgttcttagtacacggaggtctgtcagaaagaaaatccatgagagaatcactgccatctattcaactctatcggttcttgaaaacccaggagtttacgtccaagtaaatgatctaaaaaaggcatcattaagattaaacaaatcgctgaacctggaagggatcagatcaatggtggaaagagtggcacaaaagaacctagaacggggtgtgaaagttgctggatcagcaattaaggaattgaagcaagagacagaaaaaaatgaccaaaatcttagaagacttgaggatactagcgtctctgagctgcagaatggaaattcgcctgataatgaaaaagaggttcaaaaggcacaaaaacaggtggagaaggaaataaagcgccaggagaaagaagaagctcggatgaaaaaactgcaaaagaaacagcaagaagatgtcctaagagaacagaagagacgtgaaaaggaggaagctgaagctaagaaacaacaaaagaagcaggaggaggaagcactgaaagaacagaagcgtcgtgaaaaggaagaagctgaaatgaagaaacaacataaaaaacagcaagaggaagctgagaaagaacagaagcgccttgagaaggaagctgcacaactcaagaagcaactagccgtgcaaaagcaagcttctatgatgcaaagatttttcaaaagtaagaaagacaatggaaaacttcaaaaatctggagagaacaactcagctgatggtccgtgcaatgacaacaaagagaccgtaccatcaaccacatcaaaaattgattattcattgtctcaacaagagagctgggttttggaggatctttggaggttgcagatcactggttggaagaagctatctagccacaataggtcctccagatggggtgtaagatgcaaacccaagacgaaagcatttaatgaactgaagcttcagaaatcctcagatgatatggttgatgaaatactttctactccaaataaagatggctgccacacttcaagtcaggaaaatgaacatgctacgcttgaaagtgacattgacatgctacaagctattgaggtgcaatgtcatgacaccaataaccctaaacctctgcaaactagattaattagaaggaaacttctgcaatttgacaaaagtaacaggccagcgtattatggatcctggaggaagaaaagtgttgttattggtccaaggtgtccacttaagatggatcctaatcttgactatgaggttgatagtgatgatgaatgggaagaggaggatcctggtgagagtctttctgactgtgagaaggataatgatgaatttatggaagaagattccaaaattacagatgaagaagatgaagatagctttgttgtgcctgatggctatctatcggacaatgagggaatacaaattgaaagcctattggatgataaagatgaggaagccagtagctcaccaactggtcagtgtgcagaagttgaagagttcaggtctctactgcgccaacaaagagtcctgaacattttaaccgagcaagctctccggaagagccaacctcttattatatccaacctaaatcatgaaaaagctgaattactgactgccgaagacctcaaggggacagcaaagatcgaacagctatgtttgcaagttctttcaatgcacatctgtccaggaggcgcagttgttgatgtgcctctaactgacagctcatctgcaactgttgaagaaattaaccagcccaatccgaaggatggttctcctggggctgcatctgctataccagaaacagatctgccagaaattgtccaggtgataagatcatgtcgagatggtatccataaggtggtggaattactgcagcacaagtttccaaatgtttcaaagactcagctgaatcgcaaagtgagagagatatctgactttgttgacaatcattggaaggtaaagaaagaggtgcttgacaagctgggattggattcgtcaccagtgaaatccaagaagaataaaagcatagccatgtacttctcgaagagatgtttacctcctgaagaggctgtcaatgctctgtctgcttctcctgagttgcggttgaaatctagaaccattcaaaatggcaatggtggcaccgaagctcctcagatcaatctgttcccttcaaagcagtag

SEQ ID NO: 22483 - DNA, 207 bp, Zea mays
  Peptide Sequence Number=SeqID_65858
atgtccattttgctggcaggcggtgacctgtgcattctgctgacaggcggcgacctgtccattccgcaggcggcgtgtctgtccattccattggcaggtaaattgaatgcccaggcctacctccgacagggcagcaacgggtgtcatgcaaaggagggggatgacaacatcgcaagtcgcaaccactccctgacgtctttggtatag

SEQ ID NO: 22484 - DNA, 978 bp, Zea mays
  Peptide Sequence Number=SeqID_65859
atggagattagggctccgccaacgagcctcagtctcgcgccgccgcccgcctccgccagcttccgccgaacaccgcttaggaccttcttccttaacggcagcgtttcacttaaagttgtgcaagtacgacaatcaaatgtcaacagatttaagtgcaatagcatacaaagtaacctctttgatagactaacgagggttgccaggtcctacgcaaatgcagttctaagttcatttgaggaccctgagaagattctcgagcaggcagttctcgagatgaacgatgacttgacaaagatgaggcaggccacagcacaggtcttggcgtctcaaaagcggcttgagaataaatacaaagctgcagaacaagcttctgctgattggtatcgaagggctcaacttgctcttcaaaagggtgacgaggatcttgctcgcgaagcccttaagcggcgtaaatcatatgctgacaatgcaagctccttaaggtcccagcttgatcagcagaagggtgtagttgaaaatctgatttcaaatacccgggttcttgagagcaagatagcagaggccaagcagaaaaaggatacgcttaaagctcgtgctcaatcagcaaaacaaatgtggatcttgtttcacttcaggactgccacaaaagtgagcgaaatgttgggcaacgtgaatacaagtagcgccctttctgcatttgagaaaatggaggaaaaagttatggcgatggaatcccaagcggaggcactcggccaattagcaactgacgatctagaaggaaagtttgcactgctcgagaattcatctgtcgatgatgatctttcacagctgaaaaaagaactctcgggaagctctttgaaaggggagctcccatcaggcagaagagcggccagcaactcaggcgccgggcgccctttccccgacctagagattgagagcgagctaaacgagctgcggaggaaggccaaagaatactag

SEQ ID NO: 22485 - DNA, 1359 bp, Zea mays
  Peptide Sequence Number=SeqID_65860
atgggtaagaagggaaattggttcactgcgctcaagaaggccttcacctcaagccccaaggagaagccaacaaatgtgcatcagctggtagcgcagtacccgtctactcacgcgcacggctgggagaagaagcgatggggaggcttcgggcggtcgcggccgcacgcggagccggcgtccccggcggcgggcgcgctgatcaacatcccgctgtaccgcgagccgagcagcatcgagaagatcctcggcgacgcggagatggaccagcagcgccagtactacgccgccaccagggcgcagtaccagatcacgcccgcgaggcccaccaccgccgtcgccggtagtgctgcttctgctgctgccgtgccgctgccgcagccggtggtgggagtgggaacagcacgtgagcgcgagcgcaggagagaagacaagccggccgccgtggtgctcccgctgccgccgccgtcccctcccccgctgatcaggaggttcgaccatgacagggagcagcagaagaagctgcagctgcagccgcagagctgcagggccgagacggagtggcggcggcagcagcagcagccgaggcggcaccgcgcggcgaggcagagcgccgcgccgccggaccgcgcgcgcgccgcggccgtggcgatccaggccgcattccggggctacatggcaagtccatctcgtcgcttagctttgctcttcgccgtgcggcggcagacggcgcaggcgatgcggtgcatgcagacgctggtccgcgtgcaggcgcaagtgcgcgccagccgcgtggaggccatggagcggcgcaaccggcagcaccacggcgccatgctcagggacggcggcaggtggcgcgccagctctcaggacggcggattttgggacgccagccggctgacgcgggaggaggcagacgcgcggacgaagcggaaggtggaggccgtgatcaaacgcgagagagccctcgcctacgcctactcccatcagcgactgacgtgctttttgtttgttgtgctgtccttttggcgatggtgtcggcgacgacgacgacggcagctgctgaaggcgacaccgatggcggcccacgcgatcctggcggacctgcagtcggggcggagcccctggtggtggacgcccatcgagcgccgccacgagccgggggcctaccgccctgcggatcccgccattagaaagcccctgccggcgctcgccatcgcccaccgcgacatgacgacgacgcctgtggcgatgacggcggcgacgacaccggcccggtcggtggtctcggcctactctaagacaagggccacgaggcctgtgatcagggtggggagccccgccgccttcgaaccatag

SEQ ID NO: 22486 - DNA, 703 bp, Zea mays
  Peptide Sequence Number=SeqID_65861
tcaaccgaataagtctcgggaagctctgtgttggaaacatggggaaaccgctgatctacgagatactggagaagccggcgagcagcagcgtcatgggcatctgctcttgatcggtgctcatccagaagcggggcatcggatcgggctcagcgtcgagtactacctgcactacacgctcgtcctcgtcgtgctgtccaggctactggtcctcgggttctaccacgtgatgatccagaggttcaaggtggagtacttcaggagggtcaccgcggtcgggtactcgtgcgtcgtgtttggctggatgacaatcctggccgccaagcaaccgtcgtccaagctgaacatcttcggggttctctcactgcccatcagcttcgcgccgttcgagtcgctgatattcacatccatcatggtgccacaggccagtttcattggccacctgtccgggataattgttgggtactcgattgcctggggtctggtccatgggatgaacaactactgggcagtcaccatgcttggctggactccacttgtgtttgtcttgagcttgaagcgcacagggtctatggagctgagttttattgagatcgagccagtgacggacccctcgctgccttctgttggtgtggtagccaccagaaatggtagaagtagaactctgcaaatggatgccttgtctggaagtggagttgcagacatt

SEQ ID NO: 22487 - DNA, 339 bp, Zea mays
  Peptide Sequence Number=SeqID_65862
atggcctccgccgtggccctgtatagcgccgccgcctgggcatgtcgggggcggatcggatgtagtcgtactgtgggccgtagatctcaaatcctgtggtctgtattgaataccgttcggattaatgatgatctaattgtagccgctgatagaagatcgggcggttcaggatgcaagataccccttcggtctggagatctttctaaagagcccctcggttttactataataaacccgccgtcccctaaagttataaaatcaataccaacaagccctgttttttcgcaatttagaccctggacttctggagtttttgtgtccgcagtccacaacccttag

SEQ ID NO: 22488 - DNA, 648 bp, Zea mays
  Peptide Sequence Number=SeqID_65863
atggaccgcctccttcgcgctccccccacacagtatggtcctatgggaggtcgccttcggtcgtggcccagggagacttgcgcgacgggtcggcgcgtggtggagggttgtcttctggaccgatggggtcctaaagaagcccctcaggggtcgcaatcttggggaaagaaccggagtcttagctggcgcttgaagccgggtactggaaaacccgagaacaaggatgacatccttacctcttctttcggtgacggcggtcagtcagattctaaagatattgtgagattcaaagttcatgtcaaaagtgttgccatgattcccccaatcattgaagttggtgtcaaaccttttctgtatgacatttactttaaaattgacaatattactgatgaagggtggaacgatgactccataaatctgggcaagagggcttctgttgatagacagggttttggtgacccctcttttgagaaatctgttaaaaaagccaaaagtggtggtgaaaaatctagcatggatgataagggaaaatctcttttagaggatccctcatctcatggtaatgaagttggttttcagtctgaacattcagatggtatgaagactgggaaaatttctgaaggtgtcaaaggataccttgacagttag

SEQ ID NO: 22489 - DNA, 660 bp, Zea mays
  Peptide Sequence Number=SeqID_65864
atggcccggggcgcgggtggtggcggtgatcccgtcggcgacgaggacttctcgagccgcttccgcctcggcgccgatggcaggggacaccagcccttcggcagatccccactcaaatcctcccggacgagtggggcgccggcctctgcgcgagggcgccgtcccagtgcaaaagcaggaccaccccagaacacgaacgctgccctaacagcgcgcggcatcgtgggtggtcctcccgtgcacgcggcgcggcggtcgccctccggcaggaggggccgccggaagcccggccgacgactccgacacgctggaggtgacgacgcccgccgtcgatcagccccacgttgtctaagtccgcgccgtccgcagggccagcgagcgcctccacccccgaacgccgcagaaaagggtgacccgcggacccgcgcgggagggaccgggaaagggggataccccgaaaaggatccttctccgcgaaggaaccgggctccgagcccccccctactgatcaggggttcgaagactggccctccgaagggttcaacagtcgcctcagatcgcgtgggcctgacacccactactggtcaggggttcgaaggccagccccccgaagggttccatggccgcctcaggctactcgggctccgcgcccattactga

SEQ ID NO: 22490 - DNA, 1398 bp, Zea mays
  Peptide Sequence Number=SeqID_65865
atggtgtctccggtgagctgcaagcgggtaatccgagtggacgtccgtgccccgttcgttgggggtcggctaggggcccggaggcacgcccaaaagtacctgcggcgactggcgcgccggttgcttgacgcgtgggcctgggcttccaagctggcgtgtcagaagtcggagaagcgcgtccacctggcgcggttgcatgccgcctgcatggctgcccgccccttccgcccgttggtctgggcaaaaatggggggtcgcttcccccgggtggggggtatccgccgcctttccgcctcctcgttggaggaacgcaactccatgggagctggtacctctcagccatcgttcggcttcaaggattttcatcagcctgcccggccgcacccctacgccggcgatcacccaggatgcgttcgtgttctggggtggtcctgcttttgcactgggacggcgccctcgcgcagaggccggcgccccactcgtccgggaggatttgagtggggatctgccgaagggctggtgtcccctgccatcggcgccgaggcggaagcggctcgagaagtcctcgtcgccgacgggatcaccgccaccacccgcgccccgggccatcgcgccggcgtacttgtcctcgcccctcgagcgtcggcgggggcgagggcaagatcgcagcaacgccggtccactgtcgccgtagtcagaacgggcggcggcgagccgctcgtcagtcttctgttgctccgcaggccttccccatggagtggggtcgttcgtacctgcggaggggggaaccggagttccgttcgtaacggcacttcgaatgccagtgttttttgttcattgtggctgtcgaggcctgaacatgaatccctcggcccgatcggccttgttgtctggggctcctctagcttagttaaagagacccttcggccgcccttcgatgagccgaggccagggccgacgccaaagtcgatcagccgaggcctcgggtcgggctggcgcccttggaagccggtcggccgaggccccaggggtaaccggccgagccgcctgctcgggccggattcccggaggaatccctggaccgcgtcgccgtccgaggctgggtcggactctgctgaagacgtcgtcgatgccgagggtgctacggctcccttcagcgtgaagacccgagcctgcaggatcagatcgtcttgtagctcgctttatccgagcgcgagttacttctcgcagaaggtgatgagtgaggatccgctttccgaagtagtcaagaagcacgaaagtaatcctgctgaaaagagatcctttttcgaggaaaaattcgacgcaaagggggtctccccccttttagcccccgagggagggtcgggctttgccgaggctaggccgacccttccttga

SEQ ID NO: 22491 - DNA, 306 bp, Zea mays
  Peptide Sequence Number=SeqID_65866
atgacagtcgcgtccccaaccccagagccccccattatccccgacacgatgtccgggagggagggacctctgggagtgggcatccctggtgtcgcccttcttcacccgttgtcgacaacggacacgctggagcgacggagctgcgctattagggcgtggaggtggacacgaggcggtgcgagcgcctatgcggaactggagtggtcggcagtgcgaggcgctggtgccacgtgcgcgctgcgggagaaggaggcggagctagaggcggtccgattgcacgctgtggagctagaggagtggctgtag

SEQ ID NO: 22492 - DNA, 324 bp, Zea mays
  Peptide Sequence Number=SeqID_65867
atggtagcgcagaggtgcttgcccacggtgcgagcggaacccacggcggaggatccacaccaacgagaaaattgtggcgcctggttgatctcatggtcccgcgacgcctcccccatgaaattcatgcccaggcgaagctcctccgccgcccaccgatccttccgagccaccggcgcagacacacggttaatcaccacaaaaccccagcggtggcacccttacgattacccagcccgatttgcttatggcgataaccaagccgcgcacgcgtacttatacccgaggtcatggtgcggtgttcggtcacaggcgccaaacggttga

SEQ ID NO: 22493 - DNA, 258 bp, Zea mays
  Peptide Sequence Number=SeqID_65868
atggagcaggtgacacgaggcagcatgcgcgacatggggagggggcctattgccggcgacgatggcggtgggtgcgctgcaaaagggggcgtgggtggcggtgggggtgcgcatggaggcgggcacgcgtgtggggggcacgggggaagaatagagtttttccaaagcacgaactactcagattcgggggctaagcataactactattgcttggctcctgaattgagaactatgctagatgaaacttatgagcactaa

SEQ ID NO: 22494 - DNA, 213 bp, Zea mays
  Peptide Sequence Number=SeqID_65869
atggcgcggtcggctcgggcggtgcagggcagggcgctcgggcatcgggtgcggctcctgggcggcttcgggtgcgcggggggcttgcgcggctggcgggggggcttcgcgtcgggctcctggcggtgtcgcggggaggccggggtcgcgcggctggttgaagctccggcgcggtggcttggtccttggagctgcgtgcgggcgggtgcataa

SEQ ID NO: 22495 - DNA, 84 bp, Zea mays
  Peptide Sequence Number=SeqID_65870
atggcgcggtcggctcgggcggtgcagggcagggcgctcgggcatcgcgtgcggctcctgggcggcttcgggattttcatttaa

SEQ ID NO: 22496 - DNA, 351 bp, Zea mays
  Peptide Sequence Number=SeqID_65871
atggcggaaggggaaaggactgacaacgtgggcccacttggccggttaaacaggatgcgcgttgcgcagttgagccaggtccagaccccacacagcgaaaggccaggtgatgggtatcgtctgcagagcctgagcaggcaggtgggtctgccttgcgtagaattgacacccttcgcaggtgcggacaattctagtggcgtcggccaccgccgtcggccagtagaaaccttgtcggaaggcatttccaacaagggctcgaggtgctgcgtgatggccgcaagcccccgagtgtatctcttgcaggagttcctgaccttcggcgatggggatgcatcgctggaggatgcctga

SEQ ID NO: 22497 - DNA, 996 bp, Zea mays
  Peptide Sequence Number=SeqID_65872
atgcccacctctgcaaccgacgctcggacgacgaagacgcggcggcacaggcgaggggtggggaatagaagaagggagagggggtggtcggcgagggggaggagcgctgggccgtgggctcagactgagcagaggcggacccgcggggaggagctcgacgctggcgtggctgccgggaacggggaggggctcggcgcgggcgtgtggctgccgaagaaaatatcggcacgggcgagcagctgccggggacggggaggggctcagcgcgggcgcgcggctaccgaagaaaagatcggcgcgggcgagcagctaccgggaaagagctcgacgcagcgtcctgccaggcgggcgggcgacctgagccactgggcagaggcgcgtcgtctcggaggtgaagctctgatcggcgggcggtggcagaactctggccagagacggacggccggggcacaacaactcaaaggttgggggcaggtcggtgggcgactgggtgtcggcggttgcgactctcggcggaggctacggggccggcaagacctcgctgatgaaccaataagtctgcacctctccgatccctcgaataaaatcgcaatcccaagagtgcggcaggataccattggtggtgtaaccatagatgggcttcttgcagcagcagctggattctcgattgggcttgcatttgtgctgataggatttttcaccactcaatgtgctcctgatacaaattcatttggccttgcaaatgacaacgagattcacgtagttacaaggcttgagtgcggagctgtggctggaaccattggccagactgttgcataccctcttgatgtcatcagtagaagaatgtatatggttggttggagccatgctgactctattgttattgggcaagtcaaagaagcactccagtacaatggcatgatcaatgcattcaggaagactgttcgccatggagttggtgctctatacaagggtcttgtgccgaactcagtcaag

SEQ ID NO: 22498 - DNA, 267 bp, Zea mays
  Peptide Sequence Number=SeqID_65873
atggtgtgggatccgtggctgatcgtgtcgcagatcgtgtgcctgcagtgcctctactacttgtcgctgggcgtcgccatggcgctcctcgtcggcacccgcgtcccgcgactcaccctcctctacctcttcgacttctccacgctcaccccgcgcacccccacagaccgtctgcaaaaacatgctcccctgcattcattcttttctgacaggatagtggcagtagatacaacggacaagagctgggttcatgctttatgtgattga

SEQ ID NO: 22499 - DNA, 198 bp, Zea mays
  Peptide Sequence Number=SeqID_65874
atggagctagttgagggtgaacttgggaggttcgccatgaagaggggtgaagagcgaactgaaacgtacaacaggctcaagaccctgtgccttggcagatgccgaagccactgtagcgcatcctgccttaggacaatgggtaggtacaatgtcatgacatcctctgctgcttcggcggcccaggcggtggtcgtgtag

SEQ ID NO: 22500 - DNA, 690 bp, Zea mays
  Peptide Sequence Number=SeqID_65875
atgggttggcgtgagacggagcacgaaggggggaagagaagccagagggagacaggggagagaggtgaaacccgcggccttcgtgtttgtcccgcgcccaggtcgggcgtaaggaaaggatccagggctgagcccgagtccgagccctggggtcgggcgaagcggagttcgtcgtcttccggggctgagcccgagtctgagccctggggtcaggcgaagcggagttcgtcgtcttccggggctgagcccgagtccgagccctggggtcgggcgatgcggagttcgtcgtcttccgaggctgagcccgagttcgagccctggggtcgggcgatgcggagttcgtcgtcttccggggctgagcccgagtccgagccctggggtcgggcgatgcggagtttcctatggcgcctgaggccggacttggctgctgtcagcctcactctgtcgagtggcacagcagtcggagcggcgcaggcggcgttgtcctcttgtcaggccggtcagtggagcggcgaagccacctttgcattaaatgcccctgcgattcggtcggttgacgaggcgacttggccaaggtcgcttcttggtgaagactgggcctcgggtgagccggagctttgtgctgatgggggttaccagctgagatttaggagtcttgagggtacccctaattatggtccccgacagtag

SEQ ID NO: 22501 - DNA, 816 bp, Zea mays
  Peptide Sequence Number=SeqID_65876
atgaactcaagattcccgaaacggaagtaccgtcccgggctggaaaggttgctggagactgcccatctggaccttgacgggaagttgttcgtcaacacgcagcaggcccctacctggcgcgccaactgtcggcggttcgaacccggggggtccctggaccgacgaggtaatgatggcgcctcctatgacgtggtcggtccgagccctgggttgggcgaggtggaggctcctccgaggtcgaggtcgagtctgtcttccaaggccgaggtcgagtccgagcccctgggtcgggcgaggcggagaccgtcggctgaggccagggctgagtccgagccctggggtcgggcgaagcggagttcgtcgtcttccggggctgagcccgagtccgagccctggggtcgggcgaagtggagttcgtcatcttccggggctgagcccgagtccgagccctggggtcaggcgatgtggagttcgtcgtcttccggggctgagcccgagtccgagccctggggtcgggcgatgcggagttcatcgtcttctggggctgagcccgagttcgagccctggggtcgggcgatgcggagtttcctatggcgcctgaggccggacttggctgctgtcagcctcactctgtcgagtggcacaatagtcggagcggcacaggcggcgctgtcctcttgtcaggtcggtcagtgggagcggcgaagtgactacggtcacttcggctctgtcgactggagggcgcgcgtcaggataaagctttgtgctgatgggggttaccagttgagatttaggagtcttgagggtaccccctaa

SEQ ID NO: 22502 - DNA, 324 bp, Zea mays
  Peptide Sequence Number=SeqID_65877
atggcgaggaccatgcttgatgaatacaagtcatcagaccggttttgggccgaggcgattaacaccgtctgctactccatcaaccggaatccgaagagcctccacaagcacaagatcaaccttcatcttccatacaagcatctccaccaactcaagatgaggatcaagctcaagatgatgaaaatgaagatcaagaagagccacctcaagaggaggacaatgatcaagggggagataccaatgatccagacaaggaagatgatcagggtccaagaccgccacacccaagagtccaccaagcgatacaatgagatcaccccatga

SEQ ID NO: 22503 - DNA, 510 bp, Zea mays
  Peptide Sequence Number=SeqID_65878
atggcgagcagagcagggacaggacagcaacagatcggcgccggcccgggcagcaatgaggtgaatgctgcctgcgtgctgctggaattattgcacgaggtggagtgggacgaggaccagaagttggtgccgcatttaattcttgaacgaggccattcaatccccgtggtgaatactggtggcgcggcgccggcgtcgcagcgctatacactggcgattcttgattttatcactgaacaagaaacactagatgcagacatattaaatgaagaaatcttcagccatttaatcagtcaaacaaaagtcgcactatcagcagaacattcctccagttatgccgaggtaatcagcaaacctggcctgcgttgcatcgagtcatacctacatgatctacaagctcatccaaccaaggaatcatcaaagaatttcagagaagcaacaaacagccttccattgcatcccttcagctttcaacacaataatacaaacttcccactctcccaagtctga

SEQ ID NO: 22504 - DNA, 1305 bp, Zea mays
  Peptide Sequence Number=SeqID_65879
atgtcttttcccttcctcatgcactgcgtccttccatcttccaagcccccggatgggggatgcctgccgtcttttcgcctcatcgtcggaggaacgcaactccgtgggagttggtacctttcagccatcgttcggcttcaaggattttcatcatgcagcccggccgcacccctccgccggcggtcacccaaaacggtgacctccagcttgatggtgggggaaagcgagccgggctgcggcctctgcccctccctcagcctcaaggattttcatcaccaaggctggggaggggagtgtgccgagttggggtcggcccccgcgcgggtggcgggaagggtggtcgccgtccgcggcgccggcggctgcaccgtgcctggctctcggacgcgagtggcttcggagccgctcgcggcgccggcgtctgccacggcagctggaagaggttcttccgccggcgcgatagccaaggccgacctcggaccgacctccaactccgcggccttccgcccgtccttgcctcacgagtttgggcaagggcggggagaagtcgtcgtcgtcgccgctgctggagcaggtgtcgacgcgccgttcgtcggtcttctgttgctccgcaggcctacccctatggagtggggttgttcgtacctgcggagggggaaccggagttctgtttgtagtggcacttcgaatgctaactcgcatgttgataatctgaaccacttcaccaagcatgagtcgccccgtgtcaaggtgacgagtgagcatgaacagaggcggagttggctcgaaaataaaacctggttggccggagccgagccgggttgttcgttggcgggaccgacgccggagtcgatcaaccgaggcctcgggtcgggctggcgcccttggaagatggtcggccgaggccccaggggtatccggctgagccgtctgcttgggccggattcccggagaagaccctggcggcaatggctcgggcgtggtgatgacgtcgcccttcggagcaaaggccttcggaccgcgttgccgtccgaggctaggtcgaaccttgccgaaggtgtcgtcgatgccgagggtgctgctgccccctttccagcgtcaagacccgagcctgcaggatcagaatgtcttgtagtggatgtttgtgcgagcgagagttgcttctcgcggaaggtgatgagtgagaaggtgatgagtgagaagaaatcttttttcgaggaaaatttcaacgcagagggggtgctcccccttttagcccccgagggagggtcgggctttgccgaggcgaggccgacccttccttga

SEQ ID NO: 22505 - DNA, 948 bp, Zea mays
  Peptide Sequence Number=SeqID_65880
atgcagaccggctcagagcggaagaagccaaaccgccgcgcacggcgcgcacgaccgcccggcggttacaagcgaccctccacttttgcccagaccaacgggcgaaagaggcaggcagccctgcaggcggcatgcaaccgcgccaggcaactgcaccgccacttgcgccaccaccgcgcctcctcgattgcggaaccaacaccacgactcgaggcgacccagcgcacgacccagcagcgccagcctggcgcgacggtcgatgtggccaaaggtggaccagcagtaatggcggtggcaggcgggcgggagcaacggtcacgtcgtcagccaagctcacgtcccatccgggagcagcaaggcaaccccctcttacggcgtgaagacgacgcgcccgtgatccgtccctcgaacgactcgcgcacgcgcaacggccgccccgccaaccactcgccccgtcgcattaactccgcgacaaggcaggcggcgcaggaaaggcaggcgacgcttcgccttcgccgaaacgaccgcaccaaaaaaggctggccctccgaagggttcaaacagccgcctcagatcgcgtgggccctacacccactactggtcagaggttcgaaggctggccccccgaagggttccacggccgcctcaggctacccgggcttcgcgcccattactgatcagggaatcccaccggagggaggcatcgagccctcggaccccgtcgccaggggaccgggtctggcagatcactcgcagctcaccggaaacaccatgttcggtgcccaccgaggaggctcgggggctgctctcgcgaacccggctccggccaaaccgttgacagcgtcaacataccagcccgagaacttgggccccgaccgtacacccgggctacgaccagttcgcatgagggaacaaccaggccagccgaagcattacgcgaggcattaa

SEQ ID NO: 22506 - DNA, 534 bp, Zea mays
  Peptide Sequence Number=SeqID_65881
atggcggcccccagctctcttacgaaggcaggcggacgtcagcaggggctcgaccgctccaacagctgtccctccgccaagcaccgtcgctcctccgacggccacgacatcacaccagcagggtgccaagatctctctggctgccacattggcatgaaggaccagggccctcttcgagaaggttggccgcgcgaggacgaggacgagacaggcgctcccttggggccgctcgcttccctcacccgcgtggacgcttgtaaccccctactgcaagcgcacccgacctgggcgcgggacgaacacgaaggccgcgggattcccactactcccacgccggactccggccgcctcgctcctctccccccttcgtgcttcgcccacgcgctcgacccatctgggctgggacatgcggcactcactcgtcggcctgagggacccccggtctcgaaacgccgacaagcgcacaacaagaatcgtccgatcgcgatcggacgcgccatcgtgccgatggccgaaccggtatccgtgctctaa

SEQ ID NO: 22507 - DNA, 441 bp, Zea mays
  Peptide Sequence Number=SeqID_65882
atgggtgcgattaagccagagatcagtccattcgagcgactcgatcacgcctcgtccgagcctagcctcggacaagggcagccgaccccgagtgagactgacatgcggtcaggtcctaccaaaggcgccataggaagctccgcccgacccatggctcggactcgggctaggtcccggaagacggcgaactccgctccgcccgaccaagggctcggactcgggctaggtcccggaagacggcgaactccgctccgcccgacccagggctcggactcaggctcagctccagaagacaacgaactccgctccgcccgaccccagggctcggactccgccctggcatctgccgaacgatctccgcctcgcccgacccggaggctcggcctcggccacggaagacggactcgacttcggcttcggaggagcccccacgtcgcctaa

SEQ ID NO: 22508 - DNA, 522 bp, Zea mays
  Peptide Sequence Number=SeqID_65883
atggcggcccccagctctcttacgaaggcaggcggacgtcagcagggactcgaccgctccaacagctgtccctccgccaagcaccgtcgctcctccgacggccacgacatcacaccagcagggtgccaagatctctccggctgccacattggcatgaaggaccagggccctcttcgagaaggttggccgcgcgaggacgaggacgagacaggcgctcccttggggccgctcgcttccctcacccgcgtggacgcttgtaaccccctactgcaagcgcacccgacctgggcgcgggacgaacacgaaggccgcgggattcccactactcccacgccggactccggccgcctcgctcctctccccccttcgtgcttcgcccacgcgctcgacccatctgggctgggacacgcggcactcactcgtcggcctgagggacccccgcgctcgtattttaaatcggaaccgttgatacgagatcctgcgtctatcgtggcttaccgaatagggaggaatgagatctaa

SEQ ID NO: 22509 - DNA, 465 bp, Zea mays
  Peptide Sequence Number=SeqID_65884
atgtcgcacttcttcagtagcttcgtcgatcttcctttgaagatcagtcagccgcgccatcttctccttcttcctttgtacttgctgatggatgattttcatgtccctgatctcttggtccaactcctcctcttggagtgttggactggtagcttttctcttctggcttcgagcttctcgggagagaaagagtttccttatttggatccagtggctgcaacgcagcagccccctggcgctgaagctttcttcggcggcacgacgaaggtcagtgcttgtcgaaggcggtcgaatgagttcaccggaggaccttcggaggacgaacgcaggagtgacacaaagaaaactttttcattagctgcagcacagctgctaaaacgagcaaccgaacgatcagtgacaattcaaaacaaagccaagtttacgattctagcttccaggtctatgtttgtcagcatcgtctga

SEQ ID NO: 22510 - DNA, 927 bp, Zea mays
  Peptide Sequence Number=SeqID_65885
atgctgacgctgtctgtgagaagtcagcctccgacagcaaagtgtcgtaaactgacggacaaggtggccgcattggagagggagaaggctgacctccggcgccaactggcggcggagaggagggaggccaacgaggccatcgccaaggagcaggctgcgcaggcggaggccaagctggcgcgggcggagggcaatcttgccaaggagctcgccgaacatctgcaagagcggctcaccgccctggagagccgcgcgaagggggccgaggccgcgatgcgtgcggaggccgaacggacgcgcacgcagcttatggatacatatcgtgagctgggaggagctgctggaactccccgctgtcgtggggggggggggtttatgtcgtacgcctccctggttacctgcgagggggcgatgaacgcgctctcccgcgaagggtgccggcacttcgaggtcttcgaccaggcggatgaagattttgatcgagatgtctataaggttgaagacctcgtggtgaaggattctgccggggccctctacgaccggatgtggggtccgcacggtcgcgaggtggtcagggagcgggcggagacggcgatggctcaggcgttgcgtggcgagcgggtggacgacctcggggcgttgaatagcgcgctgcctgacccggagccggcccctgcggaggccgtgtccggggtcgccctggagccaaccccggagaccgcggcgatcgcgacggctgcccccacatctgctgcggccggcgaagacctgcccccaaaggtggccgaaggcgaaccggatgcccccgcggccgctgcgccgagtgctgaagatcccgcggcggtggcggcagaaacaacagcggaagcagcggcggagccaatggcggaagctttcgcagtgccagggccttcgcaggtggcgtag

SEQ ID NO: 22511 - DNA, 543 bp, Zea mays
  Peptide Sequence Number=SeqID_65886
atgcggcagacttgctttcttgcattaccccttaatagagtgctcctgtgcaaccttgtactgcaattgacattcttgatactttttcaactgatttttgaagggtcaagccatgtaaacgtcagtcatgttatccacgagctctcatttggcccaaagtatccaggaattgacaacccactggatgatacttcaaggatacttcatgacacaagtggaaccttcaaatactatatcaaggttgttccgactgagtacaaatatctgtcaaagaaaatattgccaacaaatcagtattctgtcacggagtattttcttcccattcgcccaactgagagggcctggccagcggtgtacttcctgtatgatctctcaccaattacagtcaccatcaaagaggaaagaaggaacttccttcattttataactcgcctttgtgcagttcttggtggcacatttgccatgacaggaatgcttgaccgatggatgtaccggcttgtcgagtcagtcaccaactcgaagaccagaagtgtactgcggtaa

SEQ ID NO: 22512 - DNA, 201 bp, Zea mays
  Peptide Sequence Number=SeqID_65887
atgggagtcgactgggaacatacctactatcatgccgggggtctcctgaactgcttcagcctccaagaagacgaggtgcctgctgattctgcctctgaaactgacctcctgactgattgctctgacggttctaatactggtgctgaggatactgcctttggaactgctgatgctgctgaggtggacgctggttctgcctga

SEQ ID NO: 22513 - DNA, 1275 bp, Zea mays
  Peptide Sequence Number=SeqID_65888
atggagagtcatgatctccgggcagaaagggaatcacggcttgtgggtggcaatgagactgatggttctggttatgaatatggtgctgctagtccactacagccaaacaggatacttgctgagtatgttgatgtgtactcacccttgctctacacaccaaaccccccccatccccaggttgtcagcattgcaaccactgctcgggagaagatgaagttgtggaaggagacttccaggagttccaagactacgacgagttctaggcgtggacacaccgcacgaaagtctgtcatccccttcttaccctcccgccttgctgagcgtccgcttcgccgtcccgtggccggacagtccagccacttggagagactgcaccaccgcctgcatgaggagcaggaacgtcgacgacaggagcaggagcagcatggctcttctttctcgctccaacaggagatagagtccgtgaagagctgctcccctgtgcttcccctggaggcgccccctgcaccaccactgggcgccccagcctctggagtagctgctggaggagacccagacgacggaggtggcgacaacagctcgagccacgacaccgacttttctgccgacaaggagccggaaggatgggttgctcgacccatcactcgcgacgctgctcgcgggtgtcacttccacgatgcgctcgacacccttctacgtcgggcacttaaccggcgtacttggtccatcgagtatcgctgtgtggtctaccagcacagtcgcggggtctacccggaccgctgggaggcgacctgcttggtgcgccgtccggagaacagtctccagggtgcggaggcctgctcagagcactattctatctctgagcgggactcagctgaggcagccatgcaagatgctgcacggcgtgcgctttcgcactactgctcggttctcggtggggtagctgacggtctcgacctgaagtattacccccgccgtccatctggcagcacaggaggcgtgattgtttcacccgttggtgaggacaatcctaggttgagcagcacagtcaacctagccgccgtgctaaacacggagctggaccatgcattagacaagctgagtagggctcgtgctgagatcgccctgctgcgggctgagcgtgcggaacgtcgtcacctggatggtggttcccccgctcccgtcgggactcagcacccgtaccgctcacctcggcgtggacgccagccttatggcaatcccgactccaagaccaagataaatctggaaccatag

SEQ ID NO: 22514 - DNA, 657 bp, Zea mays
  Peptide Sequence Number=SeqID_65889
atgtgttccagcaccaatctcaaaagctggaatgctgatccctccttggatcccatcttcgaaggacccaaggcggatgctaaggtagaggccatgagggtcgtgcatgatgccgcagagtacatgactaaagattttgtccgggagactggagctgacactgaggacgacgatggcgacggagacgacccggtgattcaacgccaacgaccgttcccgacgttcgtcgaagcgaagtcctaccttcgcctcgccgagatcagcatggctgccaagcaggctcagccgtctcaggctttgctgcctcggctcctcctatggagccatcgctcaacgccggtggctgccgccgaacaggcgtggcggcggcaagaggatgcctggcgggcatggttctggtgctgtggcatttcctgcgtcttgggatggccatttcgcatggcccacatcctggtaggcggccttcggcaccttttaagcatattgggccggcccatcaggcgtcccaccactcgcgcccagcacacctccgcaattgttctacgatgggctcgtggtgcctggacagcctccgacggcgccagggatgtagcctccgacagcgcccctgcctgggccccctctgaggaggcccgactccaccaccagatttcctag

SEQ ID NO: 22515 - DNA, 492 bp, Zea mays
  Peptide Sequence Number=SeqID_65890
atggatttcattcctggtgtcgatggtcctagtgagggtgtaccccgggtgctggcttgcttcagtaacaatctgctccgccgagagcctttgaagcttgtcgatgggggccagtctcagagaacctttgtatacatcaaggatgccatcgaagctgttgtgctgatgattgaaaatcctgctcgagccaatggtcacatcttcaatgttgggaatcctgacaatgaggttacggttagggagttggcccaaatgatgacagaggtctatgcaaacgtctcaggagaggcgccgctggatgagcctatgatcgacatgcctactggattatgtaggttggaacccaaagacacctctcaaggatctgctggagacaacattgacgtaccagcacaagacatacaaagaagctgtgaagaggcaaatgtcgcaggcttcagcaacaagttaagttggcgctggctggggacggctcctcgtttagagccctag

SEQ ID NO: 22516 - DNA, 1020 bp, Zea mays
  Peptide Sequence Number=SeqID_65891
atggaggttcgctgccaaaccaacttttgccagaatgaagatggtttcccaaagttgctgagagcatgcacagtccgcctcggaatcaggagccagccagagtatgatggtcatgaattcatcgagcatggcacagagaagtgtgttgtgactgtatacattggatccagtccacaccatgtggaatggagtgtcactactgctgggcacagattcaaagacacctgccaagtcgtcgctcgcaaggcattgagggccctgtgtcagatctatgaagaagaagtgcctgacaccccactcagattcttttcgccctttcagagagaccgtcccgcttggatggccaggatgcgtgcattggaggaacaacagctgcttgaggacgaccccacagtcgtgtacctcactgcatacctgctcacccttgatacacagtatgatttcttggctcggcaccaccctcaagcccgtgcaactgccttggagagtcgtgaagtcattgctgtggaagccctgaagcaagccaaggatgagcacatccataagttgatggaggcctacttggtaacccataaccaacatagagccctgcggatccgagagcccgcctcatacaacccagttcacccaggagagttgaagatccccagattcttgaaggtcacccggtctctatcagaggagagaagaaggcttgggaactcccggaaggagccatattcttggaaaggaattccagtctcccctaaggctatggataaacaagatcaccccgagtcctcccaagatcccccgccggagttgtgtgagcccctcaccatgaagaagattccagcaccgtcccttgaggtcaaggaagaagctgcaagcaccccgccagcaccgccgccctcagaggagctacaagagccagtcccgcttgaagaagagttcgaccctgtcctgccatctcagtcgctgccagaagaagtcatcaacatcagctccctgttgacccatccaggagatgtctcagattga

SEQ ID NO: 22517 - DNA, 411 bp, Zea mays
  Peptide Sequence Number=SeqID_65892
atgtcgtcgtctctctctccagcggcggcagccgcgcccctggatctggacggcaactccgtcgcgcccctcaccatctgcatgattggtgccggcggcttcatcggctcccacctctgcgagaagctcatggccgagacgcgccatgtcgtcctcgccgtcgacgtatactgcgataagatccgccacctcgtcgaccccgcgccgccgcacctcgcggggcgcatctccttccaccgcctcaacatcaagaatgactccaggctcgagggcctcatcaagatggccgatctggtcaagtactgctccgagaacagcaagcgtctcatccacttctccacgtgcgaggtctatggcaagaccatcggcagcttcctccccaaagaccacccgctccgcaaggtgacgtga

SEQ ID NO: 22518 - DNA, 321 bp, Zea mays
  Peptide Sequence Number=SeqID_65893
atgtccggtgcaccagaggactccgactcaaactcgtcaccttcgggaaattccagaggcaactccgctataattcaccggactgtccggtgctccaaggaagagcggcctcaggaactcgccagcctcgggaattcattccagctgctccgctataattcacaggactgtccggtgtacaccagactgtccggtgtaacagcggggcaacggctacttctggcgccaacggctacctgcggcgcattaaatgcgcgccagcgcgtggagaggtcaggcacgcccatgctggcgcaccggacactctacagtgcatgtccg

SEQ ID NO: 22519 - DNA, 1062 bp, Zea mays
  Peptide Sequence Number=SeqID_65894
atgacgacggcaacagccgttggcagcgtcgccgaccgcatcatgccgcacctcctcaacatatatggatcgtctgcgacggcacgggacttcgagatttacgcgccaaatgcgacgtttgaggacccgctcatgcgagctcacggggttaagcagatcaaatcagcgttctacacgctgccaaaggtgtttggggaatccaagatcaccgaatacaccgtacaagagaatcccatggggccgggcaagaccgaggtggtgatccagaacaagcagcactacaaggtgctgggcaagccggtggatctgacgtcgctcatcaggctgcagctccaggacggcaaggtggtcaagcacgaggactggtacgtcgtcgtctcgtccgccgccgctcgtatttacatatgcatatgcttctccggccagacgtactcaatgaataatggagatatctacgacgacgacggtgcaggtggcacgggaagcctctcaagaacagggacacggtgggcgtgccgctggggggcagcattggcaagcggcccgcggcgcccgagctgccggtctcgacgcaccgcgcgccccacagccgccaccaagaagggctggcgccgccgccaccaccacctcgccctcctcctcctgctgctctgctcgggccgccgccgccgccgcgcgcgcgtggaggtggatccgggctgccgaactccgtccccgtacgccggcgacgcgccatcgtcctccacggcggtgctggaggaggaggaggtggtggcggcgtggcgggagcggtggatcggcggccccgccttgcgggcgctctacaccatctacgaagaggcggacgaggaggccgcaggcgacggcgaaggcatggacggcgacgcgcgggagacggagacgccgttctacacgccgccggcgtcgccgccgcgcgcgggcggcgacggtgggagcaacggagccgttccgacccaacccaccgacggcgccgccgcccccatcgtcccagcgcacgcggacacagaagacgtagctgacgccacattagatggtaggtag

SEQ ID NO: 22520 - DNA, 1629 bp, Zea mays
  Peptide Sequence Number=SeqID_65895
atgacgacgctctccaggatgctgccgcggttgcgctcctccgccacgcgcgccctccgcaaggtgttcggactggaacccgcggcgccgccgcgacggctccccgcccctgaagccttcgtcgcgtctgagagatcactcctgcgccctcttcctggcctggacctcccgccgtgcctccccgacaacctgagccgcagccccacccgggtcaccacgctccccaacggcctccgcgtcgccaccgaggacatcccggtaatgcacagcaccacagccgctgtaccccgctcaaaaaatgcttccccgctgttccttctctctattctcaatctttgcggggctcgtcgccggcagggtccttctgcgtgcatcggtttcttcgtcaactccggctccgtctacgagtccggggagaccaccggcgtgtcatacctgctggagaggatgggcttcaaggacaccaagcaccggagccacctcagcatcgtgagcgagctcgagcttgccggggccagcgtcagcgtctccgcctcccgggagcagatggtctacagctacgacacactcaagggatacatgcccgaggctctcgagatcctcatcgactgcatgcgcaacccgctcttcctccaggaagaagtccaacggcagctggtccttgctcgagaaggattccaggagctgcagaggagccctgaaagatttctccatgaacagcttaacattgttggattttcgggtgctcttgcgaatccactaatagctcctgagcatgtccttgctagaattaatgacaggattattcaaaagttctatcatgaaaattttactgctgatcgtgtggttctagcagcagcaggtgttgatcacgaacacatgctaggctatgcagattttttgttgaaagattggcacaggggggccccaatggaaaagccaaagtctacatatgttggtggatattccaaacacagagcttattcagatatgacagatgttgcattagcttttgaagtgccagggggctggtttcaagagagagacgccgcgattatgactgtcatacagactttaatgggtggtggtggttcattttccactggtggtcctggaaaagggatgcattcacggctttctctacgtgtcctaaataaatatcactttgtcgagtccctttctgcatttagtaatgtatatgacaacactggcctctttggtatctacttgaccacgtcaccatatcatgtggcaaaggctgttgatatcgcaataagtgaattaattgctgttgcaactcccggagaagtgacagaggttgaactgcgacgagcaaaaaactcaacgatttcatctgtattaatgaacctcgaatctagggtaatcatgaatccctggtccatttctgcttcctgtcaggtagttgttgcagaagatattggaagacagatgttatcttacggtagcaggaagcctatggacaacttccttcaacgtatggaaggaattactctagatgatgtcgcaacatttgccaggaagatgctagcttcacgacccacaatggttagctggggagatgttgacaaagttcctccatatgaatctatttgcaagcggctacgataa

SEQ ID NO: 22521 - DNA, 306 bp, Zea mays
  Peptide Sequence Number=SeqID_65896
atggttctgaaggtttacacgggcctcatttatggtttcgcccaggggcctaaaaaatttgaagacggcgctgtagacagactagtgtgctttgtacaacaactggtggcccatgctagcaggtggatcaatgctgcgaaattcctgactggtgcgtccgccatgggaagcctcgctattccagcaataccgaggcatgctggcctaatcgagactggggccatgttcatccagttcacgtccttcttcattcttgtatgcacagtgctgtgcttccatagggctaccctggatgaggactggtaa

SEQ ID NO: 22522 - DNA, 621 bp, Zea mays
  Peptide Sequence Number=SeqID_65897
atgggacgtgccgcgccgtcttcatcgccgagctcgccgcagctcgggcgcaagcgcacggcggcgcccacaccggagcccccgacaccgcagcgccactgctccatggtcgacgtcatgcgccgctcgcgcgccgtcgccgcgccgccccctgtcgcacgcgcgcgggtgtacacctactacgagacccttctctgtgagacctgcggcctcggtgaccgcgacgacgagatgctcctctgcgaccggtgcgaccgcggctgccataccttctgcctccgccccatcgccgccaaggtccccatcggcccctggttctgccccgtctgcgccccgccgactatggcccccaagagtttcccggtgaagcagaccaagatcgtcgatttcttccggattcagaaggatgagcaggatgcacaggccgccaaatgcaggctctcccaaggcaatcccccccacctgttcaatgcacctgctaagagctgcagtagcgatcaccaaatattcctgttagtatgccagtcacttcttttggttcttattgttgcagcattgccttcaaatatgctcctgcgaattggaaactctaggcaacaaagaatacggtttacgttataa

SEQ ID NO: 22523 - DNA, 444 bp, Zea mays
  Peptide Sequence Number=SeqID_65898
atggcgcctcctgttgacgtggctggtctgcgccctaggttgggcgatgtggaagctcctccaaagccgaggtcgagtctgtcttccgtggtcgaggtcgagtccgagcccctgggtcgggcgaggcggagaccgtcggctgagagttcgtcgtcttctggggctgagcccaagtccaagccctgggtcgggcggagcggagttcgtcgtcttccgggacttagcccgagtccgagccctgggtcgggcggagcagagttcgccgtcttccgggactttagcccgagtccgagccctgggtcgggcgaagttcgccgtcttctgggacttagcccgagtccgagccctgggtcgggcggagcggagttcgccgtcttccgggacttagcccgagtccgagccctaggtcgggcggagcggagttcgccgtcttccgggacttag

SEQ ID NO: 22524 - DNA, 885 bp, Zea mays
  Peptide Sequence Number=SeqID_65899
atggctgaagggtgccaacctcccgcgaagttgcgctcctccaacaacagcaagacgaaagcaacgcgggtgctccccatccgggggctcggaaggaggaaggcatggaggcccaggcccacacgtcatgtaaccggcgcgccggttactacatgcgagaaactgcaccgctacttgcgccaatcccacgccttctcgactgaggaactggtgccgcaactcgaggcaaccctgtgcatggcccaacagtgtctgccgagcacatcagtcacgggtcagtcagccgcgggagaaggcgcgacggtcgatatagccaaaagtgggccggcagtaatggcggcagtaggcgagcggaagaagcggtcaaatcgtctgcgggctcacgtcccctcctggagcagcaggggggccctctcccacggcgtgaagacgacgcggccgtgttctgtcccccgaacggctcgcacaacgaccgcctcgcgaaccacccgtcccgtcgcattaacttcgcggcagggcaagcgacacctttggcaggcgaagcgggcgacgtttcacctccgccataaagacagcgccaaaaaagggaccgggaaaggggatactccgaaagggatccttctccgcgaaggaagcgggccccgagccctcctactgatcagagccgcctcagagcactcgggctccacgcccactactgatcaggggttcgaaggctggcccctcgaagggttcgacagtcgccccagagcacgtagagcgagggatgactctgggtacgtccgatacatggccgaggctcgggctatgctcccgaggatcgggggctgctctcgcaaacccggctacggccaaaccgttgacagcgtcaacaaaccaacctga

SEQ ID NO: 22525 - DNA, 507 bp, Zea mays
  Peptide Sequence Number=SeqID_65900
atggagagcatcggaataccgacccgtgtccaaactgccttccgtatgtcagaagttgcagaaccgtacatacgccgaagagctgtaaggcatttagagaaaggaagagttgtcatatttgctgctggaacagggaacccattcttcacgacggatacagctgctgctctccgttgtgccgaaatcaacgcagaggtaatgctgaaagcaacaaatgttgacggtgtgtacgattcagaccccaggcagaacccaaatgcccgccttcttgagactgtgagctaccatgaagttacggcaagagatctctctgtcatggatatgactgctattacactatgccaagaaaacaacatccccatcgtcgtgtttaacttgcaagagcctggaaacattgcaaaggctattgtcggtaagaaggttggtaccttcgtcggatgcaaaagaaatcagaaacgaaatgaaaacacactggttgaagaaagaagattggtcaatgaggtgtga

SEQ ID NO: 22526 - DNA, 507 bp, Zea mays
  Peptide Sequence Number=SeqID_65901
atggttctttgcatttgttcatacatgcttttggttgattcaggtttggctatcacatgtctgaagttgagcttaattacgttgatggagttcgtcccaccaatgtcactgtaccgcataatctatgagttctctccaccttcatcatcgggacttttctcaaacttctccggtgtacacttgggagacttgagtgatcctgaaactttcgactacctcatcccaccaatgggaatggacaagtgcaacgcgaatagcgtggacaacgacaacgtacacaaggcgggcatggtgatgaacgggttgcccatcagtgtacggttgatgagcaagatgctcaggcgcattggggattcaccgctgatcaggttcggcacatacacatgcgacgcgtgcgccatgtcgtgcacgctcaagtgggacgtggccactgccatggagtacaaaggcctacccttgcagcaggccgtcgactactatgtcaggggcacgatgcagaatatctga

SEQ ID NO: 22527 - DNA, 129 bp, Zea mays
  Peptide Sequence Number=SeqID_65902
atggccatgcaggaggcggcacctcgtcggttgttggggaccttcggcttccgaaggtatcttcggactcaagtcggcatcacagtagaccagaataatacgaaggttggtacagcgccgaaggtgtga

SEQ ID NO: 22528 - DNA, 705 bp, Zea mays
  Peptide Sequence Number=SeqID_65903
atgaaggtttatgatcgccgaaggtgttcaaaaaactcgaagagtggaagtgagttcaccggagaaatattgttaaatcttgtttttgaggaccttcggaagccgaaggtccccaacaaccgacgaggtgccgcctcctgcatggccatggttaccccgtctcctcctcctccgacgaggagggtggcggggcaaacccgggtgttcctcttctgccacggtgggaagtcgtcgtcgggttcgccaccgccgggcgagccgacgactgttgttgctgtcgcgctgtggggggaggagtaccatgtcatagctgccgtcaagggacatgaactcgagactcccaaagcggagcagcgtccccggctgaagaggctgctggaggctacccatctggaactcaacgggaaagtgttcgttaacacgcagcgagcgcctacctggcgcgccaactgtcggcgtttcggacgcgcgaggaccgtcaaccaaccagggttacaagcgtcgcgcgagggagcgagggcgagagcgaccaacgttgtcagagttgccgtgtctgcccacgacgtccaacgtcgggcgaggcggagacttctcctgaggccgaggatgggctcgggcgaggttgtgactcctcccgaggccgaggcctggggtcgggcgaggcggagatcttcttccagggccaaggctgaggctgaggcctga

SEQ ID NO: 22529 - DNA, 450 bp, Zea mays
  Peptide Sequence Number=SeqID_65904
atggagaaccacccgggaaaaacagtgctaccacaagggtgcaatgggacatccttggccaacaatgctcagcttcaaccactatttattgctcagccttacacttcatatgggctcccacctttgatgcagacagctttatcccttaaatccgggtgtgacattggtgttgtaaagcaaggaggttgcacactttatccacgagccgtgattccctctttagcccgagcttgcaagacccttatttacttccgaggtgaatggctagggattgactacaaagcctttacaaagattccctcaggctgtagccgcccgtcaggtttcctaaatgtaccgcactcctccccaaggggcaaaccaccctcggctgaacgagccgcatacaccgagccccattgttggcacgacgtcgaagcaaactacacctcagttcctctaattagttag

SEQ ID NO: 22530 - DNA, 132 bp, Zea mays
  Peptide Sequence Number=SeqID_65905
atggatgttttgatgattaggaaccttggtgaggaccagcaaggacttaggaaagacctaggtgttgaggaggagcaacaggaattagccctcgtggcgaggtcaatcgcgcagtgcacgattgataactag

SEQ ID NO: 22531 - DNA, 354 bp, Zea mays
  Peptide Sequence Number=SeqID_65906
atggcgaaaaaggagcagaggggcactggcctgctgcaggaaagggagcgacgtccatgggagagggctggaaaagtagggcaacatgatagggagatggagcacgccatctgcagagagggcggcagggcgagctggaggtcgacggccatggctgagaaggagcacgcgctggaagatgaggagctgcggccgggcgctgggaggagtagagggaagggcggccggcgccatgggaaagggcagaaggaggggcgcgcgtgggagcaccagggcgcgcggatgccagagcgcgcgactgggggagaagatgaagacggcgaccagatttttccttgctatgtgagcggatga

SEQ ID NO: 22532 - DNA, 291 bp, Zea mays
  Peptide Sequence Number=SeqID_65907
atggccaggggggccgccctcacagacctcctcaaggggaacccgaccgggctgctgatgcgacctgggcgtgatgaggaagtccttaagctggacggactctttcatcccgatctggtgattgattttctctgcattaagtacagagccccgttctcaccccacgaagcactccaacttccctgcgaagacaccaaaaatgcatttctctgtcttacacttgttgtggagagcccgtactttactaaatcccagggtttccctcttctcttattcccgatccttcgctag

SEQ ID NO: 22533 - DNA, 942 bp, Zea mays
  Peptide Sequence Number=SeqID_65908
atggggcggaagtggaacgagctgctgtcatcggctccatggaggacgggggaggcggcagaggatgaggacgcaacaaggatgagccgagaggggaaggtcagcgtcaccagcaaccccgaggagatgcccaccatgagcgtgccccagagcagacgcccggacctcgacctcaccatcgacgacttcaaggaggacgagatcgaccccgagctgcgctactccttccagcggaacagcaggtatcatctgcctgcacaattttccccagtaaacaatggtctcaagccagtattccatgtatcccgcctctcatgggtgatcatgatgggaggtatagatgaatctacgttggatcgtctctcgctggtcacagatatgacaaagcacatacgtgtccgggcctcaggtggaagctgcacatcatcttataaaccgtcaaacataaacctcaggggccctgttatgcatcagacacctttggacttttatctggatttggcagaagacaacagaaaaattactccacgagattacctagagatagcattgaggcctgttcaaggtggaggaagggacatatctgcaaagaatgcgatacgggactccatctgtgcactctttccggacagggaatgttttacacttgtgcaacctgtgaacaatgagaaagatctccaacgtcttgatcaacttcctctgagtaatttccgtccagagttcagatccggtctggatggtttcgcgaaatttgttcttgaccgaacaagaccaaaacaacttggagctagtacaatgacaggtcccatccttgctggattgacacaatcgtttcttgatgctattaataatggttatgtccctacaatctcttcatcatggcagctcgttcaaaatttgaaaagcttcttcacagttctcccaaaaaggcctttgaggtga

SEQ ID NO: 22534 - DNA, 1227 bp, Zea mays
  Peptide Sequence Number=SeqID_65909
atgtcagaccttggaatgtcaactgcaagtgatgtcactaagtacaaagaatacattatgttggcaactcctccagctaaggatcaaatggaacagttcaagaaggcacatgcacactttctgcaagcaacatctcaagtggtagctagactccaacaagttgatttagcagaatttatagcacatgagcagactaccgataaccatatgacatcaaccacaacatcaccctcaatagttgacttagaaaagctgttacatgcacaagctcttgtaatacagaatgtatcgcaactcacctcctcataccagcaggtgttggcaagtcgaaacgtcactagaaatgaaacaactgatgaacaaaaggatgcacaccaacagacaaatgatcttggaacatgttgttgttgtgagtactatggaatcccttgtcgccagatcagtacgaacgaaagtgaaactacaaaacagaagaaccggattttattttctggtataaaaagtcaatggtcttcccaagagcaactaatagcagatgcactgtcagacgatgaattgccaggttttccaaaaaggaaacatcacaaggatgctcaactccaaaaagaagcaaatgagtgttacattgatggatggactatcacctgcacacagtttcagcctcgtcgtcgcatcagttccaagaaacaaaaagggaaacatggaaaaagtcaagaaataacttcaagaaaagcttgctatcaatgtggacgtgaaggtcattacttccgtaactgtcctgagaagcgttcactactggacacccccgagataaagctatctcagtctccagacatggaatatgaacaaaaatacacagaaacttctaccaacatcgtgaagaacaacaaaaggaataggaaaatgtttggatatatgagtagtccaccccaaccacaagcaaaagccctgaaacacatggatacccaaatggaagaatcaagccagacacaactatatgagatacagacacccaatcatccctcatcacctgttggtcaagcaaagttgactcgcaaagaactcaaagcaagaggtgcttgtttctactgcaagaatgaagaacatattattcgtgaatgccccaagaaacgtctagaccgactaaagaagaagacggtgaagcaagacccaaacaataacctagaagaccaaccagctataagtacgatgacgaagatcgcttga

SEQ ID NO: 22535 - DNA, 303 bp, Zea mays
  Peptide Sequence Number=SeqID_65910
atgtcgtcgtgccactgcctcatagcccctggcgaagccgtggggctgggcaagtggtgcaacaattctctggccacagagagcgctccggcggggttatcccctaacggagtccgggacgcccaccctagcgtgcgccgccatgcagggtgcatggctgcagcacgaagcgtcggatggccagagctctacggcgtagaagatgcagcttcctcctccatggagaagccttcagagggtttcgccacgatgctcggcgatacgaaccatggtgttgagcaggaaatacaagcaaaaacctaa

SEQ ID NO: 22536 - DNA, 288 bp, Zea mays
  Peptide Sequence Number=SeqID_65911
atgcgtgggggccacacgccggttgaccgcgaaaccggcacggcggatacagattttggccccacctacaggctcgcaccctcccctgaggagggcctaggggccactgtcggtaccttgagacaggggcggagccccgctgctgccgtttggcttgaggcccgtgacataagccaatgggccaagcctgacttagggcccatggagccgttcgacctcagcatttattgcggaaaggacgtgccgcctgccaccacgctgacaagcgacaagccctctcgacattaa

SEQ ID NO: 22537 - DNA, 600 bp, Zea mays
  Peptide Sequence Number=SeqID_65912
atggctgggccttttcaccgacggcgaccaagaagggaacttggccacacagccaagccgagcacttgggtcgagcacaggaacaggggggtggtgttcgtcgttgctgagggcgccaagcagcggataacggtcaagcaacgagctgaagactgggagcggtggccttcgacgaaaggacgcgcggtccgagctgggtgcagggaggagcatgcggctggactggaggccgagagggagaaatctgagcgccggggcaagctcggggagatgggcggccgaaccagaggggcgcggctgcgcgtgagcgaacagagggaggggcgcgcgtcggcgagggagactcgagctgggggcggcggggaagctccacgacgggagtcgcggctcggggaagctcagctggacactcgaccatgggagggggagaggagcgcgcagaagcttgaaaccgagaagagaggagcgccatggggcttggggccgggcacgcagggagcagggcgcgcgctcgagcaggaagatggaggctggagcttgcggctgctgaagacagggcctgatttttcttggttgcgcgcagatgaggacgacggctga

SEQ ID NO: 22538 - DNA, 1716 bp, Zea mays
  Peptide Sequence Number=SeqID_65913
atggaccgtgttcttctgagctcccacttgccatctcacgctcatgcaaacacgaggttgcagcagggtcctggtggcctcaacagtataggatttgcagtcataaaaaagggatgcttgaagttaagatgttacgcgatcggcgatgaactcggtggtccagggcgctttagtaagcatttcatcgagaacagtaatggacctgttttccagggactcgatgcgtctgctggttcttttagaactgtcggtgctgaaatcactcaggacactggagatttctttgtcagtgacgcagagggtgatccagacaaacctaccgatgggttctcctcgatcgaccaggctataggtgctttgcgtgaagggaaggatcaatgcagaaatgtgatggatatcgctgaagatgttaaccatagacttaaagtagggtgggtaaaatggcatcaaacatatggcgttgtaggtgacaaaaagtttgttattgctgtagatgatgagaacggcgacaacgaaggcgaccttgtgatggcggccactctagtggaccagaagtcagtcgcattcatgatcaggaatggctctgggattatctcggtaggcatggaggaggaggacctgactagactgatgattccgatgatgtcccctatcacagaaatcgaagatatcacggctgctgcttccacggtgacagtggatgccagggttggcatatctacgggtgtgtcggctgcagacagggcgaagaccatcctcactctagcctcctctgactccaagcccagtgatctgaggagaccaggccacatattccccctcaagtaccggaacgggggcgtgctgaagagagctggccacacagaagcgtcggtggatctggttgcgttggcaggtctccgtcctgtgtccgttctctccaccgtcatggaccccagggacggttcgatggcaggcgtaacggttctccagcagatggctatggagcatgacatacccatcgtttcgattgctgatctcatccggtataggagaaagcgggagaagctggtggagctgattgctgtgtctcgcttgccgacgaaatggggcctcttccgagcctactgctaccagtccaggctcgatggaaccgagcacatcgctgttgtgaagggcgatatcggcgacggcgaagaggtcctggtgagggtgcactcggagtgcctgacgggggacatcctcggctcagcccgctgcgactgcggcaaccagctggagctggcgatgcagctgatcgagaaggccggccgtggcgtgctcgtgtacctccgcggccacgagggccgcggcattggcctgggccagaagctccgcgcctacaacctccaggacgagggccacgacaccgtcgaggccaacgtcgagctcggcctcgccgtggacgcccgcgagtacggcatcggcgcccagatactccgtgacatcggcgtgcgcacgatgcggctgatgaccaacaaccccgccaagttcatcgggctcaagggctacgggctcgccgtggtggggagggtgccggtgatctctcccatcaccaaggagaaccagaagtacctcgagaccaagcgcaccaagatgggccacgtctacggctccgatctcccgggaagcctgccggagttcgccaacccacaagaggcccccacagaacaagacgacgacgataaccaaaactga

SEQ ID NO: 22539 - DNA, 393 bp, Zea mays
  Peptide Sequence Number=SeqID_65914
atggcgattaggcattatatgctccagtccaagagagctcaacagattgacaaggacacaatttgttacttctatataatgtgtaccgatatcatcgttctcatgggagcttcctgcagtgtggacaatgtaccaagccctcccgtttgtgaagaagagggacctttactcaggtttcttcgagaagttctccatgagctaccgttcctttctagtgttgccagttggagtgttcgactgttcttaacagaagttcaactatctggtatgcgccttgccgtgacacagggtgtgctggtgctctacccgttcctgtggctgaagctgtaccagcacgtgttcaagcagcgcaagtccaagctggggaaggggagcaggaagaaacgggcctga

SEQ ID NO: 22540 - DNA, 435 bp, Zea mays
  Peptide Sequence Number=SeqID_65915
atgaccttcccccagaactatcccaacagcccgccatcagtaagatttacttctgggatgtggcatccgaatgtttatccggatgggcgtgtttgcatttctattcttcatccacctggtgaagatcccagtggttatgagcttgcaagcgaacggtggacaccagtgcacacggttgaaagtatagttctgagcatcatttcaatgctctctagtccgaatgacgagtctccagcaaatattgaagctgccctgttaaatatttattgtgacaattttctccttgattaccacagcgcttccgccatcgtcaagatgcctttggtttctgaagttatacacgactttgccttgcagaaggattggagagagaagcgggatgagttcaagaagaaggttaggcaatgtgtccgcaggtctcaggaaatgctgtga

SEQ ID NO: 22541 - DNA, 196 bp, Zea mays
  Peptide Sequence Number=SeqID_65916
tgatgccctgctgggtcaccttggtagtgatcaatggagagtcatgatctccgggcagaatgggaatcacggcttgtggagatactttggtacaggtggttatgagattgatggttttggttatgactatgatgctgtcgaagatgaagctgtggaaggagacttccaggagttccaagattacgacgagttctag

SEQ ID NO: 22542 - DNA, 270 bp, Zea mays
  Peptide Sequence Number=SeqID_65917
atggctagttccaaagatcgcaccaaagtttccctaagcaacatcatgaaaccaactctggagagtctgtcggctgaagatcaacaacaatttgaagattacataagacaacaacaagcccaagagcgcaaggaggcgaaagtgaaatatctggcacatttcaaggtggatcgtcatcagaggatcgtccaacaaggagagttcgagatgacatctcttctacctactacacatgcccctaatatgaactcatacatcgggcaaccataa

SEQ ID NO: 22543 - DNA, 204 bp, Zea mays
  Peptide Sequence Number=SeqID_65918
atggggcacgagctgcaccgccaggggcagggggccgtggggtggatgtggctggggggagagtatgtaatacaatctgcgaaaatgaagaggaaacaaagaaaagcaatggtgaacctcgtcggagaagaagggaaatgcagcgcgttggttgcaagtgttcaggttgaagcatggtttaggagattggagaagcctagctag

SEQ ID NO: 22544 - DNA, 2727 bp, Zea mays
  Peptide Sequence Number=SeqID_65919
atggaggtagtcgagatggttccttgcgcccgcaacaagtggggcaattggaatgagttttggttttacgtcgcggagggtaccgtcgaagaccatgaggggctccctgtgtccgagatgtgttcgcatttttactcagcatacccgccctttgaggtggcggaggaggatgcggacgaaggggcccttcggtgcgccgccggcctgagcagtgggcgcgacttggttgaagaatttgtggcatacggggtatggcccttggcgcatggctgggcgttaggcgaagtgtgccctcgccagatgccttcccatggtgggaagatggtgcgaagtcctgccttcgcgctggatctgcaaagccacgatccggccgcctttgtgcgtgaggcggaggatggggcggtgcagatcgttggtcggtacgtgccgaggacggagggccagcgtagctgggatatccgcgggtcgaatgaccgtttgaacagggtttttgaattgaatcgactgtcgtataacggctatccgggccaagatgatgtggaccgccgcgggaagaagccggtggtagagtctggagacgaccctgcgccggcggccgccctatcctctaagaagaggaaactaggtactgttatgggaggacttggggtttccgatggttttgctagagagttgatgaggacatgcgcggccccggggggaaggatgtcttcgcccgagctccgggagtcttcggcgcggatgctgagggttaccgggggttggtggcctaggaatgttcctataccccgcgcggccgacgaagacttttttacatcccgcatggttcgtgaatggaaagtgtttccttatgggtggaatattgctgctgttgtgtcggcagtgatggacaaggattgccagggagctgcacagaagcgccagacagttgtcaggcttcatgaagccaggccgaagaggcagcgatgggctgcgaaggctgctagccccggtggaggcaagccaccgctggcggcgaagtcggccgttcctgcttccagcaaggcgccggaggctgtggctggcgccggtggttccaggcccgcgaaggctttgccggcgtccagcaaggtgccggaggtcgcgaaggcggcccgagggttgccgtcgccgggcaaggccgtcgccgacttcgccactgatattagtgtggacgactatcttggtgggtcggacaaaggccaacttgttattgttgcgcctgccgcggcgaccatggctgccgccgtagtgccgaaggcaaagggcggtgctcttagtgccggaggcgagatgccggcactcgcggctgtcagggacgaggcgggcgctgtgtcccgccggctgaaggagatgaaggaggcgctaagtcaggcgactgacttcgcagaccgcgcggcgtcgggggccctcacggcagttgtgtctgccgaagtcgagagacttcggacgcaacctgctgatgccgtccgggaaaaatcggccgccgacagtaagtgccgcaagctggcggacaaggtggccgcactggagggggagaagactgacctccggcgccaactggcgggggagagaagggaggccaacgaggccctcgccaaggcgcaggctgcgcaggcggaggccaatctagcgcgggcggagggcaatcttgctagggagcgcgccgagcagttgcaggagcggctcagcgccctggagagccgtgtggagagggccgaagccgcgacgcgcgcggaggctgagcggacgcgcaaacagcttatggattcataccatgagctgggcgcgcggaccggtgacttcgaagtgccggaccgagagcccggacttcgctgcctggagtgggtacaggaggagttgcaggcactccccactatcgtggaggggttcatgtcgtatgcctccctggtcacctgcgagggggcgatgaacgcgctctctcgcgaggggtgccgacactttgaggtcttcgaccaagctgatgaagattttgagcgagatatctacaaggttgaggaccccatagtgaaggaatccgccggagccatctacgaccggatgtggggtccgcacggtcgcgaggtggtcagggagcgggccgagacggcgagggctcaggcggcgcgtggcgagagggtggatgacttcggggcgttgaacagcgcgctgcctgacccggagccgattccgggtgtccggggccgccatgttcaagattttgggcctgcgcacgcaaccgccactactaattttttggcggcttcgaccgtggatggtggtaataaatatgatgggtctgcatctgagttttctgattttgctgactctgggagctcggttgagtggactgaggagtcgtcggaggaggacttggactactttgcggccttggatgtggcagcggcggaggcttcaccgcacgctgcgggcacagaagatgtgcctggtccaagtactgggcgcaggcggcgaagggcggttgcgaagcgtagggcttgtatgatgaaggttgagccgatgtcaggtgtatttgttatgctggactggtgcgtatatagtcggtcttggcgcggacagtttggtgtggtcgtttttgcttttgttacgcttcgtccggctgtgccctcgggcaacttaggcgcggatggtctttgcagtggacttcggtttttcgcacttgctgtgctaatccggctgcacccttag

SEQ ID NO: 22545 - DNA, 576 bp, Zea mays
  Peptide Sequence Number=SeqID_65920
atgaagaagcacacagactgcgagcacgaaaacgtgtgtgaccatgtgcaaatgatgtgtgacgacgcacgcgaacaacatgcggcaacacgtgacccagacgcgcggctcgaatgcgcgaacaaacgacgacgatgcgcaaacagcatatcagcttacgagctaaacacaaatgtggtacaagttccctacattgtccaaaagcttcttcaaatccattgcaaggtttctcgctctcgctcttcctctggtccagtccaggccaaggacttattcttgctgcaagcattttaccattctgggccttttctaactcatggaaaccatgtctccctgttttgctctcaagcggagaaccagaagaagtacaccgagttcgataacaggttcaagaagtccaaggtgctgcaggacctgctcgagaagagaaggaagaacaaagagaagaacgagaggatgatccaggacaagtactgcctgcggggcgccgagtggggctcggggactgctccacgaagggcatgtcagactagaagagaggaaggacttcatttcggagctcaagaagagagctag

SEQ ID NO: 22546 - DNA, 420 bp, Zea mays
  Peptide Sequence Number=SeqID_65921
atggggagcacttcctctatgctcacccaatacgatatcgaggagcaggagatcgtatcgctgtaccaccgcttctgccagctcgaccgtaacggtggtggcttcgtctccgctgacgagttcatgtcggtccctgagttcgccgtaaatcccctctcccagaggctcctgaggatgctggatgggctcaacttcaaggagtttgtagcatttttgtcagcttttagcccccgcacaagcctgcagcaaaagattgaatttattttcagggtttatgatactgactgcaacgggaaggttgcttttgatgacatcttgagcatcttgcgagatctgacaggttcatttatgacagagcaacagagacagattattggcaattctgagctcaagatggaggttgaagttcctattgactaa

SEQ ID NO: 22547 - DNA, 63 bp, Zea mays
  Peptide Sequence Number=SeqID_65922
atggcggtgaggttgttacttttgttctactacttaattgggctgaatgatatgatgatatga

SEQ ID NO: 22548 - DNA, 516 bp, Zea mays
  Peptide Sequence Number=SeqID_65923
atggcgccccgcgtgctccatgacgatggtggctctcagccccttacggaagcaaggagacggaccccccggggtcgaaacgccgacattatgtatatgggattcctcagtgtgttctaccggaataaaatgctcatgagcgccgcctgcgtcgctccaactgttgtgccactcgatagagtgaggctgacagcagccacgtccggcctcgggcgccataggaaactccgcctcgcccgaccccagggctcggcccccgtctcggcctcggacgatgaactccgcctcgccctaccccagggctcggactcagcctcggccccggaagacgacgaactccgcctcgcccgacccagggctcggactcagcctcggctccggaagacgacagtctccgcctcgctcgagcccagggctcggactcgacctcgacctcggaggagcctccgcctcgcccgacctagggctcggaccgaccacgtcacagggggccatcattaccctacccctagctag

SEQ ID NO: 22549 - DNA, 1629 bp, Zea mays
  Peptide Sequence Number=SeqID_65924
atgaacagacaccggcactcaaggtgccattacaagcggaacttcggttccacctccgcaggtacgaacaatcccccacgttggagggcctgcggagcaacagaacgccaacgagactccaggtggctcaccgccgcccgctccggcagcagcgacaacgacttccgccctgggcggccaaacagcagcagcgatgacctcagggcagacgctgctgcaacaaggccctcgctcgcgtccccgcccaaggggcgaggacatgcagaaggccgtagagttggaggtcagtccgcgggtggcaccggctatctcatcggcggagaaacctcttccggctgcctcagtgggaggtggcatcggaagcagcgccgaagccgctcaggccggagagccggacatgcggcagctgccagcgccacgaacggtgaacgcccttccccccgatcactgaggaaaggagcgggccgctgcccgcgcggaggcaggccccaactcggcgcactcccctccccagcactgatgatgaacaaccttgaagctgagggaggggcagaggccgcagcctggctcgcttctccccaccatcgaactggtgaccagcgggtgaaagggcggaccgccatgcaggcggcatgcaactgcaccaagggagcgcaccctttcgacttcaacgcgtccagcatggaggcccaggcccacacgtcatgcaggcggaagcagcagtcaagtcgtcagcaagctcacgtcccctcctgggacagtgagagaaccctctcccatggcgtgaagacgacgcgcccgtgttccgttcctcgaatggctcgcgcacgcgcaaaggctgccccgcgaaccactcgtcccgtcgcattaactctgcggcaggacaggcgacacctttggcaggcgaagcaggcgacgcttcacctccgccatgatgaccgcgtcaaaaaagggaccaggaaaggggatactccgaaagggatccttctccgcgaaggaaacgggccccgagcccccctactgatcagaggttcgaaggctggcccctcggaagggttcaatagccgcctcagagcactcgggctccgcgcccactactggctggcccccgaagggttcgacagccgcctcagacacagagcgagggatgaccctgggtacgttcgatacataaccaaggctcgggctacactcccgagaggctcgggggctgctctcgcaaacccggctccggccaaaccgttgacagcgtcaacataccagcccgagaacttgggactcgctatgcacccgggctacggccacgccgcctgcgtcgcttcgactgttgtgccactcgatagagtgaggctgacagcagccacgtccggcctcgggcgccataggaaactccgcctcgcccgaccccagggctcggcccccgtctcggcctcggacgatgaactccgcctcgccctaccccagggctcggactcagcctcggccccggaagacgacgaactccgcctcgcccgaccccagggctcggactcagcctcggctccggaagacgacagtctccgcctcgcccgagcccagggctcggactcgacctcgacctcggaggagcctccgcctcacccgacctag

SEQ ID NO: 22550 - DNA, 651 bp, Zea mays
  Peptide Sequence Number=SeqID_65925
atggagttattgagccgcatcccgcatgttcaattgctacagcctacggaacgcagaatccaccagaatctgatgctatacaggctcgcagttattgaaaaagttgggagccggattcgcgaaaaagcagccgccggagaggcagttgaggcggcaggcggtgatgccgacgaagaactgctctgtggtgatctccggcgggtaggtgaggaactgcgtgttgtcgagctcgagcgtggtggagttgccggggcagctggcgagctcgaccttgcgcgtgcagccggcgcgcggcttggaagggtcggagagctggaagttaagcgacgggcacccgcagaccggcgacgtgccgttgtagctgcacacgcccatgctgccgcagtagccgaacacctagcactggtccgccacggccgaccactcctccgtggcggcgttgctgccccggggttgtccttgagcacgaggttgccgctgtcctggacggccgcggcggacacgttctggccccccgtgttggaggaccagagcacgaccccggatccgttgacgagctggaggtcgccgttggacgagaagcggagcgagctccacgagtcaacggcggcgccgttgcccgcggaccagacgggcacgccgccggcgtag

SEQ ID NO: 22551 - DNA, 831 bp, Zea mays
  Peptide Sequence Number=SeqID_65926
atggtcgcggaggcggcgccgttctcctcatcggcgatctggtcgtgtcaccgcgacgagatcaccttcgaccgcctccacaagttttggagtgccctgtcacctcatgcacgacatgagctgttaagacttgataaacagacccttattgagcatgctcgcaagaatttgtactgttcaaggtgtaatgggttgcttttggaaagtttcacacaaatagtcatgtatgggaagtctctgcttcatgaaggttcatgtgagccaaggattcaggaagttgaagcagaagttcaggaaccttcagttcatccttggggaggtctttcgacaacaaaggatggcatcctaactcttcttgattgcttcataaatgcaaaatctcttcatgtgatccagaatgtatttgacaatgcacgtgcgagagaacgtgaacgtgagatgctttaccctgatgcatgtggtggcggtggcagaggatggattagcccagtgatacctaactatggcaggggccatggaacacgagatacctgtgctttgcacactgcacacctttcttgtgatactctggtggatttttggtcggctctgggtgaagaaactagatcatctcttttaaggatgaaagaagaggacttcattgaaagacttatgcacagggcaggactctgggtgatccaggccacgcttagcaagtctgtcagccgtccaacatctatcgtgctccacaagccagaggaagaatttacactttcctggagcccaggatttccaaatgcgttcagcaggctcaaagctaacagagccaagaagcaaagccctgtaagctga

SEQ ID NO: 22552 - DNA, 747 bp, Zea mays
  Peptide Sequence Number=SeqID_65927
atgctgacggaaaatatcccgagattcgacagcaagagattctgcagagactgcagaaggaatgttattcgcgaattcaaggagctcaaggaactaaaacgcatgcgaagggaacctcgctgcactagttggttttgtgttgcagataccacatttaagtgtgaggtgttcgaggatgctattcttgttgattggcatcaatctttattggagcaagatggaatataccatcatttcgagtgggctattggaacagatgaaggaaaatctgatattctaaactttgaaaatgtgggcatgaatggacaagtccacaggaaaggcctcgatcttgatcactttgaagactattttgttacactgagagcatggaggctggatggtcgctgtactgaattctgtgtgaaggcgcatgccttgaagggccaatcatgtgttcaccggaggctaattgtgggggatggatttgtgacaattaccaaaggtgaaagtattagaagtttctttgagtatgctgaagaagcagaggaagaggatgaagatgatgtagtggacagagacagcaatgaccctgatggtgatatcgctcatccacagaagcatgccaagagccctgaacttgcaagagaatttctcctggatgctgctgctgttatcttcaaagaacaggaaggcaacctgtggtgtcttgctggtaattcagcgcttagccttctgtgtgcgaggttggtggggctgggtccttga

SEQ ID NO: 22553 - DNA, 2169 bp, Zea mays
  Peptide Sequence Number=SeqID_65928
atgcagcaacctctagcaattttggtcttggtgattgagaaggctttcagagaaggcacagcgcggcaaaatgcacatagcgttttcgtgtcccttgctctaaaactgttagaagaacgagttcatgttgcctgcaaggaaataattacattggaaaaacagaccaagcttcttgaggaagaagagaaagaaaagcgtgaagaagaggagcgcagggagaggaggagaacaaaagaaagagaaaagaagaatagaagaaaagagaggctgaaaggaaaggacagagataaggaaaaaacactggttcggtcaaaaaaaccagatctttcaccattttctctgtgcagccaagcaacaccaagtaataatgagtctcaggatgttctagacttgagatattcagatagtgaagaggaagacaatgttgtggtcggggaacactatcctgattcctctgctgatcaatcttcaagcaaggacagtgatgaacgaagcaatgggcatgaatgcagtgtaacaatagaatttgttccctcagattgtgatagctcattcttatgtgatgagcctaaatcatcaagaaacctgagatttagaagagacttccctgaagagaaagatgctagttattggcatgagggttgctgtgatgattctggagatactcaatggcagtctagagagaggaccagaaataacactagaaattataactctgtatttaatacaaataaccgtacaagagacaggtacaacccctgcagctgtagccatcaagaagactacagatattttaccacagcaactagatcaagtagggagacaaagatgcccaggaaaacagtggctgagaagcccaggttgcaataccgcaggtgctatcctccggatagctttgctgtgtcaaatggaggacgtgttggtggtacaccaaacaaaaacccaggtccaaaacaagtatgggagccaatggatgcaagaaagaagacagggaatgggaatagtgctactggggctgctgatggttcagatcaagtagaatgctcaaataatatcagtgaatgtgaaaagcttgaggcagtgtgtgactctcttgttgaaatttgttctgagatatctgcggaaacctgtaagtcagacacagatcaaccatggagacaaggtgagaagaatcagtctgcttgcagcgatgaatctaaatgcgtggataagccaaattgctccaaggacactggtaggacgacaaacttaaccacttcggatagctcctcgtgtctaagtgagggagatagagacagcagcatgacctcactgagtgttcagaatgtagaatcttcatctgcatctgattcagaagagtcttcagacaggaacaatagcagcccaggcgatataccagcgaagaatgtttctcgtacattacttgagatgtgtgcaggaaatggtttcagagagtaccaaccaaaaggcttgaaccctcctaatggtaaccaatttggatttatggtggccccttcacaggagcagatgttataccaacagaaggtccatgcaccgccgtactcgtcaccattcatggggttccacaatcaccccttggcagttccaacaaatgggtacttaccatatactcagccaggtcacttctaccctgcttctatgacccctgttggatatggagttgctggtgaccaatgtgtcgacttctcgatgcagtacagaaataacattcatccttactcgggtcctgaatttggttttctgccttcacagccagttcacaagacctcagtgaacttccatgcggtaccagtgacaccactgaccccgttgtgtagccgcggaatgccagtggcgacaaatcaagagaggcagcagagtcctgccctcttccctaaattaaaacaggcagtgctggtccctgagaccgtctgtgcaggagacaacaccttcaaacagaaaggcgatgacgtagacagcacacccttctccttgttccagttcaacctgccgattgcccctcccaccctggcaacatccaaagagcgaagtggggaactggcaccagctcagatagctcgagtccagccgtgctcgagggaggagaccaacgtcaaggaatacaacattttctctgggtgtgacggggtgatgtttcagctcaactag

SEQ ID NO: 22554 - DNA, 1254 bp, Zea mays
  Peptide Sequence Number=SeqID_65929
atgaggtcaggctcatgcaggaaggagaaatttgccattatggaagtccttagatgcggcttcgacgatttggaggtccgccgtcccagcgccgtgacttctccgctgctttctgccgcccaaaaaccgccgggaaggcaaaaaagatacgccctttgcggcgaagctccggggggccttgtggccctcggctgctgcctcttcctcctcccgccgctgctgtcccgcggcgcggacatgccgctggggtcgaccctctcgccgggcaactcggcgacgtggacgtcgcccaacagcaccttctcgctcggcttcacggcgtccgcgtcctccccgtcgctcttcgtcgccgccatcacctacgccggcggcgtgcccgtctggtccgcgggcaacggcgccgccgttgactcgtggagctcgctccgcttctcgtccaacggcgacctccagctcgtcaacggatccggggtcgtgctctggtcctccaacacggggggccagaacgtgtccgccgcggccgtccaggacagcggcaacctcgtgctcaaggacaaccccggggcagcaacgccgccacggaggagtggtcggccgtggcggaccagtgctagctacaacggcacgtcgccggtctgcgggtgcccgtcgcttaacttccagctctccgacccttccaagccgcgcgccggctgcacgcgcaaggtcgagctcgccagctgccccggcaactccaccacgctcgagctcgacaacacgcagttcctcacctacccgccggagatcaccacagagcagttcttcgtcggcatcaccgcctgccgcctcaactgcctctccggcggctgctttttcgcgaatccggctcccaactttttcaataactgcgagcctgctgtagcaattgaacatgcgggatgcggctcaataactccattgacagagctggtggaaggggactcgtcgcggaagatcgtggacatcaactgcctctccggcggctcctgcgttgcgtccaccgcgctctctgacggctctggcctctgcttcctcaaggtgtccagcttcgtcagcggctaccagtcggccgcgctgcccagcacgtctttcgtcaaggtcttccgtgggggaacgacggcgggggacaacttccgtggggaacgacggcgggcggcgactgtatcaacggcgccgggatgggaaagcagcgaagaactcacggcgctcggacggcggctgtatcaacagcactaa

SEQ ID NO: 22555 - DNA, 501 bp, Zea mays
  Peptide Sequence Number=SeqID_65930
atgggcaagaacaacaagcgcaagcgtgagccaactcctccatcggaggagtttggtgactcggagtacttagaggaggagttctcctctgagtctgaggggtctccggctcccgtccccctgcgtgagtcgtctgacgactcagacgactcccaggggcttgcggcggaggtctggacgtacatccgggccgtcgagcgctccgggctcgagggctcgaatgagtcagagtactcctcggatgaggaggactcagacggcggcggcgaggacgaggacgatgacgacgacgacggcgacgacgacggtgacggcaacggcagcggcaggggcagcggcggcggcagcaaggtcggtgacggcggcggcagcaggggtagcaaccagggcggcagcagcaggggcagcaaccagggcgcagcagcaggggcagcaccaggggcagcggcggcggcagcaacagggccagtggctagatgccactggtcttttagatattag

SEQ ID NO: 22556 - DNA, 72 bp, Zea mays
  Peptide Sequence Number=SeqID_65931
atggagccagtttgcatccacacaagctccgagattggggactcaacagttcaacacctgaaagtcgcctag

SEQ ID NO: 22557 - DNA, 1118 bp, Zea mays
  Peptide Sequence Number=SeqID_65932
ccccgaagtcccgaacccctagggtcggggcggaagcgggaggtttgccgtcttccggggtctttagccccgagttccgagcccctgggggtcgggcggagcggagtttcgccgtctttccgggtcttagcccgagtccgagcccctggggtcgggtgggagcggagttcgccgtcttccgggtcttagcccgagtccgagccctggggtcgggcggagcggagttcgccgtcttccgggtcttagcccgagtccgaaccctggggtcgggcggagcggagttcgccgtcttccgggtcttagcccgagtccgagccctggggtcgggcggagcggagttcgccgtggcgcctttggcaaggcctgattgcctgcatttgcagctttatgctgatgggggttaccagctgagaattaggcgtcttgaggccctacttttcacaaagctgctgcactcgtttagattctctgaccctgctcccgagaactcatcgacgccgtccatgctgtcctcctctccggcgccgtcacaagagggcgccgccgttccctcctcctgggcggaagctgcgtcctcggcggcgctccggcactaccgctcactggccaagaaagggaagccgcaggggcgcgagtccacggtcctcgccgccatcctcctctctgccccgcaggactcgcacagcctcactgtgctctccatgggcaccggcaccaagtgcctcggtgcctcgatgctcagcgcacgtggggacctcgttcacgacgcgcacgctgaggtcatcgctcgccgcgcgctgctccgcctcgtctactccgagatcggccgtggcgccccgcctgattggctggttgcttccggggatgctgggagatggaggctgagggatgggcactgccttcatctttacatcacacaactcccatgtggagtcatgccagtaccaccatcgcagtctgatttgccaagaaaacagctgaacagtatgaatgtcgaaattggctttgttcaaaggaaaccagggcgtggtgatacaacatcgtccatgagctgctttgacaaaatcacccgctggagcgttgtaggaattcaaggtaaccatttccacttctgttga

SEQ ID NO: 22558 - DNA, 813 bp, Zea mays
  Peptide Sequence Number=SeqID_65933
atgccttctcacctcctccagcagcccctccctccagctgctccaccgtcgtctctcttgcttgcccatagtcaacaccgtcgccaccatcgcttccgcggtggtcgcagtagctttgttgctcttgctcgttgtcctcctccggcgacggaggctccggaccggatccccacactcccgtgctccccgctgctagaccccgctcgcccgcttcggcgctactcccgccgcacgcttcgccgcgccacaggcgggttccacccgtcccgcctcctcggcagtggcgccgcctcgcccgtcttcctcgccaccttccccgacgcctcgctcgccgctgtgaagacgtgcgcgtcggcgcacgagctccacctcctcgcatcgctccctgaatcccctcaccttgtttccctccatggctactcgcccggcccgggctccgtcggtggcactgccgagcgcccgcccctccttgtcttcgagtacatgccacagggatcccttcagggcgcgctattcggaggcggcgacgctgctgcccgcgatggccagttcctggactcgcagaggggggatgcggcggccgtaaggagcggcatttgcgggtcacacgcgttgtgcggtgaatcatggctgggtggggctgtgcgggcgcgcgcgggatcgtcgtcggtggttgtttgccgggcggcctggaatcgcggctgggtggttgcgggcgcgagcgttgggcggggaatcccggctgggtgtgtgcgggcgacgggatccgcgggaggcaggggagagcgggggcagtctacagatgactcttaa

SEQ ID NO: 22559 - DNA, 351 bp, Zea mays
  Peptide Sequence Number=SeqID_65934
atggcgtttcgctcacgggatacactatccgagataatgtcagctattgaaggtttgaagcctgttcgggaagatagtctggcccatataaaatcagctattggtgaagcaatcaagtctatcctagagccaatacctgatgcccttgcaaaactttctcatgaaatacttgatgcagcaccaccaccattagctgagctgatgaaaccttttgcacaattgatggcaccaaacaataatggcaatgggccatctgatgtgcatgctaaggggtcatctagctcttccagtgcacaggtgccagctgaagctaaaaatgagcccaaagttaggccaagtttgggtctttag

SEQ ID NO: 22560 - DNA, 339 bp, Zea mays
  Peptide Sequence Number=SeqID_65935
atgaagatcgtccaccgcgacctcgttcgcaacgggcctggctccgtcaaggtcctcttacctctcgcccctccccttgtgctctctgtgcgagcactccggttgcttgttgggtttgccttgttctgggtggctgggtctagggctgacccaaccgctgggattcagtgggttgctttattgcttctgattaggcttacggtcgtgctccgcagttggtgccggaggaggaggacgacttgtggcacgcgtacaacctcattgccattggtgacagcctccaggccgtcaccgtacgatcttgtgccgtttcgccatgaggtactcctcgctgactag

SEQ ID NO: 22561 - DNA, 48 bp, Zea mays
  Peptide Sequence Number=SeqID_65936
atggcgtgcagctgcagggagtggctatggagctatttggatgactag

SEQ ID NO: 22562 - DNA, 1146 bp, Zea mays
  Peptide Sequence Number=SeqID_65937
atggaggtggagccgaatccagctgcgacacgcgaggacccacatcccttcgtcctcgatgttctcgaaggatcatgccgatgccgcagggcgcgggcagaaggccaaggcacacggcggaagcggaagcggaagcggaagcggaagcgggagccggaagccgcgaaaagccatgtgtcgctcacctcgcacggcaccttctccaaaagcgagaagcaggaactcggcaaacttcgagggggcaaagcgcaaaaagcgcagaacgccagagccggggatccaagcgggatggggtacttgagctccgtgatcggccaccccaccgatggatcctccgtcagcggcggcggcctcaggtgccagaatggtagatttagctatggctatgcaagctcccctggtaaaagggcatccatggaagacttctatgagacaaaaattgattgtgttgatggtcagatagttggtctttttggagtttttgatggtcatggtggtgctaaggtagcagagtatgttaaagaaaacctgttcaacaatcttgttagtcatccaaagttcatcagtgatactaaagtcgctatagatgatgcttataaaagcaccgacagtgaattcttagaatctgacagtagtcaaaatcaatgcgggtcaactgcatcaactgctgtacttgttggtgatcgtctcttcgtcgcaaatgttggtgactctagggctatcatatgcagggaaggaaatgctattgctgtttcaaaggatcacaagcctgatcaaactgatgagcggcagcgtattgaagatgctggaggttttgtgatgtgggcaggaacatggcgcgttggtggtgtacttgctgtttcgcgtgcttttggtgacaaactcttaaagcaatatgtggttgtggatccggagatccgagaggaagttgttgatgacacactcgagtttcttatccttgcaagtgatgggctgtgggatgtggtctctaacgaggaagctgttgcgatgactagatccattaaggacccagaagaggctgcaaagatgctcttgcaagaggcgtacaagagggagagcagtgacaacataacttgcgtcgtcgtgcacttcttgcatgggcaaggtagcagcggatacgcttaa

SEQ ID NO: 22563 - DNA, 1773 bp, Zea mays
  Peptide Sequence Number=SeqID_65938
atgtcgaggtttgcccacttggggaagagcagaaaacttgctgaaacccttttggttgcctcaaagcccaatactgctggtggccaaaacattgcttcaagctttgcattcggcttgggttattccagcagggcctttttgcacgggaaggttcataatggtccaaacacctcctacatgctgggaagagcaaatgatagcttacattggagcactggtgtgaggaaattctcaattctttcatcttgtagccagaatgcatttcagagtcagcttgcttggaagcgacttgtagcactgggttctcgtgcaccaaaagcatctccaatttttagtaaggttgcttgtgccattggcttggctgtgagtaggtctaatatagccccttaccttgtcgcttttattgcgggagaggtaatgctagctcagaagacatctgcagatggagaatactacccaatacgtgagagagctcaggatggccgtatttacgttacctctctaatatattcggcagtagaattggttattataatcttcagatcaatatatttggcattgctgttcactccaagtatactgatggccccatttgcagagactcttggcagtcctgcgtttatcaaatggggccaatgggctgcaacacgccctgatctgtttccaagtgacctttgtactgaattgtcaaagctgcacacaaaagcaccagctcacagctttacctatactaagaaaactgttgagaaagcttttggtcgaaagctatcagacatttttgaaaattttgaagaggaccctgttgcatctggaagtgttgctcaagtgcatcgggctgttctacgattccggtatcctaatcggcagacaaagcgtgtaactgttgcagtaaaagtaaggcatcctggtgtaggggactcaataagaagagatttcaatatcatcaatgccgtagcaaaaatatctagatatatccccacgctgaattggttgcgcctagatgagagtgtacaacagtttgctgtcttcatgatgtctcaagttgaccttgcaagggaagctgctcatctgagccggtttatctacaacttccgaaggtggaaggatttgagacttacgagcatgggggagagtgtttcacactatgttgatgaccttgaaggacatgatcgaattaaaagtgctctggcccatattggtactcacgcgctcttgaaaatgctactggttgataatttcgtccatgcagatatgcacccaggaaatattttagttcgtgttgcacaaccaaagaactcaaataacacccttaaaaagtcaaggccacatgtagtcttcctggatgtaggaatgactgctgaactttcaagtaatgaccgtgtgaatttacttgagttcttcaaggctgttgctcgccgagatggtcgtacagctgcagaaagtactctaaagttgtcaaaacaacagaattgtccaaatccaaaagcttttattgaggaagttgaacgatcattctctttttggggcactgctgaaggtgatgctatccacccagctgagtgtatgcaccaactgcttgagcaagttcgatgtcataaagtgaatatcgatggcaatgtttgtactgtcatggtgactacattagttcttgagggctggcaacgtaagttggatccagattataatgttatgaagactctgcaaactttactttttaaggaagattgggcgaagtctcttcaatacactatccaagggctcatggcgccttag

SEQ ID NO: 22564 - DNA, 330 bp, Zea mays
  Peptide Sequence Number=SeqID_65939
atgcaggatttcttcaatatgtttattaatgagtcagctcgtgcttgttatggaccgaagcatgttgagtttgcactgcaacagtttgctatccagactcttttaataactgatactttgtttcgaaagatagctatcctacttgcccttggtagtactttactatacatggaaataaggctggttccaaccccagtctataccgacaagtcatgtggcggcgtgggtggtcgttaccgaccagcctggccgttcggctccgttgacccggtcggtacttaccagtgcgctagagaaccagtcgatactgacctgaccggtcgatactga

SEQ ID NO: 22565 - DNA, 339 bp, Zea mays
  Peptide Sequence Number=SeqID_65940
atgacgcttacgactgaccagctccagaggctcggcgctccccactggaaagtgctgagagaggtggcatctggaggacgtgatgccgagcgtgtgaagcttaagttagaaattgtagtcgagtctgtagactatgacaaggagggatctgttttacgtgtgcgtggaaaaaatatcactgagaatgaccatgtgaagattggccagttccacacgttagagcttgagctgaagagaccttttgttctacgaaagggaaaggaaaagaaggtaaaggaaaaggtagattacacaccccagctatctaaccagagtggaatggtcctgccatattcttag

SEQ ID NO: 22566 - DNA, 675 bp, Zea mays
  Peptide Sequence Number=SeqID_65941
atgtcttcttcctcccttaagcgtcgggtcttcccgtcttccaagcccccggatggggggtatccgccgcctttccgcctcctcgttggaggaacgcaactccattggagttggcacctctcagccatcgttcggcttcaaggattttcatcagccggcccggccgtacccccatgccgacgatcacccaggatggtgaccgtcggtttctgggtggggaagagcaagccaggctgcaatcttggtcccaccctcagcttcaaggatgttcatcatccccgctggggcgggagccacgctgagccggcgctctaccttccgcgtgggtccgcgggtcgccctttcccgtggcgtttgggggtagaggcgttcgctggccctgcggacggcgcggacttcgataacgcggggctgaacgacggcgagcgtcgtcacctccagcgtgtcggagtcgtcggccgggcttccggcggcccctcctgccggagggcggccgccgcatcgtgtgcacgggaggaccacccagggttccgcgcgccgttagggcggcgttcgtgttctggggtggtcctgcttagagatggcaatggattttggatcatgatatcattaattattacgatacttattgattatgagaagaacaagtatattggagatgaaacccgcgggtaa

SEQ ID NO: 22567 - DNA, 561 bp, Zea mays
  Peptide Sequence Number=SeqID_65942
atggctgggaggaccgcgcccgccctccctcccctccttctccttcacgcccgactccctcgctgcccctttatcctgggatctcgtcatggatgctaccacgacccaacgattgatatcatgtccaagttcttcaagctgatggtggcttatagtgtgcttgaggttcttcgacctctctataattcccctaagatactggaacaaaagtttagtaagatcttcactaatcactacatagtgcagcactgggctgttaatattttttgtaccatgtgtcataagcatgagatgttgcctgtagagtaccaatgctttattgcagtcttcctcctcgtctgccccaatgtcggcaagtcagccctcttcaacaggatcattgcgtctctgcgagctaatcagttctgtgagcgtctccctagccccaatggcgagtcaactgttgattgccatcagatctcaaagatgccaaatcttgcattcaccatagcaaacaagactttcaccttaacaccagagcaggaaactccctacttacagtttcttcagtgtttgaattag

SEQ ID NO: 22568 - DNA, 879 bp, Zea mays
  Peptide Sequence Number=SeqID_65943
atggtcgcctttcaagggggtcgccctccttttaaaggcgactctccctacttgcgtccccagccgtcgtgggctgagtcctctccaacacgctccgaggtcctccccctacggcgcgggggctgggtcccacacgtcatgcaagctggcccagagcagaagaagccaaaccaccgcgcgcggtgcatgcaaccgcccagcggttacgagcattcctccgctttcgcccagaccagcgggcgaaagggcgggcagccatgcaggcggcatgcaaccgcgccaagtgggcgcgcccctccgacttccaacgcacccagcatgggggcccacgcccacgcgtcatgcaaccggcgcgccggtcgctacatgcaagcaactgcaccgccactcgcaccgctgccacacctcctcgactgcggaaccagtaccgcgactcgaggcaaccatgcgtacgacccagcagtgccagccaggcgcgacggtcaatacggccaaaaatgggccggcagtaatggcggtggcaggcgggcgggagcagcggtcacgtcgtcagccaagcttacgtcccatcctggggcagtgagagaaccctctctcacgggaccgggaaagggggataccccgaaaaggacccttctccgtgaaggaaacaggctccgagcctccctactgatcaggggttcgaaggctggcccctcgaaggggtttaacagccgcctcagagcgcgtgggctccacacccactactggtcagaggttcgaaggccggccccttggaagggttcaacggccgcctcaggccactcgggctccgcgcccactactgatcaggggttcgaaggctggccctcgaagggttcacagccgcctcagacatag

SEQ ID NO: 22569 - DNA, 501 bp, Zea mays
  Peptide Sequence Number=SeqID_65944
atggccagcgcgcacgacgatcttgtgacctactccgccaagatggacctcatcctcgcgcaactcgccaccatcaatgcccgtttggattcccacgatgctcgtctagccaagctcgagcaggcgtgggtcagcccctctgcttctaccgcgagctacttgggcgcgagtgagggcggcctgggcgcgggtggaggcggccgggtcaaggacgatgggctgcaacccgacacacccaaggaggaggtggaggcggcgttctacgttgtggtggtcgtgccactgctgcagcccgctttcgtactcgtggagacaaccatctgttgtgtcgtcgcagctgtggtcgacgtcggccaccttggccaccaccgcggcgtggtcaccagagctacaacaccggagggtgccaccgaccttcgccaggcgcagggagccctctgcgccaccgcagccgcgtccgtcatcggtcgatctggccgccgacgcatcctcctttggtag

SEQ ID NO: 22570 - DNA, 465 bp, Zea mays
  Peptide Sequence Number=SeqID_65945
atgcgcctcatcatgcggtaccgtccggttggagatgatgattctgatagcccgggcccgcaacacagcgacagcatcgagcaagtgcgtgaatggggcgacacacctccctcagagattggaggagaagccgcgctggccaccggtgctcgtcagtcgtcacgcccgcttctagacccaggacggcgtggtggcgctgtcgaagggaccgaggtagagggccgcatggcggagagagaccggtcagcggtggcggactcgccgctcgcggtaggcctcggcgccgtgccgccgtcgagcgtcgaaggctccaagtcgaagcctagccctagcctcttgccgcctgtcctgttcctgtgtacgtctcgtggagacttggagttggacttggacttggtcacttggacttcagagccgtgctggcgtaagaaagacagggacggcgtgggagggagagttaggtag

SEQ ID NO: 22571 - DNA, 180 bp, Zea mays
  Peptide Sequence Number=SeqID_65946
atggccggaaacctccgcgccgtaatcaccggatcaaggctcttgggtgtcggtttggccaactccggcaggaccgccgtcgcaggggaggctctgcgccaccatggttcgggtctgctgggcagctgggatgaagaatgcgccgtagccgtcagatctcggatggatggctcagattag

SEQ ID NO: 22572 - DNA, 516 bp, Zea mays
  Peptide Sequence Number=SeqID_65947
atgacctccaccactacgcaatcggggttgcggccacgatcgcggtcatggtccgacgtcgcattgtctatgtcgtcatcattctcatcctcgtcctcgtcgccgacgcccttggagcgggagccaccccgctccccaaccccaccggctgcaccgctagtgggggcgctcatcgaatcgctctcgtttcgcggatgcggttttggccgtgctgccacgtccgcatttgagaaggaggatctcaaggcgcgagccgcatttccgcagcgcctccgtactgccgtgcatgccgcgatgcgcgctagggatcctactgcaggggcattcgcgcttgttgatcgtgacaatgatggagaggggcatggcacgggcaatccatggttcgacagcgcagtgcacgacgacgcgcccgagtcaccgctcgttgctttcgtcaacccgcgcagtggcggccgcctcggccctgtccttaagacccgcctccaggagctcatcggcgaagaccaggtcaaataa

SEQ ID NO: 22573 - DNA, 105 bp, Zea mays
  Peptide Sequence Number=SeqID_65948
atggacgagtctgaaaaaggagatcggcttcatatcctcggagaaatgaaggcagaagtcattactgcatctgtagccatgtgcactcatgagagaggcacctga

SEQ ID NO: 22574 - DNA, 363 bp, Zea mays
  Peptide Sequence Number=SeqID_65949
atgccacggaacataaattgcgagcttctaacggacttagagccctggcagagctctaggtacatgatcgacggcaagaggattgctgaatatattaatagaaggagaaaaaccaaatacagggactactggccagcaagggaccaactacagcctattcaagaaaaaattagatatatgatctcctcaaacatcggggaggtcgcgtccatattcctgacatcggctttgggtattccagaaggtctcatcccagtgcaactactatgggtcaatctagttacagatggccctccagcgactgctttggggttcaacccgctagataaagatatcatgaagaaaccctcctcgaagaagtga

SEQ ID NO: 22575 - DNA, 444 bp, Zea mays
  Peptide Sequence Number=SeqID_65950
atggtcacgggccagtcagccgtgggaataggcacgacagttagcatggccataggcgggccgacagtaattgcagcaacaggcgcgcaggagcagcggtccaaccgccaatcagactctggtcccacctgctggctcgcatcctcccctgaggcgggaccaggggccactgtcggtgctgcgaactattcagccttccccatgctcctagaacaactcgtgacacctctaataactcagctttgggataggagatcgagtgttgtaaagcagattggtgacccagttgaagcacggtacaaggagtcgactgaaaggggttcctctgtagatcaactggtctactgcatcaacagtttcagggaggctgctttgtccaatgaccaaaagtttggccatattgacatatctaagaaacggaaggtgtctaattcttggaaataa

SEQ ID NO: 22576 - DNA, 162 bp, Zea mays
  Peptide Sequence Number=SeqID_65951
atggggctcggtgtatgcggctcgctctgccaagatggttatgagattgatgattctggttatgactatggtgctggttgtcagcattgcaaccactgctcaggcgaagatgaagctgtggaaggagacttccaggagttccaagactacgacgagttctag

SEQ ID NO: 22577 - DNA, 1743 bp, Zea mays
  Peptide Sequence Number=SeqID_65952
atgagagccctcgtagtcgtaagtttcgcttcggcgtgcttgctgctgctgttgcagctcgcaggagcgtcgcatgtcgtctacaactacaaggacctcgaagccgaggctgctgcggcgacggaccaggtgccgccgtccatcgtcaaccccctgctcaggacggggtaccacttccagccccccaagaactggatcaatgcgcccatgtactacaaggggtggtaccatttcttctaccaatacaatcccaagggcgccgtatggggcaacatcgtgtgggcgcactcggtgtcgcgagacctcatcaactgggtggcgctagagccggcgctcagaccaagcatcccgggcgacaggtacggctgctggtccgggtcggcgacggtgctgcccgacggcggcggcccggtgatcatgtacacgggcgtggaccacccggacatcaactaccaggtccagaacgtggcgtacccgaagaacgtgtcggacccgctgctccgggagtgggtgaagccctcgcacaaccccgtcatcgtccccgagggcggcatcaacgcgacgcagttccgcgacccgaccacggcctggcgcggccccggccccgagcagtggcggctgctcgtgggcagcgcggcggggtcgtcgccccgcggcgtggcgtacgtgtaccgcagccgcgacttccggcggtggaggcgggtgcggcggccgctgcactcggcggccacggggatgtgggagtgccccgacttctacccggtgagcaagggcggcgcgccgcgcgcggggctcgagacgtccgtgccgcccggcccaagggtgaagcacgtgctcaagaacagcctcgacctccggcggtacgactactacaccgtgggcacgtaccacccgagggccgagcggtacgtgccggacgaccccgccggcgacgagcaccgcctgcgctacgactacggcaacttctacgcgtccaagacgttctacgacccggccaagcggcgccgcatcctgtggggctgggctaacgagtccgactccgccgccgacgatgtggccaaaggctgggctggaatccaggcgattccaaggacggtgtggctggaccccagcgggaagcagctgctgcagtggcctatcgaggaggtggaggcgctgagagaaaagtcggtcactctcaagaacaggttaatcaaggcaggacatcacgtcgaggtgaccgggatacaaacggcacaggctgacgtggaggtgagcttcgaggtgtcgccggcggccctggccggtgccgagacgctggacccggcgctggcctacgacgcggagaagctgtgcggcgtgaagcgcgcggacgtgaggggcggcgtggggccgttcggggctagaaccgccgtgttcttcagggtgttcaagcccgccgccggcagcgacaagcccgtggtgctcatgtgcaccgaccctaccaagtcgtccctgaacccgaacctgtaccgcccgacatttgcaggatttgtcgacacggacatctcgaacggcaagatatccctgagaagcctgatcgaccggtcggtcgttgagagcttcggagccgggggcaagacctgcatcctctccagggtctacccgtcgctggccatcggcaaggacgctcgcctctacgtgttcaacaacgggagggcgcacgtcaaggtgtcccgtctcaccgcgtgggagatgaagaagccggtcatgaacggggcctga

SEQ ID NO: 22578 - DNA, 1119 bp, Zea mays
  Peptide Sequence Number=SeqID_65953
atgaacaaaaacactggcattcaaagtgccattacaaacggaactccggttccacctccgcaggtacgaacaaccccactcgatgggggagggcctgcggagcaacagaagaccgacgaacggcgcgccgtcgcccgctccagcagcagcgacgacgacgacttctgctccgggggaccgaacagcggcagcactgacctcagggcggatgctgctgccaagaggcccccgcccatgcccaaactcgtgaggcaaggacgggcagaaggccgtagagttggaggtcggtccgtgggcggccctggctatctcgtcggcggaagaacctcttccagctgtcgtggcagacgccggcgccgcgagcggctccgaagccactcgcgtccgagagccaggcacggtgcagctgccagcgccacggacgacgaccgcccttccctccgatcactgagtgaaggagcgggccaccacccacgcaggggccgaccccaactcggcacactcccctccccagccctggtgatgaaaatccttgaggctgagggaggggcagaggccgcagcccggctcgctttcccccaccatcaagctggagaccaacgggcgaaaggggctgcagccatgcaggcggcatgcaaccgcgccaaatgggcgcgcgtctccgactcccgacacgcccagcatggaggccccaggcccacgcgtcacgcaaccggtgcgccggatgcttcgtgcaagcaactgcaccgccgctcgcgccactaccgcgcctcctcgactgcggaaccaataccgcggctcgaggcgacccagcgcacgacccagcagcgccagcctggcgcgacggtcaatgcggccaaaaatgggccggccgtaacggcggtagcaggcgggcaggagcagcagtcacgtcgtcagccaagctcacgtcccatctgggggcagcgagagaaccctctctcacggcgtgaagacaatgcgcccgtgttccgttcctcgaacggctcgcgcatgcgcaacgatcgccccgccaaccactcgccccgtcgcattaactccgcggcgggacaggcggcgcctcaggcagaagaagcgggcgacacttcgccctcgccgtaa

SEQ ID NO: 22579 - DNA, 882 bp, Zea mays
  Peptide Sequence Number=SeqID_65954
atggctcctggtgaagccgtggagcttggagggtgtcgcaataactccattgctgctgacaatgcccccggagacgtccttgatggagtccgggatgacgtgaagggcaaggcccagacacgtgtcagcaccggaaccctgctcatacccgggttctcctcgttccgggaccctgctagggcgccgttccctgcgtggctaggggacgtcacatgggtgcggcgtcttcatgctatagaagaggcccgattctccattacgatgatgacaaagccagatgctaggaagtttgcatgtgccaagaaggagaccatccatctcggtctcaccgtgtcggaccatatttgcatgagggggacgagagagagcaccgaaggggagcgaggacttactggtggcgccggtgatgaggacgataacggggcggcggccctcttgaacccagatggatggcgttcctgcgggtgcctcgggtgggtgccagcgcgtcgggacagggtcgggcgagagaagagggaggacgcccgcgactgcgatgccatggagggggaggggcgatgcttgcgcgagcccgcgactgtgatggggggcgagggatgcatcttaggaggcgagagaagctgcgatgccgggggaagggcgggtttggtggcgaaaaaaaggcgagcggattgtggcaggcgggcggttcgcggagctggaggagaggcgggcgattcgcgggagattgaggagcggctccgcaggcgaggtgcgggtggaggcgggttccgcggcatgggtggcgcgggattcgtggtgcttgaggtgcaggcgggcgtgcgggtgggattcgccatgggggaggcgcgggattcgcggtgcttgaagcgcggcaaatcg

SEQ ID NO: 22580 - DNA, 492 bp, Zea mays
  Peptide Sequence Number=SeqID_65955
atgcgcgcaaagaattggaaaacggtgcaggggcttacccggtccacgtgcgccggcgggttcttgaactccggtgagcgtgattgggctattccggtgacgagggtccccaggtcaagcttgagcaagtctcacggcttcaccaggaagctaactgagggcctggatcgaacggaggaggacgggagaggggctggccacggtggttgctctcgggcggcactggcgggtcgcggggaggtcgccggagttaatggctggctcgggcaagtccggcgagggggtaaccctggggtggacaccctgagtaacacctggggtgttacagtggcggtgccatccacgcttgaaatggctgtgatccttggggtggtggaggcgtccaagtgcctagaggtgcctgcatccacccaacaccggtccactatggctatgacgctggagcttgtcctggccactgtccccatccttgtgcctgcgagccatttttga

SEQ ID NO: 22581 - DNA, 435 bp, Zea mays
  Peptide Sequence Number=SeqID_65956
atggctttgtttaagaggaaagacaaagacaataaatcattccaattcatgcattgttggaatgtattgcggaatcaacccaaatggaatgagaagcgcaagcatatagaggctattaaacaagtaccgaataaaaaaatgaagtcgaacttgaactcaagtccaggaaatgcaatcaccattgttgttgatagtacgaacaaagatgtagatgtcaatgcatctctagaagctaatgcccccaagagaccaaatggtacaaagaaggccaaagaagcagtgcgatgtggtgacgcttacatcgaggcttcagattatttttgggcaaaaaaggaggttgatgcagagaaagaaaggaataaacaggaaagattcaatcaatcatatgaactagaaaaagagaggcttcttatagaacaagttgagagcacctag

SEQ ID NO: 22582 - DNA, 243 bp, Zea mays
  Peptide Sequence Number=SeqID_65957
atgggagacccagtctcaggtcgcatgagggataaagtccacgcccggcttcactcagataaggttaacttcacttatgtaagacccttgggtggtatacttggtaaattgggtcaaactttagctaagtggcttggtactggtgtatatttctttgcctcaaaatttgggggtcataagtggggctctggtggttataagtccactgaatttttattatcaattttgggtatggttttgtaa

SEQ ID NO: 22583 - DNA, 183 bp, Zea mays
  Peptide Sequence Number=SeqID_65958
atgacgattgcgggtatggcggccagccgggggcgacgagggcggcgaagccagctgggggcgtgggcaacgcagccggggctaggggcgggcacagctggtggcggggtcggcgagggtggctgggggcgtgggaggcgaggtcctcatgtaacaaaacctgttgtcttaagtctgttttag

SEQ ID NO: 22584 - DNA, 195 bp, Zea mays
  Peptide Sequence Number=SeqID_65959
atggcttctaccagcaaagaatattttcaattggagcaatggtgggatcttactgcaaagctccctgtgatgctcttttcatccttgggaacagaaacaatcctaaggatggaagtatgtaaatcgagacttgggttaggaacaggcttgatgatcgaggaccctttaactggtcacatgcctcgtcatgggtaa

SEQ ID NO: 22585 - DNA, 213 bp, Zea mays
  Peptide Sequence Number=SeqID_65960
atggcggctgggctgggcggcgggcggccggaccgggcgggcagggaggcggccgaaccggccatggggaaaggggagaggggatgggggagggaggagagggggaggggggagctcaccggggaggggcgcgacggcgaggggcggtcggcggcaggggcggccgagggcggcggttgggccgggggcggcggcggcttagggcaggggtag

SEQ ID NO: 22586 - DNA, 363 bp, Zea mays
  Peptide Sequence Number=SeqID_65961
atgggtcttgctgatcactggccgccatggccccaacaccaacaacagccacctcctctgagcaacatgaatcaacaacaattattgttggacctcgatggtaggcttgaggatggtaacatctcctgctcttcttctaataatgctcatgcaagacagagagggcagtgtgatatcctggccctagtggatggtgatatccggacccaaggctttatagaattaatagagtactcataccaacaaggtgcatcttttttcagaagcctgtctcgaaagaacctccaggttaagcgtgcttggcttggagaaattttgggatgggtgaccgaccgtgaagtcttcgcgggtgcgcacgagtga

SEQ ID NO: 22587 - DNA, 186 bp, Zea mays
  Peptide Sequence Number=SeqID_65962
atgtcgcagtctgaatttgttatcctaaacaaattaatactgcgaggggctacagaagggaaaggtaccttcggattcaggattaaaagcatacacgaggagaagagcatgatcgtgacgaaggttgccgttgcttcgaagctatgcgcaagggagcttcggctcaatcgcgggaaaaggaactga

SEQ ID NO: 22588 - DNA, 435 bp, Zea mays
  Peptide Sequence Number=SeqID_65963
atggaaagaagggaggagtggctcaccacggaggacgaacgacggcgtggacgggcggtcgaggcgactccgaggcacgggaacaatggttccggtgtgaatgagggcgaggtgggggagagagattgttgggcgacgtgggagggagaagggagcaggggacgccgggacaagcggggtagacgagcacgtggcccctccaggcagcggcagcggcggccaaacccgtccgcgtgcctgcgctggtggccgagcgagcgtgcaagcgcgctagggcagcgccgcggggtgggccggggaaggggcgcgcctggtgggccgcggggagctgggccgagagggagcgtgctgggccgcgggggcgcggagggggctagctgggccgcgcgccggagtgggcccaaggggggaagaggggacgaccggttgggctag

SEQ ID NO: 22589 - DNA, 435 bp, Zea mays
  Peptide Sequence Number=SeqID_65964
atggcccctgccgtcggtgccgaggcggaggcggctcgagaagtccccgtcaccgacgggatcaccgccaccatccgcgcttcgggcctccgagcgggcggcggcgagccgctcgtcagtcttctgttgctccgcaggccttcccccatggagtggggttactcgcctgttgattatctgaaccgcttcaccaagcatgagtcgccccgtgtcaaggtgacgagtgagggaccgacgccggagttaaccagccgaggcctcggattgggctggcgcccttggaatatggttggccgaggccccaggggtaaccggccgagccgcctgctcgggccagattcccggagaagtccccggaccgcgtcaccgtccgaggctgggtcggtcctcgctgaaggtgtcgtcgatgccgagggtgctacagcccccttctag

SEQ ID NO: 22590 - DNA, 540 bp, Zea mays
  Peptide Sequence Number=SeqID_65965
atgagactcgggggagcgccgccgagcttgggggagcaggagcagcgatgcatggttgtggacgagcggcgacaggacgggcattgccaagagcataatgttgacgagcaagcaatttgtgctgttggccttgctagggcaaaacctgggattttcattgaagccattcaataccttttagttttagcaactcctgttgaagtcttggctaatgcaaatggccactttgcctattataacatcgaagctgttcctaatagttttgcttatgcttccaatgtaattgaaccatcacttgaccttgagagcatctccaacaggagacctcaaatcaggacccctacttttgatttgagtttgagggctcccctactctcgaggcttcttttttccatctattcctgcaggagccctcaaacctataaaaggcattcaaatggacccggggggggggggcagggagctttctatgcaccattgggagaagaagctgatggggagatctgggtggggtcctccataaaggagggacttgagtag

SEQ ID NO: 22591 - DNA, 300 bp, Zea mays
  Peptide Sequence Number=SeqID_65966
atggcgaaactcgcgtttcattatggcgtgattctaaatttctcggactttcgaggaagtggaggagctcgccggatcccggatgctgtcagaggtctgagctcgccggatccaaatgctatcagaggtctgagctcgccggatcctgggctggttggagctggggttggctgtggcggtcgtccccatggcagtggcggtgggtcagagcttgggatgatagtggcggtcggggatcgtccccactccccacaggtggcgcgcgggtcggagctgtggaagaagaggggtggcagttga

SEQ ID NO: 22592 - DNA, 441 bp, Zea mays
  Peptide Sequence Number=SeqID_65967
atggagaactgcgatgcgacgatgttcactagcgacgagccctccgttccaataaccgtggaaaagcttggccgtggatcaatggcctacgaccaacgacaagtgtgcagcgacacacatcacagaccgggaagagccagagacgacatgcgtgaacctcagggggatttgcggcgtggactacacgccaaggcgaggtccgaaaacgccgacaaaattctggacgtcgagaacggtggatcagggacgagcgtcggggagctcacacatgtggctgacagggagatgagacgagcgcgtgtgatgaagctcggtgtcaagctgctgctgtggaggcaaggttctctgaccacgcacttgaacgcggggataaaggaacatgcagtggctatgtccggaatcacgctgaggaggggtcttgaggtatcaacagctgcatga

SEQ ID NO: 22593 - DNA, 543 bp, Zea mays
  Peptide Sequence Number=SeqID_65968
atgaagtttgcagatgaagatatgatgctgaactccatggatgctagtctagtgatacccccggtcatcttcctgtggatggatgtccttgctcgttgtactttgatgaataaaggtgctaaaggttcagcacaaaccaataaaaagatcaagttagggtttacaaagagaggagcaaaagaaaccgaagtgtgccctggtctggcgcaccggacagtgtccgatgcaccagggtggatcaacttcaaactcttcaacttcgggtttctggagagccactccgctataattcaccggactgtccggtgtagcaccggactgtccggtgcaccaagcgaagcaacaactactgcgccaacggtcgtctgcaaaagtgaacagtggcgtgaacagtgcgcggacagtttgcgcaaagtcagagcagcgccagaaggcgcatcgaacagtgaatactgcctgtccggtgcggcaccggactgtccggggccccatgaagaccgagctccaacggtcgaaaccgtcagaactctaatggttgggtga

SEQ ID NO: 22594 - DNA, 732 bp, Zea mays
  Peptide Sequence Number=SeqID_65969
atggccgaggctcaggctacgctcccgaggtaccctaggacatttccgagaccgacgggaacgatttataacagaatcccaccagagggaggcatcgagccctcggaccctgtcgaaggggtctgggtccggcgaatcacccgcaggccgcatgagggaacgaccagaccggccgaggcatcacgaaaagcattaaggcctcagaggagtcaaaccactcctccgaggcctcaggggctacacccggcgggtgcgctcgcgcgcacccaccagaacaaagtaaaaccgagaaaggccggtcccctcaccaaaaatgcggcaaaagcctccaagcgagtaccaacactcccttcgaggctcaggggctactgtcaggaaaacagcgccgctcgccccgctccgactgctgtgccaaccacccaggcaaagctgacaacaagtcacgatcaaccaccgagttcggcctcgggcgcaacaggaagctctgcctcacctgacctcaggctccagcctcgggaggaggtctccgcctcgcccgacctcaggctccagcctcggaaggaagtctccgcctcgcccgaccctgggtctcagcctcggtctcggtctcgggaggaatcgcgtcctcgcccgaccctggcctcggcctcaggagaagtacccgcctcgcccgaccttgggctcgaaccgaccgcgccacaagggatacatcattaccctattcctagctag

SEQ ID NO: 22595 - DNA, 216 bp, Zea mays
  Peptide Sequence Number=SeqID_65970
atggcgcgccgccgcggtgacccccgcgtggctaccggagttgggccagcctatccgataccctttcgcgctggtgcttttgttaaagagccctcggggttttgtggaatcaacccgccgtcctgtgcgggtgtagtttgtgccttggggattcttaccccgagccccctgggtttctctggaattgaggcccagtccagtgagcatttaaattga

SEQ ID NO: 22596 - DNA, 564 bp, Zea mays
  Peptide Sequence Number=SeqID_65971
atgctcacggactggagcacagctcagtctcgagacccaacaatccgattgccgctccgatttgggagaccggttgacgaattcaataggaggaaggagggtttcgagcaggctgcagcaggatgcgaccttggggtgggggaatttttggctttgggctacggagaaacgcgccggccgctggacgcggctttaaaatggaggaagcggctgagagcagaaatacggctgagagcagggaaggtgaatcggatccgtgcggatggaggaagcggcggacgcggtattgattggaggatgcggcggccgcgattcttggcaccagagaggaagcagcggacgcagattcgcggcattagagaggaaacgatggacgcgatttttggcatcagagaggaagcggcggacgcggggcggatcggcgagacagacgaggcgggggcgagaggccgcgattcttggcaccagagagacgcggtgcgacagacggggctgggcgcgttcggggattggcagaaccgtgcgccatcgtgttgtgaacgcctacactatgttcttaagtag

SEQ ID NO: 22597 - DNA, 435 bp, Zea mays
  Peptide Sequence Number=SeqID_65972
atggagaaggttatggtgctggtggctggtgtctccaagatgactgatctggggagcgggtcggctgcgaagcccgagaggaagagctgggacgatccaactcacactacggctacaccgtccatgacaaagtctaaggccaaggtggacaaggttaccatcctcaggactcaggaagcaatgtcgaggcggctaagcgatgccatgacgaaacaattcggcaatgatgattcatttgttgaagagaggtcgaagcctcactacaacaagttctctgaaatttgcgcttcagcaagggtctccaatccattcccaaatgtagatctcttccttgtcgtctgtgaggatgctctcaagtggaagaccatcgctgccaagtctgtggcgaccaacggggctgaagaggaggaattgttggagaagaaatcaacttag

SEQ ID NO: 22598 - DNA, 162 bp, Zea mays
  Peptide Sequence Number=SeqID_65973
atggagaccagcagtgtgcccgccgccgccaccgaggccggctggtacgtgcttggaccgaaccaggagggtgtcggaccctacgcgcttgctgagcttcgagtttccctagagggtggaacatcgtgggatgtaggccccaaggaacaacaaatattttaa

SEQ ID NO: 22599 - DNA, 618 bp, Zea mays
  Peptide Sequence Number=SeqID_65974
atggcggtggcaggcaggcggaagcagcggtcaagtcgtcagccaagctcacgtcccctcctgggacagcgagagaaccctctcccacagcgtgaagacgggaccgagaaaggggataccccgaaagggatccttctccacgaaggaagcgggccccgagcccccctactaatcagaggttcgaaggctggcccctcggaagggttcaacagccgcctcagagcgctcgggctccgcgcccactactggtcagaggttcgaaggccggcccctcggaagggttcaacggccgcctcaggccactcgggctccgcgcccactactgatcaggggttcgtaggctggccctcgaagggttcgacaaccgcctcagacgcagagcgagggatgaccctggccaagtccggcctcgggcgccataggaagctccgcctcgcccgaccccagggctcggactcggcctcggccccggaagacgacgaactccgcctcgcccgaccccagggctcggactcggcctcggccctggaagacgacgaactctgcctcgcccaaccccagggttcggactcggcctcggccccggaagacgacgaactccgcctcgcccgaccctag

SEQ ID NO: 22600 - DNA, 417 bp, Zea mays
  Peptide Sequence Number=SeqID_65975
atggtggggagaagcaagccgggctgcggcctctgccccgctctcagcttcaaggatcttcatcatccttgctggggtggagggcgagctgagccggagcctgccttcgcgtgggctggcgtcccgcttcttcctccgacatctgggggtggaaaccatcctctagctctacggaggaggcatcctccagccatgccggggaaggacgggagtgaggacctgccggtgcgctttggggtggccggcgctcgctggtgcggtgttggtgggcaggtggacgccgctgtcggtgctgaggtggtggcagccggagaaggtttctccgccgacgagatcgtcggcaccatctgcgctccgggcctccggctcttcggcattaatagctggttctcgtcccccgcgaggggacacgaatga

SEQ ID NO: 22601 - DNA, 315 bp, Zea mays
  Peptide Sequence Number=SeqID_65976
atggccgaatatctccacacccttgacaaccaatttgatgaccttttctctcactacacctacctaaactcccgggtggaaagcctagagcggcaaatcaaggaattgaaggaagaaaaggcggctcttcaagacaacatcaagatggcagaaggcgaggaagccaacactcatgaggcataccgaaccctgaagatggactatgctaggagactgaaaaagctcgccccgtcaagaagatccgaaagagtttcaagagccaaggatgccaaaccgtcccaaaggaagaagccccaccaacactaccctccctag

SEQ ID NO: 22602 - DNA, 99 bp, Zea mays
  Peptide Sequence Number=SeqID_65977
atggggctcggtgtatgcggctcgctctgccaaggtaaagaagaaggcgtcgaggcagatctccaggagttccaggacttcgacgagttcgaggattag

SEQ ID NO: 22603 - DNA, 552 bp, Zea mays
  Peptide Sequence Number=SeqID_65978
atggcgctgaagcctggcgggaggaaaggctccgagtcgacacgtcggcgagcggccgacttctgcgacggtgtcgccatcgacatcaacctcagcaagccgcccggcggcgggaaacggcacgacggctgggccagccggggcaccgtcgtgaccgcgaccaaggagaagaaggtcatagagacgtcgcgcggatccatttcgtacgcctgtgttagtccctgttgtgctatcaccttggaactcttcaccactaggctagccgaacctgaagatgtctgccttcctgccctttatttaagtgctggttcggtgaagatttccctctgccctggtgttctagccaaagcttgcagtgaactcctcgcagaaggagtgaagattcaagctgaagtggtgactgaagaggaatctactccagtggctgctgatcaagtggaggagccatctaactgcgccaaagtagagcaccggtcatcaagtgatccggacggtacaagctcaccggagcttggttccccgccgttcgccgttgtggactgggggttgtga

SEQ ID NO: 22604 - DNA, 669 bp, Zea mays
  Peptide Sequence Number=SeqID_65979
atggctctccccgagggcacacgtagacgtagctacgtccagcccaaaggatgtccgatgggccatggaggtcgctgcaggcggggctcccgcgtcggatacagaagctgtctccttgtttctactgccgccagtcctcttgccttcagtcatcgcggtggcagggcagaccgtccggggcaacattgctcgtggtggtcgccgaaccctggagcccagccttcgccaatcattgctacttcttcctcccctaggatcgcattacccgcgctgtctgatcctggacctggagaatgtcatgggacctcccccttcatcctcaagcgctcagaaggggaagagatggaggcggagaagtggcacctcatcgaggcggcctctgaccgggttgataggagacttgagatcgtcgatcgcatcctcaacaactttagggaggcagtttcgattgcccactcgtcgatgacgcgggacttgctcccccacggccagagggagtgcgagctctccatgcttcatgctgatgctgactgtcttcgaagtgaggcggcatgcctgcgcgctgggtgccttgaggcacggagtgacgcgaaccgcatctggggggagatatccttgctgcagagggaccttcgcgaggcgaaccttcgagccgaggaggccgagtag

SEQ ID NO: 22605 - DNA, 567 bp, Zea mays
  Peptide Sequence Number=SeqID_65980
atgactcttccccctcacctcagcgggaggtggagtctgagaggctgccttcccctgcacctcagccagagatgccccctgcaccacaacagggcatcccggctgctggaggagaccctgacggagacggagacgatgacgccggtggcagttcgagccacggcacggagtgctcggaggagccggagccggagggatggatcactagacccatcactcatgaagctgctcgcggctgatggtcttgacctgaagtactaccctcaccgttcgaccagtagtgctggaggtgtgattgtctcaccagttggtgagggcaatcccaggctgagcagcatggtcaacctgactgccgtgctcaacacagagctggaccacgcccttgacgagttgggcagggttcgggcgaaggttgtggaattgcgtgctgaatgcgcggcatgccactatcttgatggtggttctcccgcccctatcgggattcagcacccttaccgctcaccgccttgtggtcgcttcaactatggtacccctgactgcaggacccggatagatttggatccatag

SEQ ID NO: 22606 - DNA, 738 bp, Zea mays
  Peptide Sequence Number=SeqID_65981
atgcaggcggcatgcaaccacgccaagtgggcgcaccccttcgactccaacgcgcccagcatggaggcccaggcccgaacgtcatgcaaccggcgcgccggttgctacgtgcgagcaactgcaccgccactcgcgccactaccgcgcctcctcgactgcggaaccagtaccgcgactcgaggcaaccctgcgtatgacccaacagtgccagccaggcgcatcggtcacgggtcagtcagctgcgggagaaggcgcgacggtcaatactgccaaaaatgggccggcagtaatggcggtggcaggcgggcgaaagcagcggtcatgtcgtcagccaagctcacgtcccatccagggacaacaagggaaccctctctcacggacaggcggcacctttggcaggagaagcgggcgacgcttcgccttcgccataatgatcgcgtcaaaaaagggaccgggaaagggggataccctaaaagggatccttctccacgaaggaaacgggccccgagccccctactgatcagaggttcgaaggctggcccctcgaaggggttcaacagccgcctcagagcgctcgggctccgcgcccactactggtcagaggttcaaaggtcggcccctcggaagggttcaacgactgcctcaggccactcgggctccgcgcccactactgatcaggggttcgtaggctggccctcgaagggttcacagccgcctcagacgcagagcgagggatga

SEQ ID NO: 22607 - DNA, 885 bp, Zea mays
  Peptide Sequence Number=SeqID_65982
atggggacgtattcttggctaagttgggatatatgggacacacttattatggagcatggagtcatcctggaggacagcttggaggaacttctgcctacgcccaccccattgacagagtcactagccttcacagctagatcatcagcttcaacaccgcttgcaccagtagtccaagcccctgctcccggaggcgatgatccggatgactctggggacgatgatgaagatgacgacgatgaagaagatgaagaggagaacgtcaacgaagaagccgacggtgtgcagcaggactacttcatggggttagggcctgtcactgaacattatacatcaatgttcgagacatggcacttccccaacctgctgcaagacgttctgcatgcgttgggaacctacgtccgacccttgtacgagacaagacgagtgtgcaagcttcctcgggcttgctactacatcactcgcattcatgtcagggtgatggatgcaggggatagagggttcaggactctatcagctcatgagtccctggcaccgctatccacctatgctgcttcgccacacctacgtaggcagcagctgcatgacacgaagtacatgcatcttcctctccgtattagtggagggagccagaccagcatcgttctaggtggagctggagaagatcgcctcaacaccctagctggtgtagtggcaggtcttaacaccaacctggacctctctagggttcacctggagctggaggattcccatgcaaggattgcagccctagaagctcagctacaaggaagggatccccctgaagcccaagtccccaccatggcattatcccctccccgcaagaggattcgctatggggaaccaggatccatcaccaagctgctataa

SEQ ID NO: 22608 - DNA, 438 bp, Zea mays
  Peptide Sequence Number=SeqID_65983
atggaggtcggcgagtggaagtgggatggccgagcaggggcagtggtggtcgtcggggtcgtggcttcactccgctcaacggcgtacaacgccctggctccggtggtcgacgacgaaggaaactccggcgatgaagggcatggcggtatctctgcgggcggctcacagcatgagagaagggcgcgagggctagaggtttgggcagggctccaagggcgcgacctcggcttttatagagagagaagaggtgggggagagagaggagaggaggaggcgcgaccgttttctgcgcggggaggttaccagtccggcctggggtcgggcgcgagccaggcggctcggacgtcgaggaggcggcatggcctcccgtgccagccgagcggcggtggcgcgtggccagggaagaggaaaggccagagcgggtccgcctgcaagtga

SEQ ID NO: 22609 - DNA, 963 bp, Zea mays
  Peptide Sequence Number=SeqID_65984
atgaacacgctccagggtcctccccctacgacacgagggttgggtcccacacaacatgcaagctggcccaggacagaagaagccaaaccgccgcgcgcagagcgtttaactgcccagcggttacaagcactcctccactttcgcccaaaccagcgggtgaaagggcggaccgccgtgcaggcggcatgcaactgcaccacgaagatgcaccctttcgacttcgacgcatccaacatggaggcccagacccacatgtcatgtaaccagcgcgccggttactacgtacggaaaactgcaccgccacttgcgccagtaccgcgccttctcgactgcggaaccggtgccgcaactcgaggcaaccccgcgcacggaccaacagtgccagccaggcacatcggtcacggatcagtcagccgcgggagaaggcgcgacgatcgatatggccaaaagtgggccggcagtaatggcggcggaaccactcgtcccatcgcattaactccgcggcagggcaggcgacacctttggcaggcgaagcgggcgacgcttcacctccgccataatgaccgtgtcaaaaaagggactgggaaaggggatactccgaaagggatccttctctgcgaaggaagcgggccccgagccctcctattgatcaagggttcgaaggatggcccctcggaagggttcgacagccgcctcagagcactcgggctccacgcccactactggtcagtggttcgaaggctggcccctcggaagggttcaacagccgcctcaggccactcgggctccgcgcccactactgatcaggggttcgaaggctggccccccgaagggttcgacagccgcctcagaacacgcagagcgagggatgactctgggtacgtccgatgcatgaccgaggctcgtgctacactcccgaggtaccctaggacatttccgagactagcaggagcgattctgtaa

SEQ ID NO: 22610 - DNA, 1014 bp, Zea mays
  Peptide Sequence Number=SeqID_65985
atggggagcgcccgcgttgccttcgtcttgttgtgggaggagcgcaacctcgtggaggttggcacctttcagccatcgcttgacttcaaggattttcatcatgcagcccggctgcatcccctcaccaatggtcacccaagacgcttcaaggatcttcatcatccttgctggggcggagggcgagatgagccggagctttaccccccgtacgggccggcgggccacctcctccttcagcattcaggggagaaggcgctcaccggcctagcggagggggcagactttgacaacgtggggccgattggccgcaagcgtcgtcagctccagcatgcctggttcgctggctcagctggctctggcacagctttcggtgccacctcccaccgctgggcggagtgtggctatctgcccgccgtacgggcggctattgcgccgcgcgcaccgagggaccgcccaagacgtcgcgcgctgctagggcagtgttcgcgttcttgggctgtcctgccctcgctccggcacgacgcctccacgcggaggtcggtgctcgcccgtctgggaggacttgagtggggatctgccggtgggcagctggagaaggcctcgtcgccgacaagatcgtcggtgccatctgcgctccgggcctctagctctttggctttgatagcttgtcctcgcccctcgagtggggacgtgggcgagggccttgtcgcagcagcgtctgccctgaggtcatcgctgctgctgtttggccgcccggagcggaggtcgttgtcgctgctgcagtggccgacagcaagtcacccggagcttgtcgtcccgcaggccctccgatgtggaggttgttcatacccgcgggagtggaactggagttccgtttgtaatggcaccttgagtgccggaaaacctcggccgctctacgatgagccggagccggaggcagcggtgtcagcatggacaaaggcagagtcggctcgagaagaagcttcatcggcccaggagcaggggacttcctag

SEQ ID NO: 22611 - DNA, 438 bp, Zea mays
  Peptide Sequence Number=SeqID_65986
atggccatcaatggcgctaataccggccatttcttcctctcccgggtgcccctcttctctacctctctctataaaagccaaggcgacgcccttggagccctgcccaaacctctagccctcgcgccctttctcttcggctgtgagccgcccgcggagacgccgtcatgcccttcatcgccgaccaccggagccaaggcgtcgtacgccgttgagcggagtgaagccacgaccctgatgaccaccactgcccctgcttggccatcccacttccactcgccgagccccctgttcgccgacctccatctccctgtgcgcacatattgctccaagagggtgatgaagaagactttgatggagattttgatgaatacagagtctaacgatgtgccggtcatcttcccgtgggagattacccatgttatttctgctatactttga

SEQ ID NO: 22612 - DNA, 642 bp, Zea mays
  Peptide Sequence Number=SeqID_65987
atgggcgagggcattgttgcagcggcgtccgccctgaggccattgctgctgcagttcggccacccggagcggaggtcgttgtcgctgctgctggagcgggcgacggagtccctcgactcggtcggccttgctgtccgaggcttctcttgcttagttaaaggaaaccctcggccgctcttcgatgagccgaagccggaggcagcggtgtcagcatggacagaggcagagttggctcgaaaagaagatttggtcggccggagcctggccgggtcgtccactggcgggaccgacgccggagttgagtcgccgatgccacgagccgggctgatatcctcgagggacagctggctgaggcttcggggtggccggccgagccgtctgctcgagccggattcctggagaagaccctggtggcaatggcccgggcgtggtgctgatgttgtccttcggagtggggatcctccgaccgcgtcgccgtccgaggctaggtcggacctcgcagaaggtgtagttgacgccgagggtgctgctgctcccttcaactgtcaaggtccgagcctgcaggatcgggagtccctcggctcggtcagccttggctgcttacgtgtacttcgtcgttttaaggatccactttcgaagtag

SEQ ID NO: 22613 - DNA, 138 bp, Zea mays
  Peptide Sequence Number=SeqID_65988
atgaacatgtacctcaagaagaggggcatgatcaagggggagcataggaagaacagggtagaagaagccttgcaggatccggactgggtgttggccatgcaggaagagctcaacaacttcaaaagaaatgaagtctag

SEQ ID NO: 22614 - DNA, 519 bp, Zea mays
  Peptide Sequence Number=SeqID_65989
atgaaggcgactaaggaggcaggaaggcggtggaggatgaggcatgtccaagaggagacctcgcttagggaatggggtgtcaagctacaggaccttctcctagccacgggtgcataccatgggagtagcgtggcctttgggcagatggtcccccacttcgatgagattgatgatgtcatgatcacgaagagctttgccgccggtcggagcgacgatgagctggacagcattgaagagcacgcgcatcctcacgcccggtcgattgtgggtcgggtcgacgagattgtcatcgccgtccttgagccggtaagcccccgggcgcaggacctgtgccatgatgaatggtccctccctcaattaggagagcttatgcttgtccttggtcgccatcactcttctcagcaccaggtcaccgatgttgaactatcaaccacaaacttgtcagtcatggtagcatcgcaaatcttgctggtatttggcaaaccggatgacgactacgtcgcgtgcctcatcgggtag

SEQ ID NO: 22615 - DNA, 660 bp, Zea mays
  Peptide Sequence Number=SeqID_65990
atgtctcctctagacttccatgttgttcctaacttggtcagtgaagcactgaagcaagcaacgctggtgtgtggccccgactttcttttacctgaagggcatggagacgtagcagaacgttctgaagggggtgatgaaggtggtagaatgttggttggttactttcatggtgatctgatgatagcccgagtaggcgtccagaaaggaaagaagcttgccccaagaagtggagtctactacctggtcgatgcgtgggagaggaaaaggatctttggaacatgccttgttaaggcttgtgtagtcgtctcacatcgtccacctcccgttccactttttaacaagtacatgattcacaacccacgccgggtggtgtatttcccttacgaaccctactaccaagagcttggtgacctctttctcgagggccttgcgcttttctttgttgaagcggcgaagctgctgggcgaatggcctagccatcgattagatgttctaggagtgcttagcgacttttgttgggatccccagcatgtcaacgagtttccaggcaaagacatcacagttggcctagaggaagttgacgaccgcactttcctgtttgtcaaagagcactaccccaatgtgtcacacccggttctgggggcaaagccgaatgcatag

SEQ ID NO: 22616 - DNA, 123 bp, Zea mays
  Peptide Sequence Number=SeqID_65991
atgggtcatgaggagtgccctagtggccggggtgtcacgctccacaagatcgtgacagccataggaggtggtgtatcggttgctaaggcgcaacgtctttggaaggctgtagtcgggctgtga

SEQ ID NO: 22617 - DNA, 867 bp, Zea mays
  Peptide Sequence Number=SeqID_65992
atggacagggccgagctcggcaggagcgtgcgcgcgcaggggagcagggacgcgcagaggctaatcctgacgagcacatcgttcgacaaaaacacaggagcgattcaccagactagcaaggagccgaggcagggagggagacacgctggagaagacgggaaggcgccgaaggagctgcgcagcagggatcgagctccgtggagcgcgagcgagcagagagagacgcgcgggggagccactcggctgggcgccatggaggccgagcaggtgaagcagtgcgcggcaccgggggcgagcagagccggacgccatgggagagggagatccgagctaggagggtccaaggcgtggcgagaaggaagccaagtgccggccatgggagatggagccgagctagagcaagaagaagggggcgcaacgctgggagaacgcgcggtcgagcaggggcccgacgatgaacactcgtgcgacccggccagcagaggcaggaaccaggggcgcgcaggcatctgggtgcgtggccatgaacatgaagtcgcatcgcctgagctcggctggaaagggatgagggaggggatccgagctggggtcattgacacgcagagggagccgctcggtaagggagttgggcgtgggcgtggcccaacgagcagaggggagagggaggggcttgagtggagccctaggcatgaccatggcagggagatggggaggagaaaggtctgtgcgccatggagacgagcagtcggcgcggggggctgggagaatcgcggctgcgcgcagctggaggagcagatcgcgctcccatggacaacctcgccggagctcggtccgtcgccgttcgctgtcaaggaccgcgggctgtga

SEQ ID NO: 22618 - DNA, 1182 bp, Zea mays
  Peptide Sequence Number=SeqID_65993
atggctgcttccacaaacaacactctcagggtgctgttcaccctaatggttgtatgcgccgcagtatgcacagcgaaaaggactgtagcaaaggcaggagacttggcgccagcccctgctccgttaggagcaggaggcgccaccgcagccccagaaggtgcggctagagccagcaggacgttcgacatatcgaagttcggcgcgaccagcgacggcaagacggactcgacacaggcagtccaggacacgtggacgtcagcgtgcggagcgatgggagacgcaacgatgctcatccccaagggcgactacctggtgggccctctctacttcagtggcccgtgcatgggggacatcaccatccagctcgatggcatcctgctgggatccaacgacctggccaagtacacggcgagttggatccaggtgtcgcacgttaacaacatcgtcatcaacggctccggcacgctcgatggccagggcaccgcagtatataccaagagcaagaccgacgtcgtcaaggcgatgcccaacacactagtgttgttctacgtgaccaacggcactgtttccggaattaaactactcaactccaaattcttccacatcaacatcgacacttctaaggacatcaccgtgaaggatgtgaacatcacggcgcccgcggacgtcgagatcacggacggcgtccatgtcggcgggtcctccaatggcatcagtgtgggctgcctaggccgctacaaggatgagaaggacgtgagcgacgtgacggtgcgggattgcgtgcttaggaacaccaccaacggcgtgcgcatcaagtcgtacgaggatgccgagtctgtgctcacggcgtcccatctcaccttcgagaacatcaggatggaggaggtggccaaccccatcatcatcgaccagtacttctgcccccagaaggtctgccccggcaagcgaagcaactcctcgcatgtctccatcaagaacgtcaccttccgcaacatctccggcacgtcgtccacgcccgaagccgtcagcctgctctgctccgagacgcagccgtgcagcggcgtctcgctcatcgatgtcaacgtcgagtacgccggcaagaacaacaagaccatggctgtgtgcagcaacgccaagggaaccgccaagggaagcctccaggccctggattgcctcgtctga

SEQ ID NO: 22619 - DNA, 183 bp, Zea mays
  Peptide Sequence Number=SeqID_65994
atggccatggagatgctgatgaagcctaggttggtcatcctagatgagcccaccgttggtttggatagtgcttcaacactgctaaggttgttcgtcggagctgtcactcaggacatacctatgatgattgtttctgaactccatgaagaggtacttctaggttctgaccccgacaagggctga

SEQ ID NO: 22620 - DNA, 678 bp, Zea mays
  Peptide Sequence Number=SeqID_65995
atgtcggtgccgcgagcgccctcccccaacctttgcaacttcactttctggttcacctgcaaccaccatgtgcatggaggaaaaaggagacagcgacgaggggtcaacgggaagtcttcgagcacgcgacagatgacgaggaggcatacaacctgcctatgttccaagggttcagctttcgggcagttgcggctggctgcatcagggtttgggatggagaacatcgtgtatgagcatggtgagaaggagcccaatgtggtatacaaggggaagctcgatgcccaacgccacattgttgttaagctctccaaccactctgcctgggcaaaaaagaaggcgaatgcccagagccacatcgttcccggtattccattcgccttcttttttacgctttctaattatgtgcatcttgtggagcttctgaagtatagggatgcagcaaaaatggttgctgttgaaaccacgcaagaaactgctatggcagagatccttgttcgatgtttaaggaacaaatgcctctgtggaattgtaggaacaaatgcatcatgtccagcaccaccagatgtagtggaagtgcggcggctccaatcccatcgtgtccaaggccgtagacgagatgattggtgtcactgtcccgaggaaagcccgctccgcttcaacgaaacgttcttcgcatga

SEQ ID NO: 22621 - DNA, 897 bp, Zea mays
  Peptide Sequence Number=SeqID_65996
atgaacgtatgtgagctcactcttgctgtctcacaacctccacaggtcaagaacaggtacagcaggatgaggcgcatggaggatgctgtgatgagctccctcccgaaccggaagctccacgtggcgcgacatctcgtctctgtcgtctatggcggcgacagaggttctacttcagatccttcggggcacgccgtcctgcgcccagctctttccttcgtcggcgtcctgtactcgctcctctccgggcccgcggcctcgaacccgtcggcggaggtggcctccgtccgtccagctctgagccgggcccttggaaatcgttgccatatcagatcagcttcgccatggaccccatatgcgacccccgctatagctcgctaccctcctctcccggcctcacccgcgctcctccagccgcagccgctgccgctgctgcgctgccacgcgccctcccagtacaaatcccagctccgcttcctatcctccctctcctcctcgtccgtgccgaccagctcagatgctcccagcgacggcaggggcggccgtgacggggaagaggatggcgcgaagagcggcggccacgtcgattacttggagatgagcgacgaggagctcatggagcagtgtgatatgggcacgttcaaggcgtccggccccggcgccagcgacgccctcgccgacgcgcacggtgcattcctggaggcgctgctcgacctaaggcgtggccacgccgcactctggctgtgcgacacggcgggcgcccagcggcacgctgagagtgaccttgtccgcctcgtgtcccccgcgcgccccggcgtcaggctcccgcaggcggcagtgcccgtggcgccagcgagcgagcgaggaatagcacttcctgttggccatagatggcgatga

SEQ ID NO: 22622 - DNA, 534 bp, Zea mays
  Peptide Sequence Number=SeqID_65997
atgtcgaccacggcgagcagaggagcgcgcatgtctgaagctgagctggggcgagcgcgaccgttgtcgccggtgaggagtcgagcagtcgggcatgacttccatggaagcagggacagagacgctcggcgaacaaaggaagggacgtgcgcaatcgcgagccggaggcagaacgccggccagggaggactgagaaattcggccgagcgctgcgagcagaggaaggaacgcactggcaagcacatggcagccatggggacgagcttgactaggggtgcgaccgacgagccgaagccgagcgcgaggaagaacgaaggagacgaggacgcgccagtcagggagcatccgcgagcagggagatggagctcgaggatgcgactgccatgggcgaggaacgagccaagggagctgggcgcagtgcaatggagctccggcacgacggctgagcaggagagagcagagcagagggcgagcaggacgtcgtggtggagtgctgcgcagagagagagaagcagaggaactctggtgggataa

SEQ ID NO: 22623 - DNA, 297 bp, Zea mays
  Peptide Sequence Number=SeqID_65998
atgacgcctcctgttgacgtggctggtctgcgccctaggttgggcgatgtggaagctcctccgaagccgaggttgagtctgtcttccgtggccgaggtcgagtccgagcccctgggtcgggcgaggcggaggccgtcggctgaggccagggcggagtgcgagccctgggggtcgagcgaagcggacccgagtccgagccctgggtcgggcggagcggagtttgccgtcttccgggacttagcccgagtccgagccctaggtcgggcggagcggagttcgtcgtcttccgggacttag

SEQ ID NO: 22624 - DNA, 1119 bp, Zea mays
  Peptide Sequence Number=SeqID_65999
atgcagcccggttgcacccctccaccggcggtcacccaagatggtgacctccagttcgatggcgggggaaagcaaaccgggccgcggcctctgcccctccctcagcctcaaggattttcatcaccagggctggggaggggagtgtgccgagttggggtcggcccctgcgtgggcggcggcccgctccttccctcagtgatcggggggaagggcggtttgttgtccgtggcgctggcagctgccgcgtgcctggctctcggacgcaggtggcttcggagcccgctctcggcgccggcttctgccacggcagctggaagaggttcttccgccgacgagatagccagggccgcccaaggaccgacctccaactctacggccttctgcccgtccttgcctcacgagtttgggcatgggcgggggcctcctggcagcagcatccgccctgaggtcatcgctgccgccgttcggccccccggagcagaagtcgtcgtcatcgccactgccggagcgggcgacggcgcgccgttcgtcggtcttctgttgctccgcagggccccccccatcgagtggggttactcgcctgttggttgtctgaaccgcttcaccaagcgtgggtcgccccgtgtaaaggtgacgagtgaggagtccctcggctcggtcagccttgttgtccgaggcttcccttgcttagttagaggaacccctcggccgctcttcgatgagccgaggccaggggtagcggtgtcagcgcgaacagaggcggagttggctcgaaaagaagatctggtcggccggagcttggccgggtcgtccgttagcgggatcgacgccggaaataaactgcctaggcctcgggccgggctgatgtcctcggaggacagctggctgaggccccggggtgatcggccgagccgcctgctcgggccggattctcggagaagaccctggcggcgatggctcgggcttggtgatgacgttgtccttcagagcggagacccttggatcgtgtcgccgtccgaggccaggtcggccctcgccgaaggtgttgtcgacgccgagggtgctgctgctcccttcaagcgtcaagatccgagcctgcaggatcggatcatcttgtag

SEQ ID NO: 22625 - DNA, 504 bp, Zea mays
  Peptide Sequence Number=SeqID_66000
atgctggacctctcttggtctgttttccaattctgcctgaccgtgttctgcttgcttttttttttgatctggccattcttgccggctttcttggtttatcggcgtcgcaggatgatgagcgactacaaggtggagatggtgaacgatgggatgcaggaattcttcgtcgaattcaaggggccggccgaaagtatctaccaaggcggtgtctggaaggttagggtagaactgcctgatgcatatccttacaaatccccgtccatcggcttcatcaacaagatttatcaccctaatgtcgatgagatgtctggctctgtatgtttagatgtcataaaccaaacatggagcccaatgtttgatctagtaaatgtttttgaagtattccttccacagctgttactatatccaaatccttctgatccattaaatggggaggctgcagcactgatgatgcgtgatcgtcctgtttatgaacagaaagggaaaggtacagtggtccactaa

SEQ ID NO: 22626 - DNA, 294 bp, Zea mays
  Peptide Sequence Number=SeqID_66001
atggcttcgttcaatgatcgagctggagctgcttcggctccgaagctggtgctcccaataacagggtgggttcgtgctcagaaccagccaacaaaaagcaaaagaaaagaggcgcagagaagggtacacatgttggagtgcagggacccttcatcaagtcaaagtggtcccacataccaatcacctctcccaggagactcagctccagggatttcctcatacgatgctatggaagaaaaacttcccattaaaagagaccccttgtttattcttgggagattaggaacatcttaa

SEQ ID NO: 22627 - DNA, 1101 bp, Zea mays
  Peptide Sequence Number=SeqID_66002
atgtcgcgactggaggcaaccctgcgcatggaccaacagtgccaaccgagcacatcggtcatgggtcagtccgccgcgagagaaggcacgacggtcgatatggccaaaagtgggccggcagtaatgtcggcggcaggcgggcggaagcagcagtcaaatcgtctgcaggctcacgtcccctcctgggacagcgagagagccctctcccacgacatgaagacgacgcgtccgtgttctgttcctcgaatggctcgcacacgcacaacggctgccccgcgaaccactcgtcccgtcgcattaactctgcggcaggacaggcggcacctttggcaggcgaagcaggcgacgcttcacctccgccatgatgaccgcgtcaaaaaagggaccaggaaaggggatactccgaaagggatccttctccgcgaaggaaacgggccccgagccctcctactgatcagaggttcaaaggctggcccctcggaagggttcgacagacgcctcagagcacttgggctccgcgcccactactggtcaggggttcgaaggctggcccctcggaagggttcgacagccgcctcaggccactcgggctccgcgcccactactgatcaggggttcgtaggctggcccccgaagggttcgacagccgcctcagagcacgcagagcgagggatgactctgggtacgtccgatacatggctgaggctcgggctacgctcccgaggtaccctaggacatttccgagacccacaggagcgattctgcaacggaatcccatcagagggaggcatggagccctcggaccctatcaaacggaccgggtccggcaaatcacctgcagcacaaagctgcaaaggcctgatgggcgcgattcaggtcaaggctccatccgctcaagggacacgatctcgcctcgcccgagcccagccttgggcaaaggcagccgacccaggaggattcacgtctcacccgagggtcccctcaagcaacggacgcaccttcagctcgcccgaggcccaggcttcatggagaagcaaccttggccagatcgccacgccaaccgaccgtatcgcaggagcatttaatgcaaggatcgactga

SEQ ID NO: 22628 - DNA, 765 bp, Zea mays
  Peptide Sequence Number=SeqID_66003
atgtcttcgcactctcctcatgcatcgcgccctcccaccttccgagcccccggatggggagcgcccgagtcgctttcgtcttgtcgtcgttggaggaacgcaacttcgcggaagttggtaccttttagccatcgctcggcttcaaggattttcatcaggtggcccggctgcatcccctcgccggtggtcacccaagacggtgaccaccagtttgatggtggggagaagcaagctgggctgcggcctctgccccgccttcagcttcaaggatgttcatcatcagtgctggggagggggagtgcaccgagctggggagggggagagtccctcggctcggtcggccttgtcgcccgaggcttctcttgcttagttaaagaaaccctcggccgctctgcgatgagccggagccggaggcagcggtgtcagcgtggacagaggcagggttggctccaaaagaagcttcgttggccggagcctggctgggctgtccactggccggaccagcgccggagtcgggttgctgaggccatgagccgggctgatgtcctcgggggacagctgcctgaggctacggagcggccggtcgagccgtctgctcgggccgggttcccggatgagaccctaacggcgatggcccaggcgtggtgccgacaggttcctttgaggtggagatcctccgaccgtgttgccgtccgaggccgggtcggattccgccgaaggtggagtcgacgccgagggtgctgctgctcccccactgatgtctga

SEQ ID NO: 22629 - DNA, 504 bp, Zea mays
  Peptide Sequence Number=SeqID_66004
atgctggacctctcttggtctgttttccaattctgcctgaccgtgttctgcttgcttttttttttgatctggccattcttgccggctttcttggtttatcggcgtcgcaggatgatgagcgactacaaggtcgagatggtgaacgatgggatgcaggaattcttcgtcgaattcaaggggccggccgaaagtatctaccaaggcggtgtctggaaggttagggtagaactgcctgatgcatatccttacaaatccccgtccatcggcttcatcaacaagatttatcacccaaatgtcgatgagatgtctggctctgtatgtttagatgtcataaaccaaacatggagcccaatgtttgatctagtaaatgtttttgaagtattccttccacagctgttactatatccaaatccttctgatccattaaatggggaggctgcagcactgatgatgcgtgatcgtcctgtttatgaacagaaagtgaaaggtacagtggtccactaa

SEQ ID NO: 22630 - DNA, 372 bp, Zea mays
  Peptide Sequence Number=SeqID_66005
atggcatacgtggtattggaagatgccctccttcaaaatcctcaacccgccgtcctccagtctctctcggacgacccaaagacagcccacaatggcgcacatccctgttcacccttcgacaccttcgcttcaaacttcagcttctggctccactcccgcgtcctctgtattctgcgttatgacccccgctggcgtgacaaggacgtgtcggaaggtaatcagcttctcatcggcgggaaggggggcgaggaggccgcgaggcgagagacgccggaggagaagcggaagcggctggaggagctggatgcgctgctggagggggctggtcgagcccatgatgcggcctccaacgccacctcctcctccgggtaa

SEQ ID NO: 22631 - DNA, 450 bp, Zea mays
  Peptide Sequence Number=SeqID_66006
atgacgcgatttgaacgccgccgccgccacggcccacggcagcggttagaaccggacgggcggacctgcccctactttcattttcctcctgctcgtggcttcaattcctttccaactccagcccgtgtcagcagcagtgttcgtggtactgctgccctcccgttccgctctccagggggcagcaagcaacacatcggcgacctgcctgccctacccgacccgacccgagtatccgtgcagcatagcgacaaggagaaaccgagaaaccccaccagtgccgtggcccccgaaacgatcgggaaaccggttgctgttactacccactggcgtggtgcctgccctaatcagacgctgccgatgtggaatcatgcatgcgtgcttggaaatgggaatggaagtcgtcgagtcttgcttggcgtcaaaatacgcgattcatcggaggcgcactaa

SEQ ID NO: 22632 - DNA, 222 bp, Zea mays
  Peptide Sequence Number=SeqID_66007
atgtcggagccccggatgcacagtccagacatccgggcgaggttcaagacctccacaggcggcgtgcccgtccgctccggaggcaggcagtacacccatactgcggcatatactgtactcatcatcactcgtacgttgccagtgaagcttccgcagcatgctgatactacgcagactgcggatatcagtgcgcaaggagattgcaccggcgaccagcactag

SEQ ID NO: 22633 - DNA, 2055 bp, Zea mays
  Peptide Sequence Number=SeqID_66008
atggacaaggaccgccagggggctgcgcaaaagcggcaggcggctatcaggattgttgaagccaggccaaagaggcaaaagcgggagtcggcgaaggctgcggcccccggcggaggcaagccgccgctggcggcgaagtcaggcgtccctgcatctagcaaggcgccagaggcagcggcgggcgccggaggctccaaaccggcgaaggctgtgccgccgctcagcgaggtggcggaggccgcgaaggcggcccgagcgctgccgtcggcaggcaagcgtgtcgccgacttcgccaccaacatttgtgtggaggactatcttggtgggtcggacgagggccagcttgctatggttgcgcctgccgcggcgatcgcgacggctggcatagtgccgaaggcgaggggcgaggctcttggctccggaggcgaggtgtcggccctcgcggttgtcagggacgaggcgggcgcagcgacccgccggctgaagggagtgacggaggcgctgagtcaggcgacggaggcgctgagtcaggtggctgacttcgccagccgtgctgcgtcgggggccctcatggcagctgtatctgccgaagtcgagagacttcggacgcaacatgctgacgctgtccgtgagaaatcagcctccgacagcaagtgccggaaactgacggacaaggtggccgtgctggagaaggagaaggctgaccttcggcgccaactggcggcggagaggagggaggccaacgaggccatcgccaaggagcaggctgctcaggcgaaggccaaactggcgcgggcggagggcaatcttgccaaggagctcgccgaacatctgcaggagcggctcaccgccctggagagccgcgcgaagggggccgaggccgcggtgcgtgcggaggcagaacggacgtgcacacagcttatggatacatatcgtgagctgggtcctcggaccggtgacttcgaggtgccggaccgagagcccgggcttcgctgtctgcagtgggtgcaggaggagctgcaggaactccccgctgtcgtggggggttttatgtcgtacgcctccctggtcacctgcgagggggcgatgaacgcgctctcccgtgaagggtgccgacacttcgaggtcttcgaccaggcggatgaagattttgatcgagatgtctataaggttgaagacctcgtggtgaaggattctgccggggccctctacgaccggatgtggggtccgcacggtcgcgaggtggtcagggagcgggcggagacggcaatggctcaggcgtcgcgtggcgagcgggtggacgacctcggggcgctgaacagcgcgctacctgacccggagccgacccctgcggaggccgtgtccggggtcgccctggagccaacccctgagaccgcggcgatcgcggtggctgcccccacgtccgctacggccggcgaagacctacccccaaaggtggccgaaggcgcccctgatgcccccgcagctgttgtgccgtgtgctgaagatcccgcggcggagacggcggaaacaacagcagaagcggcggcggagcccgcggcggaggctcccgcagcgttcaagatttttgggcctgcgcacgcaaccgctactgctaaatttttggcggcttcgacagcggaaggtggtaatgaatgtggtggatctggatctgaattttctgagttttttgatgttgctgattctgggagctcggttgagtggactgaggagtcgtcggaggatttggactatttcgcggctttggatgtggctgcggcggagacctcgccgcacgctgcggacgcgcaagatgtgccaggtccgagcaccgggcgccgacggcgaagggcggttgcaaagcgtagagttagtacggaggaaaggtctcggcttcgtgtgagtagggctggtcggcaggaactgttgtctttgccggccgccgcgaatacaggggaaggggaactgcggagtctttttgcgggtgaggagcttaggataatgttatttaattatagggagatgggaattattcctaaggttgagccgatgtag

SEQ ID NO: 22634 - DNA, 246 bp, Zea mays
  Peptide Sequence Number=SeqID_66009
atggcaagaagcgccatccgccgtgccgtgctcgccgcccccattttgaagccgtcgctctctctcgcggtctcacactctcacccaaggccggcatcccgctcggtgactgtgccgttcatttccgccgcgatggctaaagaagccagaccacgctttcccccttccctaagccatggctacaccgctaggcattccttcgagcagatgggcggcgccctgtatgagcagaggcgcacaatgtag

SEQ ID NO: 22635 - DNA, 135 bp, Zea mays
  Peptide Sequence Number=SeqID_66010
atgacgaggcaggcccaccagtcagcagttatccagggtgatcttggtagactccaccaagcccatcagttgggacattgcctcagctcgcacggcttgcagacgatacagggcattcatgcaccgcaccgttag

SEQ ID NO: 22636 - DNA, 966 bp, Zea mays
  Peptide Sequence Number=SeqID_66011
atgcatcgcgcccttccaccttccgagcccccggatggggagcgcccgcattgcttttgtctcactgtcgttggaggaacgcaacttcgcggaagttggtacctttcagccatcgctcggcttcaaggattttcatcaggcagcccggctgcatcccctcgccggtggtcacccaagacggtgaccaccagttcgatggtggggagaagcaagccgggctgcggcctctgccccgccctcagtttcaaggatcttcatcatccttgctggggcggaggccgggctgagccggagctctacctcccgcacgggttcatgggtcaccttctccctcagtactcaggggagagggcgctcaccggcctagcggaaggggcggacttcgacaacgcggggtcgagcggccgcaagcgtcgtcagctcccgcgtgcccggttcgctggctcagctggctctggcgcagcttccggtgccaccttccaccgctgggcggggtgcggctatttgcccgtctacgacgcccctgcgcggaggtcggtgttcgcccgtccgggaggacccgagtggggatctgccggtgggcagacggctgccgtcgtcggtgctgaggtggtggcagccgaagaagtcctcgtcaccgacgagatcgccgccaccatccgcgctctgggcctctggctctttggctttgatagcttgtcctcgccccttgagtggggacgtgggcgaggaccttatcgcagcagtgtctgccctgaggtcatcgctgctgctgtttggccgcccggagcggaggttgttgtcgcagctgccggagtgggcggcggcgagccacctagggtcttgtcgtcccgtaggccctccaatgtgggaggttgttcgtacctgcgggggtggaaccggagttccatctgtaacagcaccttgagtgtcggtgtcttgttcattgcggctgtcggggcctga

SEQ ID NO: 22637 - DNA, 894 bp, Zea mays
  Peptide Sequence Number=SeqID_66012
atgcaggcagcatgcaaccgcaccaagggggtgcaccctttcgacttcgacgcgtccagcatggaggcccaggcccacacgtcatgcgggcggaagcagcagtcaagtcgtctgcaggctcacgtcccctcctgggatagcgagagagccctctcccacggcgtgaagacgatgcacccggaccgggaaaggggatactctgaaagggatccttctccacgaaggaagcgggccccgagccctcctactgatcagaggttcgaaggctggcccctcggaagggttcgacagccgcctcagagcactcgggctccgcgcccactactggtcagaggttcgaaggctggcccctcggaagggttcgacagccgcctcaggctactcgggctccgcgcccactaccgatcaggggttcgtaggctggcccccaaagggttcgacagccacctagagcacgcagagcgagggatgactctgggtatgtccgatacatggccgaggctcgggctacgctcccgaggctcgggggctgctctcacaaacccggctccggccaaaccgttgacagcgtcaaaataccagcccgagaactcggaacctgactatgcacccgggctacagccactggtaaaccccatcagcacaaagccgcaaaggcctgatgggcgcgattccggtcaaggctccatcaactcaagggacgcgatctcgcctcgcccgagcccagcctcgggcaggaacagtagaccaaggcagattcacgcctcgcccgagggtctcctcaagcaacggacgcaccttcgactcgcccgaggcccagcccaggcaggcttcgcggagaagcaaccttggccggatcgccacgccaaccgatcgtatcacaggagcatttaa

SEQ ID NO: 22638 - DNA, 93 bp, Zea mays
  Peptide Sequence Number=SeqID_66013
atgaccaagaccgaaggccccagcacagggagctacattaggaaggcctattcaatgaagatggatgtttgttttttaataagggacaagtaa

SEQ ID NO: 22639 - DNA, 384 bp, Zea mays
  Peptide Sequence Number=SeqID_66014
atggcgctggggttgccaagtccagagaaatcccaacagatgctggggtcgtcgtcttcctcggacccagagggacatgaactcaagactcccgaaacggagcaccgtcccgggttggagaggttgctggagactgcccatctggagcttgacgggaagctgttcgtcaacacgcagcaggcccctacctggcgcgccaactgtcggcgtttcgagactggggggtccctcgggccgacgagtgagtgtcgccgagtgccccagcccagatgggtcgagcgcgaaggggggagaagcgaggcgaccggagaccggtgtgagagaggtgggaatcccgcagccttcgtgttcgtcccacgcccaggtcgggtgcgcttgcagtag

SEQ ID NO: 22640 - DNA, 507 bp, Zea mays
  Peptide Sequence Number=SeqID_66015
atgaggcggaaagacggcgggtatcccccatccgggggcttggaaggtggaaagacacgatgcatgagggagcgcgaaaacatggtctacttccaagggggtcaccctccttttaaaggcgactatccctacctgcgtccccagccgtcacgggctgagtcttctccaacacgctccaaggccctcccctgcggcgcgggggctgggtcccgcatgtcatgcaagccggctcagagcagaagaagccaaaccgccgcgcgcggtgcacacgaccgcccagcgggaccgggaaagggggataccccgaaaaggatccttccccgtgaaggaaccaggctccgagcctccctactgatcagaggttcaaagactggccccccgaagggtttgaaagccgcctcagatcgcgtgggccctacacccactactggtcagaggttcgaaggccggccccccgaagggttccacggccgcctcaggctactcgggctccgcgcccattactga

SEQ ID NO: 22641 - DNA, 2073 bp, Zea mays
  Peptide Sequence Number=SeqID_66016
atgatgattacagctaatacattatttggttacagcaagtcaagccaggagtgtttcagtgttgacattccctctgcagaacagcctaatccatgtccagaagttggaaatcctccaaatgttgacagtcaaaatttgaccaatgaaacagttcagattgattctgatgaagatgacttcatgccagctctgaagaagcgtaatgtttctgaaagccacacaagagtgttaagaaaagtcgtgacaaagaggattaaacatgaggagctaccccgacagaggcttaatgtgaggtgcaaccctcaagatgtcattgcaagcattaacattttgaatgaaagacaacgtgaggctataagacgtaaaggtttctctaccattcttgatatgacagtagatgcgctgtgcagtagatcacaccttcaatggttgatggacaagctagaccccaaggatatgacaatacgtcctggtccaggaaaggaactcaagatcacaaaggacattgttcatcttatccttggcgtgccaaatcatggtggtggtaaacctttggggattgacgaagcagttgcagcaagcaatttgagggcagagcttggtgtggccaaagatgagttcaatgtgacatttctacaggatcgtttaaggaaaggcgaggatgatgacctttcaatcatatgtttcttcctcattctattcaaccgtctgctctttccaactgctagctggggcataacatatcatgaggtgcttctcacagaagaaatgcaccgtttccatgagatcgactggtgcctgttcatttttaatgatctatgtgaagctgcgaagaagtggcacaaccgaatcaccacaaatgtctccacgactatatatggatgctccattgttgtccttttgtattacttggatcacctgcatacagccgctgccccccaaaataagactggcacacctcgcattaaattctttaataagaatagcataaaagctttgaccaaagctgacaaaaggaaggtacgccatggggctgaacctttcggacattgtgaaccggagtgcaggaccaatatttttgatgcaccgcgccctgcccccatgcctcggccaacttttaacatcaaacttccatctatcaaagagatgatgtcaagtaagatcaacgatctcccacatcgtcatcgatctaaattcacagatattcttgctgcatatgacttggaggttgacaagtcatgcatagccataaaagacagcattgacaaaattattgagaagcaatacgacatagcacacaagtttatagaattgatagacgaggacacactgttgatgccacccagcccacaccccgatatgccatcccaagcttcgcagctcgagacccagctgggtggtactcagtttgaagaaattcatgaaagacaacagcatatctgtagagtgcttgagacgtgtcccgacgaatcggatgtggtttcagatcaacagagaggtgaaatggcaccagaggaaatggaacacaatgacagtgggccagttttttaccagaccccaactcctcatgatgatacactgaaagggacaacaaactctggatctgatccaccccttacagagcaagagtgtgttcgttctctgtgggagttaatttgttccaaggacattgaccaaagcagggttgtcatagattatggtgaatacagtgcaaactgtatggatatttatgaatctttcgcggagggcaaatgtcttgagaatgtcttcatgcagtgtttcattgagtgtgttcgtgatgattccaaaaatcatcgtcgaagtctgacatctaacagactaatacttgatgtcaacgttggggctctgttaaattttgaagagcaggaacgtcacagcaagaatcctcagccgtttgatcaaaatgtgttacagaattgcttgcacaacacattgcctcctttggtaaatctggataaatgcaagtcggtgtcatatcttctttcaatcaaccaaacaattcccgagacctacgtgctcatgcccttcatcaactcacattcaatcgcatga

SEQ ID NO: 22642 - DNA, 357 bp, Zea mays
  Peptide Sequence Number=SeqID_66017
atggcggagaacgtggaagcagtcgggtcggcggagagcgaagaagcagaagcatcggcggagaaggtagggttttctccggtctggactccggtctccggatgcagcgacgcgaatattggagcgaggattagggacaccgaggacgcgccgctcaaatgccgtttgcgactggatcgacagcgagcggcgaggggttggaagagtcgtcggaaaggggagcggagtcgccggggatggaagaatcggcggagattcccggagtcgtggcggggttggggttttgcggttatggaaactgagccgggagcaaaggagctaatcgcgggagcacgtcagtatttatatggaaactga

SEQ ID NO: 22643 - DNA, 123 bp, Zea mays
  Peptide Sequence Number=SeqID_66018
atgacaggaccagttgaaccgccccctgacaactctggtgacctgactgccagtctgattggcagactgcagatggctccccctaaatgtgtgcacgaatatgaatccagtgttttgacataa

SEQ ID NO: 22644 - DNA, 327 bp, Zea mays
  Peptide Sequence Number=SeqID_66019
atggggcagagatttacccggtctacgttcaccggtggtcgggcgaagtccggcgaccgtggactggcttctccggcgaagcaaagtccgattccttgctcggggagctttaccgagaacgtgtcgaacacgtggaggtgttcttctgcccatgttcaaaagcttgctgagatcgcaaacgtgcaaatcttggcaaaaatccggcgcagacctcttcctgacacctatggctatctcttggggtgccttaggtggtatgccacatttttggtatacaacttaggtggttttggtgccatctacaaggtgaacacggtggatctttag

SEQ ID NO: 22645 - DNA, 909 bp, Zea mays
  Peptide Sequence Number=SeqID_66020
atggactactctgcactagcagggtcgcgttggaagctagctccgggcagcctcaccagcggcggcaaccaccactactccgagcggctcgccagcgaagacggccacctctgcaccgaccgctcgccagcggcggcggccacctttgcactggtggctcgccaacggcggcggccacctcagcgcgtgcgaagaggtcctcgccctcatcctcctatggggatgaggacaagaccatccaagaacgcgtccgccacctccacggcatacgacgtcttgtatgaccccccgggcggcgtcggagcagtgtggccggcgacgcaggggacgccacggatgcggcagacctgcgcatggcgcgactatcgcccgtgcggtggacggacagctgcgccccgcttggtggtgggaggcagcgttggaggcggcgccaaagccatcaaagccaaagagatggagccgcaacatggctcgcttcccaccccgaagagttggggggcgcgtgggatggagacgtggctcagcccgctgtccaccttcacgaggttggtgatcacccttccccctcgaatgctggaggaagaagcgggaaggggcgtcgcctccacggacatcccgcgaagagaggtcgctgagaagagagacaccagcacaagtcctcccggcaaataccgacgtattccatccaagcgggcggtataccatttcgagcactcactcagtttggatgcgctcggcatgaagttacaaggccatggtaaactatggcgacaaaaagcgagaaccttgaaggcaaaggggcacagagagctcgaaggtgtaacaccccaggtgttactatggccatggcacatctatgcactaatgactgtgatcacatgtggaagaaacttaaggagaagagcataa

SEQ ID NO: 22646 - DNA, 600 bp, Zea mays
  Peptide Sequence Number=SeqID_66021
atgcccccggcagccgagcgccccggtgcgggtgtgctcggacgcggccagttaccggcgcgggcactgacgctcggccccggcggcgagcagccccggcggcgagcagccccggcggcgagcactgtcgacctcggcttcggcaagggtggccaggcacccatcgaggcgcacgactccacaccacgggcggctccggccagcctggccacgcgggcgcgcgagcacgccacagccatgcgggcgggcgggccattcccggtgcaggccagggtgagtgcccctgcgcggactgccccgcggccttgcgcggatggcctgccggccgccggcctcggcggaccacagcggtcctcctcgggcgcggctcctcggctggagcgcttctggcggctcggccacggcccagccggcgtggatagggtgcgagcgctcctcggcgcgagcaccctcggcggtggcgcggtgaaggcgcaggtccggcggcggctggggcgctccctggaagacgacggctggggcggctgggccggcgtgctggccaccaggccgctgcctggcccgcctggcaggccgcctgggctgtttctgaggatctaa

SEQ ID NO: 22647 - DNA, 525 bp, Zea mays
  Peptide Sequence Number=SeqID_66022
atgggtaacaggaaaagggaaagagagagaaggcggttctccaccatgctttgtgctgtgcaaaaaggaaaagccacagttacatatagctttgtttgcatgcttcattctccttcgtcaaatctgcaggtcagtgtcccgagtcacagcatgctgaacatcgtcacagtccgttgtgggcactgcactagcctgctgtcggtgaacttgagaggactcatccaatcacttcctgtccagaaccaccactactcccagcagcaggagaatttcaccgtccaaaatatgggttttactgaaaattaccctgagtacgcaccttcgtaccgcatgccaacgacgctgtcagcgaaaggtgatctggatcatatgctgcacgtgcgcggtgtcatatcttctttcaatcaaccagacaattcccgagacctacgtgctcatgcccttcatcaactcacattccatcgcatcaacaaggtgttgccacttccattagatatccagagatttatgtttgcgcgcaattag

SEQ ID NO: 22648 - DNA, 1023 bp, Zea mays
  Peptide Sequence Number=SeqID_66023
atgggaaccgaagggccacgagtgatgctgacagatcaagatcctgcaatgccagtagccctcgagagggttttcccacacacaatacatcgtttatgtctatggcatgtgcaaaatagcaccaattcaaagtcacagctgatgaagatgcaggaaagtatacttgtgaatgcaaacattgggaacatacagattgaccggataccgaaagaatatattttacaaagatacaccacctctgcaaggcaagatgttccgttttcaagagatgataggaatttgaaggggaaggatggagaaactaagtcatatagacagaagatgttgcttaaaaaggcaatgaaagaaaatgatagagccctaacagtaatggatgagcttctcgaagtactttcgcgtttggaaacagatatagacattgaggaaacttgtggaactagtggaggagatggtatacaggacgatgatgaagccaatagagacaacgaaaaagatgatgaatttgacgaaagaaataacaaggaaattcaagacgtatctaatatacttgaacaaggtgtggccaatgatcaaatacatataccaatacgtccattagaagaggttaatttgcatgatcacgcaataatgaatgttagtggtgtcagtgaacaaaatgataatgccagaaagaaactggaatttgcagtcgatgggataagcttggcaagaccaagtaactcaaaacccaaaggaagaacaataaaggggagtgaagaaagggttattaaattgggagcaaaaggtacaaagaaaatgaccaggaaatgtcagaagtgtggaattgctgatggtcacaacagtaggacatgtttgtcaatggaggaaaatagacaaaggttggcaagccttgctggacgtaagagaggacgacctccaggatctaggaacaagggtggcagtaaagctcctgattggaatgagacaacaacatcaaaaaaacacgcaaatgatttcgatagtagtgagtcagacagtgattag

SEQ ID NO: 22649 - DNA, 681 bp, Zea mays
  Peptide Sequence Number=SeqID_66024
atggcacgctcacgcggtactggtagccatggactgcttaggcaagggaacgaggagtacgacgccaagagagaagcgttgtatcagcactaccaccccatcgagatctgccccgacatcccactctcggagaaggccaagctcatggaagaatggtgggagaagactcatggtcttcttattgaaggcggtcttacatacgaagctatcacaaaatctgtctctgatgccgcaattgctttcagagagggtgtggtggagctctttgagtacttggagaattcttcttgttgtcttgttgaagagagagagattccagtgctggtattttctgcaggacttgcagacataattgaagaggtcttccggcagaaattacacaaaacattcaagaacatcaaggttgtctccaacaggatggtgtttaatgaagaaggccgcctcatagcatttaaagggaaaacaattcacgttctaaacaaaaatgagcatgccttggacatggctgctccagtgcatggcaatccgggggatccaaacggatctatggatgactattcattggtgaagaaaaggaccaatgtgctgctacttggcgatcacattggggacttggggatgtctgatggtttaaactatgacaacaggatcgctgttggattcctgttagtaactttttga

SEQ ID NO: 22650 - DNA, 609 bp, Zea mays
  Peptide Sequence Number=SeqID_66025
atgggtgtgggcaagggacggcttgtgaccgcggttggaggtgagcggttgccttcttcttctataaatagtgcctttgcctctctggttatttcacatctcttgctgttcttcgctgcttgctttcttcctctccttgcatttccaccatgggcaagaacaacaaacgcaagcgcgagccgactcctccgtcagaggacttttggcgactcggaatactcagaggaggagttctcctctgagtccgaggggtctccggctcccgtctctcccccagcgtcgtccgatgactcggacgactctcaggggattgccgcggaggtctggacgtacatccgggccgtcgagcgctccgggctcgagggctcggatgagtcagagtactcctcggatgaggaggactcggacggcggcggcgaggacgaggacgaggacgacgacgacgatggcggcggcgacgacggtgacggtgacggtgacggcagcgacaggggcggcaacggcggcagcaggagcggcaacggcggcagcaggagcggcaacggcggcagcagcaggggcagcagcggcggcgacagcagcaagggcagcaacaaggccagtggctaa

SEQ ID NO: 22651 - DNA, 138 bp, Zea mays
  Peptide Sequence Number=SeqID_66026
atggggcgccagatccaccgaatcgtctacgctgagagcataatcctcttatttctgcccgatcttgatcgtcgaatccttggcctcatggctgagcccatggacccttctatagagtctcctatccatgaagtttga

SEQ ID NO: 22652 - DNA, 1914 bp, Zea mays
  Peptide Sequence Number=SeqID_66027
atggaccccaaaacctccacctccacctcccccgtcgtctggacccccactgcagcggtgctggagcacgatgagccctcctccatgcacgacctgagctaccaaccgcccacatttccctctgcactgtctcccggactcgtcgtccctgcgtcatccggatcagggtcgtcgtcctggtaccagcagatcccaccctcgcggggtgtggcggtgtggaaacgctcccactccatccacgcgcacgcgatgtcgtcgcaatcgcaatcgtccctgccatcgtccgtccccacagccggcacactccctacggtgggttatgatctgttgggcagtcgagaagcggcggtggccagccatttcccgacgctccttggaggacaatgggagcaaggggagtcgtcatcgtcgagggcagcggagatgtcgtccttcttctcgccgtcgtgcgctggtggcctagcgccgcagagcagcaaccacttgctcgggttcacgcagccttcatggggttctgagctagccccacccccgctgagcttgggtagaccttcccatgcggtggaagagcgtcccaccatcgacgctccgccgccgccaatcgaggatgatgaggaggaggaggaggaggagatagatgtaagtgccttccttgcctcggatcaagaggaccaaatgccaaatgcatcatggccgactagtccccacatgggcggcggcgctggcagggaaggaagtgcatcgtggatggcgcctgggagaacctgcaacaactggccaccgaagctgatgacgccagcgacggcaagcacgtgcgccatgcacatgctaagcaccagctttggcagcatgccccggcactccggcgactcgtccataggtgtcgccacctccaccggagctgtgataaagccaccgttatcatcccagctgtgtgccggcgctagcagcagcatctttaacggcttcgcgcagccgtcctcgagttctgttctcgccccacgtgcaccaaatctacaagcgcctctgctgccggcggtgaagcaggagttcacggcggagcacgtcgacgccacaacacgccgccgtcatcctgacttcgtatcactcgtcgacgacgacgaggatgggctttatgaggatgctatcccgttctcgtcttctagggccagcttaatatctctaggctcaggctctgccctaaatgcatgggcctgcacgagcagcagtggcgacaaacagggaccaagtttaacgccggaagcagagagtaggcacatcaacgactttggcagctccacctttgctccaggcagctggccgggaagtagcagcgacacccttagcggcgttggtcctgttagcgggggccaccgccctagctttgctgcgagcatgccgtgtttcaatcgaagcacgtcggctgacgtctccattggaggcaagatgccaatgccatctactttttgtttgccaccaccaccaacttctcgaatggcaggggcggctagggctagcagctgtagtggccatggcgcaggtatttttttcacggatgctgagatggcgatcatccggaaggagaagaacctccaagaacttttgagaaccaataatcctaagaaggtgaagaggattctttataacagagcgtactccgcaatggcaaaggcacgcaaggtaatgcacaccaagaaccttgagcgcctagttgagacactggagcaaaagcgcaaatccttggttgcacaattgcaatccctagagaagggatctgctgcgctcagggcagaaaagatggagatgcaaatgatggttggggagctcgagcaacaaacgatgttcaaagatgctgtgagggaattactaaaagcagagatccaaaaacttaaccatctgaagctcaattactag

SEQ ID NO: 22653 - DNA, 960 bp, Zea mays
  Peptide Sequence Number=SeqID_66028
atgtccggtgcgacagccacgtcaccaaaagccgttgggttcgaccgttggagttctgtcttctgggcccgcctggatgtccggtggcgcaccgggacatgtactgtagactgtccgggattgttcttgagcaaggctttgaagaacaagagaaatgttgagggcaaagccacccaaagggaaatagttaagctgaggttcgaggtttttgagcttcggtttgattgcggagggaaggagaaatcatttaaaatcctagaaaaagattttattgaaagtcgaatcgaagttcgaactatctctaaagagagtaacaaagttaaggaaacaatggtaaagaaaatatcagaactcaaagcttcagatgatgagaaggataagcgcgtcgcactactcaaagctgagctaaagcaagcaaagaaagagtatgagactgaaactactagattaaggcaagtatccgtcgaaacgactgttaatcttagggctgcccaagtgaagatagaagaccttaatgatgaaataaatcaaacgaggcggcttaatgaaaattatcgaattctgatgaccaactgctatactctaggcaataggtgttgtaacgagctgatgaagaccttctcctccaccggagccaaatctcgagagaaaaattttacgggtggtgacttggaggggatgatgcgaggtggaaaggaaatcagcattgatgaatcaaggaagaatatggagaaggcccaacaagcagctgaaaaagctatagacattagaaataatttgcaaggcaagaaagccgaagaagtttctactttacaggtgatcattgaagtaaagcaaactgaagccaaagctaaggatgctgctattgaagccgaagcggtagctgccagggctgcaaagaaggccacaaatgatgttgttcttaaaatctgtgagcagatctatgatgagatgatgtag

SEQ ID NO: 22654 - DNA, 834 bp, Zea mays
  Peptide Sequence Number=SeqID_66029
aaactggggtgtggcacatcaatccccgagaagtacgccataggcgggaagaggcgcaagcgccggagcatcatacaggaggaggtggccgtgttcgtgcccaccgtccgcgtaccagtggcttctgacgtagctcatccgctcgcaggaatggtttccgaggatctcgtcgtcggtcgcctctccagccgcactccgcgctcacgtggtcgcgctggcttaagagatctgctggacttgattatgataaacggttctgatttactcttttcttttccaattggtgaccttctgctatggaaagattatgcagacgtatcagctgttcaagaactgcagcatgcgttagagggagtacttttgccggttgttcttggtttaacaacaacgaaagagagccgtctcgaatcgtcagtgcagttcagctggaagaccttagatgatgaccaggctaatctattactccttccaaagaacagccaaggtggtggtgaaaggaaggtgtcagaagatggaaagaaggatgccgtcggttcattgctcagcgcgtcaggatgcttacactactccgtgcacggcatactcgttcaaatacctgcacaagtcaagtatgcactcaccctccaatgcacattagccaggggtagggtacctcctccttggggtgtcatgaaaaacatgcacaaggaaatcccagacgtcgcgtgcaagaagttccaagtgtatcggcagggtacgagttgccgagcactgattcattctgggagaatgctaatggccagcctcagattcagagtgccgaggagcatccgaacgatgacgaagatgaagtag

SEQ ID NO: 22655 - DNA, 72 bp, Zea mays
  Peptide Sequence Number=SeqID_66030
atggacttcatggtgtttgaggttgctgaattagatggagcaacaatgatttgtcacactaacgaaacttga

SEQ ID NO: 22656 - DNA, 717 bp, Zea mays
  Peptide Sequence Number=SeqID_66031
atgtcactacaagaactaagactaagagatgccactaaaagaactaaatctaccgattcttgttctttcaaaagggaattaggtgtcagctgggatgttgaactgtatggagaattgctcaggataggtggtggaaaggaaaggatgacagcttacttcaaccagacaggatggccggctaaagcaccaaagacagatgacaaaagaaaggagttcatagcttctcttcacaagaggaaaacagaattattcatggccctaattgagaaaaagttgcttcctctccgtccaggtgttcaaaggttaatcgatgaagctttaggaaaggcagttaaagttgcagtgtgcagtacatcaaatgagaaagctgtttcagcaatagtgtcgtacttattggggcctgatagagctgataagattaccatatttgctggagatgtggttcctcacaaaaaacctgacccagcaatctacatattagcagcaactacacttggagttgatccacaaagctgtgttgttattgaagacagtactatagggctcgcagcggcaaaagctgccggcatgaagtgtatcgtaacaaaaagcggctacactgcagaagaggacttcgagacagcagatgcagtgttcgattgcattggtgacccgccagaagtgcgcttcgatttggatttctgcgccaagttgctcaagaaacaatatgtgagctga

SEQ ID NO: 22657 - DNA, 1551 bp, Zea mays
  Peptide Sequence Number=SeqID_66032
atggctggcctgtctctacagcatcccatggccttcgccttcggcctcctcggcaacatcatctccttcatgacgtacttggccccgctgccgacgttctgccggatctacaggaacaagtcgacggaggggttccagtcggtgcctccaaacgagttcctgctcatcaccatcaactccgccggctgcgtcatcgagaccctctacatcgccacctacctcctctacgcgcccaacaaggcaaagctgttcacggccaagatcctcctcctcctcaacgtgggcgtgttcggcctcatcctcctcctcacgctgctgctctccgcggggccgcaccgcgtcgtcgtcctcggctgggtctgcgtcgccttctccgtcagcgtcttcgtcgcgccgctcagcatcatccgccaggtggtgcgcacgcggagcgtggagttcatgcccttctccctctccttctcgctcaccgccagcgccgtcgtctggttcctctacggcctgctcatcaaggacaaatacgtcgccctgccaaacgtgctcggcttcaccttcggcgtcgtccagatgggcatgtacgcgctctaccgtaacgcgacgcccagggtgcctgctgccaaggaggcggcggcggcggcggacgacggcaacaccttcaacttcaaggcgcccggcgagcatgtggtgaccatcgccaagctgaccgcagcggcgcctgcgacggcggcggagcttatcatcaaggcccgcgacgacgcgcagcaccccccggaggaagaagcagcagcagccaaggcggcgccggcgaagtctaaattattaatccccctcccagaacatgccacggccccggcgacgccgtacgagtcatgcaatgcgtcgtcggccaactcgtgctacgactacggctacgccagcggggagctcaacgtcgaggagtacttccaggagtacgcggacggtctggcgctggcggaggacgccgctgcgacgccgagaaagtcgtggtccaggaggctacggttcatgaggcagctcaacctgggcctccggctcagggcgtccaaggtgtacctcaagaccatcttgttcgcggccaggccggggagcccggctaacgagaagagcgttcttggcgcggcgacgacgaggggcgcgcgggaggagatcgccgcccatggccacggccacctcagggcgtggacatggaacccgttcacccagaccagaatgaacaccaggtgcgtcgcctctcacggtggcagcagccgcgccgctgccgctacagggcggtgcaaggaacgcgagcacggggcgcacaggcactccttctccagcgtcatcgtccgctactctccgtcgaacaagacgtcccccgtcccctcgctgtcgccgtcctcgtgctccttctcatcggcctcctcgtcggtccggacctcaagcaggtcgtccgacggcggtgtggggccgacgctgaggaggagcagcagcgcgagctcggaggtggagaaccccgtccaagggctcatcgcctactgcaagaggtcctag

SEQ ID NO: 22658 - DNA, 129 bp, Zea mays
  Peptide Sequence Number=SeqID_66033
atggctagtgccgacagtctgacacatgagccaactctgacacattggtttatagatcatgtgttggaagatctgatggctataggaaacatatcaggaaaccagtgcagaccatttgtttgtgactaa

SEQ ID NO: 22659 - DNA, 822 bp, Zea mays
  Peptide Sequence Number=SeqID_66034
atgtcttcttgctcccttatgcgtcgcgtctttccaccttccaagcccccggatgggggcccggctgtatccccccgccggtggtcacccaagacggtgaccaccagttcctgggtggggagaagcaagccgggctgcgatcttggtcccaccctcagcttcaaggatgttcatcatcctcgctggggtgggggccgggctgagccggcgctctacctcccgcgcggggtcgtgggtcaccctctcccgcggcgttcgggggagagggcgctcactggccctgcgggcggcccgaacttcaacaacgcggggccggtcgacggtgggcgtcgtcacctccaccgtgtcgggctcgtcggcttggctcccggcggcccctcccaccggagggcggctgccgcgccgtgccggtgccccactcgcccgggaggatttgagtggggatctgctggggggctgatggcctctgccatcggtgtcgaggcggaggcggctcgagaagtccccgtcaccgacggggcccaccccatggagtggggttgttcgtacctgcggagggggaaccggagttccgtttgtaatggcacttcgaatgccgactcgcctgttgattatctgaaccgcttcaccaagcatgagtcgccccgtgtcaaggtgacgagtgagcacgaacagaggcggagttggctcgaaaatgaaaacctggttggccggagcctagccgggttgtccgtcagcgggaccgatgtcggagttgatcagccgaggcctcggaccgggctggcgccctcggaggatggttggccgaggcccctggggtaa

SEQ ID NO: 22660 - DNA, 732 bp, Zea mays
  Peptide Sequence Number=SeqID_66035
atgggcgcacggggccggcgggcggagcacggggcggcggcggccggcgaacggggtgcaccgacggcggcggcggcgacgcgcgggcagagagaaggtagcgcgcgtgaaaatgaaacggcgcgcggggtcggatccgcgttaaaacgccttatgtccgacggttatggactcggccgtcggactgttggtgataagccaatgaaacaactcaatcctttgggtgccgcctatcctggtgatcttcaggtggcttccctcgagtactcacagcaaagagcttttagtggcgtctcggctggtatgtcgatcctaagacaaatcctaggatctcttctccctgacggggtccctcctaggagccagatccaggtgctgttgccgaacttcgccgcctctacgcacacgctgaccattcgaccaccaggcgggcgggaggatggtctgggcttggagcgacagcgtcctaggttctggcctggtggcgcggcggatgtgaggatgagccacgagaggatggagtcctggaggacaggggagcttacacttgggaccatgcatgttttgttgattggaaaccttgaagaggaccagcaaggacttgggaaaggccaaggtgtcaaggaggagaagcaaaggctacaacaggaaggagatccagtccaagacttgagaaaggcccaggtgtcaagtaggagaagcaaggacgactacaacagaaaggagatctag

SEQ ID NO: 22661 - DNA, 210 bp, Zea mays
  Peptide Sequence Number=SeqID_66036
atggccacggcgagatctccgttccgcggttcagttgtagccatcagggggaagatggctcctggcgacaaggcccacaagtcagccaccaatgagggtggggccactgaactttccatgtggtatgacaaaaaacgtttcctcgccacgtttgctctagcggtagccctctcatgtttccaccttgcctacaccacacttcgagggtga

SEQ ID NO: 22662 - DNA, 714 bp, Zea mays
  Peptide Sequence Number=SeqID_66037
atgggcgttgtcgttagcatgtgtatatttcagctcttccagaacatcaccggcaaccttgaagtcaggaggctccaccggggacccgaaacattcatcaaatttagctctgagccccggctgcctcacccggtcgcccctgacctggcgaccaaagccgtgtggtgcctactgcctaccgagcccctctcctcggcgaccgtctctctcttcctcgctctcgccgacggcagccccatccaagccctcaacgtgcgcgccgctgtaggcgtcccacgggcaaaaactccagaggaaagagcccttgtggacctggaaacacactatacgaagtcgtttgcaaggacgctggcggataaatcccatcttttctgcgagcaagagaaagcatggggacgttccatcggcgacctccaagcggcgaggagtgaggccgcagtagcccgcactcatgccgcgtcgatccagaaggatcatggtggcctaaccgaggcggtgagaagggacacggagtcggcggcctttgcgcgccttgaatgtacaaaggcagtttcccgcctccgcgtcctggagcaagggaaggaggttgctgaggccccgcatcgcggccttggaagaggaaatgagcggccgggcgcgctccgctataattcaccggacagtccgatgtgccaccggacagtccggtgcaccagcggagcaacgactatctag

SEQ ID NO: 22663 - DNA, 198 bp, Zea mays
  Peptide Sequence Number=SeqID_66038
atggccacgacgagatctccgttccgcggttcagttgtagccatcagggggaagatggctcctggcgacaaggcccacaagtcagccaccaatgagggtggggccactgatgtaattatggacatcactccacaacccatcacactcaatcaaagatccaaaccatacaatcataagaacaagcactcaagcgtatag

SEQ ID NO: 22664 - DNA, 705 bp, Zea mays
  Peptide Sequence Number=SeqID_66039
atggcgccgtggcgagccggatcggctgctgccggtcttcacaaggaggaagaatcgcttggcttcgccgtatccaccatgcaccagacccccgcgtgcgtcggcgtgcaggccggagcttcgccctgccaaatcgcgctgatgaccatcccctccggcgagcttgtaaaggtcagtgagcctatacttgaatacaacgtactgctccgtctcggtgtagcaggcggctatggcctggatggttatagcgtacgacggctggaggtcaagagcaggtaccacaggatgaggcgcatggaggatgctgtgatgaaggggtcgggcttccaaggccctgcccatttcctcttcgttgttaaggacaaagttaaggttctcgaagtggatcgtcgcttcggagatccgattggcattgcaactgatcatccagagcctagaaagtccgtcgagaacgtgcaaggcccctacctgggtgcgccaactattggtgtttcaaaccgccgctccgacaagtcttcaagtctcattgggcgggtgcggttgcctttagtcaagtgtcttctattctgtgtgcctctcccattcatcgtgaccaccctcctccttttatgggccaagccgaccacttatggcagaccaatctcgggccaggtgaggaatccactcgagtgggttcccttcgtcttgcctggctcccctctgtag

SEQ ID NO: 22665 - DNA, 111 bp, Zea mays
  Peptide Sequence Number=SeqID_66040
atggcctatgccaaagactatcacacaggaagcacatggaggtgcttgacgggacattctggagcaaagaaaatggaggacatacttgttggtcatttcttttggccctag

SEQ ID NO: 22666 - DNA, 1074 bp, Zea mays
  Peptide Sequence Number=SeqID_66041
atggcccgtatcaggtgcactgcacgtaagtctatgatcccctttttgccttctcaactggcggagcgtcccctacgtcgcacggtgtcaggtcagtccagtcacctggatagactgcattgtcgcctgcacgaggagcaggagcgccgacgccaggagcaggagcagcaggactcttccccctcacctcagcgggaggtggagtctgagaggccgccttcccctgcacctcagccagagatgccccttgcaccaccacagggcatcccggctgctggaggagaccctgacggagacggagatgacgacgccggtggcagttcgagccacagcacggagggcttagaggagacggagccggatggatggatcgctagacccatcactcgtgacgctgcttgcgggtgtcacttccacaacactctcgataccctgttgcatcaggccttcgaccgacacacttggtctatcgagtaccgttgtgtagtctaccagcatcgtcgcgggttatacccaaaccagtgggaggctacttgcttggtgcgccgtccgaacgatgatctccggggtgcagaggccttcttagagcactattctatcactgagagggacactgccgaggcagccatgcaggatgcagcacgacgagcactttctcagtattgctcgttgttcaacggggtagctgatggccttgacctgaagtactaccctcgccgttcgaccggcagtgctggaggcgtgattgtctcgccagttggtaagggcaaccccaggatgagcagcatggtcaacctggccgccgtgctcaacacagagttggaccacacccttgacgagttgggaaagatgtctgagaacaggcgtaaaggtgcaaggcatgctcagccagagcagcaggcaccccaggaggaggcagctccacagcagcatttgccaccgccacccccgatgaccattgagcagatgttcttgatgcaaactcaggcagttcaggcaattggtcagacattagcagcaatgcagcaggttcagcagcagccaccaccgcctcagcctcaggtgcaagtctag

SEQ ID NO: 22667 - DNA, 282 bp, Zea mays
  Peptide Sequence Number=SeqID_66042
atggcggaaaaaggaaccgacttaaaggggaaaaggctatctagtcctcatagaattgtatataagttaacaatatatgtaaagggcatgaatcatttgagagcaagtccccaacattggcgaccacctccggtgaaccctctttccgaccaccttcgtcgagcactgaccttcttcatgccaccgaagaaagcttcagcgacaggggctaccgcactgcagccactagacccgaaccaggagaccctttctcttcgagaggcccaaagccagaagaggtga

SEQ ID NO: 22668 - DNA, 600 bp, Zea mays
  Peptide Sequence Number=SeqID_66043
atggtggagctccggctgcgcgagaatcactccggtgagcacgggccggctaaaccagggagggaaggggcacaccgaagggtgtcccgagcatgtgacagtgaggcagagctcccgtggcactggacggggcgcgaacgcgacggtggtcgcagaacaggtggcggtcggcggtgggcggtggcggggctctctgcacacgtgggtagagcgagagagagggcgagggagctgggcagagggcgcaaatgggcgaggggaggtgggcgagcagggcacggggctcaaaaggggcgcgaggtctcggacgtggccggagaacgcacagtcgtgggcgcgtccacggcgaggagatcatgggcgggaggttggggacgagctgacagggtctcttatgctattctgccatggcgaaggggtacgggtagacttcaaccgttggatcggcatttgagggctcggattagatcaccatcatatgtgaaccggtatccaatccgggccgcaggattcaggatccatggtccagatttcacggagaagggttatgtggtcgctctaatctcacccgcacatcgtccgatcgacgcccagatctaa

SEQ ID NO: 22669 - DNA, 363 bp, Zea mays
  Peptide Sequence Number=SeqID_66044
atggccagatcaatggtccaaatcactcaacgatccccatctaatctagaccgcccatgcaagatcggacggaggaactcccttcactgcccacgcccgaccaacccaccagcggcgcggtcacctagcgcggcggcgccatggccaagacaccccaaagctcaacctcgtgcacaaagctctgatccgagaagccctacacgatgccctaagcaaggtgaatgcgatgaacgtatacgtaccccacagtgcgccgcagaaagccctggccacggtgagcagcggatctccaactccggctgggagccggcacaaaattatgacgattcaccgcacacgatgcaccgagacaccactgcatag

SEQ ID NO: 22670 - DNA, 189 bp, Zea mays
  Peptide Sequence Number=SeqID_66045
atggcaaagccaactactcctctggtttatctaattaatcagctaagggcgtcccattccaccctcatggttccactattatcccgggttgttactccccaaacaggtaccttcgaagacagattgcgagtatacaagaacatggttaagacgaagcttgactgggacggcgatcacgacgaaggataa

SEQ ID NO: 22671 - DNA, 156 bp, Zea mays
  Peptide Sequence Number=SeqID_66046
atggtgttggtctgtggacaacaatccatggggattggttatctacgaggttctctggaggacatgattgctggagtgacttggccgtccaccttaccaccgggttggactgttgagtgggaccctgcctcggctgaggaggagcatgaggagtga

SEQ ID NO: 22672 - DNA, 324 bp, Zea mays
  Peptide Sequence Number=SeqID_66047
atggggaagcctgtcccatcactcctcatgctcctcctcagccgaggcagggtcccactcaacagtccaacccggtgcagatcagggctcaccgccttggcgtacaatgcctcactgaccccgactggccgtcgtgcagtgaccgcacttgtacccaccataaccggaatgggagacctcgtctcaggtcgcgtgaggggatatgtccactgccaggttcactcagaccaacacaattatgatataaaaaatggatacaaccaatttcctgatctcgcgcgagtgctagaaaaatcactcgacttctaccgagatcctacttaa

SEQ ID NO: 22673 - DNA, 693 bp, Zea mays
  Peptide Sequence Number=SeqID_66048
atggctttcgccggaggacctcccaccacacgccccaacgcacggagccaaccggcccgcgcgccgcacctcccgcctggcatgcgcacaaccgcaaacgccgccagggccactactgcccacatgccgacgccacacaccaccactgaggagccagatcctccgctcctcgccgacgcacggttgtcgccccgtccacagcgtagtctaggtcgtgaggggaggggcggcgaagaagagagcgccacccacagcgcctacacgagccccaaaccaacgccgctgccgacgcaaaccccacctgccgccagcgccacgcgcccatgtcccctcgcccgctgccgccagaatgccgtcgaggccctggccggccctgccgcgctggagaagggacgaggaggcggcggtcctgacggcgtccagctccacgagctggaggatgccgccggcagcctgctgccgggcgggcttcagctcggtcgccttgttcttcttgaagcaaaatcgccccgccgccaccttccttggatcgcgcggacatccggcggcgccctccgctcagtcaattctgattggcctaatcgaatatgcgctgcaaggatccgcgccctctccctctctcccagctctcagcccgatgtccctctctgcgccagtcttctactgtccacagctgcagcctttgcgccttag

SEQ ID NO: 22674 - DNA, 894 bp, Zea mays
  Peptide Sequence Number=SeqID_66049
atgggcgcgcctgccatctgcgcgcgcagagcgcgcattaaatgcgcgacagagagccgttggagcggaggtagccgttgctccgctggtacaccggacagtccggagctctgcctcttaattaagaagaatggaattgacccagttttaagggaaaccgggcccaaaacctacacagagcgcacagtagaaaaaccggcgaaggagctaacaaacaacctagacaacgacaggccccacactcagacacatctagagtcatcgttgccaagctcaaaaagagacgagcagctccgacatcccaagacgagccgcacactgccaaagcaacacgacgacgcttacatccagacatcgacgcaaggaataagaccgcggcgcgccatcgttgccaagcctcagcacacccacatgaggcagctccgattcttcaccacgagcaaagacccacaacgccgaaccccgggagcgagcagacgccaaaagcgacaaaggcccgaacaccatcaaaccaagcggagtgacaaagagcctccacaacacggacgaacacacagactggaggtctcctgggccgcgccttcaagaaggagaaacgacgtcgaaaagccgtcgccgcccgcctggtacaaaccaagcaaagtttcctccgaagacctagcagagcagtgtagatcgccagcagcaaggagaaagctgaagggtcagccacgccgatgtcaccccgccaagccgtcgcgtgatgtcaccttctgccgcccccccgacgcaccaacccaccagccccaaccctcagagccccaacgccggtcgagcaccagcgagagacctcaagaaggccgaggcgagggttcccgcatggggcgagaggtccaaagacggcaccctcaatag

SEQ ID NO: 22675 - DNA, 2544 bp, Zea mays
  Peptide Sequence Number=SeqID_66050
atgccaacaaaagttcaggttagcagcgaaaggaatgtgaagatcatatcaggtcgagatgggcaaaagaagggaaattcacagcatgaccaaattgtacgcgtgccaaaggacatggtcacaccagtcaatggaaatgtagatggaaaatttgaagataaagttagagttgtgaagaatgataagttccgaagacaacgagagtcttggggtggggaaagggctgcatgcatgaagggctcaaaaccatggcctggtcgaaaggcaactactgttgatgaacttgtcaaacatatgtcaaatgttccttcatatttacagcgtaaagaaacttctgagcatcttcaagacaaggcgctgaatgttggagttcttgagtggggtcttcttgctaactggtctcagcaacaaaagcatgagctcgctagaagccatggagcatctccatccaatactagcaggtctgtactattctcatctccatcacattcttctgcaagccccagcagcagatctcttgagagcaatcaatctaccccaattagtgactatcatcattcatccatccgagcccagcagagtaggctcgcagataaacaccatgggaaggccagatgttcgcctagcccaaattctgcggtactgagcttattgccaggtcatggcacacatccctgtcaagagaatggttgtaattatgttgacttggatctcaacaatgtttctttagcctcagactctctaggttcttcctctcgaagttgcagtagacatgaaatagttgaagatgaagagactagatggaagattgaagatgttgtccatcattgttctcgtaggctttttacagacagtgataacattgggaaacatttcttcacatcaaataacaaagattccatgtgtaatgatcctgaacagagcagtggcttggattgtgaaaattttgagtcactaatatctgatgctgtgatggatacagctagaaatggcagtaggtcacctgattgtttcttggaggatattgagacatcccgtgaatttcctcgaatcccatattcatgtccacttcccatcatagattcagcagctaaagagattggcaccactagtactgaggctggagataattttattggtacagctgcaaaagtaagtaagaattctagcctaaaccaatctgccctgaatgccactgagaatcctccccgatattctgcaaagtttagtgataggatgcctgatcgccatcaaggttctgtgatgaatcgagtgagccgcagctctagcctcaaggagtcaccacatgctcgacaacccaatgtagttcctcctgttgataagacaggagatcggtcatcacccaacagcaaagtcaataccaccaagcaatctctggacttagggggatcagtgccacagaatatgcagcgaagtgcaagatacatccagaaagaaaaggattcaacaacaacaagacaagcatttctgcagctagcatggaagaatggcttgcctttattcatgctgtcttatggcgattctgatatcctggcagccactgttagaaggaagggcatctctgaaaaggatgatctggaaagcacatatgctgtattcactgttgaagaacctaagaaaaaaagtggagcttggatcaaggcagggggcaagaacaagaaacaccaccttttgtctagcatagttggggaaataaaggttgcacgtcgaaaatcaagatgtcaccatacagcagatgttcatgtatacagggaatttgtgttgcttggttccggatttctaccatcatctgaagaatcgggtgattcacatgttagtggagagtttgcggcttttattagtgcacttcctcagcaagaagcagaaacttcgaatcaatcatcttcacagaataccagacaaaaaaatttagcactaactggctgtggttgccccccactgggaaacttccagcctagttctgcttcagccaatgttattgcagtacttcctgatggcttccatggcaaatcaacgtctgggcagccgttgcctttgattgagaggtggaagtcaggaggagcttgtgactgtggcggatgggatgaaggttgcatgctgagtgtcctcactgatgcggccgaagaaaatgatgccgttcaggctaaccaggcaaaggatggcagccagcgatttgaacttctagctcagggtggatcacgagaagataggcatgccttcagtatgacttcattcaaagaggggctttatacagtggaattcagatcatccattgcattacttcaagcttttgcaatgtgtatagtgatgctacatgggaggtaccctgacaggctgcaagttggttcgcaagcagcgcaggagcatgacctccttgctggtcatgaggtcaaggccatgtcgcgtagtgctggtgggattgatataccatggtcctcaggcccatatgcaatacgcatattgaaagtgacaatctcagaacaatcaatcggctttagaggtagctacctgtacatgttgtga

SEQ ID NO: 22676 - DNA, 1056 bp, Zea mays
  Peptide Sequence Number=SeqID_66051
atggcgcctcctattgacgtggtcggtccatgccctgggttgggcgatgtggaggctcctccaaggtcgaggtcgagtctgtcttccgaggccgaggtcgagtccgagcccctgggtcgggcgaggcggagaccgtcggctgtggccagggctgagtccgagccctggggtcgggcaaagcggagttcgtcgtcttccggggctgagcccgagtccaagccctggggtcgggcaaagcggagttcgtcgtcttccggggctgagcccgagtccgagccctggggtcgggtgaagcgaagttcgtcgtcttccggggctgagcccgagtccgagccctggggtcgggcgaggcagagttcgtcgtcttccggggctgagcccgagtccgagccctggggtcgggcaaagcggagttcgtcgtcttccggggctgagcccgagtccgagccctgggtcgggcgaggcggagttcgtcgtcttccggggctgagcccgagttcgagccctggggtcgagcgaagcggagttcgtcgtcttctaggagctgagcccgagtccgagcccctggggtcggggcgaagcggagttcgtcgtcttccgggggctgagccccgagtccgagccctggggtcgggcgaggcggagttcgtcgtctttccggggctgagcccgagtccgagccctggggtcgcgcgaagcggagttcgtcgtcttccggggtcgagcccgagtccgagccctggggtcggcagtcggagcggcgcaggcggcgctgtcctcttgtcagaccggtcagtggagcggcgaagtgactgcggtcacttcggctctgtcgactggagggcgcgcgtcaggataaagctttgtgctgatgggggttaccagctgagatttaggagccttgagggtacccctaattatggtccccgacaagattataccaaagttggagagttgcttggagcaacggcgaaggatgagatatggagtggagtggaagcctttgtcttcaccgaagactccaattccctttcaatctcctatgacttggtttga

SEQ ID NO: 22677 - DNA, 114 bp, Zea mays
  Peptide Sequence Number=SeqID_66052
atggagagagtagcatgtaccctccatggcaagaggctggatggtggtgtatctgtgctctcggttggcgtgaaccagggttatccaaggtccttaggacaaggacaattgtag

SEQ ID NO: 22678 - DNA, 285 bp, Zea mays
  Peptide Sequence Number=SeqID_66053
atgtatgacgagcattccgacccgaaacacggctgtcatggtgaagtcctttgtcatggcagtcagaagtgtggctcaaacatggtattcttctgttcggtcgggaacaatcatgtcatggcaaaagctgaaggatatgctagtcaccagcttccagggtttccagacgaagccagtgactgctcaagctctattctaatgcacacaggaccacgaggaatacttgcaagcgtatgtccgaaggtttctatgtctcagagctcagatgccaatggttccaaatga

SEQ ID NO: 22679 - DNA, 414 bp, Zea mays
  Peptide Sequence Number=SeqID_66054
atggcggatcttgctaaacggtggtcacaccggtggtggtcgtgtggccatgttgctgggcaagtgggtacggtgagggcttttgagattttaatcattttagactactactaccctcatgccctaatcctaggatggctcgtattagatgcatggcatggtgcagaggccttcttagaggactattctattactgagagggatattgttgaggcagccatgcaagatgtaggacgacatgcactttctcagtattgctcgttgttcagcggggtagctgatggccttgacctgaagtactaccctcgccattcgaccggcagtaccagcagggtgattgtctcgccagctggggaaggcaatcccaagctgaacagcatggtcaacctggccaccgtgctcaacaccggctag

SEQ ID NO: 22680 - DNA, 234 bp, Zea mays
  Peptide Sequence Number=SeqID_66055
atgaaccgtgccgggctcgaaggctcggatgagtcggagtactcctcggacgaagaggattcctcggactcgtccgaggagggcagcgacgacgatggtggtgatgacgatgatgacggcggcgacggcaatggcggcggcgacagcggaaggggtggtgacgacggcagcaagggcggcgacggcgacggcagcaagggcagcaacaaggccagcaacaaggccagtggctag

SEQ ID NO: 22681 - DNA, 396 bp, Zea mays
  Peptide Sequence Number=SeqID_66056
atggcggaggtgaagcgtcgcccgcttcgcctgccaaaggtgtcgctgtcgggcgcacgaggaacaatggacaatgatgtacagtgttcttgcttccccggtattttcacatctcttactgctctctgctgtttgttctcttcttcttccttcctctccactatgggcaagagcaagaaaggtagcggttcttcacaccattctggcgacaaacacaagcgcgagccgactcctccctcggaggacttcggcgactcggagtactcggaggaggagttctcctccgggtccgagggatctccggctctcgtctctcccccggcgtcgtctgatgattcagacgactcccaggggattgtcgtggaggtctggacctacatccgggccgtcgtgtaa

SEQ ID NO: 22682 - DNA, 534 bp, Zea mays
  Peptide Sequence Number=SeqID_66057
atggccaggatcccatcgtccccaacacaggccgcgcgcgacgacggcgagttcacaacagggcactccggcgaccacgccgtcactacggtgagaagcgcctccgccacgcagaggaactccaatgagcaattcaccggcctcctccgcacctccggtcccgatttcccacggtcgcgctcttcgtcaccagggaagtcagcccgaccacttattgcctccggcgcggcagtgcaagcgctcggtcacggcggcggcagattcgctccccacggcgacgagcggacgagggacgaggccgaggtgaggatttcggtcaatggctccgaggttcgcggcaagctccgccacggccgggattccgttgagggcgatgggcagctgacctacgcggctgacaggtgggtccctgatgtcggcgctcctctgttcgtggctgctagtggggccagcggatcagtgacaggcagccacgcgtgggcggagtgggtgaagggccgcgcggcgtggtttgctgatgggccaaattcgtag

SEQ ID NO: 22683 - DNA, 171 bp, Zea mays
  Peptide Sequence Number=SeqID_66058
atggcagcggtgtcactcggctctccctcacagacggcgatatcggtacctggcggtcctggtgatatgagcgtgagcgagggcttcttttccccccatatacccagggtctccagggtgctcgacgcgcagatccgattcaatttcgtggtagatttatcttcacattaa

SEQ ID NO: 22684 - DNA, 738 bp, Zea mays
  Peptide Sequence Number=SeqID_66059
atgccggggaaggcgaactgctgctgcccagctagggtgcagcatcccgtcctctgtccgggtgacagtggccagccgcaccggggggtctcacaacacgtcgtacgccgcgagggcggtactcgtgttctgggacggtcccattctcgttttcatggcgaggacgggagtgaggacctgccggtgcgctttggggcggccgacgcccactggtgcggtgttggtgggcaggtggacgccgccgccggtgctgaggtggtggcagctggagaaagcttctccgccgatgagaccgtcagcgccacccgcggatcgacctccggctctttggctttaatgtctggttctcgtccctcgagtgggaacgcgaacgagagcattccagcggtagcgtccgccctgggaccatcgctgctgctgcagaggtcgccggcgagtcacccggagtttgtcgtcccgcaggctccccgatgtggaggttgttcatacccgcgggagtggaaccggagttccgtttgtaatggcaccttgagtgccggtgtatgttcattgtggctgtcggggcctgaacatctagaaaagttttcgagcgttgagacttgttcggtcagcggaatcgcttatccgagcgtgagttacttatcgcagatggtgatgagtgaggatcacactatcgaagtagtcgaaaagcgcgaaagacgttctgacagaaagacttttcccgaggaaaaattttga

SEQ ID NO: 22685 - DNA, 633 bp, Zea mays
  Peptide Sequence Number=SeqID_66060
atgtcaccccgccgattcccgagagcagccagttcgccgtcgggccagcttgggcaccagacactgtccagtgtaccaccggacagtctgaagggcaacgcctacttccagcaccgcccctacatcccgctggagcaggatctggaggtgaacggcgtgcccaccgtgaaggactcgcaggctatttgcgacctcgtatactccctcttcatctcggaggaggtggacaaggtggagttgctctactccaagttcgtgtcgttggtgcgctccgaccccatcatccagacgctgctccccatgtcccccaaaggcgagatctgcgacgtcaacggcgtctgcgtggacgccaccgaggacgagctcttccgcctcaccaccaaggaggggaagctcaccgtggagcacgagaaggtgaagatcgagacgcagcccttctcccctgtggtgcatttcgagcaggaccccgtgcagatcctggacgcgctgctcccgctctacctcaacagccagctcctccgtgccctgcaggagtcgctcgctagcgagctcgccgcccagatgagcgccatgagcagcgccaccgacaatgccatcgagctccgcaagaacctctccatcgcttacaactga

SEQ ID NO: 22686 - DNA, 252 bp, Zea mays
  Peptide Sequence Number=SeqID_66061
atgtcgagccccagcctcttggcgagctcagggccgggaagcatcatggcaaagcctgacgcccaaaagagctcctacctgaagtgggtctcgaagaactcaagaccaatggcggtgaacctgtcacaagtcacggacaacgccgaccctttcttggtgctgagcgactacacctgggtgaacagccatggttccaagaaccataacaagaagtcatccaagtccaagaagggcaagaccaaagagacctga

SEQ ID NO: 22687 - DNA, 2301 bp, Zea mays
  Peptide Sequence Number=SeqID_66062
atggaggggctcaccctcatcgacgtctccgtcgaggacgatcttcttttcgacatcgcctcaccgccccacgcaggtgaggtgttccacccccatttctggaggatttttcttgtggaagaatggtgggactggtgcctgtttggatttgtggatctaacgggcgacgattcttctttagggtctctggtgggcgccgtggcgacttcctctggcgcttttccgtcggcggcgggacgggctccggatccggacagtgtgatggaggagcaggcgctccccgagcggacggactccccggaacagcggaaggccaagaagggggtgaacctgcgcaagagcttggcttgggacagcgctttttttacaagtgaaggtgttctcgacactgaggaattggccattgtaaacagcaccttccgtaagacgcagggttccaggttgcctggaatcgtggaggaaatgagtagatcgggggaatcagcaacctcaactctggaaagtgaatcctgggtgatggagagcgttgagactgaactatttgacaatgtccgtgcttcgatccagaggtctcttggcaaacctgataaagttccaggtcggcctgttgctggctcaaaccacccaaaggccacagcaaatgtacctcgtgttgcagttgcagctagaaaaggtgttgatcggatgccccagccaaagataagggcccctgtttcaacaagccaaggagccggtgtcagacaaagggcccaagtcaccaccaaagagcctgtggctgcacgagttaatttactaggagctgcagaagcaaagatatcctcaaaacctcctagagctttgccaagagttgctatgatgaggtcatcaactaccacagctgtcacctctggggtttcagacaaaagaagcagcactgggggtgctgccaacaggcaggcagctggtaaaactgccagtacttcagctggcctgagatctggcgggggtacaaagtctagttcaatctcaaaatcaggtcccttcacatcagcagcaacttctcatggtgtgtcaatggacactaagccggaagcaaaaaccaaatcagcaaccttaagcaacaaaaataggactgcccagagggtccctgttcatccgccatcaaaatctggtatcagcaaaactattccctcaagatcatcagggaacacgattccagctaagggccatgctgaccgtgcatcaccaagcatttcacctagcagctccatggacagcatgagctctgtcatatctggggcttcaactgcttccaccgtagggaggatgagccatacatctgagagtttaaatggactgtccccctccctcaggaagagcaatgactgccctccaactccaaagcttaggcctcctgttgtcacagagggtcattcatctggaacagcagcacctggagttaatttaaaagctacttctgaaatgaccaaccagagaaaaggttttaagccatctgggcttcggaggcccacacccaagattggttattttgatgctgagaaatacattgaccaaaacatcggtgcacagctacaaccacaaccttcaaaggtccagtgtctacctgacacaacacaatttcagagcatgaatgtggatgccgcaccagctacctacgtccaacaggattcaaaactgacagcaacacctcatgaggaaagttgtgcttccgaaagtaaggtcgtgaagctgctgcctcttaaggtggaagtagagccttttaaggtggcggaaccatgcacgcaccagactgatccagttgtggtcagacccgaagcagtgcaacagcaatccatggagatccagtgcttgctatatgccacaccaaactctcagcaaacctttggtcaacaagtattagaacctatagtagcacctcatgaggttagtgcttgcaaaagtaacacagtaaagacgcctttggaaactgtgcaaatggaagtagaagcgcctctagaagcagtgcaattggaagcagaagcttttaaggtggacaaacctgaagcgtgcagacacctggacaaattctgtgatcaaaatgctagagctcttgtcgctgaacgtgaagattgcacgctcatgactgaggcagtggtggcactggctacagactattcaaaagagaacattccggttttgcatgagaatatacaagctaatgtggatgcgagttcattagttgaggtgctgacccagaagttatcctccatttctcttggggaggataactctaacgtggctctcaggtcctgcagtgaatga

SEQ ID NO: 22688 - DNA, 3252 bp, Zea mays
  Peptide Sequence Number=SeqID_66063
atggtatttgttgcatcaagttttaatgagcgcgatttcttcccttttgccactgttctattccgcaggaaggatacatatggagtgtttgcggagcctgtggatccagaggagctgcctgattaccacgatgtgattgagcacccaatggacttcagcaccgtcaggaagaagcttgccaggaatgcatatcgctcgttcgagcaatttgaggatgatgtattcttaatttgcagcaacgcgatgcagtacaatgcacctgatacaatttatttcagacaggctcattccatacaagagctggcaagaaagaagtttcaggaactgagggatgaaggcatacctacagaaaatccgataaagagtgaacagaaaagtagaccaaatttctgcagtggagaacaggttaaaaaacctgttttgaggtatctggatgatgatctagacttcctgtcccgcaaagatcaagataaaagatccaattcaaataatgtgaatgatgacatgagcttcaacggtcatgttaagaaaaccttgtccaagaatgcaccggatcaaagttgcttattacagaaagagcggattaataaacccatctccagaaattcagaggacaatttaagttcctcattccacaaaaagcagcgtaagaaactgatctccagacattcggaggacgacctgaactgcccatctggcagagaccgagctaggaaagtcatttcaaaaaattcagaaaatgatgaaaactcccctttccacaaacatcaagtcaagaagtcagctccgcagagatcaatcgatggtctctcattccaggaaaagcacattaagaagccaattgatggaaatggagaagatccaggtttttcatcctgcaaaagacgcatcgaggatcccttttgcacaaatgttgaagatgcaagcttctcatctacgaaaaggctgtctgagaagcccatgtctgagaagcccatcagtataaacaaagaagaggaccttgaccattgccaccaggaatcatctaagaaacctagttgcagagttgagcaagatgatcatggttactcatgtgatgaagaggctgttaaaaagccgggttgtatggatagccacgatgcccaaggttcagatatctctgctgcaactattgcttctgttggagatggctctaatggtttaagcatgccacagcctaataattctgaacctactggttgtactgtcgccaatggggttatagacaaagatatcagctctccactagatgaaataagatctgagaagactgacgatattttggccaagcctagctacaagacaattgtggtagatgagaacagacggaaaacttatgatgcatctgaaggacagtctccaatggaatctgatccagtttttgatgttttctctgcggaaccaaaagagctcgtgaatgttggccttgatgctgaacactcatatgcatatgcaaggagtctggctcgttttgctggttcatttggcgctcaaggctggagaattgcttctgaccgcattcggcaagcattacctgctgatgtaaagtatggtcgtggttgggttggagaatatgagcccccattactgcctattcttgttgtgaatgatcaacctagatacctgaagagctctgagacaaatagacaaaggaatgcttctctgcctagggataatgaaaggctcagatcaacagaaacaaataatccgaaggatatgagacggatgaccactgacaacaatgtagttggagtgcctggacaattagacagtccagaatttaagccaagattatttggtgtttccaatgagcttcaacacaggagcacaggcacattatcactgcatgagaaccatagagtatctggtaatgttgcgaaaaccaaaagaacaaccaatgagaaaacgagaaaaggcacttcatcttccagtgcccgacctcgtgaaatgcagctacagaaaggagcttcttctggtgcacttgataaccttgcctcaaacaaaatggctggccagcctagaccgtttttgcaaccaccagaatcaaatagaacccagccaatgagaaaaattgactcatcaaaaaacaaaattccaattgaaatggcaccacagcaagttgagtgtgcaaaaggtgctgcttctggtgtgcatgacactcctttgtcagatgggcagcctaaacacttcttccagtcacaagcagcagcttcctctggtgtgcatgatatgcattcctctaatgggcagcctaaacactacttccagtcacaagcagcagcttcctctgatatgcatgctatgccttcctcaaatgggcagcctaaacactacttcaagtcacacgcagcagtttcctctgtcgtgcatgatatgccttcctccaatgggcagcctaaacaaattttccagtcacaagcagtagcttcttctggtgggcatgatatgccctcaaatgggcagtctaaacccttgttccagtcccaagaagcaactatactacagcccaaaaatgaagcaacgtgggtgtaccatggacgacctggtgatggaaaggttggaacatcaaacaaaagcagaccatcgaccagtattgggttcatcaataaaaatcatcaatcagtaaatgctgcaacttttgccatgaatttgaatggacagaagattgtcagtgaccatgcaaaatcagcaggcacaactgcaatgcctgtccaggtaaatataccaaacagaggtcttgatgctcctcggaacatgttctcagcatttccagctgctgttagggagaaccatagcattccaccagctccaatggctcaatcttggatttcatttggtgctactacagagaacaaaccaaccattgtcagcccaacttcccttgacaataattgtggctggaaaatgccatttgctaacgtccaaccttctgatgataccaaaataaatgccgttcctcagttatttaggcatcctgtccaggtagctagagagaactcggttcaaagcaagggtttggtaatatttccccagttggtgcagccagatttcgcgagatcacaagggcaaccacagtggcaggggctggttccccacatgcaacagaagccaggcaaggatgtactccgcccggacttgaacatcgggttcccatctccacgttcaccaccagcccgacaatcgtctggcatcaatttggaagcacagcagccagaccttgctttgcagttatga

SEQ ID NO: 22689 - DNA, 546 bp, Zea mays
  Peptide Sequence Number=SeqID_66064
atgtacaagggttctgagcccccgacacgtgggcccagggacaaatggaagaatggatctactgcttgccatgcccgtgtaatctccgtgcgccttgacacccgagatctgcgtagcctcatcgcgcaggaggaagcttctcgtgtaagggatgagtacagtgcaccgcgcagcatgggcacactgtttcgacaacggactggacaggtgcgcagtctacagggtggccctggcgctgcctgccagcggaatggacaggacgcaataaatgccgtggaggcacatcatctgtcagaagggtggacaggtggcctaggttataacactccctttctcgggaccttgtcatgggcggtccggagctcacttggtggggtccgaaccctatccaatggcttcgggttgctttacttcgagggtctgggtcgtgtgcacaggggtcctgtgccttctgggcccgatgacgttgtttccgagaacgccaccttaactgcccacaagatacctctgaggctgttctccgcgcggctaaaggtagccgcatag

SEQ ID NO: 22690 - DNA, 984 bp, Zea mays
  Peptide Sequence Number=SeqID_66065
atggcgaagccggccgttggcaacctgagagccgttggcgcaccggacactgtccggtgtacaccggacagtccggtgcccccttctagccgttggctcgaccacgtgtcccgcgcagatcgcgcggccgaccgttggctcaccggacagttcggtgcacactggacagtccgatcaagagggcttctccgggttggcgatgagggcctcggattcggcgagggcctcagcgtactccacgcactccacgtcgcattcgtacgcgtgtcggtacgtggatccgacggtgatgaccccgttggggcccggcatcttgagcttgaggtaggtgtagttggggacggccatgaacttagcgtagcatggtctccccagcactgcgtggtaggttcctcggaacccgaccacctcgaacgtgagggtttcctttcagaagttggagagagtcccgaagcagacgggcagatcgagttgcccaaggggttggacgcgcttcctggggatgatcccgtgaaagggcgccacaccggcccgcatcgtggacagatcgatctgcaagagcccgagggtctcggcgtagatgatgttgaggctgctgcctccgtccatgaggaccttggtaagccagacgttgccgatgacgggattgacaacgagcgggttggcgcctccgagaggcttccgagggttcctgtgctcggcggcggcgacaaggtctgcgtcggcggtgtcgcgtttcgcttgcgacttcttcttgtccttcttcttggtgccgcgctgagcggacgcctcagggacgtcttccggctagcgcccctgaggctgcttgtccttccggaagatggcctcgaccgcctcctgaccagaggcgaacttggtggcgatgtccatcagcttgctcgccctggtgggagtcttgcgacccagcttgctcaccaggtcgcgacaagtggtgccggcgaggaacgcgccgatgacatctga

SEQ ID NO: 22691 - DNA, 336 bp, Zea mays
  Peptide Sequence Number=SeqID_66066
atgcaggaggcatgcaactgcaccaagtgggcgcaccccttcgacttccaacgcacccagcatggaggcctaggcccacgcgtcatgcaaccggcgcgccggttgctacggaccgggaaaggggtataccccgaaaagggtccttctccgcgaaggaaacaggctccgagcctccctactgatcagaggttcaaaggctggcccctcggaggggttcaacagacgcctcagagcgcgtgggccccgcacccgctactggtcagaggttcgaaggccggcccctcggaagggttcaacggccccctcaggctactcgggctccacgcccactactga

SEQ ID NO: 22692 - DNA, 528 bp, Zea mays
  Peptide Sequence Number=SeqID_66067
atggcgtcctccctccccaagttgtcaccgtcaactcttcctctcacgctgttgtcgccaccgttgattcctcgtctctcctctcagaatcgtaactccgtcgccgtctctcctacgtacccagtctccttgtccgtcgtcttctaccttagctttactcagccagcggcctcgccgagccagcggtggacggcctcgccgcgaaccagcgttgggcgggcggccgagccagcggcctcgccgagccgggcggcctcgccaagccaagcgtcgggcggcctcgccgagccgggtggcgagcggcctcgccgaggcaggcggcctcacctagccagacgccgggcggacatcaccgagccgggcggcctcgccgagctccaagatccaggcgcggcgcagtgcctcgccgagccaagcgacctcgccaaaccggacgccgggtggtctcgccgaactccaagctccgggtggcgcagtgcacaggtgattcgctgcataaccttcatgctatgttgttggttcagttaa

SEQ ID NO: 22693 - DNA, 1833 bp, Zea mays
  Peptide Sequence Number=SeqID_66068
atggctgaggatgccagaggagagaagaaggatgcctacgcggcggcgccggcgtccaagttgccggcgaagcaacggggagggttcaggagcatgcccttcatcctagctaatatttcttggcatggatgtgcacgacgtacggcagcgaatgacttctgcgaccggcttgcttcggtggggttcacgacgaacctgatctcgtacctcaccctgcagctgcacctgccgctcgtggaggcctccaacatcatcaccaactacaatggcactgctaacctcactccgctcatcggcggtctcatcgccgactcctttgccggccgcttctggaccatcacattcggctccatcatctaccagctcggcatggtctgccttaccctctccgccgcgctcccctcgctgcacccgccatcctgcgccaagcacgctgcagactgccagcgcgcgtcctcctaccagatttccgtgctgtacctgtctctgctctgcacgtcgatcggcaccgggggcacgcgcccctgcaccatggcgtttggcgccgaccagcttgagctgaacgcgcacaggcaccggggcgccaagcccaagtggagtttctttaacctctacttcttcgccgtcgagctcgcgaagctcgcggccgtcaccgccgtggtgtacatccaggacaacgtcgggtggagttggggaataggcgtgcctaccgtcgccatggtcgccgcggtgatcgccttcgtgtccgggtactcgctctacatcaggatgccacccgggggcagccccctggtccggttggcgcaggtcgctaccgcagcatacaagaagcggaaagccgtcgtgccggacccgagcctcctgtacgaggacaaggagctcgacgctggcatctccaccaccggacgccttcttcacaccgaccagctaaagtgcttagacaaggcggctattgtgacggacggcgacgtgctgccgtcgggtcagccgaagctatggcggctgtcgacggtgcaccgcatcgaggagctcaagtcgatcatacgtatgctgccgatctgtgctgccggcatcatcctggtgacatcggcgtcgcacaatcacagcttcgccatccagcaggctcgtaccatggaccgtgacatcacgccacacttcaagatcccgccggcctccatgctcatcttcaccaacttcggtatgctgctgaccctggccttctacgatcgcgtgctcgtccgcgtgctgcgccgcttcactggccgcccgaacggcatcactcacctccagcgcacgggcgtgggactgacgatcgccatgctgtccaacgtggtggccgcggtcgtcgagcggagacgcaagtccgttgccgctgcgagtgggctgctcgacgctcccaaggccaccctgccgatgagcgtcttctggctggtgccgcagtacgccatccatggcatcgccaacgccttcatggacgtcggccgcatggagttcctgtacgaccaggcacccgagagcatgcggagctcagcgacggcgctctactggctgaccttctcgatcgggagctacctcggcacgctgctggtgaccatcgtgcacgacaagacgaagcgaaccgggcaatggctcccggacaaccttaaccgagggaagctagacaactactactggctagtcgtggctctggaggtggtcaacctcgtctacttcttcatctgcgttaagtactacacctttaagccattggagatggtgagcggtgaggaggttgagctctaccaccatggcaatggcaccgacgacgccaagaagcaaggtgtggaagcttag

SEQ ID NO: 22694 - DNA, 1839 bp, Zea mays
  Peptide Sequence Number=SeqID_66069
atggagactgcagctctggccgacgaggatgcatcgccgaagaagacgaagcagggcggcttcaggactatgccattcatactggcaaacgagatctgcgaccggttcgcgacggccggcttcaacgccaacatgatcacatacctgacgcagcagctgcacctgccgctcgtggaggcctccaacctgctcaccaacttcaacggcaccgcggcattcacgccggtcctgggcgccatcatcgccgactcccgtgccggccgcttctggaccatcgcggggggcggcgtgctgtaccagctcggcatgctgggcctcgtcgtgtccgcgctcgtccccgcgctccgccccgcgtcctgtggtgccactggcgctgcgcccccgctgacgtgccagcgcgcgaacggcgggcagctcgccatgctgtacggttccctgctcctcaccgcgctcggcggcggcggcatccggccctgcgtcgtggcgtttggcgccgaccagttcggccagcgcggcaagcgtcctggcggcgagcagcagtggagctacttcaacctctacttcttcagcatggggctcgccgttctgctggcgctcaccgtggtggtgtacatccaggagaacgttgggtggggctgggggttcgggatccccgccatcgccatgttcgtctccgtgctctcgttcgtcgtggggtacccactctacgtgaaggtaaagccccaaggaagccccttcaagaggctcctgcaggtcgtcgtcgcggcgtttaagaaggggaaggactccgtgccggaggacgtcggcttgctgtaccagaacaagcagctcgacgccccagtcgccgccgacgggaggctgctgcacaccgatcagcttaggcaagtgcttttgacttcttgcttattacttcagacgttggtttcatgtgcattacagaggttcttggaccgagcggctgtactgacgacgggagacctttccgactccggcgagccgaacctctggcgtgtatcgacggtgcatcgggtggaggagctcaaatccatcgtccgcatgctgccgctgtgggcagccagcatcacggcgatcgcggccgcgtcgcacaacttcaccttcgccatccagcaggcgcgcaccatggaccgccacctcaccccgcgcttccagatcccgccggccacaatgatcatcttcaccacgctgaccatgctcgtcagccttgctctctacgaccgcgtcttcgtccccgtcgcgcgccgttacacggggcggcggtcgggtggcatcacctacttccagcgcatgggcgccggcttcgcggtgtccgtcctcggcgtcctggcgggcgcgctcgtggaggccaggcggcgccgcgtggccgcggagcacggcctgctcgacagccccagcgcggtcgtgcccgtcagcgtgttctggctggtgccgcagtacgcgctgcacggcgtgagcgacgcgctctccacggtggggcacatggagttcctgtacgaccagtcgccagagagcatgcgcagctcggcggccgcgctgttctgggtcgccggctccctcgggaactacctgggcacggtgctcgtcacggtggtgcagagcgccaccagaggggtgtggctccaggacaacatcaacaaggggaggctggactactactactggctcgttacattcctcttggtgctcaatcttttctactacatcgcgtgcttccatttttacaccttgaagacgttcgaggtggacgccggccgcactaatggtggagaacggcagccggaggctgcggagccttgccatgtacaggttggaagtttgtag

SEQ ID NO: 22695 - DNA, 741 bp, Zea mays
  Peptide Sequence Number=SeqID_66070
atgatgcccccgcctcccccgatccgcgcgtgccctcgcccagctgagcgcgtcgcaaaatctgcgccgacatccacgcgggcaaaccgccgcacacctacatcaaatagccggccttcgcagacctcctatggaagcatcgtgaaatacggcaccgcgaaagctccgcgacctatacagcttcctgtcggtgttggtgtcgcgttcgtttctggttctgtctatcctctgactctggtttttctggtgctagccatcctcctgcctctcgggaataaaaagcatctgcttcttcatatagcagagtgctgcacagattgcctgaatcacataaatgttgcacaatatgcatatggccttgccgcttttgggaggcaacttcatgcaatgggactgacagatgctttagaaatccaccctgatagacatttgggcagtcatccacaagctcatttggccacaacttatttggagcttcataggtttagcatgctcagtttactggtagagttcttcaaaaatattgaaagaagtcaagctgtctcaagaaatactgtgaatgctatcagggaggtgttggatgctccagcaactgcagatgtgagagtagcaaaaatgcttttggcagaagagatgaagttcagtggtgttctcattaaaaagtgtttctatgcactgaacatcaatcagattaccttgcctatgattttaatttggattagacaccactgtaattcgtaa

SEQ ID NO: 22696 - DNA, 465 bp, Zea mays
  Peptide Sequence Number=SeqID_66071
atggcatggttgggggcgacggggtcacacgaggggcgatcggaggtgacggtgccatgcatggcacgtgaaaggtcgccgggactagacgtaaaggaaaaggagggatgtcggcgggatcagaatcgagagtctaagtcgggatgtggggaggagccaacaagggaaaaacgtcttcatcaaaaccacatggcaagatatgatgatgcagggggtgaggagatcgaggcacctttaccccttgtgatcataggtgtacccgaggaaaagacaactagtgtatcaaagcatgagtttgtggggagcggtggtagaggtattaggatagcaagcacaaccaaagacgcagagaggaaggaagagatggatgagggggatggaagtggttcttggtcaatcgtggcccaacaaccctatgcttatcctggtcgtggagccatgctcttggtcgtgccacaatgttga

SEQ ID NO: 22697 - DNA, 705 bp, Zea mays
  Peptide Sequence Number=SeqID_66072
atgagcaagcaagccaccttcaatcaaagaaaaagaccaaagaacagaaaacagaacctagataaggttatgaaaacatttgttcactttggagcccctccaaacattttagttgatgggaaaccacacttgggtactgataaacttgttccactgctgcgaaaattcaggcatcacttaagagagttgggtgttaccataagatttaatgctagagtagatgaccttatagtagaagatgggcaggtaaaaggaattgtggtctctgatgtggaactacagccaggtcctgccagccagaaactagcatttgacgcagttgtaatggcagttggtcattcagctcgtgacacatacagtatgctttggcagcataatgtagacatgagcccaaaaagttttgctgttggcttaagaattgagcatccccaagaattgataaacagtatccaagaccccggcatcgccgacaatgacacactcacggacgaagtgaaggtcgatctccacgtgcttcgtacgctggtgctgctcgggattggtggagaggtagactgtgctgacgttgtcgcagtagacgagggtggcacgcgtgagagggttgtgaagcttctggagcagctaaaagagccaggacgcctcggccatgccgttggccacagtgcggtactcagcctcagcgttggtctgaaggtctcgtcgtag

SEQ ID NO: 22698 - DNA, 801 bp, Zea mays
  Peptide Sequence Number=SeqID_66073
atggctcgacttagacacactgcacgaaagtcagtcatccccttcttaccctcccgccttgctgagcgtccgcttcgccgtcccgtggccggacagtccagccacttggagagactacaccaccgcctgcgtgaggagcaggagcgtcgacgacaggagcagcagagctcttccctctcgctccaccaggagatagagtccgtgaggagctgctcccctgtgcttcctctggagccgccccctgcaccaccactgggcgccccagcttctggagtagctgctggaggagacccagacgacggagatggcgacgacagctcgagccacgacaccgacttctctgctaaccctgagccggaaggatgggttgctcgacccatcactcgcgacgctgctcgcgggtgtcacttccacgatgcgctcgacaccctgctacgtcgggcatttgaccggcatacttggtccgtcgagtatcgctgtgtggtctaccagcatagtcgcggggtctacccggaccgctgggaggcaacttgcttggtgcgctgcccggaggacagtctccagggtgcaggatcagatcatcttgtagcgtgcgctttctgcggccgccgaggccagaagaacacgccctcgccccgcttgcgaagctgcgtcttttttcctcctgtttcgagcatctggacttcgtcgaaggtgacgagtgaggtatccgtatcccggaggcgtaggagtccctcggctcggtcagccttggctgcttacgtgtacctcgtcgtttccaggatccgctttccgaagtag

SEQ ID NO: 22699 - DNA, 396 bp, Zea mays
  Peptide Sequence Number=SeqID_66074
atgtgcgcgacagcgaccaagggcaccaagcaagcagtaccggcatgcaggaaggctggtgcgctggtccgtttgctgtcatcccgatccgccggtgccgtcgtcccgttcacaagctcaggcgctctcacccatcaatcattagaaccggacacgcgcctacttcacctttacaagtgtgaacccgtcgtttgggtcgtcgtcgagcccgccaccgacgcgcccgccaccgccgaggtgctccgcagcaccggcgtcatgtacatgcacctcgccttcaagcccgaggacaacttcaacgccgccgacgccgaggctcacgtgcagcagaacgccgagctcgcgcacgttgagaagcaccgactcaccggtgtcctgcacttcgccgacatctag

SEQ ID NO: 22700 - DNA, 744 bp, Zea mays
  Peptide Sequence Number=SeqID_66075
atgacgtggcgggggcaccggactgtccggtgcgctatcgaacagacagcctccaccaacgccggagagatctgggcaccctactggcgtgatgtcgtggctatcggaggtgcggcggagcctgatggagggacagctgttggagcggtcgagtccctgctgacgttgtcctgctgccttgccgtggccgagcccgagccaaggggtcgggcgaggcggaggtcgttcggccgaggccagggcggagtccgagccctggggtcgggcggagcggagttcgtcgtcttccgggtcttagcccgagtccgagccctggggtcgggcggagcggagttcgccgtcttccgggtcttagcccgagtccgagccctggggtcgggcggagcggagttcaccgtcttccgggtcttagcccgagtccgagccctggggtcgggcggagcggagttcgccgtcttccgggtcttagcccgagtccgagccctggggtcgggcggagcggagttcgccgtcttccgggtcttagcccgagtccgagccctggggtcgggcggagcggagttcgccgtcttccgggtcttagcccgagtccgagccctggggtcgggcggagcggagttcgccgtggcgcccttggcaaggcctgattgcctgtcagactcactctgtcgagtggcactgcagtcggagtggcgcaggcggcgctgtccttctgtcagactggccagtggagcggtggagtga

SEQ ID NO: 22701 - DNA, 249 bp, Zea mays
  Peptide Sequence Number=SeqID_66076
atggcaggctcggccgccccgcccccacctgcctcgcccggctcggccgccccacggccggctcggccgccccctgcgccgccccctgccccgccggttcggccgcccctgcgccccgccggtggttatgagactgttgattctggttatgactatgatgctggttgtcagcattgcaaccactgctcaggcgaagatgaagctgtggaaggagacttccaggagttccaagattacgacgagttctag

SEQ ID NO: 22702 - DNA, 1683 bp, Zea mays
  Peptide Sequence Number=SeqID_66077
atggacaaggatcgccaaggtgcggcgcaaaaacgccaggcgactgtccggcttcatgaagctaggccgaagaggccgcggggggctccgaaggctgcggcctccggtggaggcaagccgccgctggcggcgaaggcgggcgccgctgcacctagcaaggcgccagaggcgacggcggggcgccggaggctccaagtcaacgaggatggtgccgccggccagcggagtggcggaggcttcgaaggcggcccaggcgtcgccgttgtcgggcaaacgcgttgccgacttcggcaccgatattactgtggacgactatcttggtgggccgggcgagggccagcttgctatagctacgcctggcgcggcgatcgcgacggccgtcatggtgccgaaggcgaggggcgaggcgcttggcgccgaaggcgaggtgtcggccctcgcgttggtcatggacgaggcgggcgcggcgacccgccggctgaagggagtgacggaggcgctgagtcaggcgacggaggcgctgagccagatccgctgagctatggtctctcccccctttcttttcttttttacgtcaatggccttacgtgtgctctgcaggtggctgacttcgccagccgcactgcgtcgggggccctcacggcagcgttgtctgccgaggtcgagagacttcggacgcaacatgcggacgctgtccgtgagaagtcagcctccgacagcaagtgccgcaaactggcggagaaggtggccgcccttgagaaggagaaggctgacctccggcgccagctggcgggggagaggagggaggccaacgaagccatcgccaaagagcaggctgcgcaggcggaggccaggctggcgcgggcggaaggcaatatcgccaaggagctcgccggagagctgcagcggcggcttactgcccaggagagccgcgcggagggggccgaggccgcgatgcgagcggaggccgaacggacgcgcacgcagctcatgacttcatatcgcgagctgggtgtgcggacgggtgacttcgaggtgccggagcgagaggccgggcttcgctgtctggaatgggtgcaggaggaactgcaggagctccccactgtcttggcggggttgatggcgttcacctccctggtcacctgcgaggcagcgatgaacgcgctctctcgcgaaggctgccggcactttgaggccctcgaccaggcggatgaggactttgggcgagatatctttgaggtcgaagaccccgtggcggagcgcggcgagcgggtggacgacttcggggcgctgaacagcgcgctgccagacccggagacgacccctgcggaggccgcgactggagtcgccccgggaccgaccccggggaccgcgggagatgccccaggcgcccctgggcctgccgcggccggcgaagaccttcccccaaaggtggccgaaggcgcgcccgatgcccctgcagctgctgcgccgaacgctgaagatccagcggaggtgggggcggaggcagcggcggaggcctcggcggaggctcccgcagcggcagggccttcgcaggttcaagattttgggcctgcgcacgcaaccgctactactgagtttttggcggcttcgaccgcggaagatgaaaatgaaaatgaatatggtgggtctgtttctgagttttttgatgttactgaccgt

SEQ ID NO: 22703 - DNA, 801 bp, Zea mays
  Peptide Sequence Number=SeqID_66078
catattgagcgagatatctataaggtcgaagaccccattgtgaaggaatccgccggggccctctatgaccggatgtggggtctgtacggtcgtgaggtggtcagggagcgggccgagactgcgagggctcaggcggagcgcggcgagcgggtggacgacttcggggctctaaacagcgcgctgccagacccggagccgaccctcgcggaggctgtgactggggtcgccctggagccaaccccggagaccgcagcggtcgcgacggctgcccccacatccgatgtggccggcgaagacctgcccccgaagatggccgaaggcgctcctgatgcccccgcagctgctgtgccgagtgctgaagatcccgtggcggtggcggcggagccaacggcggagccaacggcggaggctcccgcagcgtcagggccttcgcaggttcaagattttgggcctgcgcacgcaaccgctactactgagtttttggcggcttcgaccgcggaaggtgggaatgaatatggtgggtctgtatctgagttttttgattttactgactctgggagctcggttgagtggactgaggagtcgtcggaggaggacttggattattttgcggccttggacgtggctgcggcggaggcttcgccacacgccgcggacgcgccagacgtgccaggtcctaggaccgggcgccgacgacgaagggcggttgcaaaacgtaggggctggtcgtcaggaactgttgtctttgccggccgctgcgagtacaggggaaagggaactgcgaagtctttttgcgggtga

SEQ ID NO: 22704 - DNA, 465 bp, Zea mays
  Peptide Sequence Number=SeqID_66079
atgggtttaacagatagcaatatcaatagtgtcgatcaagttatagccgatcctggtcttcgcatgccaattgagcaaattgatgcaaacattagggatgctgtcagaagagcatatattgcgaagggtccatgccaaccaaaaggtcataagtatcctaaaacaatgataggcaatcgcaataggtcttttcatgatgaatgtgcaatagggccgtacgacttcaaactcttcaccttcgggtttctgaggccgcgctccgctataattcaccggattgtccggtgtgccggtgcaccagcggagcaacagctccagcgcaacagtcgactgcacagtgccctaacagcgctacagtacgcggcagaagttagaacagccgccagaggtgcaccggactgtccggtgccacaagaagacaaagctccaaccgtcgaaaccgctagaaccctaacggttgggtga

SEQ ID NO: 22705 - DNA, 1485 bp, Zea mays
  Peptide Sequence Number=SeqID_66080
atgaacctgacgctcagtctagccatcaacgatggcggcggcggcggcacgaccaagaagcgcaagctactgcgggacagcgccgacgacgacgtgatgagccgcgatggtggaggagaccgcagcagcagggtcgtcgcgaggctcgtacaggtacaggccagggaacggaagctggcgaagctggaggccgccgccgccgacgacgacgaccacgaccacgacccgagggtggctgcagcggaaacatctcccggtgacattggcgggggcctgcggctcatgcacctgcttctgtcgtcggtggccgcggcggagtccggcgacgcgcgcgaggccgccgcggccctgcgcgaggcctgccgccgcgcgtcgttccgcagcggcgaccccgcgcagcgcgtcgccgcctacttcgccgacgcgctggcgtcgaggctcgtcggccggccgccgccgacgcgcgccgagcagttcctggcgtacaccatgttctaccaggcctccccgatctaccagctggcgcacttcaccgcgaaccaggcgatcctcgaggcgttcgagagcggcggcggccgcctccacgtcgtcgacttcgacgtgtcatacggcttccagtggccctccctgatgcagtccctgtcggacgccgccgcgagcacgagcagcagctcacgcgacggcgactgcgccgagccggtctccctgcgaatcaccggcttcggcacgagcgccgacgagctgaggcagaccgaggcgcggctagcgcggttcgcgagcgggtgccccaacctacggttcgagttcgagggcatcgtggatggcgcagacgacagtgaacgcatcacggtcgacgacggcgcgaccgtggttgtcaacctggtgttcccggcggcggcagcagcagcagcacggagctcctcggcgacgagcagcacaagagaaggagcgtgcagcgcgctggctcgcatccgctcactggacccttccctggtgttcttggtagagaaaggcggcggcggcggcaatgccacgtcgagaggacgacgcccaagcttgctggcgccgttcgcggccagcctccggtacttcgccgcggtgttcgactcgctgcacgagcgcctccccgccgacagcgccgagaggctcgcgatcgagagggaccacctcggcgcggagatcagcgacgccgtggcctctttagcagactacagcagcagcagctacggcggcgatgatgagccgagcagcagtgccactgccggctgcagctggaggcagatgatggagcgcgcggggttcgagggcgtggagctgagctcgcgagcggtgagccaggcgaagttgctgctgaagatgaagagcgggtgcggcggcgggttccgggtcgtggaggagggggatggtggcagggccgtgtcgctggggtggagagacggtagagcgcagctgatcaccgcgaccgggtggcggcggtgccgttaa

SEQ ID NO: 22706 - DNA, 663 bp, Zea mays
  Peptide Sequence Number=SeqID_66081
atggcacgacggtggtccgaggcgacggtgggggacctccgcggctgcacggggaacggcggatgtagggtggggggcacacccgacagcctggcttggcgagtgggtggacacgccaggatagacagtggaaccgctaccctttggaactgccgcctcgtatctgggatgcgccaccactacgtgcctaggggaggctgccgtcgtcgctcgcgcctagggaagtttgccatcgccgctcccgccttggatggcatcgcagtcgtacgcgctcaggggttgacccgggtaatcgtgcatcccgagatccgtcggaccagccgctcccacctcgccgtcatgcacgccttaggggtgccgtcgttgctcacgtgcccccaagatccaccgtcgcagccgctcccacctcaccgtcgtgcgcacctcaaggggtcgctgccgcgtgcatctcagggagacgccgtcgcgctcgtgccccccgggatccactgtcacgtccgctgccacctcgtcgtcgtgcgcacctcatggaaccgccgccgcgtgcgtgcccttgggatccgatgccgcagccgctcccacctcgttgtcgtgcgcgcctcaagggggccatctgaaagggaaatgtgccttgggccatttctaagtattttggtgatttag

SEQ ID NO: 22707 - DNA, 438 bp, Zea mays
  Peptide Sequence Number=SeqID_66082
atgggcaagagcaagaaaggtggcagctcttcgcatcactcaggcgacaagcgcaagcgcgagccgactcctccttcggaggacttcggcgactcgaaatactcgaaggagttctcctccgagtctgagggctctccggctcctgcttctcccccggcgtcgtctgatgattcagacgactcccaggggatcgccgcggaggtatggacctacatccgggccgtcgagcgtgtcgggctcgagggctcggatgagtcggagtactcctcggacgagaagaatccctccgactcgtccgaggagggcagctgcggcgacgacgacgacgacggaggcgacggtgacggcggcggcaacagcggcaagggcggaggcgacagcggcgatggcggcaacggcggcggcggcggcagcaagggcaacaacaaggcccagtag

SEQ ID NO: 22708 - DNA, 75 bp, Zea mays
  Peptide Sequence Number=SeqID_66083
atggggaccgacggacacaccgacctcaacaaaggagattttggtgaggcaatggggttttggggccaaaattga

SEQ ID NO: 22709 - DNA, 2769 bp, Zea mays
  Peptide Sequence Number=SeqID_66084
atgaggggaatgctctttgctggtagcgcacgagaagggcacgcggggacactgctgcaactgcaactgcaacaccaacgacaggggctcgccgccggcaaagtctcaggcgccggcgacctctgggagcccacctcggtgcttgaccgccgacacagccccagcccgagcccgccgacctcggttcccacgctgtcgtcgcccctgggcgccgcgaccgccggtgtggcggccctcgccggtgctaacgccaagaacgtctccccgccgccggtggcggcggcggcatggccagggggaggaggggcggaggaggccgtggcggggggcaaggaggagtggcagctcacaccgcttgacatgggccttggcgccggcgaggggtgggacgcggccgacgccgcggcgccgccggggctcgcccccgaccacaccttcctcaggtggatcatcggcggcgaggacgcgtctgcggccatggggtctgtcatggacccgccggtccttgagctggaccacgcgccgtccatgatgtcgccggcgtttgggtccaccatgccgttcgcgccggccatggaggacgccaagccggtgcccttcggccacacgcccaacttcctgctccaccactgccaccagcaccacccccagccgcacgccgccttcttcggctcgcacccgtccctggacgcggcgccgcagccgaagcgaccacacccgatggccggggcgccggcgccgaagctgccgtctttccctgggcctgtcgcccaggcgggcggcgggttcgcgtcggccttgaagcccaaggcggaggcgggtaacgacgaggcggccgctgcggtggaccagcttgccgaggcggccagacttgccgaggccggcgacgccttcggcgcccgcgagatattggcgcggctcaattatcggctccccgccgtgcccacggccgggacgccgctgctccgctcggccttctacttcaaggaggccctgcgcgttgcgctctccccgaccggcgaggcccttgcgcccccggcggtgtcgacgccgtacgacgtggtcctgaagctcggcgcgtacaaggccttctccgaggtgtcccccgtgctccagttcgcgcacctgacctgcgtgcaggcggtgctggacgagctcggggccgccgggcgcatccacgtgctggacctggacatcggcatgggcgagcagtgggcgtcgctgatgcaggagctggcgcagcgcagccccgcggcgacgctcaaggtgaccgcattggtgtcgccggcgtcgcaccacccgctggagctgaacctcatccacgagaacctgtcgggcttcgcccgcgagctcggcgtgttcctccagttcgcggcgtacaacgtggacgccctggaccccgcggagctggtggccatcaccagcggcgacgccgtggccgtccacctccccgtggggtcggcccacgtggccgcaatgccggccgtgctccgcctcgtgaagcggctcggcgccaaggtggtggtgtccgtggaccgcggctgcgaccgcacggagctgtcgttcagcacgcacctgttacaggcgttccagtcctgcgtgtccctgctggactccatcgacgccgtggggggcgcggacgccgaggcggtcggcaggatcgagcgcttcatggtccagcccgacgtggagcggcgcgtagtgtcgcgccaccgcgcggcagtggccgtggacaagccgccgccgctgccgtggcggaccgtgctcgcgtcggcggggttcgtgccggtgcaggccagcacgttcgccgagtcgcaggccgaggccctactcaagcggatggcgctgatggggttccgcgtcgagaagcgcggcggcgcgctctgcctctactggcagcgcggcgagctggctgacagaagtgtttacgaccattatcttgttccatcagatgctgctggcgaagcagagatgctaaaccaagcaagttcccgcgtctactggactcctgccaagacaaacggaggaaccccgtgggagcgagtgtacgttcccggattctacatgaacaaagctcgcagcaggagcccctcgactttagcacacacacagtacgttcgcacgagggagaacggcggccacagggagagaactccacgccggaacccggaagccaggcagaagatccaacaccgggccgctgaaccaagagagcatggagccggagcatgtgggccacggagaaattttagctgcgtccctgtgctgtgctgtctgtccttcgcagtccacagctcagctcagctcagctcccagtcccaagccgtgttgttgttccctgctctgcttccgcgtgcgggtgaacctgttgaccacaccacaccacgcacgcagcccccctcccccaccccgcgccacgctgccaccggcccacccaccgccgcccagcatcggggatccaatcccaactcgtgccggggcctgctgtactttacatatgcatgcatcctcctcagtgttgttggccaacgcatgtggctcgtgccgtatcttgcaggacgaagagtcccagagaaacttcccgggaagcttcatcttccagttccagcgccgctgaacgctaaacgagcaccgctccccgcatgcctgcagcctgcggcctgccgactgccgattgccgtgaaagagcgaggcagacatgatttgaagtctcactcagagaggcccgggattcggaagccactggagctcaaggtcccgttcatacgg

SEQ ID NO: 22710 - DNA, 450 bp, Zea mays
  Peptide Sequence Number=SeqID_66085
atgaacctatggaacatgggacacctaattatggtgttggaaggcaggtgtcgcttgacaatggtgaattccacatacttgatgaggaagtacatatggatgccaaaggtgaccgctagctttattgagttgatcagaaggatcatccctatggatactcccatgaatgggcgtgcatcaatgagcctagcatgggggatctacatctcatcgaaggcatacattgatatggtgttgaggccagccccaccatcaaccataacatgccatagtttaatattgttgatgatggggcccaccatcaaccaagattctggcgctaaccatgttgccgagtcagtcaatggaattgaagaagatcgaagtattggccaactcgggaggcccataaaacaaagacatgcacatccaggtgcaaaagattcagggcccactaagaagatcccatag

SEQ ID NO: 22711 - DNA, 468 bp, Zea mays
  Peptide Sequence Number=SeqID_66086
atgggcaagagtaacaaacgcaagcgcgagccgactcctccgtcggaggacttcggcgactcggaatactcggaggaggagttctcctccgagtccgaggggtctccggctcccgtctctcccccggcgtcgtctgatgattcagacgactcccaggggattgccgcggaagtctggacgtacatccgggccgtcgagcgctccgggctcgagggctcggatgaatcggagtactcctcggatgaggaggactcggacggcggcgaggacgacgacgacgatgacgacagcgacgacgacgacgacggtggcgacggcgacggtgacggcagcggcagcggcgggggcagcggcggcgacgacgagagcaaggggcagcaccagaggcggcagcagcaagggcagcaccagaggtggcggcggtggcagcagcagcaagcccagtggctaaacgccactggtctttag

SEQ ID NO: 22712 - DNA, 498 bp, Zea mays
  Peptide Sequence Number=SeqID_66087
atggacggtgacgaagtcgcgtcggggacggacgacaccgttatcttcggtacgaggtttatgcccagcaagcctttcgcgagcgcgctggcgtcatctgtccgcttgggacgcaaggtcaacgcccgacgtgtcccccgctggggcaccggcgtcatcgactcgctctacagccaacgaggtgccacctcctgcttgggcacggttgccccgcctcctcctcctgtggcggggaaggtgacgggacagacccggatgctgctcttccgccatggggggaagacgtcgctgagtccgccgccgtcgggcgggctgacgaccgtcgttgtcgctgtcgcgcggcagaggaaggagtgccatgtcgtagctgccgtcgagggacatgaactcgagactcctgaaacggagcagcgtcccgagctgaagaggttgctggagactacccatctggaacttgatgggaagctgtttgtcaacacgcagcaggcccctacctag

SEQ ID NO: 22713 - DNA, 219 bp, Zea mays
  Peptide Sequence Number=SeqID_66088
atggcgtactcgctctcgccgtcgaccatcacactcccctgcatcgtcgcccttcccattccctatgctgctatcgtcgaacaagacaattgtcttagaaatttggcccttagagctgaatctaatgtggagatatggtgctaccacgtcttcaccgtctccacgcccagcacccgcaaaaatagtgcaaagcgaactctcaaactcatacctatctga

SEQ ID NO: 22714 - DNA, 198 bp, Zea mays
  Peptide Sequence Number=SeqID_66089
atggccgaccgagtggacaacgaatggttttacgtgaaggctgatgagaagaaaagggagaagctcatgagcatgggggtcccttttatagccccaaggcagctaggagccattggaggccaacaaggaaggtcatccttgccttctgtcgggtggcgcaccgggacagtccggtgcgccaccggacagtcactgtag

SEQ ID NO: 22715 - DNA, 827 bp, Zea mays
  Peptide Sequence Number=SeqID_66090
aggctggtgctctcactttgaaaactgatctcaaagggagaacacagcagaaaaaacagttagtcaaggagaactttgattgttttgtctcgtgcaaaactacaatagatgacattgagtcaaaattgagacagatagaggaagatcctgaaggtgcaggtactgctcacttgtattcagtgacacaaaaaattagtggtgtggcgaatcgtgcatttgagcctctatttgagaggcaggcccaagctgaaaagatcagatctgttcagggaatgcttcaaagatttcggacactatttaacctcccaagtgcaatccgtgggaacattagaaaaggagaatatgatcttgctgtcagagagtaccaaaaagcaaagtcaattgttcttccttcccatgtggggatactaaaacgtgtactcgaagaggtcgaaaaggtgatgcaggaattcagaggcatgctttataagtccatggaggatcctcaccttgactttgctgagcttgagaacattgttcgtctactgttggagctggaacctgaaacagatccacatgttccagctttctggagattagctttatctgttttcagtggaaagtttgccaagacagcttctggtaatgtagtttctgattctgacatgaatgcaaagccgtctgcaaataagaacgatgacaaaggtggagatgtgaatatgattcttaatctgatgagcgagactgcgaagtcatatgacatttctcaaccacttcaggaaattaatgagtctgtcagacttgcatttttgaattcctttctggattttgctggtatgaatctctaa

SEQ ID NO: 22716 - DNA, 1419 bp, Zea mays
  Peptide Sequence Number=SeqID_66091
atgctgcaggccgaggtggccttcacgcatgtcttccagttgtgcgcgctgctgcaggggtggcccgtgctgcaggccaaggtggccttcgcgctgcatcagcgcgatctcccgctcgagatgaaagacatgtaccgagaggcgttgtggcagaagagaggtcgtcctcgggagttatatccggacgtatctagtaaggatgctcctgttcctcctgaactccccgtgcctaactgtgactgtggcagactggcttggggacatcagaagtgtttctttttccagtggatcgatggtcctgataaatttgaccctcgatatcttcttttcgttaattggttgagtggaaagaccagtcatgagcgttttaagcgttgggtacctcctcccccgaatcttccaccaatgacggatgcggagaaggagccatacaggtggcgtaagtgtcgtttcagagagtggttgtatggtcctttgtcccattggccagagccagaggtaaaggaaaagagatacatggggtgggcggcagaagaggtcaaatttgatccagtactctgcaaatgtggtattgaaactaagtatggattagttccttcggagcttggtgttggatatttttgtggacatatggtcgattacgatgaggagacgaggaaatgcagttgggagagttacgacgacaaaggagaggtgatgcgcacaatagagtccaagagaataatgggacagaagatgcgttgtggatctcggctcgtcgattcgtacattaacgatcgcatacgcgacatgcgtagggaagcaaaatctgccttttatgatagcccgaagcgtgcagagtataggaggttgaaggcggcagatgagaagagagcacaggatgtaagggaatgggaagcggctcaagccgagaaacagatgttggataatcttgctgatcgcctcaagggaaagattggaagcggcgtaaactatttggccgatgaggcgcatgcgagatatgttcaagataaaatggcaacgatggaggaggaggacgacgacacatctagattgagtgagcttatcgccctcgcagaggcaggattacatgaagaagaggaggacgacacgtcaaggttgagtgagctcatcgcactagctgaggcaggattacgtgctcaagaggaagaggatgagtttatgtcacaggccgccgcagaggtagaggcagcttattacaagaagaagtctgatgaggctgaggctgaggatgagctattctcccaagctgcagatgaagcagaagccaattattacaaaagaactggtgacaagtgtgatgcaggacaatgcagcaagttgaatgaggttgttgttgaggattgcgcgacggatgactccgaagatgagttactcatagattgtgattcagactga

SEQ ID NO: 22717 - DNA, 105 bp, Zea mays
  Peptide Sequence Number=SeqID_66092
atggaatcccattcaacagttctgaggctgatgcaatggggaggatcactgctggaattcttcgtctccttaaacttgacaaatctcttgggcaaggaactatag

SEQ ID NO: 22718 - DNA, 756 bp, Zea mays
  Peptide Sequence Number=SeqID_66093
atgtggggtccgcacggtcgagaggtggtcagggagcgggccgagacggcgagggctcaggcggcgcgtggcgagagggtggatgatttcggggcgttgaacagcgcgctgcctgacctggagtcgaacccaacggaggttgtgcccgaggccgccctggagccgcccccggaaactgccgaaggcgctcctgatgcccccgcagccgctgcggccggcggaggcccgcccccagagaccaccgaaggcgcccctgacacccccgcggccgctgctccgagggctgaggatcctgcgacggtggcggcggaggcaacagcggaggcgacagcggaggctcccgcgacggctgggtcttcgcaggttcaagattttgggcctgcgcacgcaaccgccactactaactttttggcggcttcgaccgtggatgatggtaataaatatgatgggtttgcatctgagttttttgattttgctgactctaggagctcggttgagtggactgaggagtcgtcggaggaggacttggactacttcgcggccttggatgtggcagcggtggaggcttcaccgcacgctgcggacacagaagatgcgcctggtccgagtaccgggcgccggaggcgaagggcggttgcgaagcgtagattatcggagtgttcgtgccgtctcgtggaggccaggtctgcaagtctacgccagacagtggagctagaagccagttccgcgagctcccctttccccttcgccggataa

SEQ ID NO: 22719 - DNA, 732 bp, Zea mays
  Peptide Sequence Number=SeqID_66094
atggacgccctggatccacctcctcctcctcctcctcctctccccatcactgcgccgcctgcccctgccgcacacctacaccacaccccttcccttgccgtggatctcgcccatacgccagcggatctcgcactccttccttcgatggcgcagtggcgaggacgtcagcgacggcggcgtcgagtcgaggtcgggcacgaaggcgtggaggccgtgggagtggccgtggcctacgcacgcacgacgccgctcccccagttcaaacccaccaccccttccccctttgtcttccattcccaactgtgcacgcgctttccgatcgcttcatctacctcgctttcgcccagccccagtcaccagtccaccgtgcccgcgcctctgatccagcgatatggctggctccatagctccaaacgctgtggtcctcgatctcctcctgctcgtggggctcgcggcggcgcagagggggatgacaccagcggtggcgaccccgcgcccgaccccggctgcagcagcatccagctgacctacaacttcatggaccgcaccaaaatctggcccttcgtcagtgacaagaacaagcagccctacgccttccgtgccaatgtcaccgtgctcaactccggcacccgcccgctcaagtcctgggcggcgctcgtcacattcggctacgacgagatcctcatcggcgtcgatggcgaaacccgcacccgccgcctcatagaaccctag

SEQ ID NO: 22720 - DNA, 387 bp, Zea mays
  Peptide Sequence Number=SeqID_66095
atggcggtgaaccgaggcgccagggcggggggtacggtggatccgcggcgccttcgggcgagatccacaacgaggaaggggcacggtggaggggtgcggtgggggcaggcggcacaggggaagagggtggggatccacgggcgtcaatggcgtccttccatcgacggagagcagatggggcggtgggtgggcagagggatctcgcgggcgagatttccgtgggcggtgggcgaggttggggtggtggatgtctcgggcgtgggcgcggcggcggagattgcggccgagggacgcagcgggcgaagttttcggcgcgcggcgggcgactggggagggggcgcggaggcagaacacaagggtgtggacgcctacagtggacgcttatag

SEQ ID NO: 22721 - DNA, 1617 bp, Zea mays
  Peptide Sequence Number=SeqID_66096
atggaggtagtcgagttggttccttgcgcccgcaacaagtggggcaattggaatgagttttggttttacgtcgtggagggtaccgtcgaagaccatgaggggctccccgtgtccaagatgtgctcgcatttttactcagcatacccgccctttgaggtggcggaggaggatgcggacgaaggggcccttcggtgcgccgccggcctgagcagtgggcacgatttggttgaagaattcgtggcgtacggggtatggcccttggctcatggctgggcgttgggcgaagtgtgccctcgccagatgccttcccatggtgggaagctagtgcaaagtcctgccttcgtgctggatctgcaaagccgcgatccggccgcttttgtgcgtgaggcggaggatggggcggtgcggatcgttggtcgagaattgatgaggacatgcgcggccccggggggaaggatgtcttcgcccaagctccgggagtcttcggcgcggatgctgagggttaccgggggttggtggcctaggaatgttcctatcccccacgcggccggcgaagacttttttacatctcgcatggttcgtgaatggaaagtgtttccttacgggcggaatattgctgctgttgtgtcggcagtgatggacaaggatcgccagggagctgcacagaagcggcaggcggttgtcaggcttcatgaagccaggccgaagaggcagcgaggggctgcgaaggctgctgcccccggtggaggcaagccgccgctggcggcgaagtcgaccgttcctgcatctagcaaggcgccggaggctgcggctggcgccggtggttccaggcctgcgaaggctgtgccgacgtccagcagggtgccggaggtcgcgaaggtggcccgagggttgccgtcgccgggcaagggcgtcgccgacttcgccaccgatattagtgtggacgactatcttggtgggtcggacgaaggccaacttgttattgttgcgcctgccgcggcgaccacggcggctgccgtagtgccgaaggcgaagggcggtgcgcttagtgccggaggcgagatgccggcactcgctgctgtcagggacgaggcgggcgctgtgtcccaccggctgaaggagatgaaggaggcactaagtcaggcggctgacttcgcagaccgcgcggtgtcgggggccctcacggtagttgtgtctgccgaagtcgagagacttcggacgcaacatgctgacgccgtccgggaaaaatcggccgccgacagtaagtgccgcaagctggcggacaaggtggccgcactggagggggagaagactgacctccggcgccaactggcgggggagaggagggaggccaatgaagccctcgccaaggcgcaggctgcgctggcggaggccaatttggcgcgggcggagggcaatcttgccagggagcgcgccgagcagttggaggagcggctcagcgccctgcagagccgtgtgaagagggccgaggccgcgacgcgcacggaggctgagcggacgcgcaaacagcttatggattcataccatgagctgggcgcgcggaccagtgacttcgaagtgccggaccgagagcccggacttcgctgcctggagtgg

SEQ ID NO: 22722 - DNA, 282 bp, Zea mays
  Peptide Sequence Number=SeqID_66097
atgggccatgttggaacttgctctcagttgcaaggggatccaacaagggtgaacagtgacgttaacagggttctcgcgcaagatggcaatagctttgttaatctcgcctctcacgggcactgtgcggggggggcgaagggtgtccctgcccgttttatctttgttggaccaacgactgcagcggatgcctcgagcgaagggtggcgtctttgccttcgccccaacatttgccctccgagggaccagttcgacaaagtcatctggtgccgaagacgtcgctag

SEQ ID NO: 22723 - DNA, 822 bp, Zea mays
  Peptide Sequence Number=SeqID_66098
atgacgaacgcgaacatccccgacagcaacacgctcacgaacgaagtgaagatcgatctcgacatgcttcatgtgctggtgttgaacaaaggtgacagaaaaataggagatgatgttgtcgcagtagataagtgtgctcctggaccaagagatgatgttggccccaagaaacaccgcatagccgaatgtggaccaacgtgtgtccggccacccggcctagtgcggctctcagggatcatgcatgtagagacagacctattggacagtatacgcgatgtcaggtcggatgaaggtgagatactgaagagcgccgacagtactgtagtaggcagtgtggtcactcataggggaacgtcgccagagagcttggattgcatgtccattggtgtcgcacatggcttgcagtctagcgtgtcagcccacaccccaccgccacaggatcccatccagccaacgctgcccctcggaccttgtcgatccgtcggccccagatctcatgtgctggtaaacctcatcagcacaaagctgcgaaggcctgatgggcgcgattcaggccaaggctccgctcaaaggacacgatcccgcctcgcccgagcccgacctcgggcaaagacaaccgaccccggaaaattcacgcctcgcccgaggatcccctcaagcaacggacgcaccgtcgactcgcccgaggcacagctcggtcgacagggccgaagtgaccgcagtcacttcgccgctccactgaccgacctgacaggaatacagcgccgcctgccctgctccgactgtcgtgccactcgccagagtgaggtcgacagcggctaa

SEQ ID NO: 22724 - DNA, 762 bp, Zea mays
  Peptide Sequence Number=SeqID_66099
atgacgacctccctctgtgaccttagggagccagtctccgatcgcaaactcgtcctcagccttctgtgtggcctcaatgagtgctacaatcaccttcgggcttggatcacttgctcggtcccattcccttgtttccacaaggttcgtaataacctcatccttgaggagctcaccaagggggcgccgcctcgtttcgatgccgctactactctctacagctcgacccctaggggccagacttcgcgagtactaggagatattctatcaaagacaacttttccggtgtttccaaagaatccagcagcaggaaccaaaactcctttgctaaaacacaagataccagtatgtggtccaaggtttcagaagcctgatcacataaaggatacctctcaaggttcccccatgtcgctcccacctgtggcaccgatgcctctcatggtccttgtgcccctggactccctccgggctaccctaccgccctggttggattgtgtgcccctcgctggcctccgctggatcgctggtgactttggtggcctctccttcgccctcgatttctctgacctcactcgtgccactaggggcctctccgatgccctccccgacacaccctcactacgccaactccgtgcatgggtgggtgcaccgacctgttctcgggccgagccgacgattgctcttgctgatcctcactggtttcacgctatggaggaagatacctccttgccaatcacacctgggatttggtgccccatctcctag

SEQ ID NO: 22725 - DNA, 774 bp, Zea mays
  Peptide Sequence Number=SeqID_66100
atgaaggttcttgaaggcagcaccaaggtggagagcgcgagcctcatggttgccgagctactcctcgatggcaacccaagtctgacgagcagtgacgccatgctcgcgaatgacatcttgcagctcaacaatgatcgtcccaaggatccaggagaggaccacactatccatccgtcgctaggagggtatggcgtgaaggaaggcaatgacaacgacctcgtacaccgaaagaggatctgggagaggctcgaagcagggagagccaagcaaatggcgcacggcctcggcaagctgcttggtgaggctgtcgccaacactgagctatgggcgtgtgctcccctctcctcttccctcctccctcccctctcctcttcccccctccctcccctctacctcgtcgccaaatctgctctggaggtgcgccacgagccttccaggccgccagcgcagccgctcaagtgcctcctcacgatcgcgaaggggaggggcttgccagcgcagcctggacagcttgcggtcgtggaggagaggggccaccgcggaagtgacggggtcaagggacctcgccggcgtagcctagacagctcagcagctcgcagtcgcggaggggaggggccaacgccgccgccgctagcacttcaaggcgtcctcttcccatcgccttatgcctctccaaggcgtcggggcgacgccctaacggtcgaagcgaacgccttacaaacccaggtaaggcgacgcggacgccttacggtctacgctcgccttggcgcttag

SEQ ID NO: 22726 - DNA, 489 bp, Zea mays
  Peptide Sequence Number=SeqID_66101
atggtcgctggtggctccgccaaacatgttttaacttatagcccctcctttgatccaatcctggatccgccactgacagtccctgctctcgcgactcgtgtagctaagccacgcggttacaaccaagctcggcgccaagatctgtggcgccgagctcggtgccatgtcgacgccacggcgtccgagttgtgccagcgcagcaggtacctcggcgccataggctatgacgccgagctgtgttacctcggcgccataggctatggcgccgagcaaaggtctggcatcgctgaactgggcttcgctgcagttggcctcaatgtcattggcatgaccctgggtagtctaggcactggtgctaccctcggcgctgctcccaccgttcgcgtgatctacctcaggctctctccgtccttcaggcctcctgtcgatgtggcaactgctcagtccaccctggcagtggccctcacggctactaaggctgttgcatag

SEQ ID NO: 22727 - DNA, 669 bp, Zea mays
  Peptide Sequence Number=SeqID_66102
atggatcgtgacccatgggcaaaattccgacgcccaaacagtgagcacccagcccaatcagaggagacacgcacgcaccagcaccctggtgtggccggtgcccggcggccaaacgcgatgccatctccgtctccagccccgccgccagtgctgccgatctcggagcacgaggacgagatagtcgccgcggtggacgcgaacccagtggtggtggtcatcggcgagactggctccggcaagagcactcagctctcccagatcctccaccgccgcggatacacccgtcggggtgccatcgctgtcacccagccccgccgcgttgctgcggtttccgtttccagaagagtagctcaagagcttggtgttccacttggggatgaagttggttatgcaattcgatttgaggacagaacttcagaaagaacatgcataaaatacctcacagacggcattcttctccgtgaaagcctttcaaatcctgagttgaagcagtactcagtaatcatactggatgaagctcacgagcgtagcttaaacacgtatgagtggacagttgacgccgacccgttaatgatggggggccaggacccaagtaagaacaaggaaatgaggccacactgcacctcagcacattgcagccctcttgaaccacatgctcctcacatctga

SEQ ID NO: 22728 - DNA, 252 bp, Zea mays
  Peptide Sequence Number=SeqID_66103
atggctcaccggagttcctccagcccgcccgaggctttctcaccgccgttctcccctctctgcccgtggattcatggccctttccccgccattgagttcgccgtggcgccttcttcctctctgcccaactccggcgaccctggaacccccctagctcacgcctgtctcaactccggtgacctcaccaccacggagaggagcagcgccgccctcagccgttcacccctccctggtctgatcctctccgtctga

SEQ ID NO: 22729 - DNA, 672 bp, Zea mays
  Peptide Sequence Number=SeqID_66104
atggtcagcgagggcggcgcagcccacgccggtcaaggagacacccgtttgggaccaggcgcccactggtgtttgcggtgcctccgcagcgaaatcttggtcgaggttgcaaccctcgacgttctgtcagcgctcacgcgccctttccaaagagacccgggcgtcttctcccatctgtgtatcttcggcgtgcagggcaagcttcttgtagaagggataacacagtgcactgcttggcacgggcgcactgttcgccaacagacccagcaggcgcgccgcttgctggatgaccttgatgccgcctgccagcggatgggacgggacacattaaatgctgagagggcacgacgctcgtcagcgcagtggcaggcagcgcgtcctctcctcaataaatgcaggggctacacgactttacgtcaggctcggcccgatggcttatgtcatgggccacaagcagcgggccttcgcctgcgtggggagcggagaacaaggcctacacacgtgtcagcaccggacccctgcataccccaaggtccttctcgttgcggaaccctgccggggttcggacctcccccggggctccggacctccgaggctaagcttacccatgacgaggcatgtggccagttaaagggtcctagatcaacaggccaacaatcatacagtccttaa

SEQ ID NO: 22730 - DNA, 864 bp, Zea mays
  Peptide Sequence Number=SeqID_66105
atgtcttcactggaggctccaattccggtgaagacaactagacggaccaccagggggctccgtgctacctcgcctaaggggccgaagcctgccttccccccagaaacccttctggactccccacgggtccaaactttcgatgggtttgtgcaggggccactacagcgcgaggacgtggactcaagtggaggactcacatgtcaagttgcaactcgaaatgcacatcgtaaccaggcgctcaggtataaactacccgacgccagcagagtcgcgctggaagttcgtggccactgtccctgcggaatcctccaggacgacgtgacaacggtgatggccgcctcaatgcatgcgccattgcgaagagatcctcgcccctgtcctcctacggggggcgacaacgaggccattaaagccaaagagtcggaggctcggtggcagggggcgctggtggtctcgccagcggaggcaaccacctctgcagcgggcagcctcaccagcggcggcgaccacctcagcaccgacgacagcggccacctctacaccggtggcttaccggcgacggcggccgcctcagcgcgcgcgaagagatcctcgctcccgtcctcctacaggagtgaggacaagaccatccaagaacgtggccgccccctccacggcgaagaagcgggtcaccagcccatgcggaagacaggaccccaactcggctcgccttccaccacaacaaggatgatgaacatccttgaagctgagggtagggggaggccgcagcccggctcgcttctctccaccacgaggctggtggtcatccttgtagatgaccactggcgggagaccgcagccgggatgcatgatgaaaatccttga

SEQ ID NO: 22731 - DNA, 96 bp, Zea mays
  Peptide Sequence Number=SeqID_66106
atggatccaaaagggaagggaatggtgatcaatgacaagaaaaaggacaaggagactctctatgttgatgagcaaaaaggttggattatcccttaa

SEQ ID NO: 22732 - DNA, 321 bp, Zea mays
  Peptide Sequence Number=SeqID_66107
atggctatggtgataaccatcgccggtctttgctggcgatcaacgacggcgtcaagcgatatccattcttacgggcttgccacgtccccgtcgcgacagcaacgcagtcacattggtgcggcgtggatgaacggaagggagggcgtcgatgaccggatatggccggaacgaggagtggccgcgtggcagccgaaattattgctctccaccgcggcgatcttacccagatcaaaaagatcttcgcgcggagatgctcgccgatcgaccatcccgaccccggcgcaaatcgcggcgcggataggtcatcggcggcgaggctga

SEQ ID NO: 22733 - DNA, 466 bp, Zea mays
  Peptide Sequence Number=SeqID_66108
agttataagtcctgcgggtccgacaacctcgggacccggagctagagaatggacattagtctcctggggtggtccggagcccgtgcagccgctcagcctggtcccgtaccgtgagcctgcacgctccaccgcctgcgacaagtgtcctaatccagatctcggcgagtttgcctcccgaggattgttgacaacattttcagaaacgctggaatggactacgctgcaccagcaagagtcgcgctggaagctggttccggacagccccaccaacgacggcgacctcctctgcaccagcaacgacaacgacctctgcaccgagcggctcgccagcagcagcgatcacctcagggtggcaccgacggtctcgccagcggaggcaaccacctctgcagtggacaacctcaccagtggaggcgaccacatcagcgccaccggaggcagcgaccacctcttcaccgatggatag

SEQ ID NO: 22734 - DNA, 315 bp, Zea mays
  Peptide Sequence Number=SeqID_66109
atggcggtggcaggcgggcgggcgcaacagtcacgtcgtcagccaggctcacgtctcatcctggggcagcaagagagcctcctcccacgggaccgggaaagggggataccccgaaaaggatccttttccgcgaaggaaccgggctccgagccccccttactgatcaggggttcgaagactggccctccgaagggttcaacagtcgcctcagatcgcgtgggcccgacacccactactggtcaggggttcgaagtccagccccccgaagggctccatggccgcctcaggctactcgggctccgcgcccattactga

SEQ ID NO: 22735 - DNA, 546 bp, Zea mays
  Peptide Sequence Number=SeqID_66110
atgggaagctctgcctcgcccgacccagggctcggacccagcctcggcctcggaagacggcctctgcctcgcccgacccagggctcggacccagcctcggcctcggaagacggtctccgcctcgcccgacccagggctcggactcagcctcgaccccggaagacggactccgcctcgcccgaccctagggctcggactcagcctcggcctcggaagatggtctccgcctcgcctgaccccgagctcggactcagcctcgaccccggaagacggactccgcctcgcccgaccctagggctggactcagcctcgacatcggaagacgaactccgcctcgcccgacctagggcccagactcgacctcgacctcggaggagcctccgcctcgcccgacctcgggctcggacctgccacgtcaccaggaaggccatcattaccctacccctagctagctcaggctacggggaacaagaccggcgtcccatctggctcgccccgggaccccccggggtcgaaacgccgacactatcaaaaattcgactgtag

SEQ ID NO: 22736 - DNA, 378 bp, Zea mays
  Peptide Sequence Number=SeqID_66111
atggagtggagctcaccgtatgacactggaggcatacgtctgaaaaacccgaaggtgaagagttcggactgtatggctcctggtgcactggacactgtccggtggcacaccggacaatccggggaaaggtttgaccctatttccctttcaaataccattcacgattatcaggtattcaggcctagaagattgatagatggaccctacacttcatatgatcttaatacacttcttaaagctacagctggggagcgacgagcagtagtcataggcaaagctgcaatccatagagagaaaaatactgtagaagccgcagccgcagccggattgcagccgcagcaagccgcagcgaacaagctggaagtcccaacaacctaa

SEQ ID NO: 22737 - DNA, 90 bp, Zea mays
  Peptide Sequence Number=SeqID_66112
atggagttccccaccgaccccaagccgtcggaggaggagatggtcgcggcctacgtcaagaccctcgcggccgtcctcggaagtccataa

SEQ ID NO: 22738 - DNA, 351 bp, Zea mays
  Peptide Sequence Number=SeqID_66113
atgaggcctggatcgacccccggaccatcttcgcgccggtgcatccatggctccgccgccgcgctcccaacgctgctgctgctgcttcttcttcttctggctgcatcgtccgcgcaagctcagcaaacgtcaaggatgaagaccgatccagtcgaagcggcggcggtgaacgcggtgttcgccaagctcggccaggcggctacgtcggcatggaacatcagtggcgacccctgcacaggcgccgccacggacggcacgaacatcgacaacgaccccactttcaacccggccatcaagtgcgagtgctccgtccagaacaaccgcaccgtctgccacgtcaccaagctgtaa

SEQ ID NO: 22739 - DNA, 297 bp, Zea mays
  Peptide Sequence Number=SeqID_66114
atggccttccaaatggagctccaacggctcctagctgccttggggatcacctattcaccccctataggtgctctcaccggcgcaccgcccgcccccacccacgtcaatccacatcgaccattaatatctcatctcctcacatcaagacttcgtctcgcccctatccccaattcctccatgcttcgtatgagactgtccccggtctactccttcacctccctcttccgtagcaaatccagatctgagcgcaatctatggctcggtatcacgttctgcagtggcggcgtgctaggctag

SEQ ID NO: 22740 - DNA, 507 bp, Zea mays
  Peptide Sequence Number=SeqID_66115
atggccgttggaaggctgcggtcgcatggcgcaccggacagtccggtgcgccagccacagaggaagaagcagaagctctctgagatccaatccggcgttgaggaagctgaatcgctgattcggaagatggacctggaagcaaggagcctacaacctagcattaagagtgagctcaagaggatatctgcgcccattgccaggcaggctacccgggaggagctcctggagtctggaatggctgatactctcgcagaagccaggaacccatccgaacaaggttgcaatcatgataagcagatagagcaagcatatgatgatattttgaattcgtcgaagcatactttggccagcatgatggagctgcaggaggctttgcttgagagtaatcaggtgtcacacccggttttagaaggcaaaccgaatgcgaaccatgtacgtgccaggatcagttattcacgtacacagcagttacataacatggacatcatcacacagtgctcaaaatag

SEQ ID NO: 22741 - DNA, 360 bp, Zea mays
  Peptide Sequence Number=SeqID_66116
atgaagctgtggaaggagacttccaggagttccaagattacgacgagttctaggtgtgggttagcggcaacccccagtcggctgcctgtgaaggccgcgggggtgctggccaagctgggtgagctgacggaggaggaggcgacgacgctgctgcgcgtggacgccgagatacgggcattgtggcagaagctggcctacctgcaggcgctcgtacgcggggccggccgccagcgccgcgaccgcgcaagcgagctgctcctgctctggctacgcgagaccagagaggttgctttcgcgggtggttctgccatacatagcggcgatggctcttcctcccaggactaccatatctacacataa

SEQ ID NO: 22742 - DNA, 1461 bp, Zea mays
  Peptide Sequence Number=SeqID_66117
atgtgcggcccccggggaaggatgtcttcgcccgagctccgggagtcttcggcgcggatgctggaggttaccgggggtcgatggcccaaggacgttcctatcccccgcgcggccggcgaagacttttttacgtctcgcatggctcgtgacttgagagtgtttccttacggacgaaatattgctgctgttgtgtcggcagtgatgaacaaggatcgccaggaagctgcgcagaagcgccgggcggtcatcaggcttcccgaagctaggccgaagagggcgcgggggactgcgaaggctaccgcccccggcggtagccagccgacgctggcggcgaagccggccgcccctgggtccagcaaggtgccggagagcgtgaaggtggccggcgtcggcggaaccaagtctgccccggacggagccgcgaaggcccgggaattgccttcgccggggaaacgcgttgccgacttcggcacaaatattagtgtggacgattatctcgttggatcgggcgagggacaacttgttgttgttctgcctgtggtggcgaccacggtgtctgccgcggtgcctagggtgaagggtagcgctctcagcgctggcggcgagatttcggcggtcgctgccatcaaggacgaagcgggcactgtgtctcgccggctgagggaggcgtcacagcagttgagtcaagcggccgacttcgccgaccgtgtggcgttgggggcccttactgcagatgtgtctgccgaagtcgagagacttcgggcgcagcatgctgacgccgtccagaaaaagtcggttgcagatagcaagtgccgcaagctggcggagaaggtggccgccctggagggcgagaggacagacctccggcgccagctggtggaggagaggagggaggccaacaaggccatcgccaaggcgcaggcggcgcaggcggaggccaaattggcgcgggtggagggaagtcttgccagccagcgcgccgaggaatgggaggtgcggttcaacgctttgcaggcccgcatggagagggccgaggcctctacacgctcggaagttgagcggacgcgcaaacagctcgtggactcataccgcgagctgggcgcgcggactgctgacttcgaagtgcccgaccgagaggcgggccttcgcttcctcgagtggctgcaagaggaattgttggcgctcccgaccatcgtggagggatttatgtcctatgcctccctcatcacctgcgaaggggcgttgaacgcgctgtcccacgaggggtgcagtcactatgaggacaacaattcccgcttgccagccctgcccacacgaagccgaccgccatccacttcactcactctacgcttcgccaccgtccttcgccgcctatgcccagcactcggaccaggcaaaacttcagcatccgtaacatgcggagaagcctccgccgcagccacatccaaggccgcaaaataa

SEQ ID NO: 22743 - DNA, 117 bp, Zea mays
  Peptide Sequence Number=SeqID_66118
atggctacgtttagaagtgaggacacgtgtcacctaaagatcatcctgaacatggagcgaccacccgggaaaacagtgctaccacaagggtttaatgggacgcccttggctgattaa

SEQ ID NO: 22744 - DNA, 1200 bp, Zea mays
  Peptide Sequence Number=SeqID_66119
atggctaccacctggggggtcgatccctttttaaaggcgactctcctcactcgcgtcctcaggcgtcacggactaagtcttcaccaacgcgctccaaggtcctccccctacgacacgggggctgagtcccacacgccatgcaagctggccgggacaaaagaagccaaaccgccgcgcgcggagcgtgtaaccgcccagcggttacaagcactcctccatcttcgcctaaaccagtgggtgaaagggcggatcgccatgcaggcggcatgcaactgcaccacagagatgcacccttacgacttcgacgcatccagcatggaggcccaggcccacacgtcatgtaactggcgcaccggttgctacttgcgaaaaactgcaccgccacttacgccaatgacgtgcctcctcgactacggaactggtgccgcgactcggggcaaccctgcgcatggcccaacagtgccaaccaagcacgtcggtcacaggtcagtcagccgcgggaaaaggcgcgacgatcgatatggccaaagggaccgggaaaggggatacttcgaaagggatccttctctgcgaaggaagcgggccccgagccctcctactgatcaggggttcgaaggctggcccctcggaagggttcgacagccaccccagagcactcgggctccgcgcccactactgatcagaggttcgaaggctggcccgtcggaagggttcgacaaccgcctcagagcactcgggctccgcgcccactactggtcagaggttcgaaggctggcccctcggaagggttcgacagccgcctcaggccactcgggctccgcgcccactactgatcaggggttcgaaggctggccccccgaagggttcgacagccgcctcagaacacgcagagtgagggatgactctgggtacgtccgatacatggccgaggctcgggctacgctcccgagaggctcgggggctgctctcgcaaacccggctccggccaaaccgttgacagcgtcaatataccagcccgagaactcggaacctgactatgcacccaggctacgaccagtcaaagctccgtccactccagggacacgatctcgcctcgcccgagcccagcctcgggcagaaacagtagacccaggcggattcacgcctcgcccgagggcctcctcaggcaacgggcgcaccttcgactcgcccgaggcctag

SEQ ID NO: 22745 - DNA, 519 bp, Zea mays
  Peptide Sequence Number=SeqID_66120
atgaaccggagccggaggcagcggtgtgagcgtgaacagaggtggagtcggctggagaagaaacttcgtcggcccaggagcaggggacttcccaggccgaggaggcgtagcagcggcggctggaacctggccaggtcgtccacttggcgggaccaaccctggagtcgggttgccgaggccatgagccgggctaatgtcctcgggggtcagctggctgaggctacggagcggccggtcaagccgtctgctcaggtcgggcgcggtgctgatatcttccttcaaggtggagatcctccgaccgtgttgctgtccgaggctgggtcggattccgccgaaggtggagtcaatgccgagggtgctgctgctccccctactgatgacttgttcgtcggtagcggaatcgtttatccgagcgagagttacttttcatggaaggtgatgagtgaggagtccctcagctcggtcgaccttgccgcttacgtgtactccgtcgtttttgggattccactatcgaagtag

SEQ ID NO: 22746 - DNA, 513 bp, Zea mays
  Peptide Sequence Number=SeqID_66121
atggtcgtcgtcggggggcacgaaccaggcgtgggtctatccgcagagaggaagaagcagaagctctccgagatccaatccggcgttgaggaagctgaatcgctgattcagaaaatggacctggaggcaaggagcctacagcctagcattaaggctggtttgcttgcaaagccgagggattataaatctgacctcaacaacgtcaagagtgagctcaagaggatatctgcgcccaatgccagtgagctaatgctaggacttgactgtgtctacgagactgctcctaataataaactgaagaaagcaaaagaaatcattcaacgtattcgccgaagagaactctacaaggcatccacacaatggattggtgcacggttctgccgatgtatcccacgcacgcgcatggaaggaggcaggcacccttccctgccgccccggatctcgcgccagccatcgccctaccccgcctgcccttccactcttccccctgaaagtcgcatagagggggggtga

SEQ ID NO: 22747 - DNA, 783 bp, Zea mays
  Peptide Sequence Number=SeqID_66122
atggtccgacggacgccaaaggccgtcgtgtctcccgccccatcactcgcctgcgatgtcgggcgtccacaaaacggattggtgcacggttctgccgatgtctcccacacacgcgcatggaaggaggcaggcacccttccccgccgccccggatctcgcgccagccccagccctaccccgcctgcccttccattcttccccagccgccccccggtcaacgtcacgaacccgggcctcgtgccgttcgccgtggccacgcggttcgacgagcgggtcacggagctgctgagcgcgctcgctgacgcggcggcggggcgaccaggcaggtgggccatcggcgaagcgccatggtcgtcgtcggggggcaggaaccaggcggtgtacgcgcgccgcgcgcccggctcttcatcgcctccacccgctccagcgtctccaccacctccttcatcgagggccgactgcgaggctcgccggccaggcagccgagcgtcagttgcgccgcttggaacgcctgcttttgttgatcagaggaagaagcagaagctctccgagatccaatccggcgttgaggaagctgaatcgctgattcagaaaatggacctggaggcaaggagcctacagcctagcattaaggctagtttgcttgcaaagctgagggagtataaatctgacctcaacaacgtcaagagtgagctcaagaggatatctgcgcccaatgccaggcaggctacccgggaggagctcctggagtctggaatggctgatactctcgcagtgagctaa

SEQ ID NO: 22748 - DNA, 111 bp, Zea mays
  Peptide Sequence Number=SeqID_66123
atgacgagtggtcagaagtacagagattgcagacaagcctgtaggtcattttatatgagccatcaaattgcgatgacagttgccacaaatccagtttcatatgaaggttga

SEQ ID NO: 22749 - DNA, 358 bp, Zea mays
  Peptide Sequence Number=SeqID_66124
aagcagctctgaatcactgcagatggacagaccatcagaaacctttagaagatctctaaagcctctgtctctgtgtgctataaacaaatcctggggtctcccgctctacaatcccaaggcgacgaggaggtgccgctcaccacccacccgcggcctcgggccctcggccaccctctgctctgctcccccaatgcctcagcgcctgggcgccaccacggcggcgaggctggtcgcgctcctcgtgtgcctctccccggcgctgctcgcgccctgccgcggtgtcaacgagcaaggccaggcgctgctgcgatggaaagggtcgtcggcgcgcggcgcgctggactcgtcgtggcgggcg

SEQ ID NO: 22750 - DNA, 930 bp, Zea mays
  Peptide Sequence Number=SeqID_66125
atgaaggtagagcgcgatttccacatgagccggggcgacggcgaggacagctacgcctccaactccagggtccaggagaagtccatactcaagacgaggccggtgctgcacaaggccgtgacggcggcgcacgccttgtctctcatctccgcaggatccggcggtggcgccatggtcgtcgcggacctcggctgctcgtcggggcccaacactctgctcatcgtctccgaggaccggcgggagaaacctctgccgccgccgtattacgtccccgggctaccgggctccttctacacccggctgttcccggaccgctccgtccacctcttccactcctcctactgcctcatgtggcgctccaaggtccccgacgagctcaccggcggcgccgtcctcaacgagggccacatctacatctgggagaccacgccgccggcggtggtggccctgtacaggaggcagttccaggaggacttgtcgctgttcctcaggctacgccacacggagctcgtgaccggtggccacatggtgctgacgttcctgggcaggaagagcaaggacgtgctccgtggcgagctcagctacacgtgggggctcctcgcgcaggctctccagtcactcgttaaacagggccgtgtggagaaggagaagctcgactccttcaacctgccgttctacgcgccatcgatggacgaggtgacagacgtgatcgcgcggagccaggcgttcgacgtcacccacatccagctcttcgagaccaacttggatccacatgacgacgacgacatggagatggagatgaacgaagacgccgccgtccagagcggcgtcaacgtagccaggaccatcagggccgtgatcggaccccttcatcgcgggccactttggcgagcacatactcgacgatctcttcgagctgcatgccaataa

SEQ ID NO: 22751 - DNA, 168 bp, Zea mays
  Peptide Sequence Number=SeqID_66126
atggggtcgtggagaaccctcgcacgatttaacgaggacaacctcataccatgcgttggatttggcgacagtcacgcgcagcctccaaagaggcagtggcatcctcttctgagcccacaggaaagggagaccgtagatgcaatggatgccaaatattccagtgattaa

SEQ ID NO: 22752 - DNA, 132 bp, Zea mays
  Peptide Sequence Number=SeqID_66127
atggcaatttcgtcgaaagccgccgctgcgttggtggtcaccgggatgctgctcatcagcaccacctgctgcttcgtgcagctccccgcgccgactcattgtccattcactggaggtagaactctgctgcag

SEQ ID NO: 22753 - DNA, 414 bp, Zea mays
  Peptide Sequence Number=SeqID_66128
atgcaggcggcatgcaaccgcgccaagtggacgcacttctccgactcccgacacgcccgcatggaagcccaggcccacgcgtcgcgcaaccggcgcgccggatgctgcatgcaagcaactgcatcgcctgcgccaccaccgagcaacgggcgacgcttcgccttcgccgaaacaaccgcgccaaaaaagggaccgggaaagggggataccccgaaagggatccttccccgtgaaggaaccaggctccgagcctccttactgatcaggggttcgaaggctggccccccgaagggttcaacagccgcctcagatcgcgtgggccctacacccactactggtcagaggttcgaaggccggccccccgaagggttccacgaccgcctcaggctactcgggctccgtgcccattactga

SEQ ID NO: 22754 - DNA, 660 bp, Zea mays
  Peptide Sequence Number=SeqID_66129
gttttggagacggtgatcgccggatttggaccccgaggtgagctccctctccttctccctctccctctctctcctccccttcaccttctccttcctccccgcgcgggccccccggcgacgctccccgcgcggccccagcgacgctcccccgtgcccccccggcgtgctcacccgcggccccaggcgcgctccccgtgccccccggtgacgctcccccgcgtggcccaccggcggcgctcccctcgcggcactggcggcgcccctagtagcccccctgccccgccctccccgcacgcgtccctcacggcctcctggcgacgccctcgcgcgcgcccccgcgcggcccctgctcggcccctcctcggtggcgcccgccctgtccacggcgcggctgcgcgcccccgacgtgactcgcgtggtctcgcgtgtccccgacacggcctcgcgcgccctgatacgcgcaacgcgttcctgcgcgctgccccatggaactggggtgtagttcgcttcgtcgtcgtgccgttaatggggctcggtgtatgcggctcgctctgccaaggtggcgatgaggaggatggttatgattatgcttatggtaatggagaagatgaagctgtggaggaagacttccaggagttccaggagtatgatgagttttag

SEQ ID NO: 22755 - DNA, 381 bp, Zea mays
  Peptide Sequence Number=SeqID_66130
atggaaaaagagccacttgacatggttgagagctcagttcgagtcatcgagacacatgttgacatcattcgcagtctagtgactgatggggttgtggatactagtgaaccggaatcagtgtacacacttaagaccacttttgtttcaaattggagatttagacagagaaagcatggctgtgatgttataatgctgaaggaccccaagaagagattaagccctgtagtctaccacctcccgttatttgtgggcttcaccgatggctggaaacatttggtgatagcaaacgaccttcgggctgaagacgtctgcgagcttgttaaggggccagacgatggtgagccggtgtactatgtccggatgagtggtcacaaaatttaa

SEQ ID NO: 22756 - DNA, 207 bp, Zea mays
  Peptide Sequence Number=SeqID_66131
atggagagcgtggacagcagcgaggaggagaggaccgaggaggtcatcgagtcaattatagctgggatgtggaacatcatggaggtcgtggctgatccatgcgtgcgttcagctaggcagaacgggtgcgagaactacccatttctagagatgtatagggagcatgacaacatcgtcaactgcaccacccctaacttcactatgtaa

SEQ ID NO: 22757 - DNA, 474 bp, Zea mays
  Peptide Sequence Number=SeqID_66132
atggagtcctccacgggcgtgtgtcgggccaggcgcacatccggcgtggtggcctcggccttggtcgccagccccactagcctccgcgggcatctgccaggccagacacacccttggcgcggcggcctcggtcgccagacctaccggcctccatgggcgtgtgccaggctagcctccgtgggcatctgccgggccaggcacacctccggcgtggtggcctcggcctcggtcgccagacctgccggcctccacgggcgtgtgccaggccaggtccacccggcggacttggcctcggtcaatcagtcaccgaccctgcagcaggcctccacgggcatggcagcacgtgacaacataaacgcctacatctgcgacgtgcgccccaccgacatctatcgcaccatcacgcgccaccgcatcacctacatgtgtggcgttcccatcgtcttcagcatcctcctcgatggcgtcagttga

SEQ ID NO: 22758 - DNA, 564 bp, Zea mays
  Peptide Sequence Number=SeqID_66133
atgacaaatcaatcaaaagcggattcagcatctcatggagtaggcacacggtcccaaatagacaatttcgaagtatgggaagaagatggaatgattcatactcgagaatcattacgtcttaaaaccaatatctcggtatacaagaaggaggatgttcctccaaaatttgtgaatgggaggccgttcttgacgacggtgcaactttctaagttgtcgactccggagattagaatgcatgagtggtacatggtggctagcaacaaatacaaactcgaggacttcacatttgttgtgccagaagatgcattttggagcaatgatcatatagatcatgtgcgtcatttattctttgatgatctctggtcgttgtaccaccgacaaaggatggaaaccaactacttaactgttggggcgaaggcaaagacgccacccttcgctcgaggccttcgctgcagtcgctggtctgacagagacaaaacgggcagggacacccttcgctccattcggcaccagacgaaggcctgcggcgacgtcatcccgcagcgcggcctcgtccagctctga

SEQ ID NO: 22759 - DNA, 111 bp, Zea mays
  Peptide Sequence Number=SeqID_66134
atgacggggatgaaggtagataaaggtagacccgaggatgaagagctaccagtagcttcccggaagttggtaattttcctacggtttatcataaatggtgtagaaagttaa

SEQ ID NO: 22760 - DNA, 477 bp, Zea mays
  Peptide Sequence Number=SeqID_66135
atggatgaaggaactcccctcagtggtctggagtctgaggacgacgccaagccgagccacgggcttcacgctgttttttctagtctatggggccgaggctatcttgcccacagacttagaatacggttccccgaggacaagggcgcacgacgactgaagcgactagaccagccgagaagactcactggaccagctggaagaggctcgggacatggccttactacactcggtgcggtatcagcagtctctgcgacgctaccacgcccgaggggttcggtcccgagaccaccaggttcagacatcaacagggggagcagcagcaccctcggcgtcgactccaccttcggcggaatctggcccggcctcggacggcgacacggtcggaggatctccacctcgaaggaagatgtcagcaccgcgtctgggccatcgccgccagggtctcttccaggaacccggcccgagcagacagcttga

SEQ ID NO: 22761 - DNA, 396 bp, Zea mays
  Peptide Sequence Number=SeqID_66136
atggcgcctgaggctggactcggctgctgtcagcctcaccctggcgggtggcacagcagtcggagcagggcaggcggcgttgttttcctgtcagcttgtgctgatggtgattaccagccgagtttaggagtcttgggggtacccctaattatggtccccgacagacacgatgcggcggccgcctgtgcatgcactgaggctgagcacgccgctgctgctcctctgcctgtgcgcgttccccgcctcggcgcggtcgtagaacacgaccacgactacggccaaatttattcaactagatggagccgaaggctgaagctgttcgacaaaggtggcaaccctcccagcgagaggatgcgcgtcgggctctcgtgtaggttcctgcaacctggtgaatga

SEQ ID NO: 22762 - DNA, 207 bp, Zea mays
  Peptide Sequence Number=SeqID_66137
atggccctcatgccattaccttatgttgcaacacgtgacaataactttatagagactgttgagtatctaaatggtattgtgttagaaaatgatgggagaacaaatataattaattttgaatggttcgaaaaggttgacgagataaagaaagaggtggattcaatcgtcgatcctatactcgacaaggtcgccaaagacaagtcctag

SEQ ID NO: 22763 - DNA, 396 bp, Zea mays
  Peptide Sequence Number=SeqID_66138
atgagcgaaaggaattgggcggagactcactggatagctcggtccacgcgcggcggcggaagaccgaagtccggtgaggttgatctcgggcctccgatgaagtctggccgggtccgagggtttggcgagcttcacgggctactggcggagctagccgaagcactggctgggcttgagagtggctggagttggctggccacggcggccgaagctctggcggcaatggcgggcggaattaagctcgccggagctaagggaagtggctggccggagaggagatatggagccaggaaatctggtctgtctccctgcccaaacccgaggcaaatcccaggttttgtcgtgtctagggctcgcgtcccaatgccatcttctggcacacgacagaggggttag

SEQ ID NO: 22764 - DNA, 204 bp, Zea mays
  Peptide Sequence Number=SeqID_66139
atggcgagctcgaacagccacatggacagcgctggcaggggacttgagcacgcggcagacaggactggcggggaggacgacgatcgatttgggagcagagcgcagggtgcccggttcagtccggtccggtccacgggcaaaccagagactacaggacctacgtgggagggtgtatctgtaaaaatgtcgctggacgttggatga

SEQ ID NO: 22765 - DNA, 2628 bp, Zea mays
  Peptide Sequence Number=SeqID_66140
atgaccatgacttcgccgcaggcgctgtccgccggggctgtcaccgtggaggacgatggcggcctcgccgttccacttctagcggacggcagcggcgccacgaagacggaggaggagtgcggcgccgaggccgagggcaagtactgggtggccgccgacgaggcggagaggcaggcggtgacggactgcggcgctgaggacggccgtgcgctgctgttccggacgtacaagctcaggggcgccatcctgcacccctacagggcgctaatcttggtgcgcctcgtcgcggtccttctattcttcgtctggcgcatcaggaacagcgcatccaacgtcatgtggttctgggctacgtcggtcgccggggacgcctggttcggcttctcgtggctgctgaaccagcttcccaagttcagccccgtcaagagcgtgcctgacctcgccgccctcaggcgacactacgacctgcttccagctgatgatggcgccgcctctaagctccctggcgtcgacgtcttcgtcaccaccgccgactccgtcgacgagccggtactctacaccatgaactccatcctctctatcctcgccaccgactatccagccgacagactcgcctgctacgtctccgacgatagcggcgcgctggtcctctacgaagcactggttgaggccgcgaaatttgcaaggctgtgggttccgttctgccgcaagcactgcgttgagccaagagcgccggaaaggtacttcgagacggaaccacagggcgggagagcatcgcaagagtttgtgaatgattataagcgggtgcagatggagtatgacgagtttaaggtgcgcttgggtaatctccctgacaccatccgcaagcgatcgggcacgggcagcatgagagcttcagaaggagatgcgcaggggacttggatggcagatgggatgcagtggccaggcacatggatggatccgacagagaagcacaggaaagggcaccatgctggaattgttaaggttgtgttggaccatcatccaagccgtggacaccatggtccccgagcgggcgctggcgccggcgccgagaacaagcagtctgctgacgacttcggtgctgctgctgggctgcgcctaccgatgctcgtatacgtctctcgcgagaaggatccgaactacgaccacaacaagaaggcaggcgcgttgaacgcgcagctgcgagtctccgctctgctctccaacgcgcagttcgtcatcaacttcgactgcgaccactacgtcaacaactcgcaagcgctccgcgcggcggtctgcctcatgcttgaccagcgagaaggtggcgacaccgccttcgtccagttccctcagcgcttcgacaacgtcgacccgacggaccggtacggcaaccacaaccgagtgttcttcgacgggaccatgcttgcgctgaacggcttgcagggcccgtcctacctcggcaccgggtgcatgttccgccgcatagcgctctatggcgtcgacccacctcactgtaggcaacaacaactagagagcgtcgcgcctgaacctgctagcaagtacggcaagtcaacggccttgatacactcggtctcggaagccatgggagaacgagaaaggctgaccacgccgccaccagtaccaccacttgacgtggagatggttgtggcagcttcctacgacggagggactgactggggcaagggcgtcggctacatctacggcatagcaacagaggatatagtgacagggttccgcatccatgggaaagggtggcggtccatgtactgcacgatgcggcgcgacgcgttccgtggcacggcgccgatcaacctgacagagcgcctccaccagattgtccgctggtctggggggtccctggagatgttcttctcccgcaacaacccgctcgtcggtggccagcggctgaagcttctccagcgtgtctcctacctcaacatgacagtctacccagtcacatcgctcttcatcctgctctacgctctatgcccggtcatgtggctcgtccctgaagaagtgcacatccagaggcccttcactaggtacgtcgtgtacctgctcataaccatcctgatgatccacatgattggatggctcgagatgaagtggtcaggggtggcatggctggaccactggcgcaatgagcagttcttcatgatcggatccacgagcgcgtacccgatagcgctatggcacatggcaaagaaactcctcaccaggaagggcatacacttcagggtcacctccaagcaaaccaccgcgggcaccgacgacaagttcgccgatttgtacgagatgaggtggacgccgatgctggttcccacagcgtttgttttggttgccaatgtcggcgccgttggagtggccatgggcaaggccttggtctacatgggagtatggacggtggcgcagaagacgcatgctgcgcttggccttctcttcaatgtgtggatcatgctgctcctttacccctttgcactggcgatcatgggacggtgggcgaagagacccatcatcttgttggtactgctgcctgcagtctttgcagttgttggcaccatatatgtggctcttcatttcttacttgctaatgttatcccaatataa

SEQ ID NO: 22766 - DNA, 786 bp, Zea mays
  Peptide Sequence Number=SeqID_66141
atggctcgtcttagacacactgcacgtaagtcggtgattcctttcctgccgtctcgacttgcggagcgtcctctgcaccgcaccgtgtccggacagtcgagtcacctggagaggctgcaccaccgcctgcgtgaggagcaggaacgccggcgccagcacggagagcagcagggctcttcctcctcaccccagcaggaggtggagaccgtgaggccccgttcctctgttgcccagctgggggcgccccttgttccaccgcgggacgtcccggctgttggaggagctgttggaggagctgttggaggagctactggaggagaccccgacgacgactcagaccacagcacggagtcttctgagccgcaggaggcggaaggatgggtcgcccgacccatcacccgtgacgccgctcgcggttgtcacttccacgacgcactcgacaccttgctgcgccaggctttcgaccggcacacctggtcgatcgagtatcgttgtgtagtctaccagcacagtcgcgggaggtacccggaccgctgggaggctacctgcctagttcgccgtccggaggatgacctccggggtgcggaggccgtttcggagcactattccatctccgagagggacactgcagaggcggctatgcaggatgcagcacgacgtgcactctctcagtactgttctttgttcggtggcgtggccgacggtcttaaccttcggtactacccccgccgccctactggcagcacagagagtgtggttgtctcacccgttgtttggcttagctag

SEQ ID NO: 22767 - DNA, 367 bp, Zea mays
  Peptide Sequence Number=SeqID_66142
atgacgaccagggcgtcgttcaatctctggcatgtgggacccccacctgctgcatccccacgttggttacacagttacacccgcgtaatcaccttcgttgtagcagcaaagcacctggaggcgcgccgcactgttcttgggaacctctggacaggaaagattctgggggcgacctacactacggggatcgcatcagacctgttcggatgcaagaccatcgccgtggctggatctctcgtgattgggcgaactctgaatctcaggcaaggactctcatccatcggctctggtagcataccggttgaattcaacgacaaatctaatctggagcattggtttttgatcggacgtgtccgtgtggtcgcgg

SEQ ID NO: 22768 - DNA, 249 bp, Zea mays
  Peptide Sequence Number=SeqID_66143
atgcaggaatcccttgcaggaccgccatcgcagcaaaatcctcccgagggcctccctacactgaccactcccctactgcccttgcccctttcgggtaaggtttttcttccctgcctgggctgcactcactatttacagagaacccaggggtctcggggaaagattcccaagacacaaaaaatcctggactggaccgcgggatgccgattcgacggcacagatccaatcacccaacagcgatacgactaa

SEQ ID NO: 22769 - DNA, 204 bp, Zea mays
  Peptide Sequence Number=SeqID_66144
atggacggaaaacttcagcttcggcttggtcaacctgtatgtaagtactataatctaaattcaaaattcaaaagaaaaggtaatcataaggaacgcagcagcggtgccccgagaagctaccagggcacaaaagtcgtcgtgtccagcaataacatcatcgaggtcatcaatctcaccttcgatgtgttcgaaggctcctggtag

SEQ ID NO: 22770 - DNA, 228 bp, Zea mays
  Peptide Sequence Number=SeqID_66145
atgagggtggaatgggagtgttatgaaactgatatatcagccgtgctcgcggttatgagtggccaagggagctccattgattatagatacttgatcagatatggtttgtttacagatgatgatgaggaggatggttatgattatgcttatggtaatggtaaagaaagagaagaaagcgtcgaggtggttccccaggagttccaggacgtcgatgagatcgaggattag

SEQ ID NO: 22771 - DNA, 417 bp, Zea mays
  Peptide Sequence Number=SeqID_66146
atggccaccgtggccgagtcgtcgtcgttcattgcgccgaagtcttcgccagcagttcgtcgtgttctgcgtccatgccccaacgtcatgcgtctgtgccccgccgttcaccgtcgtctgagggggctcgagcagtttctcgagtgcctctccgtaaggacctgttcgttggattaccgcccaggaaaacagtgcaaccatgaggagtgttatgaaactgatatatcagtcgtgctcgcggttatgagcggccaagggagctccattgattatagatacttgatcagagatggtttgtttacagatgatgatgaggaggatggttatgattatgcttatggtaatggtaaagaaagagaagaaggcatcgaggtggatacccagaagttccaggacgtcaatgagttcgaggattag

SEQ ID NO: 22772 - DNA, 585 bp, Zea mays
  Peptide Sequence Number=SeqID_66147
atggacgcgcccacgaccacgcgttctccggccacgaccgagccccttttgaaccccacgccctgctcgcccacctcccctcttccatttgcgacctctgcccagctctctcgccctctctctcgctctgcccacgcgaaccgagaacctcctccaccgcccaccgacgtccaccgtctgttccgtggccgccgttgcgcccgtgccccgtccagtgccatgccagagctccaccaccgtcgccccgtcgtgtccctgtgcctcagccgttgccccgtgcctccagcgcttcccctcaaggagagcaacctccccgcgcccctatttccctgtgtactgcacttgttaacacacaatttctcgtgggagttgccccgcgccgccgttagcccgcctcgccgtgtgcagcgccctctggtgctccctatcggcgtggtgccctcggctgagtccgccagatccccctacaacgagcagttcgaggttcctgagtgtgttgttggagacctccctgagcaacaacctggaggtgaagctggcaacatggatgacttcgaggagttcctggaatacgatgagttctag

SEQ ID NO: 22773 - DNA, 306 bp, Zea mays
  Peptide Sequence Number=SeqID_66148
atggctatgttgactatgctgctcaacctaggattgtcctcaccaataggtgagacaaccaagcctcctgtgctgccagatggacgatggggagatagaataatgctccgagcagacctccgcaccccggagcctatcttccatatggcgcaccaagcaagtcgcctcccaacggtccaggagagcagcgcctcgcagactctacctcctgctgaggcaaggaagaagatccctgctgctccagctcctgtcgtcgacgctcctgctcctcgtgcaagcgatgttgcagcctctccaaatggctag

SEQ ID NO: 22774 - DNA, 531 bp, Zea mays
  Peptide Sequence Number=SeqID_66149
atgaagcaagtgcagcagcaacagcccccacctcaacctcagatgcaagtgcaaatgcctcagatgcctagggataagcgtgcagaatccatgagacatcatcccccagtctctctcgccctctctctcgctctgcccatgcgaactgagaaccttcgccaccaaccgccgacgtccaccgcctgttccgtggccgtcgttgcgcccgtgtcccgtccagtgccacgccggagctccgccaccgtcaccccgacgcatccctgtgcctccgtcgttgcctcgtgcctccagcgcttcccctcaagcgccctttggtgctcccgcgccggcgtggtgccctcggctgagtccgccagatccccttgtgtgcgcctaggccaacccccaagcctctggtgccccaccgtggccgacaacgagcagtctgaggttcctgagtgtgttgttggagacctccctgagcaacaacctggaggtgaagctggcaacatggatgacttcgaggagtttcaggaatacgatgagttctag

SEQ ID NO: 22775 - DNA, 600 bp, Zea mays
  Peptide Sequence Number=SeqID_66150
atgccccctgcaccacaacagggcatctcggctgctggaggagaccccgacggagacgacgatgacggcggtggcagttcgagccatgacacggagcgttcggaggagccagagccggagggatggatcgtgagacccatcactcgtgacgctgctcaggccttctcagagcattattctatcactgagagggacactgctgagacagccatgcaagatgcagcacgacgggcactttctcagtattgcttgttgttcagcggggtagctgatggccttgacctgaagtactaccctcgcctttcgatcagcagtgctggaggtgtgattgtctcgctagttggtgagggcaatcccacgctgagtagcatggtcaacttggtctccgtgctcaacacagagttggaccacacccttgacgagttgggcaaggttcgggcggaggttgcggaattgcgtgctgaatgcgcggcacgccactatcttgatggtggttctcccgccccggttgggtttcagcacccttaccattcaccgccccatggtcgcttcgactatggtaccccagactgtagggcccgcatagatttagatccatag

SEQ ID NO: 22776 - DNA, 537 bp, Zea mays
  Peptide Sequence Number=SeqID_66151
atgtcgcccccggaccccttcctgggcagggtccgggtattatttgcctcagaatcccgggatccggcgacccaccgcgtgtatcttggagcacatccctttccctggccacgtggcgacctcggggcggtcgatgtggcccggctgcgaactggtctccgcgcaactagagacctctccgccggcgtagcgccttcatattgtggcaagggcagctgtgattactctgaaatcacgagcaggggctggtttaactcgtctttgttgtatgcaaagctacgatccaccaatgtccaaggacgaacagggctcagaagccacgtaacgacgcgcagagacgccctgtcattcgtgtcatccgcgctgctggcagcgttgttcgtggtggccggtgcagcagaagctagaacttcgaggttggagaacaaaaagaaagccctggagaagctccgggagaaggcgttgggccgaaaggaggagaacggagccaccggtggcaagaagatgccgcctccgacgaacttgctaatccgataa

SEQ ID NO: 22777 - DNA, 528 bp, Zea mays
  Peptide Sequence Number=SeqID_66152
atggggaagcctgtcccatcactcctcatgctcctcctcagccgaggcaggtacaatggatcaagcagtctcattagctgcgagaagcagacgattcgaatcgagttttttatccttgcaagatcagggctcaccgccttggcgtacaatgccccactgaccccgactggccgtcgtgcagtggccgcacttgtacccaccataaccggaatgggagacctcgtctcaggtcgcgtgaggggtaaagtctgcgggcaggttcactcaggtactaggcttaccgatttaccatatttctcggttatgcataaaaccggggcttgccttccaaagcagtggcaggcaggtcctctggtgctggctctggtgctggatctggggctacctcctgagcagctccttgctccggcacgaggatgtactctccgtcagcaagattacagtctagcgaatgcaatgaacattgggttgtcactggctattttagcttgttttaagaatttgaggcttaaggaaactaaggggtag

SEQ ID NO: 22778 - DNA, 708 bp, Zea mays
  Peptide Sequence Number=SeqID_66153
atgccgccgcgcacaagaaagactgcgcgcaagtctatcgggccgattggcgtaccccaccatcaacttgccccaaggcatgaagacagtagcagtggtagcaacgatccaatcggggatctggaagcccaagtagaacagcttcgatcagagctccgtcacaggaacgatatatgggtcgcggatggtgaaagaataaatgaattgcgaactgacatccaccacttgcaagaccaacttgctgaacgtgatttagcgctcgattgggttgtgaactcgcgttcacttgcttgggccaaggaagccaaagctcgagcccgcgtggaggagcttagcacagccgtggaccacttgcaagtgtattgtaagacactacatgagaagatgccttccaagactcatgcacaggatggagcagggacctcccgtgggagggaaacaactccgaacctgcccccagtacctccaacattagctaaggccattgctgccttagttaatgctacagctgataatacccgctttctgcgggaaatggcgggacaacaaatgcaacagcaaggcgggcgagcctatcagcaaggaccccatgaaacatcgtatttggatttctccgagacacgtcctccattatttgtcaaggcgaaagatcctctgaaagcggatgagtggatccgcgttattgaacagaagttcgggcttctctga

SEQ ID NO: 22779 - DNA, 612 bp, Zea mays
  Peptide Sequence Number=SeqID_66154
atggaggaccaagccacccctctcgccagagttcctgcccatattggacaggatcaaggtcttggctacgggcgacctgacatcaatgcacgtggtcggcgatctcctgaagcgccggttcgcgccgctgcagagaaggtcgcgcctgtcctgctggacatcccgacgctctatgatgacacatgcttgaggacggcgatcttggccacgttgccaacccacgacgacagcggcgtggcggcgcacgtcttatccgtaataaatgcaaagacacgcgtagctcagaggctttatgccaggctccgcccgttggcttacgccgcgcgcagtaggccacgtggcagcatcgggtctccgcctgagcggggagcaggagtgtatgtgataaggtcaggtctggacacgtgtcggcaccagacccccgcctgggtcctgattaaggcccgggggtctggcaccttcccatgggggtctggactcactagtgatgcctcagagcatgtcactttctctggacacgtggcggcactggacccgcccatgtggtgggggtaccgacagaatccatctgggtgggtgtcatcagtggttcagatacaaattgatcactag

SEQ ID NO: 22780 - DNA, 405 bp, Zea mays
  Peptide Sequence Number=SeqID_66155
atgcccagtgtggacgatgatgatgactttgagccccccaaaaaaagactcaacattagatgcaacccacaagatgttcttacgtccattcagataatgaatgaaagacaatgtcaagttatagtcagtaaagttttctccaacattcttgacacggcgattgatgcaattggatgtcagacacatctttgttggctcatgcagaagctagaccccaaagacatgactctttgtattggtccagacaaagaactgaaaatcaccaaggagactgttcgtctaatattgagtcttccaaattcgggtggtgggaagacactaaattttgatgaagcgaatgtcgctgcaaaccttcagtcctccctgggcattaacaatgatgagtttgtgatttcaaagctatag

SEQ ID NO: 22781 - DNA, 354 bp, Zea mays
  Peptide Sequence Number=SeqID_66156
atgcgttgcacggaaccgcagcgcgtgtacaagggcaatggcggtgaaaaaaaagacgaggaattacccaaggagcaacacgcggcgggcggcgtggagctggaggtgttcaaccagggcatgttgaagacggagctgtgcaacaagtgggaggagaccggggcgtgcccctacggcgaccagtgccagttcgctcacggcgtcgccgagctccgccccgtcatccgccacccacgctacaagacccaggtctgccgcatggtgctcgccggcgaggtctgcccctacggccaccgctgccacttccgccacacgctcacccccgccgaacgcctccacctagcctgcccttag

SEQ ID NO: 22782 - DNA, 309 bp, Zea mays
  Peptide Sequence Number=SeqID_66157
atgtgggagcgcgagcgcgaggccaccgacgctatcgctgctcaaattgccgcggcggagcagctcctcgcctcacctgcggcccacaacggtgaggccacctctcatgccacgggcgtcatgcacggcatcctggccacgtcagccgtcggagccgggcaccgcaccacctctgccaccacggtgccctggcacgacccggccgacccactcgtggctcagctccaccttcaggctgggagtgtccaaaacattcgcctgatggtccccgtcgtcctggaggctgagtcgccgtcctacgctcgctag

SEQ ID NO: 22783 - DNA, 312 bp, Zea mays
  Peptide Sequence Number=SeqID_66158
atgaacaagaaagcaaagcaactaaggagaagacgcattgctcaacctcttcaagatatccatggacgcgtggtgaagaagcttgagaagggagaaaccacagcaagtgtcaaactccacaataagttaataaagcaacaaatgaacaaggaaaaaggcaaggatgaaagaatgaggatatgctttggatgcaacgataaggatcatgtgaacacttcatgcccactcatgaagaatcaaagacgtacattccccacgatgaccctcaccaaaaacaagaatgaacagcaagcgtcatatcaagctgagtga

SEQ ID NO: 22784 - DNA, 549 bp, Zea mays
  Peptide Sequence Number=SeqID_66159
atggaaattggaaatgatatcaaattacaaatgtaccttcggcttgaaaaaagcttcggctctgcgtcaaccttcgtattccttgtgcttcttcacactggttctgatccgagtctgaagaatagaagtttcctcttgtgccacaatgctataacttgtcctaagtttggtgtcttagtaataagaaaatgtcaggataaaggatcaggcacaagtgtgaaggagcaccctagagataaagctttcaagggttcaaagctcaaccttgtaatgaggggtttccttgagttcattttgatcttaaggggagaatgctttagttttgttaataatgcttatcatatgcttcttgttgtattatatggtgataatgcatataagatggacattgctcaagtgagactcggtgtgcgtaactcggagataactgatcaagccaaggatggaggcaagaagagtttcgaggtaccaagtgctcgggagaaggtcaaagaggctgaggaacctaaagccaggggtgaagaagaagacttgcaaagtcaaggttga

SEQ ID NO: 22785 - DNA, 243 bp, Zea mays
  Peptide Sequence Number=SeqID_66160
atggagctaggcttgcgtgcatggaggggggctcggccagggaaaggggtatgcgctgcgcgtgaagaatggagaagaagaataaataatggagacctcattggagttggagggtatgatctagtaagtgttgctggtggcgatgttgacacaaacaatggtgctctggcaggcgtagaggggaaggtcgccgatcgatccccctttggctatgtgcagaggcgaaggagcgacgtcatctag

SEQ ID NO: 22786 - DNA, 129 bp, Zea mays
  Peptide Sequence Number=SeqID_66161
atggcgcccaagaggaaaacctcgagttcgtctgccgtggtgattcctccaatcgaccccaacagccagttgcctttcgcagggagattcctgatgatgaacggcaggtccactttgaagtgcccctga

SEQ ID NO: 22787 - DNA, 333 bp, Zea mays
  Peptide Sequence Number=SeqID_66162
atgggcaagaacaacaagcgcaagcacgactcccaggggctcgcggcggaggtctggacgtacatccgggccgtcgagcgctccgggctcgagggctcggatgagtcggagtactcctcggatgaggaggactcgaacggcggcggcgaggacgagggcggcgacgacgacgacgacgacgaaggcagtggcgacggtgacggtgacggcagcggcaagggcggcggcagcggcagcaaggacggtgacggcggcggcagcaggggcggcagcggcggtggcggcagcagcaggggcagcaacaggggcggcagcaacagggccagtggctag

SEQ ID NO: 22788 - DNA, 468 bp, Zea mays
  Peptide Sequence Number=SeqID_66163
atgggcaagagcaagaaaggtggcagctcttcacatcactcgagcgacaagcgcaagcgcgagccgactcctccctcggaggacttcggcgactcggaatactcggaagaggagttctcctccgagtccgagggctctttggctcatacctctcccccggcgtcgtctgatgattcagacgactcccaggggatcgccgcggaggtatggacctacatccgggccgtcgagcgtgccgggctcaagggctcggatgagtcggagtactcctcggacgaggaggattcctccgactcgtccgaggagggcagcggcggggacgacggtgacggcgacgacgacggaggtgacggtgacggtggcagcggcagcggcaagggcggtgacggcagcggcaagggcggcagctgcaacggcggcagcggcagcaagggcagtagcaagggcagcaacaagaccagtggctag

SEQ ID NO: 22789 - DNA, 792 bp, Zea mays
  Peptide Sequence Number=SeqID_66164
atggctagggatccactacgaggcctttacaaagttccactagcttccgaaaacccgctacagtttataggaagatccagtacagggttcctggctgaccgccatcgcagcaaaatcaaccagggacctccccgcactgacctctcccctactgcccttgcccctttcggggggctcgggaggggttcaagtgtaaatcgcgcagccgaaggggtatggagctctgctggccgctggattaaacaccaagcgcccagattaaaccagaaactgtgcaagctggtactcattgcagaccctaggatctggatcctacggttaaggcgggtcacgtggtggactacacagacctcggatctgagccgttcatccccaaatcaacgcccccgattacaacccgcgaaggggtactatccaggcggaacttgccacgccgatgagaaattgcgcggtcacggtggcgttgatgacggaattggtgacgaccgaagctccacgagtgcacggcgcagcgatcggatgctccacggtggtccacgtgtccgcggttcacgagttcaacggcggtggcgagctttacccgagcggaacccggcggcgctccctataagggcgtggtcgtggtcaagcgctcaacagcttcaagcgagaactgcgcatgccgccatgctcggcgatttcgttgaggatggatctggcgcccaggtcccattcgccagcgatggggagaagaaaacgcagccagacaagcgggcccccggggtaagtggcgccagcgcgcatgagatttaa

SEQ ID NO: 22790 - DNA, 264 bp, Zea mays
  Peptide Sequence Number=SeqID_66165
atgaggaaaatcaatacaagcgatagagcaatcaagcagtgccagctcaaggaggaagttgtgcatgtttccactgtggggaacaaggaatctgggaacctgcttggcgtggtgaagcttcggcccgcactggattgggcgaaccttaccccggcggatcgtgatgcacctgtccgtggtgaggatcgtgagttatggagtcggattgcctctctccggcgtgaggacgccgtgaagtcaggcggtggcgccgtcgctagctga

SEQ ID NO: 22791 - DNA, 216 bp, Zea mays
  Peptide Sequence Number=SeqID_66166
atgtacccagcctcttgtaactcaattaactgcttctttagtccctttaactcttctacagatatcctgtatggccatttagaaataggagcagtcccaggttccctatctcttaagaaggtcataaatgtaggattgcaaggtgtgaaatccatcttgtatcagagtagaaaagataagaatgatcagagtggaacagtagaaggtgagacatga

SEQ ID NO: 22792 - DNA, 309 bp, Zea mays
  Peptide Sequence Number=SeqID_66167
atggcgagctcgtcggcgctcgtcgtcccctccatccctctccctctcccggacgcctataaaagggaccgcctgagctccgttccttccataccagctccggccatctcctccactcctccccgagccaatcgagccagcgccaccgcgtcttccccgtcgctccgtcgaattaaccagtgcgtgaagctccgccacacgctcacggtcacagggcacccctccccacctcctattgcacccggcagcctcaccggcgacctcaccgccgtgagcacccaccaccgcgccgcggtccggccgccctag

SEQ ID NO: 22793 - DNA, 735 bp, Zea mays
  Peptide Sequence Number=SeqID_66168
atgtcgtcgaccacagaagctctggctccgatgatgatcttggcgctcgccgctgtgctgctggccaccgctgcacgtcagccgtcgccggttatgtccacgaccaccaccaacctgaccctccacaacctgtgcccgtacccggtgtggccgctggtgaccgccaacgcgggcaatccgtccatccccaccgacgccgacggcgagccggcggggcggctggacggcaacggcgagggcctggcgacgctagcgttcccgccgggcgcgtggtcgggccgcgtggtggcgcggacgggctgcactggcggggacgacaacgacgaggcggacgcgtacgacccgctgcttccgacccctcctctccgttgcacgactggcgacgcgccgccggtgacggtggcgcaggtgagcgtgggcgggacgggcggggccgcggcgtacagcgtgagcctggtggacggctttcaacgtggcgagggcaccgggccacgccggcggtgccccacgctggggtgcgccgtggacctcggcgccgagtgccccccgcgcgcccgcgcgcccggaggagggtgcggcgccggcgcgaccgaggcggcgttgttcaagcacctgtgccccgacacgcggaccaacgccactgacatcgaggacacgccccaggactgcgtcgaccccggcgagatcaaggtcgtcttctgccccaagcccggcagcgtgtcccgccagctctag

SEQ ID NO: 22794 - DNA, 741 bp, Zea mays
  Peptide Sequence Number=SeqID_66169
atgtcctggtcgtcgctgattagcggcgacgcgtataagtcgccggcgttcatcgcgctggccagcgcgctgtgcgtggcggtggcggtgctgctgcaccactgcgtcctcgccgcctgctgccacggcggcgacaggcgccgccgcaggcagcagcaccaccaccggcatgtcgtcagtgccgtcaccaccagcttctcggccggcgcgcggcggcaccagcaccagcaccagccggaggaggaggaagcggacgtcagcgtggaggtgagcgcgacgtcgcggacgcaccttgtggccgcggcggtggtgtgccggtaccgcaaggaggagccctggaacgagtcgacgtgcccggtgtgcctggccgacttcgacgacggcgaggcggtgcgggtgctgcccgagtgcatgcactacttccacgccgagtgcatcgacacctggctgcgcgggagcaccagctgcccgatgtgccgcgccgagaccacgccccacgcccacgcccagcccggcctccgtgcgccaccacctcgagctctccttctccctcgaggagatccttgcgcggacggtccgcggtacagggccggacggtccgcgacctggcgtgaggcggcggtgctctctggtcaggcgcggacggtccgcggcacagggccgaacggggcggcggatgatcgccggcagcgcctggatctcgctcccgggagggaccccgtcggggaggagagatcctag

SEQ ID NO: 22795 - DNA, 885 bp, Zea mays
  Peptide Sequence Number=SeqID_66170
atggcagccacaatccggcgctcgtgcgcatgtatcgcgacaaaacggaaatatgcaactaactacatgcgaggcttatccaacatcttcttgcaacgagcaggagcagcacgggtgtcttcttgcaagattgcatgcatgaagcccatgagctgccacgagcaggagcagcacgcggagctcgccgccgccacgaccaacagcggcttcgactggcttgaggactccgtctccttcctcacagcagacgttgacgccgccggctgccgcggctacgggtggtgtccgcccctagcgcacacatcgccaagcattgcgtcaccggccgtgtcggagcctttgtccaagaagcgcaagtccccagcgcacagagcgtccgcccacagtggcagcaaccagcgtcgtcgcgctgaccaggcggacaggccaggtgctggcggcggcaagaagggcgggggagcgggatccgaccgcgacacgaggtgggcggagcagctcctgaacccgtgcacgaccgccgtcgaggccggcaacctgacgcgcgtgcagcacctgttctacgtgctcggcgagctcacctccttctccggcgacgccaaccaccgcctggccgcgcatgggctgcgcgcgctcgcccgcagcaggctccccgccgccgtcgggccggcggccgcgacggccgtgcgggtgccgccctgcgactgccccacgccggcgttcgcgggcacggagccgcggctgttccgcgcgtcgctcatcaggttccacgaggtgagcccctggttcgcgctggccaacgccgccatggagtggaatagggagaagggtaacagatgtagagacgccgtgagtgtcactggtttaatcgtagatgttaccttgtaa

SEQ ID NO: 22796 - DNA, 378 bp, Zea mays
  Peptide Sequence Number=SeqID_66171
atgccgccacaatccggcgctcgtgcgcatgtatcgcgacaaaacggaaatatgcaactaactacatgcgaggcttatccaacaaatctcctcctaagccttgcatctctgcttaatcttgacgagcccgagcttgtcgcgcagttcgcagaaacgttcccgcgcaagcgccttcgtcaaaatgtcagccagctgctcggtggtgtcgatggagacgacgttcaccctgccttcctcgacgcactcacgaatgaagtgatatctggtgtctatatgtttgctgcgttcgtgaaaaacagggttcttactgagctggatggcggactggttgtcgataaagatcgtgatcgcaccctccttcttgcctctcagctctga

SEQ ID NO: 22797 - DNA, 135 bp, Zea mays
  Peptide Sequence Number=SeqID_66172
atgtcgcccatcgtcgtgggcaaccttctgggtgccatagctaacgctgatcattatgttaattggaacatggagcgaccacccgggaaaacagtgctaccacaaaggtttaatgggacgcccttggctgattaa

SEQ ID NO: 22798 - DNA, 1665 bp, Zea mays
  Peptide Sequence Number=SeqID_66173
atgaataaaacaggtctgattttgatcaatggccggcaggagaagcttgcctatggaacctcggcatacgtgacccaagacaacgtgctgatgtcgacgctgtcggtgcgggaggccgtgtactactcagcgcagctgcagctgcccgacacgacgccggcggcggagaagcgggcgcacgcggagcgggtgatccgggagatggtgctcgcggacgccatggacacgcgcatcggcggccgcgtcaccaagggcatcagcggcgggcagcggaagcggctcagcatctgcatcgagatgctgacgcggccgcgcctgctcttcctggacgagcccaccagcggcctcgacagcgccgcgtcctaccacgtcatgagccacatcgcgcgcgtcgccgcccgcgacggcatgaccgtcgtagccgccgtgcaccagcccagcggcgacgtcttggagctcttccacggcctatgcctgctcgcagccggaaggacggtgttcttcgggaccatctctgacgccaccgagttcttctctctgaacggcttcccatgcccacgcctgagaagcccgtcagaccacttcctcagaacaatcaacaaagactttgacgaggaaaccgtggtggagagctctgacaaagctaaaaggaaaacagcagctgatgaggcaatagaaatcctggcgactgcatacagatcatccatttacttggacaaaaccacagaccaaattgtcgaaatgaaaagcatggatggagcttcatttcggcggagagaacacgcaagctttggcaccaagctccttgtgctgacgaggagatcgttcctgaacatgcacagggacgtagggtactactggatgcgtctggccatctacatgggcattggcgtgtgcctaggcactatcttctaccaacttggctacagcacctacagctctatccagagtcgatgtgaagtaatcatgtacaccatcgcactcctaactttcatgtccatcggaggatttccatccttcgtagaagacgtcaaggtgttcagaaaggagaggctgagcggccactacggcgtgtcggagttcgtcatctccaacaccatctccgccactccgtacctgtccgtcgtttccctactgcccggcgcgatgctgtactacctcacgggcctgtccaaaggcgccgaccacttcgtctacttcgtcatggtgctctgcgtctgctgcctcctggtcgagagcatgatgatggtcatcgccgccgtcgtcccggacttcctgatggggatcatcgtcggcgccggggtgcagggggtcatgatgctcaacggcggcttcttccgcctccccaacgagctgcccaagcccgtctggaagtacccctgctactacctgtccttccacaagtacgccgtgcaggggctctacaagaacgagttcgtggggctgtcgttcccgagcgaccagctcgtcgactccaatgtcaccgtcagtggcctccaggtcctcgagtacaagctgcaggtggagatggggtactccaagtgggtcaaccttgccatcctctgcgggatgatgctggtgtacaggatgattttcttcgctatcgtcaagatctccgaggaagttcggcagaaaaggggtggcaaaagaggatgtgttagatag

SEQ ID NO: 22799 - DNA, 529 bp, Zea mays
  Peptide Sequence Number=SeqID_66174
atggcgcctcctgttgacgtggctagcctgcgccctaggttgggcgatgtggaggttcctccgaaaccgaggtcgagtctgtcttccatggtcgaggccgagtccgagcccttgggtcgggcgaggcggaggtcgtcggcagaggccagggcggagtccgagccctggggtcgggcgaagcggagttcgtcgtcttctggggctgagcccgagtccgagccctgggtcgggcggagcggagttcgccgtcttccggggcttagcccgagtccgagccctgggtcgggcggagcggagttcgccgtcttccggggcttagcccgagtccgagccctgggttgggcggagcggatcggagtggcgcaggcggcgctgtccttctgtcaggccagtcagtggagcggcgaagtgacggcggtcacttcggctctgccggggggcgtgcgtcaggataaaggtgtcagggcctcgggcgagccggagctttatgctgatgggggttaccagctgagaattaggagtcttgagg

SEQ ID NO: 22800 - DNA, 258 bp, Zea mays
  Peptide Sequence Number=SeqID_66175
atggcggatatgttccagtacatgcagagccttggcgccgcacagggcatcgctccgccacctccattgttcctcccagttgaccctactctcgtccacactcctggccaatctgggcggcatccaacaaccctccggaagggttcagcccaacgcagccccgtagggggttacaagcgtccacgcgggagagggaagcgagcggccccaagagagcgtctgtctcgtcctcgtccccgcgcggccaaccctctctaa

SEQ ID NO: 22801 - DNA, 589 bp, Zea mays
  Peptide Sequence Number=SeqID_66176
catgtactactactacggcgagggtccgaggcagacggacgaggagcaggacaagacgatcgtggccatagtggtccccgtcatcatcgtcgtcattttggtgctcaggttgctctgctcctgtctccagaaggacagcgaggagcaggacgccggaggtcctgggagtacagcacgtcagctgcggccgtcgcggcagcgcgccactgaagccggcggcagggtcgtcgacagggcaccgtcgtcgacggtgtccggcgccgttgtggaggtggcgcaggccggcgagccaccgctggtgtgcacgtacacgaaagcggacgggtggggcgagggcacgtgcggggtgtgcctggcggacctcgccgacggcgacgccctcagggtgcttccggcgtgcatgcactacttccacgccgcctgcgtcggcgagtggctgcgcgcccacggcacctgcccgctgtgccgcgccccgctcgtcgctccagccgccgctgcctaccggatttccggccagacggacgacggcaacgacagagtggtacccacagcatcaccggccggcgtcctcgtgctgctcaggctctag

SEQ ID NO: 22802 - DNA, 981 bp, Zea mays
  Peptide Sequence Number=SeqID_66177
atggcgtgtagaacgttggagctgatgctggtctccgcgagggacctccgtgccgtcaacctcgtctccaagatggaggtctacgcggtggcgtacgaagccaacgacccgcgctcgcggcagcgcgtcccaccgaccacgccgacggccgcaaccccacctggaacgccaccgttatgctcaccgttccggcctccacagcgacgtggaggaggcacccccaccctccacacggctcatcgcgctccaacccgcttgccgggccgcatcgtctccgagacgttccgcctcggcctccccggcgtgcgctggttcgtcttgggcgacgacgacaccgtcttcttcccggacaacctcctcaccgtgctcaacaagttcgaccaccgccagccctactacatcggctccctctccgagagccacctgcagaacatctacttttccggcgtacggcggcggcgacttcaccatcagtcggccgctggccgaggcgctcgcgcggatgcaggatggctgcctccaccggtacccggcgctgtgcgacagcgacgaccggatccaggcgtgcatggcggagctgggcgtgccgctcaccaagcacccggggttccaccagtacgaagccgctccagatctgcgcgtccaggttgtggcggcgatgatcgaggactagatccacgaccaggctgttgcggcgacggcggaggcctcaatccgggtctagaccaaggtcatggtggcgacgaaggtggaggccgaggatattgtgatggaacaaactgttttgcaaatgggtctggtttggcaaattctattgtcggctcaatgtcaacatattctgatttcttagtggatcactacaacaccccttctgctattgaaactgcaaagctgcaaggactatatctaatggaggagatagtactatcaatttatgacttgctggccatcaggaagcaactaccatattcttttgcttaa

SEQ ID NO: 22803 - DNA, 1575 bp, Zea mays
  Peptide Sequence Number=SeqID_66178
atgcaatcaatagccacggcggcggcgctgcagctgctgtgccggccgtcgctgagcgccgctcagctccggcaggtggacgggcacctgctccgctcctccacgctcctcctcgccgaccgcttcctccccaaccagctactccgctcgctgctcccagcgcacccgctcggcgccctccgcctgttcccgcgcctccgccgcatcatccccgacttccggccgaacaactacaccttctccttcctccttaaagccgccgcagactcgtcagcgccaccgtatctggaaccggagtccccattcggctcccacgccatcgtgccctgtctccacgccctcgccgtcgtcctggcctgggacgcccacgcctacgtcgccaacggcctcatccacgcctacgccacccacggcgtcctgccagccgcccgccgcctcttcggaggcgccgtcgcctcccgcgcggccgacgtgtgctcttggacgtcgctcctcacggcctgcgccaaggccgggcacgtggatgaggcgcgcgccctgttcgacggaatgccccgcaggaacgatgtcgcctggagcgccatgctgagcgcctacgtggccgcgggcagcttcggcgacgccgtgcggctgttcgaggacatgctcaggtcgtgcgtccgccccaacagggcggcggtggtcggggtgctgaccgcctgcggggcgctcggggcgctggaccagggcaggtgggtgcacgccttgctcgtcggcggcggcggccacggcgtggcgatggacggcgtagtggcgacggcgctggtggacatgtacgccaagtgcgggagcctggaaacggcgaggcaggtgttcgcggcggcaccgcgggggcagcgggacgtgttcgcctacacggccatgatctcggggctctcggaccacggccgctgcggggaggcgatcgacctgttcgggcagatgctggtggaaggggtgcgccccaacgaggtgaccttcatctgcgtgctcaccgcctgcggccgcgcgggcctcgtcggccgcgccaaggaggtgttccgcagcatgggggcggtgcacggcatggagcccggcgtggagcactacgggtgcctggtggacgtcctgggccgcgccggacagctggcggacgccttggaggccgtgcgttcgatgcccatgaggcccgactcgtacgtgctgggcgcgttgctgaacgcctgcgcggcgcacggcgacgtggaggccggcgagcaggtggtacgctggctggcggagctggggctggaccacagcggggtgcacgtgcagctgtccaacatgtacgccgggtggggcaagtgggaggaggtgctcaaggtgcggcgggacatggaggagaggagggtggccaaggtgcccgggtgcagcatgctagaggtgggcggcgtggtctgcgagtttgttgccggcgaccgctcgcatcccctgatgccagagatcatgtcagccagtagagacctccacgggcagctccggcagttggaccatgactacctcagcttaggccctctttgtttacaatcaagcttatag

SEQ ID NO: 22804 - DNA, 237 bp, Zea mays
  Peptide Sequence Number=SeqID_66179
atggggggcatcacaggaggacacgggcgggggcatggcctcgtccctgtagacgcacacccttccacacttaatagtagtagggattaccagtttcactcgaacaacaaccctaaaacacggattttcatgaagactgacttcaacacgcgcacagccttcctccaaagccttcctccaagaactgtcgtccatccgaacctggggagaagattggaggtatcagccatcaaatga

SEQ ID NO: 22805 - DNA, 1113 bp, Zea mays
  Peptide Sequence Number=SeqID_66180
atgagatcctggaaagcggtctgtggatccccccgcgacatcctcctccaccgcgccatggctgcccccgacgtcctcccctccgcggcgcgcccgccccgactcgcgatgcgcaagcccgcctccaccgccgtcgccacgctctcctcgcacccgctgaccctgcatcgtctagcctgcctgctcgctctccttgctcctcgactgatacgcccctcccacccggcgctctcgctctcgtccctcccgctccgccccacctcgccgcagccgaccgcgcgctcgcgctcctcgactcccttctgtctatcccccgacaacaaacgcctccacgacatgtgtcctcccgctgccgctgcgcgtcctcacacctcgcgggggatcgcctccgtctacgccaagcgcaacgctctcaccttcccacgcgtcctatctgtcgtgccccgtgtctggcgaaggctcgccaccaagttcctagccgccttcgcgctcctcttcgcctaccacgtcgttgtcgtgctcgtcttcatcggcctcctcatcgctggggacaacggctccagcctcgcgagcctgctccgccccagtgccccctccccggtcaccgcacatcgtgcaaccgcctccgtaatagacgacctcccaacccttgcccccgcccatcgcttcgccacctcggatgccttcctcagaagccgacgcgcccccgcgtgcattgcctctgtccccaccaaactcgtcgataggggctcggatgtgctcaactgcaccgtgtccgatgaccgcctagtcggctactggctggggcacaactttatgcaggatatgaaggattcaagccgcggggcgccgaacgactatgcaggatctcgacactatgcaggattcaggtggctttgtgtcacagtgcttagcgacctgaaggagttgttgctggtcgcgatagaccacagcaacggtggcagtggtggtgttgctcctgctgttcttggtatgagcgttggagatgggacatactactacaatgtgctcaaggttttgagtgatccccagaagagggcggcatacgatcagtatggcaaggaagggctgaaggcctttgcagatatctag

SEQ ID NO: 22806 - DNA, 402 bp, Zea mays
  Peptide Sequence Number=SeqID_66181
atggtgctcggcctgtctctcttccactactaccagaagtcgagtttgcggaggcactcacctccaaaatacctaggaatctcaagggaaacaaaggatgtgatcaagtctataaataagtctacagggaacaagagcaagagcagtcagacactcagttcttcgctgtcacggcaatcaaaagatgtcgtcaaggcactgaagaaacagattggccacaggaatccaaaagttcaacttcttgctctaagtatcaaacacctgatcctctcctctagcactggttatgctgcattcaacaaggttgacttttatgtctatatattcattgaggaaacccaacattttgctaagaacataatgacatcactagcaattactcgagtggggttcatgttgtag

SEQ ID NO: 22807 - DNA, 396 bp, Zea mays
  Peptide Sequence Number=SeqID_66182
atgggcgcaatctccgcctcgcccgacgccagacaatatctccgtcttgaggaccttcgacagaggagacctccaacaagctcgtccaacacctcaggaagacttccgcctcgcctgagcaaggctctgacctcgataaaagcagccaggaatctcgacatcatcccgcgcaaggacgctgacgcaccccgtaagcaggcctttagcccataccctgacgctgttacaacaactacgggcgccaagacatctctccttcgaatacaaccacaccaggcttcaccgtggacaccccctttgtgtataaataggacagtagagttcctccaggaggacgcacagacaagcaggacactcagacgaacactctattctccaaccagtcttcgatattga

SEQ ID NO: 22808 - DNA, 633 bp, Zea mays
  Peptide Sequence Number=SeqID_66183
atggagaggaaatctccgcattggcgtgggattcactgccgaccggtgtatagcggacgtctggagtccgccaaaattaggggatggaccacgaatgctgagaaggtttggcctgggatgcttagtcggaaacctgtgctcccccagcagtttttgaagttcatcgaagaaacataccaccaacttactatttcattgcctgatagctttcaatacttacagcctctgcgatacgcattagcatctattctgagatacctagctccagaatttgttgatgcgaaagctgagcggtttgacaatagaatacataaggggctttttgatcttctccttacctggagtgaggattctggtagttcatggggacatgaaagcagcagcgacaatcgtcgcgaaattgagcgatataaaagtaatcaatatacgaggtcacttgacaaattttcatttgacagggaaatgactcaacagttagctatgaactgggtttcaatgaatataatgccattgctttatggaccttgttttgatgataatgcaagaaagatgtctggccgggtgatatcatggattaatagtttattcttggaaccgtctccagttcatccgcgaacactcgaagcatactga

SEQ ID NO: 22809 - DNA, 882 bp, Zea mays
  Peptide Sequence Number=SeqID_66184
atggggggcacccgcgctgccttcgtcttgctactattggaggggcgcgacctcgcgggtgttggcacccttcagccatcgctcggcttcaaggattttcatcatgcagcccggctgcattctctcaccaatggggagagggcgttcaccggccttgcggagggggcaaacttcaacaacgcgggaccggtcggccgcaagtgtcatcagctccagcgtgcctggctcgctggctcagctggctctatcgcggcctccgacgctgcctcctgccgcttgatccgggcgtggctgttcgtccactgcacgggcgacagtcgcgccgcgcacaggtcgggcatcacggcgcctccacgcgggggccggtgctggtccgtccgcgaggacttgagtggggatctaccggtgcaagctggggtggccgccattcgtcggcgtggcgctggcgtgcaggtggccactatcgtcggtgccgaggtggtggtcgccataggtgaggctgcctctgccgaagcggttgcttccgtcgatgacaccgtcagtgccacctgcgctccgggcctccggctctttggctttaatggctggttctcgtccctcgtgaggggacgtgaacgagggccttccagcggtagcgtttgccctggggccatcgctgctgttgtcttgccgtccgagacggaggtcgttgtcgctgctggtgcagtggtcgccggcgagccacctggaaaccttcggtcgctctgcgatgagctggagccagaggtagtggcgtcggcgtggacaaaggcagagtcgactcgaaaagaggcttcgtcggcccgggagcacgtggcttccctggctgaggaggtgcaacggcggcggctggagcttggctag

SEQ ID NO: 22810 - DNA, 378 bp, Zea mays
  Peptide Sequence Number=SeqID_66185
atggacaaaagcagtattggttatcgagcacataaagagaataaatatcaacaagaaaacaagacaatacctaagcctaagtcaaagagattctttgagtatggaaaagaagcacattgcatgataaggaaagatgcaagtgacaaagttatgttcttaggcccaccaaacaagaataggcctaagaagatttgggttggaaaggctttggttgagaagaggagggacgacgacagaatcgacatccaagagggtgtcaaggttaggaggtggggaagagccgacaagaggaaagacgtccttattgaagaccatgtgatgggagatgatgatacggcaagtgaggagatcgaggcaccgatacccccctgtgattag

SEQ ID NO: 22811 - DNA, 240 bp, Zea mays
  Peptide Sequence Number=SeqID_66186
atgccgcaccttctcgactgcggaatcggtgccacgactcgaggcaaccctgcgcatggcccaacagtgccaatcgagcacaacgatcatggggaccgggaaagggatatttcgaaagggatccttctccgcgaaggaagcgggccccgagccctcctactgattaggggttcgaaggctggcccctcggaagggttcgacagccgccctagagcactcgggcttcaagcccattactga

SEQ ID NO: 22812 - DNA, 234 bp, Zea mays
  Peptide Sequence Number=SeqID_66187
atggaaattcttagaccagtcatcttcgttgaagaagccctcctgatgaagctctctgtgttgaggccttcagttctgctcatcttgagtaagatggcgaacttcttcagaggcttcgtctatctgcctttgcaggtgttcaaaactcagaaagtggaagtgagttcaccggaggtgggcgccaatgttggggacttgttctcaatgctaagagttaagaacaaggcaacatga

SEQ ID NO: 22813 - DNA, 279 bp, Zea mays
  Peptide Sequence Number=SeqID_66188
atggaaggaaatctggagaatagagaagtagaaaacattgaaagtattcctggtaaggtctctcaggttgtctacactggatatgagaacaacattgtgcattcatggcttctattggctgttgtacttccttttcactttgtatgtgcttgtcccaaggaattggagcctgatgcaaacacaatggagatcgccaggggtgccggaatcagtataatcgaaataaaaacagtcccagagaagcagttaaggggtctgcttggcaagaagcatccgtag

SEQ ID NO: 22814 - DNA, 426 bp, Zea mays
  Peptide Sequence Number=SeqID_66189
atggaagatgatgacgatggtggcgaggacctgtgcttgcgtttctccgcaccaaccttcttcgccggcgtcgaccttctcaacctcttcgcgatggcggttcgacgtcgaccaacaccgacgctaccaccaaactcctcaaactcctggatcttgctctcctcgccggccacctccttgcttccagccaccgagagtggtccgccgccggacccgcccgcgcacggcctcttcgagcccagcttggccgcctcctctgacgacccgcgccgtgaggctccctcgccgacagggatcgaagtcgccagcgacgggagaacaaagcgtgcagaattttcaccccgccggagcccgatccttcgcccggatagcgaacgctcggaagtctccacatctagcgtgcgtgcggcgtcctctaaattttag

SEQ ID NO: 22815 - DNA, 333 bp, Zea mays
  Peptide Sequence Number=SeqID_66190
atggtgatcagtttcctgatgatattgagaaactttggaagcaatactcgcaatatcatcccagttttgaacttcttgatcaccagagggattgaggactgcaatgtgaatccatcggcagagatcactggccgcctggcgcctggcggtgctgcgctgccgctggtcgctggagacagctcagactggagaagtggagaggacagaggaggcagccaggcaggaggcgtggccgcgcgggccgtgggcgagcgctctgcggcgctggagcctggagccctggaggtgcggcggctggagcagtggagcctagagaggagctgcggcagctag

SEQ ID NO: 22816 - DNA, 921 bp, Zea mays
  Peptide Sequence Number=SeqID_66191
atggggaggctagaacctcaggcagaatgggaatcacggcttgtgggtaaagtgtgcatcctttgcagagtgttagaaactggtatatcagccgtgctcacgttctactcttactcttgtgcttacgatatcttttgtagatggcccgtatcaggtgcactacacggcatcccggctgctggaggagaccccgacggagacaaagacgacgacgtcgatggtagttcgagccacaacacgaagtgctcggaggaaccagagccggaggggtggatcgctagacccatcactcgtgacgcggcttgcgagtgtcacttccacgacgctctcgataccctgttgcgtcgagccttcgatcgacacacttggtctattgagtaccgttgtgtagtctaccgacatcatcgcgggtcatacccggaccagtgggaggctacttgcttggtgcgccgtccggacgatgatctccggggtgcagaggccttcttagagcactattctattactaagagggacactgtcgaggcagtcatgcaggatgcagcacgacgagcactttctcagtattgctcgttgttcagcggggtagctgacggccttgacctgaagtactaccatcatcgttctaccggcagtgctagaggtgtgattgtctcacccgtcggtgagggcaatcccaggctgaacaacatggtcaacctagccgccgtgctcaacacagagctggacgacgcccttgacgagttgggcaaggttcaggtggaggttgtggaattgcgtgctgaatgcgcgacacaccactatctggatggtggttctcccgcccttgtcgggattcagcacccttaccgttcactgccccgtggtcgctttgactatggtaccccagactacaggacccgaataaatttagatccatag

SEQ ID NO: 22817 - DNA, 804 bp, Zea mays
  Peptide Sequence Number=SeqID_66192
atgaagaactatggcttggttacataccatgaaacagcattgctatttgatgagatgcactctgcagctgccaataagcagcgggttgcagttgttgtagctcatgaattagctcatcaatggttttggaaattttgtcacaatggaatggtgtcttacttagctgctgatcagttctttcctgaatggaatgtttggactcagtttctagaggaatctacaataggtttcaagttggatgctcttgcaggttcacatccaattgagatggaggatccggtggccgccatatccgcactcttcccccttccactccttccctggccattgaaggatcacattttattgtatctgaagcatctaccacctgagcttctcaaagaaaggcttccttgtatttctgaaaatgctgttattccaagactgcttgatgatgtcaagaaacctgaaaagactataactgaaactgagattcccaagaggccgatgtggcacacctatctgggttgccgaccacctgaaaccaacccaagcgtgctagagccgcagccgatgatcagcaactttggacgtgggagagggagagccatcgctaccgagacgatgctgggcggcggcggccgtggctacgggagaagtttccatggggctgagtcgtcgcaaagtcgaggcagcaggaatgacagaagctcttatgcaggaagagggacgtatggtggcgggttccagaggcagcagaccacttggcgcccagctggggatgcaggcagacgtggtgggagcgagcagcggcgtggttggtag

SEQ ID NO: 22818 - DNA, 603 bp, Zea mays
  Peptide Sequence Number=SeqID_66193
atggcgtacggcgaccgcgtcaccaccttcgaggactccgagaaggagagcgagtacggctatgtccgcaaggacatgaagcattggcccctcatagctcccctgtcgtcctacgggagaggaagggacgagcctggcccaaggtacaacaatttcatcggaggttccaatctcactgatgtcatcatcacaggcaaaaatggaacgatcaacgggcaggggcaggtctggtgggacaagttccacgccaaggagctcaagttcatccgcggccacctcctcgagctcctctactctgacaacatcatcatctccaatgtcaccttcgtcaacgcgccgtactggaacctccaccctacctattgcaccaatgtgaccatcagtggcgtcacaattcccgcgccagtgaattcgcctaacaccgatggaattggcccggagtcttcctcgcgtgtcaaggtcgaggactgctacatcatctccagcgatgactgcgtggccgtgaagagcgggtgggacgagtacgacattaggttcaacatgccgagccagcacatcgtcattcagaggctgaccagcatctcccccacgcgagcgccatga

SEQ ID NO: 22819 - DNA, 1149 bp, Zea mays
  Peptide Sequence Number=SeqID_66194
atggagcaagcacttgtctttaaaccgaagctcaaaaatcaggcgagggctggtaagcaagagttaaaatttgagaaaataacgcaaatagcagaaatgacatatcaaatgctgccgttgtgggttcctatttatacgcctagcactttgcagctggcggccccatttgtcattgactttcgctattctagcaaagggaagattaacagtagcaccaacgcccgcacgattggtgtgctcgaggccagagtgggtatagtggatctcgcccaggtccaggcggtccccacccgccagtcccacaaccctgccaaccactctctcctgcgtgccgacagttggggccagatcctacctctgccattatcggggctgattgggttgattcgcctcaccccttggagcataaaagtcatgcacagtgtgccgcatcaagggaagacaagcaccatgtcagctccaagggagaagatggactcacatgttgccgagttccaagcatccgcctgggagcgcctcgacgtagtcgagtctgcgctgaccacgcgcgtggaggcgctcaaacattcgttagccacctgcgggtcctggaggcctttcatcgaatacttcgtgggcttcaatcactcctccatggaagcgctccgggctgacatcttgaggatcgccgcgcacgtcgaacttcctccacacgccagcatcctcggtgcatacgagtcgacgggggacgcccactggttcccgcagcacacgtcgatggcccttgggggcacgacttccacaactactgtcgggaggggggccaagggttttcctacacccaaggtccactcccgcccaatggaagagttggcaccacgcgtagatatgctcggaagttcgatgcctcagtcacttcgaggtccttctcgcgcacagctctaccactacctccaccccctcctcggcaaccaagcaatttcaagccagatgtggaacctatgcccaacatgtccaagtcttagtcaactgatgacaagttctccaccttatatgcttatcccaaagctaaaggactttgctacaagtgtgggcttcattattctcgcggtcaccgttgtggagatactgtctcccagtaggttgtggaagaattatggcaactcataa

SEQ ID NO: 22820 - DNA, 1410 bp, Zea mays
  Peptide Sequence Number=SeqID_66195
atggacgccgccgccgttcacaagcgcaagcgacctgaagaggccgacccaagcgcgggggagctcgacctctccgccgccgacgccgtcgaggtactcgacctccgggccgccaaacgcctccttctggccttcgagcgccgcctccgtgacaacctcgaggcgcgcatgaaataccccgacgaccctgcccgctttgcagactccgagatcgcgctccacgccgagaccgaccgcctccgcctccttgccggcgcgcctgagctcttccccgacctcgtccccatcggcctcgcctcttccctcgcctcccttctcacccacgacaatgtcgatctcgcagctgccgccgcatcactcctcgccgacctcaccgactccgaggacccctccgacctcgccgctgtccaggccctcgccgacgcgctcgtcgacgccaacgcgctcgacctcctcgtccacaatctctcccgcttttccgagaccgaccccgatgaggccgaggccgtgcacaacaccctcgccgtcctcgagaacctcctcgacctccgccccaacctcgccgacaaagtctgcggcggaaccaagcttctacgatggctcctctcgcgcgtcaaggcacgcgagttcgacgccaacaagcagtacgcctccgaaatcctcgcgatactcctgcagaacagccccgccaatcagaagcgcctcggccagatcaacggagtcgacgccctgcttcaggcggttgccatgtacaaatcaagggacccaaagacgtctgacgaggaggagatgctcgagaacctcttcgactgtctctgctgcgtgctcatgcccctggagaacaaggagaggtttgtcaaggctgaaggtgttgagctcatgatcatcattatgaaacagaagaagctggcatacagctctgcgacccgcaccctcgattttgccatgaccaagttcccgcctgcgtgcgaacgatttgttgatgtgcttggccttaagactgcttttgcggccttcatgggcaaggcaagtggtattaccaaaggctcacgaaggatgaggctactaggaaaatttgttgagaatgaatgtgaaaagatagaccgccttatggagttatacacaaggtattcagacagagtgaaagaagagactgaaagacttgatagtcttgatttggaagatttagagatggacgatgatgagcggtataaccgaaaactcgaagctgggctttacacactgcagatgagagcaagagtagaattacttcttaagcagaacaaacttacaaagcaagatgtgaagagcatacttgaggagtaccatgacaacattggagatttggatggacctgaagagaaggaaagagcacaagtgcggaccaaggaaattattgacgcgttgtga

SEQ ID NO: 22821 - DNA, 599 bp, Zea mays
  Peptide Sequence Number=SeqID_66196
atggctaccaacaatgttgtccttcaatatgatctgccggctcctggttggtcctgttcaggggattatactacttcaagtcatatttatgctgggttacagaacggcatgctattagtctttgatatccgtcaaacttctgcacctttgcattctagcatgggtctatcaacacacccagttcatacaatacactgcgctgtagatggcagtggttccaggaaggttttttctgcttcttctataggaccctgcgtttgggatgccagcgaaaacaggccgagtttggtaagtgggatggaaaaccaaggggtctgcatatctcttgcgtgcagctctccatcaagtgatgtcctggtggcttcatatcgcccgagagttgagctgccagacgctatcgccacatctcaagcgtctacaccacaatcaccggcacccaccggttcaggaaaactaggatgccacacactccttaggagaaccaccgccacatcctttgccagggaccatatctgcagtggtagccggtacaccgatctcaagccccacaggcaaccggtccttgatctaaggtatgctgaaagttcaactggggagag

SEQ ID NO: 22822 - DNA, 1290 bp, Zea mays
  Peptide Sequence Number=SeqID_66197
atggcttcagaaagctcttcgtcagagtttgccaagatcgttcagtctaagcagacgaggcaagctcggctgtgcggagcggactctgagctactgagctccctggcgggcagcgacgcggaggtcatggtcaccatccccaacgagcagctggagcacgtggccgagttccaggaggaggccgacctctgggtcgccgccaacgtcgcgcggttcctcccgtcgaccaggatcacgcacgtcgtggcgggcgacgacgtgccggcgaactcccccggcagcgcccacttcctggtcccggcgatgctcaacctccggtcggcgctcgtcgccgcgggcctcggcggccgcgtcaaggtgtccagcgcgatgtccggcgaggcgctgtccgcgccggcgtggtccggcgtcgtgggccacgtcctgcggttcctcgagtcggccggctcgccgctgctcctcaagtcgtcgtcgcgcccgtcggaagaagccagcgacgccagggtcggccgcgcgtacgccgcgatgcgcgcgctgggcgtctcgggcgtccccgtgatcgcgacggacctcgcggccggcggcgacgccgtgccgtactactactcctactacggctacggctacccgggcggtcacggtcggcggcggtcgctggcgacgacggggacgttctgcgtggcgctgcaggacgcggaccccgcggcgctgcaggccgggctcaactgggcgtgcgggccgggccacgccgactgctcggccatccagcctggcggcgcctgctaccagcagaacaacctgccggcgatcgcgtcgtacgcatacaacgactactaccaggagatggccagcaccggcgccacctgctccttcaacggcaccgccaccaccaccaccaatgacccaagttcagggtcttgcgttttcgcgggaagctccacagcgggaggctcctccaactcgagcgtgccggtgggcgcaagcccgccgaccagcctctcccctccgacgggcttcgcacctccagtcggctccagccccccgtcgtcgtcgtcggagtttagccccccggcggtcggcaccgcccctttgtccggcttcaccccgccggacggaggcggcttcggcaccccgccgggttccttcaatggcaccgggacgttcgggccgagcggcacgctcagcccttacaacggcggggcccctgggctgtcgcgcgccggcttgagcttgacggctctgtccgccgctgcggtcgccgtgcttctcgcgtccattgatgcgatgtga

SEQ ID NO: 22823 - DNA, 228 bp, Zea mays
  Peptide Sequence Number=SeqID_66198
atggagccttcacgagggaagctgtctgccgccgccgtcctcctgctgatgacgacgctcctcgtggtggccgccatgcgggcggttgaggcacgcgactgcctgacacagagcacccgggcggagggcaagggctacacgggcggcaggtgcctcatctctcccatcccgctcgacgggattctctgctactgcgtcaagccgtgcccatccaacacgacgacataa

SEQ ID NO: 22824 - DNA, 282 bp, Zea mays
  Peptide Sequence Number=SeqID_66199
atggcgcggagcgtatcgtacgtttcggcggcgaagctggtatccatggcgcgaggcaatccccgcctcgccatcatcgacgtcagggatgaggagaggagctaccaggctcacatcgcgggttcgcaccacttcgccagcggcagcttcgaggcgcggatgccggagctggtgcgggccgccagcggcaaggacaccctcgttttccactgcgcgctgagccaggtcccagatccgccgccctcgcttctctcaatcactttgcccaatcgctgcacatag

SEQ ID NO: 22825 - DNA, 195 bp, Zea mays
  Peptide Sequence Number=SeqID_66200
atggcgaatgctggatgcctggatcgtttctttgctggatgcctggatcgtttctttgctgccgtgaagcaaaaaactgtgaattctgaaacgaatactgccacctggcagtacaccgtgaagtgtcttatgtctgacagtggtctggtggtagttatgcatgcagttcccacaaaggagttgccaacccaataa

SEQ ID NO: 22826 - DNA, 747 bp, Zea mays
  Peptide Sequence Number=SeqID_66201
atggctttctcgcggctcctcccctcccgcagccgcctcctctccaccctcctccacacaccgggacccatccccaccccgcgcgcggcagccgccgccaccaccaccccgctcggccccttcctccgcagcttcgcctcgggcgcgcggcgggcggggccctcctcccgcccccgcgccgcggacatcggcgcccgcgcgcgacagctgcagacgcgccgcctctggtcttacgggctcgccttcgccctgcacggccgggaccagctcgtcttctacgtcacgcccaccgacgcgctcgccaaattcaccgccgatccctccaagccccgcgtccgcctcggcggtctcgtcctcgagggctccgtcgtgcacccctcgccatcctctcccgagatcgagttcgtcgtcacggacctcatcaccgacgtgctggtccggtacgagggcgcgctgcctgaccttttccgcgagggacactccgttgtcgttgaggggctcctcaagcccctcaccgacgacctccgccgcgacgacgggaggaaggtggccgagaaggcccgggagtgctcgtgcttcttgcgcggcaccgaggtgctcgccaagcacgacgagaagtacatgcccaaagaggtcggcgaggcgctcgagcgaaacaagaagcgcctcgaggccgaggcagaggcggccgccgctcaagtgtcgactgtggcggcggcggcggagggagcaaagccaagctcgtaa

SEQ ID NO: 22827 - DNA, 165 bp, Zea mays
  Peptide Sequence Number=SeqID_66202
atggagacactagtgcctctacaaccaaccagctctcaccaaaatgaatttatagtattgttgagtgactattggagattattgttgattggaagggactctccattctccaataaagttagaaggattacgtggatgagactgcagcgcataaacggctcatga

SEQ ID NO: 22828 - DNA, 159 bp, Zea mays
  Peptide Sequence Number=SeqID_66203
atggcgcaccggacagtccggtgcgccaccggtggctatgagatcgatgattttggttatgactatggtgttggttgtcaacattgcaaccactgctcaggcgaagatgaagctgtggaaggagacttccaggagttccaagactacgacgagttctag

SEQ ID NO: 22829 - DNA, 1569 bp, Zea mays
  Peptide Sequence Number=SeqID_66204
atggagaagtgcaaaccaatcaagacccccatgcctacaaatggacatctcgacttagatgagggagacattagttcaggatgccgcgcacgaagaatgcgtcggcgtcagggggtggcgatgatgaggaccctcgtcgccccttcagcggcagcagctgcagcagccgctgcgcaggccacacttggagatcagccgcatgttccatctgatcagattgcattccgtgctcgtcgtctcacctcccggtctcgctcctcctctcacacctccgcttctactccgccacccactcagcctgctcccgtcactcctattgctccatccacctccacagccatacccaccacctcctctacgccagcttccactgcttcccctgctcccgcttcagctcctcctgtccctccacctcgcttccgggagcgtgatgagactgaggtccgtcctctggtttcggatcctcgtctgtttgatcttcagcgtgctactgcagcacgggtacgtcggttcaggtacgtacccgtggagtcttggcttcctgctcagagagacccagcagcaggtgttcttttcagcacacggattcaggagtccttcttcagagctcagatgtctgctcagatagcgttgcgagtgcaccgccttttggatcttccagcttttctgcttgcagccggtgctgagtctgaggcgcatctcacctatctgcctggcctcctgacccttctgactatcagcggcagatatgttgaggagtgggtccgcgtcttctacgcctctgtttggattgacccggatcatcactggatgaggttccgctttgagcgagaggatgtcacaatcactgccagggcagctcacgtcgcggctctgttccgcccgccttttacagatgggtcgcgacgttcaccagcagactttactacagcagcgaagtacttatatgagctcatcagacggacactcctaccgaggatgggatacagggaggctaccactcatattcagctttggctccttggtgccctggtatcccactctgagtttgatgttgtggactttctgatctgtgagatcgaggacaccgttctggatgggattcgtgctcgtcggcagctaccttatgctcactacttgtgccacatctttgcgcagctgattcagccacctcgatttcagagcacccttgaggcctcacgccttgtttttggatcttaccgtcctgctcctgagattccagtgccagcttctgcttctgtgtttgactctcaggctgaggatgcagctcttcgacagtttgacactcagggtacagcggctgatgatgatgatgatgatgattttgggcttcctcctccgcctccgcctcctatgcctccacgctcacatgatcatgaggctgggagttctcgtgctgcccctgctcctcctccggctatggaccctgctcttgcggcaattctggccaacctggcagccgagcaggcccggttatccgagacgatgctctcgatgtttcagagcatgcaggacaggcaggatgcacttcagcagcagcttatttag

SEQ ID NO: 22830 - DNA, 626 bp, Zea mays
  Peptide Sequence Number=SeqID_66205
atggcggactgcctaaagccacacacggatgtcgcgcgacgcagtgggcagatcgatcgaccgatccatccaccgatcgggatgtgggaaggcggcggcagccacgcccacgaggcgctcctgctgcaggccgccggatcaggagcggccgactacgggcacgccggcccgtcgctcctgcggccgtggctcggcccggccgccgcgtcggggttctcctacatggccccaaaccacgcgcagccagggcccttgggcgccgaggcggcggtcgcgagccgtttcggcttcggcggcggcgggtacagcgatggcggggtggagcaagagcaattcgtggtgatcggctcagccgagactgtgcctccgcggcacagtctgcaggctgctggagttggtgggaggacgacggcgctgctgccgcacgggccgaggatggtgtcgggacttctcgggaccctgcaggcggagctggggcggatgacggccaaggagatcatggacgccaaggcgctggcggcctctcgcagccacagcgaggccgagcgcagccgccgccagcgcatcaacggccacctcgccaagctccgcagcctgctccccaacaccaccaaggtgacgatgag

SEQ ID NO: 22831 - DNA, 522 bp, Zea mays
  Peptide Sequence Number=SeqID_66206
atggccagaggaggggcgcggcctggggtcggcgtgcagaagggcacagcctggttatggcgcgcaggggaaggatggtggcgcagcctagatgaagcgcctagggcagcggaaggatttcacgatgctgcctttaagagtaataaaggtgaatctaaaaataaatttaaggcgaatgatgatatgaagaaacagcaaagaccatttctcatgcagttcttctcaccaatttttctgaaggcattttctattacattctttggtgagtggggtgacaagagccagattgctacaattggcttggctgctgatgaaaacccgttcggtgttgtcctgggtggaatcatgtacgagctgcttcttttactgacctggctgctctatttacatggcttattgtgtgttccctggttgaactgtcaagcggagtgctcttcctgctcttcggtatcatgtccttactctctggaccagaaggagaattgtaatccctgcttgagcctttttcagctagctgattaa

SEQ ID NO: 22832 - DNA, 1506 bp, Zea mays
  Peptide Sequence Number=SeqID_66207
atgtggaagacgaccgggaagcgatctacttggggggcagctgatggcgataggctagaacagtgtctcggcgaggacaaggtgaagattctggagcaggcgttcatggaggcagcagataatgtgctgccacatccaatggaggatgcttacctcgaggcttgtcacacaaacaacatggaatggaaaatgtgcatatatggtgctgattgcagtgagattagcctcgtccaagttaagggatctggtatgttaaaggattctgcctgccatgaactagacaagattagaagtttaaagaggccttacatcaagagagtacaagatcgccataaggaaacagtaaattgtctcaaacgcaacgctattgaaatggagggatacattcgccctcttgacgtagtaataattgtgtcgcagtatataccttgctctgatgaccagcattctgatggtgttgcagatgatcatcccaacgattccttattctctccaacataccatcatcacaaggaggtctacatggtggtgtctataggtctcgatgtcaagcctggttccactgttaagtgtgagcctggatatggttttatgctgcacctttcccagaaacttgccattggaaccctctctgttgacaagaacccacacatacaatttgatctggttttcgataaagagtttgagctgtcgcacacatcaaaaactaccatcgtcttcttcactggctacaaggttgagcaaccattcaaggaagatggatatccttttttatttagcattgaattagttctatttcaagtagaagtgatcagaactttttttgtttccttgacctcttgtttgccttcttccacaatggatcttgattctgaagatgaagacgagaagctgaatgttccagtagtcaaggaaaatgtttcttggttgttctatgagaacatagttgaagtagaattggctgttgacagctatgaagttactctgatatttttacagatatttttaataatgacctcggtggaccctatgcatttcttgagtagtactactgaagcacggagcgaaccgcacaggctaagcccgcacggagcgaaccacacgggaaaagctgatgggaagaaacagaaaagtcaagaaaaggctgttcctgcagcttcaaaatcaagtccggcttccaagaagagcaaggatgacgatgattctgatgagggcgagactgatgattctaacgaggacgagacagacgattctgatgagggtgagggtttgtctcctgaagaaggcgatgatgatgattcaagtgatgaagatgataccagtgacgatgaggaggaagacacttcaactcctaagaagcatgaggtaggcaagaagagagctgctgaaagttccatgctgaaaactcctctatctgataagaaagcaaaagttgccacaccgtcagctcagaagataggtgtgccattgaacggattaacaaaactgtcgtcgaagattgtatag

SEQ ID NO: 22833 - DNA, 159 bp, Zea mays
  Peptide Sequence Number=SeqID_66208
atgacaaccgacaggccgcttgagctactccacatggacctattcggcccgatagcttacataagcatcggcgggagaaaaatctcaaacccaagagaccttaaagggattcttgagacgggctcaaaattagttcgacttaaggatcaaaaagattag

SEQ ID NO: 22834 - DNA, 150 bp, Zea mays
  Peptide Sequence Number=SeqID_66209
atggtgacactagcagttgcggcgccagggggcttcgctcgtcaagctcggttcaatttgtatatggcgctcgggaacgaccgattgcagcctcgccggcgtgcgccgccgtgcgttctgagcgcgccgccatggctcggcggtgggtag

SEQ ID NO: 22835 - DNA, 1391 bp, Zea mays
  Peptide Sequence Number=SeqID_66210
atgccgtcctcttcctcatctggcgcgtcatccgaggacactttgagcaatgtggcggcagaggagttacatcctagggataccgtggagtttggcgtgtcgcggatttcctcggtccacgttcaggatatgcagcagcttggatattttggcagcggagtggggcgtgtcccgggggcggaggaggtccaccagctgacgccgaatgccgtggtggccctagcgaagtatgtttgggcgacgacttcgtatggcggttggccctctgtggagggcgcagtcgaagaccatccaggactccctgtggccgtcatgtgctcccactattacatagcgtatccgcagtttgaagtggcggaggatgatgaagacgaaggggcccttcggtgcgctacccgcatgagtagcgggcgcgatttagttgaggaatttatcggttacgaggtatggcccttggcgcatggttgggcgctgggcaaggtgtgccctcgcgagatgccctctcggggcgggcagcgggtgcgaagtcctgccttcgcgttggatctgcgtggccgggatcctgccgcattcgtgcgcgaggcgaaagacggtgcggcgagaatagtggggcgctatgtgtcgaagacggaggttgatggagacatgtgcggcccccgggggaaggatgtcttcgcccgagctctgggagtcttcggcacgaatgctggagtgatgaacaaggaccgtcaagacgctgcgcagaagcgccgggcggtcgtcaggatcacagatcctatgcgtgattcaaagagggcgcgggggagcacgaaggctgttgcccccagcagtagccagccgatgccggctgctaagccggccgcgcccggatccagcaaggtgttagcgagtgcgaagactgtcgcctctggcggaaccaagcctcccccgggcggatccgcgaagggacgggagctgccatcgccggggaggcgtgttggcgacttccgcacggacatcagtgtcgaggattattttgttgccgctgccgccaaggacgtggcgggctccatgtcccggcggctgagggaggcgtcggaggagctgaagcagcacgtgatgccgttcggagaagtcagcggcaaagcaaaacagcaggctggcggagaaagtggccgccttgaggacgagaagacggacctccggcgccagctggtggaggagaggagggaggcgaaccaggcgatcgccgaggcgcaggctgcgcaagcggaggccaaagtggcgtgggcggagagcagtctcaccagtcagcgcgccgaagagctggaggcgaggttcaacgccttgcgcggccgcgtagacaaggccgaggcctctacgcgctcaaaagttgagcgaacgcacgcata

SEQ ID NO: 22836 - DNA, 858 bp, Zea mays
  Peptide Sequence Number=SeqID_66211
atggagagtcatgatctccgggtagaaaggggatcacggcttgtgggtaaagtgcacaacctctacagagtggcaatgagattgatggttcttggtattgactctggtaatgcaggagatagagtctgtgaggagctgctcccccgtgcttcccctggaggcgcccctgcaccaccactgagcgccccagccgctggagtagctactggaggagacccagacgacggaggtggcgacaacagctcgagccatgacactgacttttctgctgaccaggagccggaaggatggattgctcgacccatcactcgcgacgctgctcgtgggtgtcacttccacgatgcgctcgacaccctgctacgtcgagcacttgaccgacgtacctggtctatcgagtatcgttgtgtgggttctgagatctgctcaaagcactattccatctctgagcgagactcagctgaggcggccatgcaagatgccgcacggcgtgcgctttcgcactactgctcagtgctcggtggggtagctgacggtctcaacctgaagtattacccctgtcgtccatctggcagcacaggaggcgtgattgtctcacctgttggtgaggacaatcctaggttgagcagcacagtcaacctagccgccgtgctaaacacggagctggaccatgcattagacgagctgagtagggctcgtgctgggatcgccctgctgcaagctgagcgcgcggagcgtcgtcatctagacgatggttcccccgctcccgttgggactcagcatccgtaccgctcacctcggcgtggacaccagccctatggcaaccccgactgcaataccaagataaatttagaaccatag

SEQ ID NO: 22837 - DNA, 312 bp, Zea mays
  Peptide Sequence Number=SeqID_66212
atggaaatcctcatactagtcgtcctcgttgaagaagccctcttggcgcaattccctgtggtatggccttcgattctgctcatcttgagcgagatgacgcacttcttcggtagcctcgtcaatctgccttggcagattcggctttgcgttatccttcgtactctttctcgtgcttcttcacgctgtggtttcaactcaagtccgaagggcgagaggctccaagttgtggagattcctcgcaaatgggagaaaagactaaggaagaaagtcgtggtattcaagttgatcattggatcacttgaaaggggttga

SEQ ID NO: 22838 - DNA, 381 bp, Zea mays
  Peptide Sequence Number=SeqID_66213
atggaggacggtgccgccgccgtcgtattgatccgcgccgcggcgagttcggcaccgtatcgccactccgccgcgctttggtctccgtcgtcccagttcccatctccggccacccctatttccgactcggtcaacaccggtcgggatttctcatcgggggaactcaagccgccgcttaccgtcgccatgtcagtacgcagggaattgtgggaatccctggccttcgcagctgggtcatcgacgtcagcatcgtctgcaccagccttccaagcacctgcacctggaggcgacgaccccgacgactccggagacggcgatgacgaggatgacgacgacgaagacgatggagaagacggacacgtcaacgaggaagctgactaa

SEQ ID NO: 22839 - DNA, 306 bp, Zea mays
  Peptide Sequence Number=SeqID_66214
atggaccctatgctcggcgccatcatcattggcgccgagtttgtgtgtgccggcgccaacactattggtgcttatacgtcagacgtggcggctttgctggcagtgacgtgtcagggggtcggcgccaagatctatggcacctgcctggtgtcggcagcgcacctcatgtcagggggtcgcgacggggcccccgtgcccagactctcgcacacaaagattggtacaattatgccgaacaggacgcagctgaagggaaggggaaaccaaagaatacaatacatctcatgtcacgcgaactcaccttga

SEQ ID NO: 22840 - DNA, 597 bp, Zea mays
  Peptide Sequence Number=SeqID_66215
atgaataagaaaaggaagcaatccaagcgcaagggctcaaaagaacacaacaaatcactctcacttaacactaaagcttttgtggaattgggagaggatttgatcacttgggtgtgtctagaattgaatgctagagctcttggcaggcgacacctttggcaggcaaagcgggcgacgcttcacctccgccatgatgaccgcgtcaaaaaagggaccgggaaaggggatactccgaaagggatccttctctgcgaaggaagcgggcctcgagccctcctactgatcatgggttcgaaggctggcccctcggaagggttcgatagccgactcagagcactcaggctccgcgcccactactggtcagaggttcgaaggctggcccctcggaagggttcgacaaccgccttaggccactcgggctccgtgcccactactgatcaggggttgaaaggctggccccccgaagggttcgacagccgcctcaaaacacgcagagcgagggatgactctgggtacgtccgatacatggccgaggctcgggctacgctcccgaggtaccataggacatttccgagaccagcaggagcgattctgtaa

SEQ ID NO: 22841 - DNA, 240 bp, Zea mays
  Peptide Sequence Number=SeqID_66216
atggaccctatgctcggcgccatcatcattggcgccgagcttgtgtgtgccggcgccaacactattggcgcttatacgtcagacggcgctgtgacctggaatctacgtggaatgatgtctaagcgtggtaaatatgctaaaccaaggtcgataagtctgaagatcatgacacctatcgacagaggtaggatatgtattccgcatgaggaaaaatcggacgaggatctacccaacgagtga

SEQ ID NO: 22842 - DNA, 1635 bp, Zea mays
  Peptide Sequence Number=SeqID_66217
atgagatgcattaatgacgcggggcacctcctgctcgagaaagaagttgaacggctcaaggcgcttaaccagatgctgcagcaagagttgcagctacaaggcacggaaggtgaaacacctgtggctgtggacccagcttccggcgctttccatcctgatcctgagccctcgttggagaacgtcttcgcggcgcaacacgacgggcaaatgctcgccaagctagccgagaacgcggcacaggagcttctcgtcctggccgaccccgaaagccctctctggctgcctgtcccaggcggctcgttcgaaacgctgaacatgatcgcctacgcccagacatttcccgggcagatgagcgtagatgccatcgcgttgaagacggaggctacccgcgccagcggtgtggtcatgctggacccgaagagccttgtggagttcctcatggatgctgagagctatggcacgatgttccctggactcgtgtccggtgcagccaccgacaaggtgtacaactggcctaccagtcgcgaggagagctatgatggggctgtgcagatgatgactgttgagctggcgttcccctcgcccctggtggcggctcggaagtgcacgttcgtgcgctgctgcaagaagctggaacagggagcctttgctgtcgtcgacgtgtctttggacgacggcgccaggtgccgcaagatgccatcggggatgctgatacagcccataaggtacaacagctgcaaggtcagcgccatcgatcacgttcgagtagatgacactagcattcatgacatcttccatccatgcctgagcggtgtcctcttcggggccaggcgctgggtgacgagcatggcgcgacagtgcgcgcggatcagagatgtgttccatgtcaccaactgtaccctcaacgtcacttcaagggggaggaagactatcatgaagctggcagacaatctgctggccgactacaccagcagcgtcgccgccttccctgacgacgcctggaccgtccagtgcggtgtgggcacggaacaggacatcaagatcatgtacaagaggcaaagcgaaggcagcagcagcagcagcaacaccgcggtcgtgtgcgcgtgcgcgtcgttcctgctgccgctgcgcatgaggaaagcgttcgacctgctcaagaacaatctgctgcgtgccaagtgggacgtactggtgaacggaggctccgtgaaggaggagcatggccacggggcaaacagggacaccatgatgatcctgcagaacagcagctacgacgcgtccgggtcgttcatggtctactcctctctcgacaagcagctggtggagacaattacgaacccgggtgacagccaggcgatgagcagcatcaacctcttccccgccggcttctccctcgtccccctcaccaacccggacccggcgccgcaagagggctccggcagcatcgcacagcctggggcgaccgtgatgactgccgggttccagattctgatgaagatggcccgtgggaccggcctttgccctcgctcggtgtcgtccgcggtcaagatcatgtcagacaacatcaccaacatcaaagacgctctgttgaaaagccaccctgttttctacaagagcattcagtctgtcgactga

SEQ ID NO: 22843 - DNA, 894 bp, Zea mays
  Peptide Sequence Number=SeqID_66218
atgcgcgctctacttcacctccggcgctggcaatctctacctctgatcgcgaggacctcctccacaatcactttctcatcctcctcctcttccgagcctcacgaaatccccaccatctactccttcctccagccatctatcttcgcgccgcgccccaggtcccaaccgccacagccgccgcccccgcccccgcccggagcccatgatcccgcccgcaggaagacgctccccgtcgctgacgccgccgcgctggagtccgacctcctcgccgccgtctccgagggccgctcggacgacgcgtggctcgcgttcaagtccctggccgcggcatcctgctcgccctcgccccacgccgcggcggcgctcaagagcccgcacgcggcgcccgttccggagccagcactcgaggcgctcttctccgcgttcgtcgcggcggggtccgccgccccggcggtggcgcttgcgcgcgcgatgctccgctgcgggcgccgcctcccggcgttctccgtctgggggcacccgcttatcgagctcacccgcaccgatcctggcgccttcgcggccttcctgacgttgttcgacgaggcctgcaagctcgtggtggaggagaaatcccctgctgaagcggcggcgatgcgccctgaccgcgctgcgtgcaattctgtcctttctggttgctgccgcgggctaggttcgctggcagatgcagagcgggtgctggagactatgtcggcggttggtgtctcgccagatgtagagagctttgggtgcctcgccttcctgtatgcttggagaggtgttcccagtcgggttgatgaactggatacattgtttgatgctctgggcttcagcaagaaggggtttttcaagaacctgctcaaggagcctctgtag

SEQ ID NO: 22844 - DNA, 2727 bp, Zea mays
  Peptide Sequence Number=SeqID_66219
atggaattcgtggcgtccattgtcgacacggtgttccggccgctcaaggactacttcgcgcggaccgtcggctacgtcatgtcctgcggcgactacatcgacgcgatgggcaacgagatgaacgagctcaagagcaagcgcgacgacgtcaagcgcatggtcgacgccgccgagcgccagggcatggaggccaccagccaggtcaagtggtggctagagtgcgtcgccctgctcgaggacgccgccgcgcggatcgtcgacgagtaccaggcgcgcctgcagctccctcccgaccagccccccggctacaaggccacctaccacctcagcaagaaggccgacgaggctcgcgaagaggccgcgggcctcaaggacaaggccgacttccacaaggtcgccgacgaactcgtccaggtccgcttcgaggagatgccgagcgcgccggtcctcggcagggacgcgctactccacgagctccacgcctgcgtccgggacggcgacgtgggcatcgttggcatctacggcatggcgggggtcggcaagaccgcgctgctcaacaagttcaacaacgacttcctcatcaactcccacgacgtcaatgtcgccatctacatcgaggtcggcaaggacttcgatctcaacgacatccagaggatcatcggcgaccggctcggcgtgtcatgggagaaccggacgctcaaggagcgcgccggtgtgctctacagagtgctcagcaagatgaacttcgtgctgctgctggacgacgtttgggagccactcaatttccggatgcttggcatcccggtgcccaagcacaactcccagagcaagatcgtcttgacgaccaggatcgaggatgtgtgcgaccgcatggacgtccgccgcaagctcaagatggagtgccttccctgggagccctcgtgggagctcttccgtgagaaggttggcgaccacctgatgagcgctagccctgagatccggcaccaagcgcaggcgctggccatgaagtgcggcgggctgcccctcgctatcatcactgttggccgggcgatggccagcaagcgcactgcaaaagagtggaagcacgccatcactgtgctaaagattgccccatggcagctccttggcatggagtttgatgttcttgagcctctcaagaagagttatgataacctgcccagtgacaagttaaggctctgcctgctatattgctcattgttcccagaggagttctctatttccaaggattggatcataggctactgcatcggtgaaggtttcatagacgacttgtatactgagatggatgaaatatacaacaaggggcatgaccttcttggtgatctcaagattgcctctttgctggagaaaggtgaagatgaggatcatatcaagatgcaccctatggttcgtgccatggctctgtggattgcatcagatttcggcaccaaggagaccaaatggcttgtccgtgctggagttgggctgaaggaggcaccaggcgcagagaaatggaacgatgctgagcggatttctttcatgcggaacaacattcttgagttgtatgagaggcctaactgccccttactgaagacattgatgctgcaaggaaatcctgggctggacaagatatgtgatggattcttccaatacatgccatctctcagagtgttagatctgtctcatacctctatcagcgaattgccttcagggatcagttcattggttgagttgcagtacctggatttgtataacacaaacatcaggtcacttccaagggagctaggatctctatcgactctgcggttcttgcttctctcgcatatgccgctggaaacgatcccaggtggtgttatatgcagcctcacaatgctgcaagttctgtacatggacctcagctatggagattggaaggttggtgcaagtgggaatggtgttgattttcaggagcttgagagcctgcgtaggctcaaggcgctggacatcacaatacaatctgttgaggctctggagcggctgtcacggtcatatcgcctcgctggttccacaagaaacctactgataaagacatgctcgagcctgacaaagatagagcttccttccagcaacctgtggaagaacatgactaacctgaagagggtgtggattgtcagctgcggcaacttagctgaggtaatcatcgatagcagcaaagaagctgtgaatagcaatgcgcttccccgttccatcttgcaagctcgggcggaacttgtcgacgaagagcagcctatccttccaaccctgcacgatatcatccttcagggactgtacaaggtaaagatcgtctacaaaggcgggtgtgtacagaatctagcatcactgttcatctggtattgccatgggctggaagagctgattactgttagtgaagaacaagacatggcggcaagcggtggcggaggacaaggttcggcagcgtttagagtcatcacacccttccccaacctcaaggaactgtacctccatggcttggcaaagttcaggaggctcagcagcagcacatgtacactgcacttccccgcgctggagagcctgaaagttatcgagtgcccgaatttgaagaagctgaaactctcagctgggggactcaacgtgatacaatgcaacagggaatggtgggatgggcttgagtgggatgatgaggaagtcaaagcttcttatgagccattgttccgcccattgcactga

SEQ ID NO: 22845 - DNA, 111 bp, Zea mays
  Peptide Sequence Number=SeqID_66220
atggccatgatgggtccaacatcgaaaaagatgtacctctgtcaggaccttgtcgatgtaggcttgatgatcaaggaccctttaactggtcacatgcctcgtcatgggtaa

SEQ ID NO: 22846 - DNA, 804 bp, Zea mays
  Peptide Sequence Number=SeqID_66221
atggcccaagggcacatttccctttcacctgctccagtgattgatactcaggctgaggataccacttttcaccagtttaagactcaggacgcagcagtccatgatgatgactttggggttccgcctccgcctcctatgcatccacgcactcatgatcatgaggctgggagttctagtggtgctgcccctgctgcccctcctgccattgaccctgctcttgcggcgatcctccagactctcactcagcagcagacacacttggtagcggtccagcagcagatgtccgagagaatgctctcgatgtttcagacgattcaggacaggcaggatactttgcagcagcagcttcttcaggaccaggctgagaacagggcattcatgactctcatgcttcagcatactggtgtaccgattcccccagttcagtcaacattgcctccacctcttcaggctcctgttgtgccagctattcagccaggaccccctcttcctacacttggtccttcttcctgtccgctttggccggtcaccctggttttcacgtcgccggtcattggctccgtcagctctcagccactagtgccaccagcttctgctattaccactgccgctgtagtggtgtctgtgacttcttcggctctggcagctcctgcagcgcagcttccgtctgagtcagtactagctccagcttctacagcagatcctggatccgagactgactctgacccacagctagcgttcgctctactgccacgaccgcgaccggatgcgcccccgccacctcctccctcttctgatgtgtag

SEQ ID NO: 22847 - DNA, 465 bp, Zea mays
  Peptide Sequence Number=SeqID_66222
atgggcgcgattcaggaagctccgcctcgcccgaccccagagctcgggctcaacctcgacgccggacgacggactccgcctcgcccgaccccagggctcggactcagcctcgacgccggaagatggactccgcctcgcccgaccctagggctcagactctacctcgacctcggacgatggtctccgcctcgcccgaccccagggctcggactcaacctcgacctcggaagacggactctgcctcgcccaaccccggggctcgggctcagcctcgacctcggaagacggactccgcctcgccccaccccaaggctcggactcagcctcgacctcggaagacggtctccgcctggcccggcccccgggcccggactcaacctcgacctcggaggagcctcctccttgcccgacctcgggctcggaccgaccacgtcacagagggggctatcattaccctactcctag

SEQ ID NO: 22848 - DNA, 1091 bp, Zea mays
  Peptide Sequence Number=SeqID_66223
atgggtcggcgcgagacggaacacaaatgggggaaaacagcaaaggggaaacccgcggccttcgtgttgtcctgcgcccaggtcgggtccgagcccgaggttgggcgaggcggaggctcctccgaggttgaggctgagtctgagccctggggtcgagcgaggcagagaccgtcgcctgaggtcgaggtagagcccgagccctggggtcgggcgaggcggagtccgtcttccggcgtcaaggctgagtccgagccctggggtcgggcgaggcggagtccgtcgtccggagtcgaggctaagtacgagccctggggtcgggcaaggcggagtccgtcttccggcgtcgaggctgagtccgagccctggggtcgggcgaagcagagtccgtcgtccggcgtcgaggttgagcccgagctctggggtcgggcgaggcgaagcttcctatggcgcccgaggctagactcagctgatgtcatcctcactctgtcgagtggcacagcagtcggagcagggcaggcagcgctgttttcctgtcagtcgacccttgcattaaatgctcctgcgatacggtcggttggcgtggcgatacggccaaggttgcttctccgcgaagcctgggcctcgggcgagccgaagctttgtgctgatgggggttaccagctaagattaggagtcttgggggtacccctaattatggtccccgacaggagcctccgggtaggtccgaacctcagcaggctcctggaacgaggaggactctggtatgagcaggggtccagtgctgacacgtgtccgggccttgccctccacttcccgctcaggcggagacccgcggcttgcggcgtcaaggtcatccagcaggcggcgcgcctgctgggtcagctggcaaacaggcgggtgcactccgccacccggccggagatctactctccgacatttggcgcgccaggtagaagctgcttcctctacaccgcaggttcccagtcgcccagcaccaggcactcctgctgtgcacgccgcacggcagcacatagcagcgcaaacatcccagactccatcaaaggcgtctccgggggcgttgttggcagcca

SEQ ID NO: 22849 - DNA, 408 bp, Zea mays
  Peptide Sequence Number=SeqID_66224
atggttgccatccaagggggtcaccctccttttaaaggcgactctccccacttgcgttctcagccgtcgcggactgagtcttcaccaacatgctccaaggtcttccccctacgacaagggggctgggtcccacgcgtcatgcaagctggcctaggacagaagaggccaaaccgccgcgcgcgggaccgggaaaggggatactccgaaagggatccttctccgcgaaggaagcgggccccgagcccccctactgatcagaggttcaaaggctggccccttggaagggttcgacagtcgcctcagagcactcgggctccacgcccaccactggtcagaggttcgaaggctggcccctcggatgggttcgacaaccgcctcaagccactcgggctccgcgcccactactga

SEQ ID NO: 22850 - DNA, 528 bp, Zea mays
  Peptide Sequence Number=SeqID_66225
atgatagtgccaccatcgctcatccaaaaaatgtatagagttctcacccttggaggacaagggcgaggggctggagaggatgccccccctgacagcagggcaggagaggaatttgggaattatgtctctttgaggggaatcaagggacttgcttttacttgtctgggctccatgtctaagtgggagccagtcacgtttcaggaatctcttagctttgttaagaaagtaaagtctccgtctggagatgagatctcctttgccgattggtggcggaaagcacgtgactacatgctatacatatcattgctcgatgtgctcaaccggaatgatcaaatccctctgcaagcttacagcgagggctctttagctattgtgttcgtcgaaggggtacgcgtgattcttggccattggatcgcccttcaacagatcagattagatatgaaccggtacgcaacaaaggccgtaaaatcccggattaacggcctgagagccctctatgtctcccgctactctcggttatccagataa

SEQ ID NO: 22851 - DNA, 1560 bp, Zea mays
  Peptide Sequence Number=SeqID_66226
atgatccaccgtgcctggggggaagtctcttgggtctcgacccccggaaccgccgccgaggtccgcttcgccggcaacttcggcaccacccttgctttgagtgccctggacgcccggggggcggattgcccaggcactgtcacggtgaccggagggtcgcctccctgcgctgccggcgcgagcggcggctctcggggagcagacgccctggcctggccccccggggtcgcctcagctcttccagctggggggtcaggagcaacccgatgcaagaggaaggaagaagcggacactcaccagagtcacgcacccttggtctgggcgcatcgaaagcttggagtaagcggtggggtccggcttccccaacgcgacggacacccgcccgtggagggcgtcgaagggaagaggatcagaggacatccgcgagccctccaagtcagccttcggtgtcatctcccaaagcgacagtcgtcgctccaccaagggaagcaccctccgacggtggatggcggcaatcacttccgcagcggtgagtccccccttccgcaacgcctccaaggcctagagaaggggttcgaggttcttctgtctttcgtgcggggtcccgtggcgccaagcgtcggtggcagtggtgactactcgctgggagaacggcgggagcaactcgccgtcattccggaggtagaaccaccggcgctgccaccccttgttcgaggacgcgaggatggcaggaatatacagcgacgcccgcgactgcctcagcaggagggtgcagccgccggcccgcaccgctgcgcggactttcctctcccccgtcggcgaggcaaaaagctccgcaaaaaagagatgggtccacaaatcccaatggggggcgatccccaagtacccctcgcacaccgctacgaagatggcggcctgcgagatggagttgggggtgaggttgtgcaactccaccccatagtggtacaggatcgtccgcaaaaaacggcccgtcggcacaccgaatccccgctcgtggaaggagacgaagctcacgacgtaccccggcggtggggacggagcggctccgcccacgggaggaatccattccggtcgctgctcatcggtgagagggcgaagcaaaccctcgccgaccagatcctccagatcactcgccgtcaccgtggaaaaaggccatggatcgcgcggcgagatgatggtcacccggtcagccatcaccgagcggaagggatggcggcgcaaggggcaggaagggcggttttctcttctctggctaagtctctcgggttgcaaaaacctaagagggaggcaggaagcggagcaaagaaccgtcaccagaccctctcccgggtatataaagaccaaggcgagaccggttccaacgttccacccggaccggacgcgggattcaaaaacgcgaagcgaaacagccgttcctcgaacggctcgcgcacgcgcaacggccgccccgccaaccactcgccccgtcgcattaactccgcggcgggacaggcggcgcttctggcaggagaagcgggcgacgcttcgccttcgccgtaa

SEQ ID NO: 22852 - DNA, 810 bp, Zea mays
  Peptide Sequence Number=SeqID_66227
atggccgtcgtcgcccatgccggcctcccacggcctcgcctctttctccctttctccttccacggaagccccatctattcatcatgcctgtcattggctctgccttcggttgctgtagattatgaccatgggaacccatggtgtcgccctgacactcctcacaacggtgcttctcgaggccaccatcccagtgtcagcagtggatggccttgcgtgggtcgtgcaagaagccacgagttcctcatcaagatcagagcaagggcgtgcttgaaagtccagtgccagttttcttattctgagaatcaattggagcagttaataagtgatgtgactttgaatacaagaaggatggaaaatcaattggagcagttaataattcacaatttttgggcaaaggccttccttgcgactatagaattccctgaatcaaaatttggaattaatagactaaccttcgtatgcctaaaaatatttggaattggtcatgatgagcctcatgtacagatatatcaagaacctcattgccaatcagaagctgcatacttccatctttccattttacagagcgtgcattactttcacactacaataaataagtacccaaatcttattaaccaaaatgcaattattggtcttggtgaagcagaggaccggttctccatgctagaacaagtgctttgtttcgttcctgagaccaactccatctttgctagcgagaaacttctcacacttgcaaacaacaactttgacacggaccagacgatgttcaagatccttggcctaatccccaatgctctaagcttttgctag

SEQ ID NO: 22853 - DNA, 191 bp, Zea mays
  Peptide Sequence Number=SeqID_66228
atggcgaccttgggacaaatggttgatggagttggtcgttgttgctggcttgagctcgcgaggacctccaccattggctctggttttgcagggattccacccgagatgagcggtccgccgtcggaaccgcccgactccggccatatagagcccagcttcgcgtctagggctggacaaaatactcgtggctc

SEQ ID NO: 22854 - DNA, 492 bp, Zea mays
  Peptide Sequence Number=SeqID_66229
atggcaagggattctcggggggaaagggcgcggactgagggcatggatggaaggacacctatgtgttgcgggtcaaggatggtggacagggcacgaggatggcggacagggactggcgtgaggatggtggacagggcacgaggatcttggacgtggacagggcacgaggatggcggcaaggatggcaggaggcgcggtcgcggcgattctaggaggcgtggtcggcttcgtgggagaatctcaaacgtggacgagggcacgaggatggtgggaggcatgggcgtagcgatactaggaggcagtgtcggcttcgctgggggagatctcgtacgtggacaggggcgcgagaatgttgggtcacggaatgatggagaggatgaagatggttgcggacaaaggataaaggagggtcaagattggctagcaagcatcattaagtccaagttccaatgcactgatgttccccgctcttcccgaaaccaacaacaataa

SEQ ID NO: 22855 - DNA, 537 bp, Zea mays
  Peptide Sequence Number=SeqID_66230
atggtgggacaacgtcgaccgactacttggtatggcacattcaacctcgaccaggtcgaagacgcggtcatcccagcgccaacacgaggcgtcagcatctgtgcgctcgccctcactgcccagtcgggtggctcgagggccgtcctccgggacagaaagaagaagaagaagaagaaggactgcgactaccaaaagccgcggtccaccgctctggtggtcgcagccacgaccggaggccagggcgaccgcaacaaacgcccgcggtcgaagaggggtagcagcggttcatgccctatggacccgaacggtcgccacagcaccgcggagtgtcgcgagatcattgacctcgcaaaacgcgtcagcgagtggcacgagcagtcttttaaagacggctccccatcttgccgccgccccggcaaggaaaaggtggacgacgacgaagtagccgcggctgagcgggacctcgggtatcagtcgcccgagggggacctgaaggatatattcactggaggctcctactctggtgaagacaactag

SEQ ID NO: 22856 - DNA, 246 bp, Zea mays
  Peptide Sequence Number=SeqID_66231
atgggcagcggctgcaccagcacgcatgaagaggtcctcgctctcgtcctcagtgcgggagtgaggacaagaccatccaagaacgccgccgctgcccccgcagcgtacgacatcttgtacaacctcccagtgcagccggtggcgcaggagaagctgtggatgtggtcgacccgcgcacggcgcgaccatcgcccgtgcattggacgggcagccacgctccgccccagcggcaggatgcagcgctag

SEQ ID NO: 22857 - DNA, 627 bp, Zea mays
  Peptide Sequence Number=SeqID_66232
atgggcgcgattcaggtcaaggctccgtccactaaagggacacgatcccgcctcgcccgagcccagcctcgggcaaaggcaaccgacccaggaggattcacgtctcgcccgagggtcccctcaagcaacggacgcaccttcggctcgcccgaggcccaggcttcgtggagaagcaaccttggccggatcgccacgccaaccgaccgtattgcaggagcatttaatgcaagggaagctccgcctcgcctgaccccagagctcgggctcaacctcgacgctggacgacggactccgcctcgcctgaccccagggctcggactcagcctcgacgccggaagacggactccacctcgctcgaacccagggctcggactcagcctcgactccggacgacggactccgcctcgcccgaccctagggctcggactcagcctcgacgccggaagacggactccgcctcgcccaaccccagggctcgggctctacctcgacctcgggcgacggtctccgcatcgcccgaccccagggctcggactcagcctcgacctcggaggagcctccgcctcgcccgacctcgggctcggacctgccacgtcacagggggcgccatcattaccctacccctag

SEQ ID NO: 22858 - DNA, 267 bp, Zea mays
  Peptide Sequence Number=SeqID_66233
atgaaagcccactacgacagactggtgccgacaacaggggcccaccgactggggcagctccgcgacgtcgtgagggaagatgggtgcctcgcgccttttaatattagcaagccgggagcctgggattgctcattggagcaggcacaagccttccgcccatgccttgccgcagtgctgccgcctcgcatcctcactgttggtggacgccctactccgatgagggcgctgtcgtgcccctgttctagcgccgtcgttgttggatgtggg

SEQ ID NO: 22859 - DNA, 474 bp, Zea mays
  Peptide Sequence Number=SeqID_66234
gttcttgaccagagggtgcagtctctggaacgtgaactcgatgctgccatttcagcagctgctcgagctcgtgtagagaaacgtcaggcggaagctgcgcaacgagctgcagagttacgcacacgggaggtcacagaagaactggagaacactgctagggtgtttgagctgcacatggaggagttgcggctgaagcaagaggatattgcgaagaaagatagcgatatcaaggctactaaggctggtggcaatgtggcccgtagcatgggcgagggcgagacggtgccgctgccgcccggcttcccggcgacgcagctcgtgtccgacgagagcgggcagtattgcccggctggagcgcgcgcttggacgagagggaggcgaggcgctggcacggacagggtttgcaagacccttaggcactcccaaggtgaatatctagggatccactgtgaggcctttacaaagttccactag

SEQ ID NO: 22860 - DNA, 456 bp, Zea mays
  Peptide Sequence Number=SeqID_66235
atgggcaagagcaggaaaggtggtggttcttcgcatcactccggcgacaagcgcaagcgcgagccgactcctccctcggaggacttcgacgactcggagtactcggaggaggagttctcctccgagtccgagggctctccggctcctgcctctcccccggcgtcgtctgatgattcagacgactcccaggggatcgccgcggaggtatggacttacatccgggccgtcaagcgagccaggctcgagggctcggatgagtcggagtactcctcggacgaggagaattcctccgacccatccgaggagggcagcggcggcgacagtggtgacagcgacgacgacggaggcgacggtgatggcggcggcgacagcggcaagggcggtgacggcagcggcaagggtggcagcggcgacggcggcggcggcagcaagggcagcaacaaggccagtggctag

SEQ ID NO: 22861 - DNA, 2925 bp, Zea mays
  Peptide Sequence Number=SeqID_66236
atgatatgtttgggcctcggcggccgcaaaaaacatacgcacactacagacaaactgttcctgcaggttcagacatcaacagagggagcagcagcaccctcggcgtcgactccaccttcggcggaacctgacccggcctcggacggcaacacgggcggaggatctcaacctcgaaggaagatgtcagcaccgcgcctaggccatcaccgccagggtctcctccgggaacccggcccgagcagacggcttgaccggctgctccgtagcctcagccagctgtcccccgaggacatcagcccggctaatggcctcggcagcccgactccggggttggtcccgctaggggacgacctggccagggaatcacctgctcctgggccgacgaagccccttttcgagccaactctgcctctatccatgctgacaccgctgcctccggctccggctcatcgcagagcggccaagggccccgatagccgcaatggacatacaccggcactcaaggtgccattacaaacggaacttcggttccactcccgcgggtatgaacaacctccacatcggagggcctacgggacgacaagctccgggtggctcgccgccgaccaatgcagcagcgacaacgacctccgctccgagcggccaaacagcaacagtgatgacctcagggcagacgctgctgcgacaaggctctcattcgcgtcccctcgcagaggacgagaaccaaatattaaagccaaagagccggaggcccggagcgcagatggcaccgacgatctcgtcggcagaggaaaccttctccggctgccaccacctcagcaccgacggcggcgtccacctgcccaccactaccgcaccagcgagcgccggccaccccaaagcgcaccggtaggtcctcactcccgtcctcgccacgaaaacgagaatgggactgtcccagaacacgagtaccgccctcgcggcgtacgacgtgttgtgagaccccccggtgcggctggccaccttcgcccggacagaggatggaatgctgcaccctggctgggcagcagcagttcgccttccccggcatggctggaggacacctcctccgcagagctggaggatggtttccacccccagatgctggagaagaggcggtacgccagcccacgcgaaggcaggccccggctcgcctcgccctccgccccagcaaggatgatgaagatccttgaagctgagggcggggtaggggccgcagcccagcttgcttctccccaccatcgaactggtggcgtcgcggaccaagtcttcaccaacgcgctccagggtcctccccctacgacacgggggctaggtcccacacgtcatgcaagctggcctaggacagaagaagccaaaccgccacgcgcggagcatgtaaccgcccagcggttacaagcactcctccatcttcgcctaaaccagcgggtgaaagggcggaccgccatgcaggcggcatgcaactgcaccacggggatgcaccctttcgacttcaacgcatccagcatggaggcccaggcccacacgtcatgtaaccggcgcgccggttactacgtgcgaaaaactgcaccgccacttacgccaatgtcgcgccttctcgactgcggaaccggtgccgcaactcgaggcaaccctgcgcatggcccaacagtgccaaccaagcacatcggtcacaggtcagtcagccgcgggagaaggcgcgacggtcgatatggccaaaagtgggacggtagtaatggcggcagcaagcgggcggaggcagcagtcaaatcgtctgcaggctcacgtcccctcctggagcagcaggggagccctctcccacggcgtgaagacgatgcgcccgtgttccgtccctcgaacggctcgcgcaacggctgctccacgaaccacccgtcccgtcgcattaactccgcggcagccgccccagagcactcgggctccgcgcccactactgatcagaggttcgaaggctggcccctcggaagggttcgacagccgcctcagagcactcgggctctgcgcccactactgatcagggtttcgaaggctggccccccaaagggttcgacagccgccccagaacacgcagagcgagggatgactctgggtacgtccgatacatggccgaggctcgggctacgctcccgaggtcaaggctccgtccactcaagggacacgatcccgcctcacccgagcccagcctcgggcaggaacagtagacccaggcggattcacgcctcgcccgagggcctcctcaagcaacaggcgcaccttcaactcgcccgaggcccagctcgggcagggttcgcagtgaagaaaccttggccagatcgcctcgccaaccaaccatgtcgcagaagcattcaatgcaaggatcgcctgacaccttatcctgacgcgcgttcctcagtcggcagggccgaagaaaacagcgccgcctgccccgctccgactgctgtgccacccgccagggtgaggctggcagcagccgagtccagcctcaggcgccataggaagctccgcctcgcccgatcccggggctcggcctcaacctcgacctcggaagacagtctccgcctcgcccgacctcagggctcggactcaacctcaacctcggaggagtcactgcctcacctgaccttgggctcggaccgaccacgttacagggggggccctcgtacaaaggaggtggccgcgcgggaggacgggctgacggacacgctctctccctctctcgtgaacgcttgtaaccccctactgcaagcgcatccaccctgggcgcaggataacggaccccccggggtcgaaacgccgacaagtacaatcggcggaaaatgtaataacatttacatccatacctggtcgctctggagaagcttcatagtcgaccaggtcttctcccagtag

SEQ ID NO: 22862 - DNA, 270 bp, Zea mays
  Peptide Sequence Number=SeqID_66237
tacctgcccgcggaggcgcaggaaccggggttccggaccttctggctcggagtgatacggcgactggacacatgcatgaagtgggatctcgatacgaaaggcggttctgggcagatgcaggagcttgtgccgcggatgctcaagcggatgatcatggagatgaagtcgaagggggtgctggtgccgcgggaaggcgatgagctctgggagattacccacatccagattcagtggatcgcaccggccgtcatggacgagctattcccgtag

SEQ ID NO: 22863 - DNA, 564 bp, Zea mays
  Peptide Sequence Number=SeqID_66238
atgaatatgtatgacgtctttcttcctgccatctgccaagggccaccagccctccccatatctttcacatttgctacttcttcacacacgacgtcgtcagtaaatgctgtcagttcagcggcgtttcgacggtcgtccagcgtcatatgtaaagaaaaccccttgccatctctttcaacgcatcatagtgcccaacaaacccccatgagatgcgcgagggctcagcacgacacccgccttgggctgcgtcgacctagggcgttgacgaggagaagggcagttgcctcttatgcttccctaagagtaggcaaggtcgtcgggaacgataatgtgtcctccactgcgctaggtggacgcctaaccgacgacagccgagggacggacgcgcgtgctagggtggcgaaggccacaccggtggcgaccgagagtggcagatttcttggtggatttgaccagcgtcctatgaagctgtatctggatgagaataagcagcttattttggccattttggaaaatcagaacctaggaaaattggcagaatgtgctcagtatgtatttggttaa

SEQ ID NO: 22864 - DNA, 2622 bp, Zea mays
  Peptide Sequence Number=SeqID_66239
atgttcgtgctgctccgcgtgtgcggcggcggcaacgggccgcagctgcaggaggtggcgatcgagggcctcatcagcttctgccggcagccgacgttcgtgatcgagacgtacgtgaactacgactgcgacccgctgctgcacaacgtgtttgaggaggtgggcaagctgctgtgcaaggcggcgttcccggcgtcggccccgataacgacgatccagctgcaggcgttcgagggcctcgtcaacatgatcaccaccatcgccgacaacgtcgagatcgacaagacccccgaacacggcgcctacgccgtggacgtgtcggagttccgcctcttctggaccgagcgctgggactctgccgccgccgccggcggccagcgggagacgtgggtggacttcgtgcgcaagcgcaagctgcggaagaagaaggtggccgtcgcggcgaaccactacaaccgcgaccagaagaagggcgtggagttcctcaagctgtgccacctggtgccgacgccgccggatcccaggagcatggcttacttcctccgctactcgccggggctcgacaagaacaagatcggtgagttcctgggcgaccctgacgagttcagcctcaaggtgctcaaggagttcacggagacgttcgatttcacgggcgccatcctggacacggcgctgcgcacgtacctggagacgttccggctccccggcgagtcgcagaagatccagcgcattctggaggccttctccgagcggttcttcgagcagcagacgacgggggtgttcgccaccaaggacgccgcgttcatcctctgctactcgctcatcatgctcaacaccgacctgcacaacccgcaggtgaagaagaagatgtcggaggaggacttcatccggaacaaccgcgccattaacgacaagaaggacctgccgcgggagtacctgtcggagctcttccactccatctccaccaacgccataaccgtcttcagcacgtcggcgacggcggtggagatgacgcagagccggtgggtcgacctggtgaagcggtcgcgcgccctggagcccttcacgccgtgcgacttcaagcacaagctgagccgggaggtgttcatcgcggtgtcgggccccaccgtcgcgacgctggccgccatcttcgacagcgccgacgacgaggagacgctgaaccagtgcgtggaggggctggtatccgtggcgcgcatcgcgcggtacgggctggaggacgtgctggacgagctgctttgctgcctctgcaagttcaccacgttgctcaacccctacgccaccacggaggagacactcttcaccttcagcaatgagctcaagccacggatggccacgctcgcgctcttcaccatcgccaaccgcttcggcgagtcggtgcgcggcgcgtggaagaacgtcgtcgattgcctactcaagctcaagcggctcaagatgctaccgccgtcactgatcgacccggacggcagtggcgcccacggcggctcggatcagcggtcgggacatcggcacaggccgtccgcctccgacgctggcgtcatcttccccccgacgcaccgcggcgcggggacgagccggcacgtgtccggcatgatcggccggttctcacagttcctgtcgctggacagcggcggcgagtcgctgctctccgtcggtagcgagttcgagaacaacctcaaggtcatcaagcagtgccaggccgggagcatcttcacggagagcgccaagctgccggacgaggcgctgcagaacctcgggcgggcgctcatcttcgctgcggggggaaagggccagaagttcagcacgcccatcgaggaggaggacacagtcggtttctgctgggacctcctggcgctccttgcgacggccaacctccagcgcttcgcgaccttctggccgccgctgctcgagtgcttcagcgccgtgtcacagctgccgctcttctcgccgtccccgttcgccgagaaggcgatcgtggcgctcttcagggtcgccgtgcggctgctgtcgacgccgccgccgctgcgcccctccgacagccgcgtctccgaggagctagtgttcaagtcgatcaacatgatgtggaagctggacaaggagatccttgacacgtgctgcgaaggcatctcggagaacatcgtgaagttgctgacggagcacaccgacggagtgcagacgccactcgggtggaagacgttgctccaccttctcaccgtcacaggccggcacccagagacgttcgaccagtccgtggcggcgatgatcaagctgatgaccgacggcagtgccagcatcacacggttcaactacgccgccgtcatagaggccgccttcgggttcgcggcgctcaagatcagcccgctggacgtcagcacaaagatcctggagctcatggccgagtccgtgaactggctgatccagtggcacaagtccggctactccgaccctggaaacagcggcggcttcagcggcagctcttcgtcccagacgtcggtggaagatgcgtcgcggatgggcaacctgacagtcaacatgttcatcaagctcgcggaggcgctgcgcaagacgagcctagtccggcgcgaggagatccgcagccaggcc

SEQ ID NO: 22865 - DNA, 357 bp, Zea mays
  Peptide Sequence Number=SeqID_66240
ggtgttagagtcaaagaggaggcagcggtagtggaaagggccgccgacccgctccaggctggacatgaggtccacgctgccaaggtggctgcgacgcctctgacattatctgccgaggccatccccgacccgtctgcgaagaccgagggcaagagggtggctgatgctgatgaggccggtccctcaaggcggcccgaggtcccggtcatgggacgcaccgcgcttttccccgacgatgagggtctcatggtgaagttcgtggccaagtccatcttccttcgctacgagcatgacatctgggacacgctgctgcaccagaggggcttgcttgatcaattaaatgagcagcttgcctag

SEQ ID NO: 22866 - DNA, 282 bp, Zea mays
  Peptide Sequence Number=SeqID_66241
atggccgagcctcacttgaaggttagaattttgattcataagtatttggagtacacaacagtttggaaatctaagggtagaagcaatgtagttgttcgatgtttcaagcgttctcgtaaacttctccatattcgttgcagagctttgtcgctgacgactggggccactggatcaggtctctcccagccactgtctcaacaaccatggcgatattcatggagccaaacgccgcacgccgccagatctcaacgattcaccgagaaaccagctggggccccttag

SEQ ID NO: 22867 - DNA, 528 bp, Zea mays
  Peptide Sequence Number=SeqID_66242
atggagcagcgagttgttgctaactcaaatgctaaactgtttgtgtttactagcatggattcacgcatgtcgcgggcaagcggctcctccaatggaggacaaggatggcccagttatggtccggtgtcgctgatccgctgccccaaatgcgaaaggtcagagtcgctcgtgagactaagatcgaaaaggtgggagaacggcaactttggtcgagagttcgtgaagtgtgaaagcaagtcatatcgagataataaggttgttaaaatatgcaattttttcatgtggatggacgattatgtcaagatgcttgaaggggcagggttggtgggtggctctggggagatgatggcgtctaatatgtgggatgaacgagcagatgtgactacgaactgggacaaatttgctgccgaactgaagaagatgaatgacaacatggtcgagttgaagaagatgtttggagccgtttatgcttctatgatttttattctattccttttctttgtgatgaactataattgtaagcgctaa

SEQ ID NO: 22868 - DNA, 453 bp, Zea mays
  Peptide Sequence Number=SeqID_66243
atgcaagggaataattcattccaagcttctaacttggggcctacaagatccctacgccatgataagtttggcggagatgagcaaagtacctcgccgatggatatattttttggtctagctatgttgtacaaaattgggtactgggtcctccgagctgaggagcctagccaaatatcttcccaaaaatgcacctatcagtcgtcctttaccttgaaagagccaaagcggagaaagtctagcttcaccttcataagaacgtaccaaaatgtgagtcccctgcctccattctacttgggaaaatggggtcgaaccaaggtatcttcggactcgagtcgatatcacagtaggagaagcccaaataatacgaaggttgatacagcgccgaagatgtcagcaggaaagcttcggcatggtagcagaaaaggaaaccgacttaaagatgaaaagaaatga

SEQ ID NO: 22869 - DNA, 414 bp, Zea mays
  Peptide Sequence Number=SeqID_66244
atgtcggcgtacagaaatccggagcttgctgctgggaagagggagccgagcagagggtcacttgcaggggattggaggcaggggagaaagagctactgctcccctgcggcattggacacaggaagaaagccggcgtcgagcacctcgctggtgtgctgcgtcgagggggggggggcaagtggagagaggcgctgggagaaaaagacagccggttgggggagctcggctggaagagagggtgtcgtggagggagagcagaggcgccgcgccatggacgccggcgagctcactgctcgagctagggctggtccggccatggcagggctcctgccggcaacccgcgcacgagcagagaaagccgcggccaaggagagcagagagctcgcagggaggggcgcccagcacagggggtag

SEQ ID NO: 22870 - DNA, 288 bp, Zea mays
  Peptide Sequence Number=SeqID_66245
atggaggagaggaggacctgcagctcgcctacacccttggtgccgaggagaggaagggcgccatggggggctctgtgtcctgctgcattagtgccgagcaaatggcgaggaggaactgggttccctgctgctggcgtgagggagcagtgggagagctgcagccgtggggaggaagggaggaagaaggtgagaggtgacgcccatggagcagtcctgctgccgagcgccatgggagaggcttgctgccgtggagagaagacagggaggaagaatggctgtggcggctag

SEQ ID NO: 22871 - DNA, 360 bp, Zea mays
  Peptide Sequence Number=SeqID_66246
atgtgcagggcggtgtcgctgtcgaggtcaagattgtggattttgtgcagggtgaacgctgcgctaattggacgaatgaaagtcaaccgagagcttaccccggaccaggagcaactggcctccgccgccgacgctggagcgttgccgtccccggtggccagatgtgctgagcgctgcagcgagcgcgccgagccgaccgacaagacggataggcgctggagcgcgagcaggaccgacggctgcacaggcttctccttccacgacgaagctacgcgagcagaggcgcaaactgggctagcggcggctggagctcgagcaggaccagcggcagcggtgctgggccggaacgcgaggatctga

SEQ ID NO: 22872 - DNA, 99 bp, Zea mays
  Peptide Sequence Number=SeqID_66247
atggagaaaggtagcagggaggatacatcccctcggactcccttccctgtgaaggatgtgaggctcgagcctcatactgatcaggggttcgaaggttaa

SEQ ID NO: 22873 - DNA, 291 bp, Zea mays
  Peptide Sequence Number=SeqID_66248
atggggatggtggggaaggcagaccacatcgtccccatcccgatgcgccctgagcggggttatgtgtccctggggctgctagggtatcgaactgccctacccctggtcctagaggacgcggctagccggacggcgtgccgattggccgtggaggagcagaagaagaagaaggacacggagaataagcggcccacaagaagagggaggcccgcgatgcacatgagaagcgccaccgtgcgcaggagagggaggggtggcactagagcgatcccccagcacatacgacaatga

SEQ ID NO: 22874 - DNA, 1518 bp, Zea mays
  Peptide Sequence Number=SeqID_66249
atgcgcgcggcggttaactcgtcccagatctcggcgcggcacggcgcctccctcccggccctgccggcgagagcggggtccgatgaggcggcggccgttcctggaccagctacggccatctttcaagcaccggtggcagcagcagccgtggtgggtgcgcctcttgctctccctcctcctcgccctcgcatgcgtcctcctcctcgctatcctccttggctcccccgaccccaacacctcgccgtccacctccgccgcgtcctccggatggtggccgagtaccgccaacccttggtgaagatcgagggcgccagcctcagcatcacgcaggtggccaccggcgctggcgaggcccgggtcaagctggacgagtctgcccgtagtcgggtcaaggcaagcagcgactggatcatgaacagcatgatgaaccgcaccgacagctacggcgtcaccaccggcttcgacgccatgtcgcacaggaggaccaaggagggcggcgctctccagagggagctcatcaggttcctcaacgccggcgccttcggcaccggcacggacggccacgtcctcccggccaaggcgacgtgcgcgaccatgctcgtccgcatcaacaccctcctccaggggtactctgggatccgcttcgagatcctcgaggcgatcgtcaagctgctcaacgccaacgtcacgccgtgcctgccgctgcgcggcacggtcactgcgtccagagaccttgtgccgctctcctacattgccgacctcgtcactgggcgtgagaactttgttgcgctcgccccagacggcagcaaggtcaacgccaccgaggcattcaagattgccggaatccagggcggcttcttcgagctgcagcccaaggagggtcttgcgatggtgaacggcacgaccttgggctctggcctcgcctccactgtgctcttcgaggctaacatccttgccatcctcgccgaggtcctgtctgccgtgttctgcgaggtcatgaacggcaagccggagtacaccgaccacctgacccacaagctcaagcaccacccgggacagatcgaggctgctgccatcatggagcacatcttggagggcagctccttcatgaagcttgccaagaagcttggcgagctcgaccccttgatgaagcccaagcaggaccggtacgcgctccgcacgtcgccgcagtggctcattcgttcagtatttagtaatgtcagcaaatgctgcgtatggaagccatcagaggccgccgcctcctcctcgtcgtcgtcgtcctcgtcgtctgatgatgatgatacaccttcaactgcagcccgtagcactagatcaagtaatcctgtgttgtcctcatggtcctctgatgaacctcaactggagctgccaaaagagatacttaataaattcctggactacggctttaagggcgccgagatcgccatggcgtcctactgctacgagctgcagttcctggggaacccggtcaccaaccacgtcctgaagcggttcggttag

SEQ ID NO: 22875 - DNA, 378 bp, Zea mays
  Peptide Sequence Number=SeqID_66250
atggcttgtatggatccagtagataaaaattgtgttagagttgtcatctatggaggtatgtgtatgcgggccaagcgatgctcaggtggtggtggcctcatccacaccggggccaccactgggtctcctcacgccaacacgaaggtgaatacaggcacatcatggttgagaagatggcacagctgcccttccctcaccatcgaggaagctggcgggatagctcgattctcaagggttgcaggagaagttggtggcagcacagcaggagaaaagtgtggcaatggcgcagcaggaagggagaggcggcagaagctcccagacctagacccgaagctgagcaacgggatttacatcacgtacaacagagagcgagaataa

SEQ ID NO: 22876 - DNA, 528 bp, Zea mays
  Peptide Sequence Number=SeqID_66251
atggacgacaccactaaagtggcagagatgaagactctgacgactttctgtggctgccatcccctggagatggtgatgcaccccttgggactcttccctgctgagaagaagaatgaccccatgtggtgcaaccgtgtgagccatgtgaaggacgtatgggcgatgtatcctgacttggttgggagggtcactgttcagtgcatgaatgcgttgtactgccttcagaccctacagagcgacgctatggcacatcttgctaacatcgctcaaaccaccaagctcaccctcgacggccgagaagactttgtggtcgacttgtcctccgagttggtggagaaggacctacaggaacttgaagaagctaatgaccacctggacatgcaccacttagagatggaagccaatgaggccggaaacgagggagaagaggctcctgaggagttaggaccagcccctggtgccaatgggacaacctccgcgatgcccccttcactcgcatctagtgtcgcttccactactcagggttga

SEQ ID NO: 22877 - DNA, 495 bp, Zea mays
  Peptide Sequence Number=SeqID_66252
atgtacaaatgggtcgcccgactcggcccgacacggatcaaggacaagaaagcgctggaggagaaggcggcgaagaaggcgcagcaggcagcggccggcggcaccgggacctccacggacaacaagaataaggcaggtggcaagaattattaccatgcgttcaagttcctccgagaggacggcaagcagaggagaggtaaccctaatcccaaattccttcgagttttcctttcacttcccaacacccggcccacactctccttcaatccctccgacgacgccgacaacgcatccctgtggccatccttgattctcctcgccgaggaggcgttagccaagtcgtcgcggtcgcggcccgcaggccactcgagagtgttcctggtgagtagcaccaccacggtggggagcgggggtgggggaggcagcactggcgatggcagggtgcagctcgccgacaacctcgatctcgacgtctatgtgcagtccaagtgctag

SEQ ID NO: 22878 - DNA, 513 bp, Zea mays
  Peptide Sequence Number=SeqID_66253
atgcccgcgcgtgccctcgcctccaccgccacgatgcccgtgcctctgcccccgcctcctctgccctcgcgacgctgcgccctcccccgtgatgcccgcgcctccgtccaccgcgagatccccgcccttccccccaaaccctgtcctgcccctcgtgcccccgcctccgctcgtgatgctcctgcccgccccaccgccatgacagccaccttcgcgtccaccgccagatccccgcccttccccaaaccctgccccgcacccctccacgagctctgtcatatccggggttcgctcgagtctccttgtgtcgccgtggtcccactgcgacggtcgaggagcatggtgggcgggtggaggcgggaacgaacggcggaggaggtgaagctcgacaccggcaacgtgctcatggcgctcgagtccctcaagaagaagaagggcaacaaggatagagcggtcgggccatcctctaggaagaagcacgcagaggccgcgcagcagcaagagccgccatag

SEQ ID NO: 22879 - DNA, 1158 bp, Zea mays
  Peptide Sequence Number=SeqID_66254
atggtaccgatctggggagggagagccgcgccgcctgtagaggctgtgatctccatcgactcggtcgccgccgccgggagcaccgccggcgtgtctacacccgtctgggctgccgccgcgtgcgccctcgcccaaaccgccgtcggcgcgtcgacgcctatctgggctattgccacgcgcgcccccatggggatgcgtggctgcccactgtgccgcctgctctcgcgctgcttccctcgccagcctgagcacttcgtctgtgttgtcgtcgacaaaagcagagctgccggctctactgccgcgcagagcctcgagctctgctaccgccgcacgtgcagcatcagccgcctccgctgcttctacttccgctctcgctgctgccagttccgccgccgccagccgtgctgccctcgccgctgtcgctgcagccactgctgctgctcgctcgcgttcttgtgccgtggcgaccttggcctcctgctggcgccgcgcactcgaatggccacattcggcgcccctgctcctggctcagcctcctctcccatcggcgcgagcggctccgatgtgggaggcctcggtgcgtgccccctcgcccttggcatgcgtgaccttgacctaggcggatccggcgcaggcggccccggcgcaggcactccaacgctcggtcaggcccccacggtcctccatggcacgagtttttctgacctccccttcttcgaggatagcaaacccgccgtcgtccccttcatcgatgctgctgccatgctcgcctcggggttcccatacggcgtcatgaccagcggggcacactacttggtcgtcggggatcgcaccggcactgctgcctcgacatactccacccctatgactgtctcgcagcggccgcctaccgacaatgccactgccaccctagtcgttgcccaaaccgctgcgacgaccgctcgtcggcatgcgcaggacaccgcccatgccttggagcaggagcaggcggccgccgatgccctcgagcatcagttgtcgagacttaccgatgtgacggaacctcccaagtcattaggcccacctacagttgtccttgtccaacggacctcagacaaccctgcagaaatgcttactaatagtggatccttaaaaatccagttttacttgtcaggttaa

SEQ ID NO: 22880 - DNA, 1104 bp, Zea mays
  Peptide Sequence Number=SeqID_66255
atgcggggctggtcggccgcgagcgtcgtcagcttcagcgcgttgggctcgctggctctggctcggctcccggtgccccctcccgccgcacgagcggtcgtcacgccgcgcgcactggaggaccgcccaagacgccgcgcgctgctagggcggcgttcgtgttcttgggctgtcctgcctttgctccggtacgtcgcctctgcgcggaggtcgatgctcgcccgtccgggaggattcgagtggggatctgccggtgggcagatggcttccgtcgtcggcgcggaggtggtggcggctgaagaagtcctcatcaccgacgggatcaccgccaccatccgcgctccgggcctccggctctttggctttgatagcttgtcctcgcccctcgagtggggacgtgggcgaagggctcgttgcagcagcgtccgccctgaggccatcgctgttgttgtttggccacccggagcggaggtcgttgtcgctgctgccggagcgggcgtcggcgagccacctggggttttgtcgccccacaggccctccaatgtggggggttgttcgtacctgcgggggtggaaccggagttccatttgtaatggcaccttgagtgccgaaaccctcggccgctctacgatgagccggagccggaggcagcggtgtcagcatggacagaggcagagttggctcgaaaagaagcttcgtcgaccggagcctggccgggccgcccactggcgggaccgacgccggggtcgggttgtcgaggccatgagccgggctaacgtcctcgggggacagctggctgaggctacggagcgaccggttgagccgtctgctcgggccaggttcccggaggagaccctggcggcgatggcccaggcgtggtgccaacaggttccttcaaggtggagatccttcgaccgtgttgccgtccgaggctgggtcggattccgccgaaggtggagtcgacgccgagggtgctgctgctcccccactgacaaggtgatgagtgaggtatccgtatcccggaggcgtaggagtccctcggctcggtcggccttgcctgcttacgtgtactccgtcgttttcaggatcccgcttttgaagtag

SEQ ID NO: 22881 - DNA, 903 bp, Zea mays
  Peptide Sequence Number=SeqID_66256
atgatgctcaggttcctcaaggccaggaagttcgaagccgataaggtgatgctgatgtggtcggagatgctgaaatggaggaaggagtttggaactaacaccatcctcgaggtggattttgttttcgaggagctggatgatgtgctgcgctactaccctcagggctaccatggtgtggaccgcgaaggccggcccgtgtacattgagaggctagggaaggtggatcccaacaaactcatgcagatcacctctgtggatcgctacatcaagtaccatgtccaggagtttgagagagccttcagggagaggttccctgcctgcacattggctgccaagaggcacattgactccaccactaccatcttggacgggtttaagaatttctccaagactgcaagaaaacttgtgcatcggatgcagaagattgatagcgattattatcccgaggtgcttggttcgaactaccagagcaggcttcttgaagtaatagattcgagtgagctgccagaattccttggcggttcatgcacatgtagtgacgagggtggttgtccaggatcgaacaaagggccgtggaatgatccttatatattgaaggatacggagccgagtgcagcatatccatcggagaaaggggagaacatgctaaagaagagattcctctacgggttctccatgggaggaactgtggtggtacagctccatatgaatgatcctttctactgggacggtgccgtgttgcttgctccaatgtgcagggtcttgtccttaactgtattgaatggcctaagtttcctgcctatatttccccctgtgtctgtggaccgttgtcttgctatttctttctatgcgattgctctaagtgctctcattaaaatatatggttgcttttgtttgaaataa

SEQ ID NO: 22882 - DNA, 210 bp, Zea mays
  Peptide Sequence Number=SeqID_66257
atggccgtgatgggttcaacatcggaaaagatgtacctctgccagaaccccggtggcgagttgacatatgcaagggttaagtgctacatatgtcgtgtgattggagatcctcaggtgaagaagcaacaaatttttgttgcttttgttccaaggtggtgcctaaggaagaaaaccaagactgaagccgcgggaggaagtgtcctcctttaa

SEQ ID NO: 22883 - DNA, 182 bp, Zea mays
  Peptide Sequence Number=SeqID_66258
atgacggcggctcccagccccttacgtcagcaaggagacgtcatcaaggattcgacagccccgacagctgtgcttccgcaggtcgtcatcgtcttctccccgttgccgcgcgtggaaccaaaaatctcggggtcgccgccgaccttcacgcacgccccatcctcacagccgtgcgggacctg

SEQ ID NO: 22884 - DNA, 855 bp, Zea mays
  Peptide Sequence Number=SeqID_66259
atgcaggcggcatgcaaccgcaccaagggggcgcaccctttcgacttcgacgcgtccagcatggaggcccaggcccacacgtcatgtaacctgtgcaccggttactacgtgcgagaaactacaccgccactcgcgccagtaccgcgcctcctcgactgcggaaccgttgccgtgactcgaggcgaccctacgcatgacccgacagtgccaaccgagcacattgatcacgggcggcacctttggcaggcaaagcaggcgacgcttcacctccgccatgatgaccgcgtccaaaaagggaccgggaaaggggatactctgaaagggatccttctccgcgaaggaagcgggccccgagcccccctactgatcagaggttcgaaggctggcccctcggaagggtttaacagccgcctcagagcactcgggctccgcgcccactactggtcagagattcgaaggctggcccctcggaagggttcaacggccgcctcaggacactcgggctccgcgcccactactggtcaagggttcgtaggctggcccccgaagggttcgacagccgcctcagagcacgcagagcgagggatgaccctggcacaaagctgcaaaggcctgatgggcgcgattaaggtcaaggctcagtccactcaagggacacgatctcgcctcgcccgagcccagccttgggcaaaggcagccgaccccggaggattcacgtctcgcccgaggcccccctcaagcaacggacacagcttcggctcgcccggggcccagtcttcgcaaagaagcaaccttggccagattgccacgccaaccgaccgtatcacaggagcatttaatgcaaggatcgcctga

SEQ ID NO: 22885 - DNA, 1704 bp, Zea mays
  Peptide Sequence Number=SeqID_66260
atggacaaggaccgtcaggaagctgcacaaaagcaccgggcgatcatcaggctgcccgaggctaggccgaagagggcgtgggggaccgcgaaggttgccgccctcgacggtagccagccgacgctggcggcgaagtcggccgcccctgggtccagcaaggtgccggatgtcgtgaaggcaaccggtgccggcgaagccaagtctgcctcggccggagccgcgaaggcccgagaattgccttcaccggggaagcgcattgccaatttcggcactgatattagtgtggatgattatctcactagatcgggcgaggggcaacttgttgttgttccgcctgcggtggcgaccacggtgtctgccacggtacctggggcgaagggtagcgctctcagcgctggcggtgagatttcggcgctcaccgccgtcaaggacgaagcgggcactgtgtcccgccggctgagggaggcgttgcagcggctaagtcaggcggctgacttcgctgaccgcgtggcgtcgggggcccttacggcagctgtgtctgccgaagtcgagagacttcgggcgcaacatgctgacgccgtccgggaaaagtcggccaccgatagcaagtgccgcaagctgacggagaaggtggccgcgctggagggcgagaggactgacctccggcgccagctggcggaggagaggagggaggctaatcaggccctcgccaaggcgcagtcggcgcaggcggaggccaatctggcgcgggtggagggttgtctcgccagccagcgcgccgaggaatgggagacgcggttcaacgctctgcaggcccgcatggagagggccgaggcttcgacgcgcttggaagttgagcggacgcgcaaacagctcatggactcataccgcgagctgggcgcgcggactgctgacttcgaagtgcccgatcgagagtcaagccttcgctgcctcgagtggctgcaagaggagttgttggcgctcccgatcattgtggagggatttatgtcctttgcctccctggtaacctgcgaaggggcgatgaacgcgctgtcccgcgaggggtgcagtcactatgaggtcatcgaccgatctgatgaggatttcgagcgcgagatttacaaggtcgaggaccctgtggtgaaggaatccgcgggagccctctttgaccggatgtggggcccccacggtcgggaggtggtcagggagcggcccgatcgggcgagggatcaggttcaagattttgggcccgcgcacgcaaccgctactgctaattttttggcggcttcgaccgtggatgctgggaatgaatcggatgagtttgcttctaagttttccgattttggtgactctgggagtttggttgagtggacggaagagtcgtcggatgaggacttggattactttgcggccttggacgtggcagcggcggaggctttgccgcgtgctgcggatgctgaagttgtgcctggtccgagcgctgggtgtaggcggcaaagggcggttgcgaagcgtagagtgagtgaggtggatggcggccgacttcgtgtgggcagggctggcaagcaggaattgttgtcctcgccggccgttgcgagtgtaggtgagggggagttgcgaagtctttttgagggtgaggagcttaggataatgctatttaactatagggagatgggaatcattccgaaggttgaaccgatgtaa

SEQ ID NO: 22886 - DNA, 303 bp, Zea mays
  Peptide Sequence Number=SeqID_66261
atggagatgaataagaagataaaagaggatctgaaggcagttgcacttggaacgtcaaagatcaactaccttgattctagaataatagtggcatggtgcaaacgccatgaagtccctattgagaaggctgtggaagagcagatcaagaagagagtagagaataaggcaaggatcttcgagcaaaatgccactgatagtgagtgcaaggtcgatcctaaagtgctctccaagctatatgatcagtgggtgatgccacagaccaaggatgtcgaagttgagtacctcctgtgcttccttgactaa

SEQ ID NO: 22887 - DNA, 324 bp, Zea mays
  Peptide Sequence Number=SeqID_66262
atggcctccggcaccggctccggccagccgcaacccgcagcagcagctgatgctgacccgggagccggcgacaacaagctcgtcttcgagacgccgctgcagccgcagcccgtgagggaggactacgtcgagaacgccgtcaagttcctctcccacccaaaggtcaggggctcccccgtcgtctacagacgatccttcctcgagaagaagggcctcaccacacaggagatcgacgaggccctacgaagagtccctgatcctgaacccatcactacggctaccgcttctccacagcagcagggtttgacttgcccctctgtttga

SEQ ID NO: 22888 - DNA, 246 bp, Zea mays
  Peptide Sequence Number=SeqID_66263
atgagtgcgcagcacgccactttctggatggtggttctcccacccctgtcgggattcagcacccttaccgttcaccgccccatggtcgcttcgactatgatgtctgagaacaggcgcagaggtgcaaggcgtgctcagcctgaacaacaggcaccccaaaaggaggcagccccgcagcaacatttgccaccgccaccaccgatgaccattgagcaaatgttcttgatgcagacccaagcagtctag

SEQ ID NO: 22889 - DNA, 402 bp, Zea mays
  Peptide Sequence Number=SeqID_66264
atgcacgacttcctccttgggctggcgctgcttgattgttctggttggttgctagggcaggaagacgggctgcctgatttctctgacactggtattgatttcctccttgctggttgttctgacagtactgctgctgctgctgaggaaactgcctctggtactactggtgctggttctgacgttgatgctggtgctgacggacatgggacctttcttgagggcgagaaactcctccttcctcactatcatcagtccctcgggtacatggtagcgatggaagttgtctctgaattcttcccaagtgatggcttcagggttggcatgggtggcgaggcacatgtggcatctggacttgcacttgaggctgaggcggtggtggctgctgttgcacctgctgcatag

SEQ ID NO: 22890 - DNA, 411 bp, Zea mays
  Peptide Sequence Number=SeqID_66265
atgctggtagactacacaacggtactcgatggaccaagtctgttagtcgaaggcccgacgcagcagggtgtcgagagcgtcgtggaaggggcatctctggctgaggtgcaggggagggcggcctctcagactccacctcctgctgaggtgagggggaagagttctgctgctcctggtcctgctcctggcgtctgcgctcctgctcctcgtgcaggcgacgatgcagtctctccagcatttgagaacaagtctccaacattggcgcccacctccggtgaactcacttccacttttgagctgatggcttcgtccaacacccaagctgaagctgcttcggctacgaaaccgggacccttcatcaagtcaaaatggtcccacatcccaatcaccttctcccaggaggacctttag

SEQ ID NO: 22891 - DNA, 342 bp, Zea mays
  Peptide Sequence Number=SeqID_66266
atgggcgacggcgggccactgctcgagttcggacccggagaaactgctctgcgcggtggagccagggggagggatcgctgtgcagggccggacggccatgggcagaaaaagggagggaggaagggcgttgtccctgctacaagggtgccgagcgccatggctggccgaggggaagaagtggaggagctgagctccctgctggctgctcgccgtgaacagcagagggagggaggaaggttcctgcgccaggaacagaggaagaagaaagctgcgcgtgagagaaaaaaaagagaagagagagtggcggctagggaaaaatggaggggtgggagtggaaaatga

SEQ ID NO: 22892 - DNA, 480 bp, Zea mays
  Peptide Sequence Number=SeqID_66267
atggccaccggcgacgacagaaaggacttcctcttcttcattgatgtggtgacgaatgaaatcaagcaatggggacggggctctctaggccattcgggacaaacgactggaacacgtccccttatcctccaaacgggaaccccgggctggagctctccagcgagaagagcaagcttgctgaagggccgcaggcttggaacatctagattttgttttgctagggggagcgctatgtcttcagtctttgaattttcttctccgattataagctcaaagatttatgtgtttacaaattttgaaagtaatattccaagcatacattcagctccagctgccctgggttctcctgatccactagatggaatacgacgaccaggggcgagttcaagattctggatactatctggagatgtttgccatgatgacgatttaggtgaagagggctcgcagtcagctacgtgtacaaaagctcttgtttga

SEQ ID NO: 22893 - DNA, 381 bp, Zea mays
  Peptide Sequence Number=SeqID_66268
atggctgctgcttggaatctggatggacagattgacatggtgaaggtggtagagccactgcaggctatgattatgggttcacctttagagaatgcaagacaaggcccagagaattcttgcctggaggcagtatttttgacatcctttacaatagacgaggaatttttcagctgccggatgactagaattgcatcttatgtgtccaatggaatgaattacttccatcggattaatattgttcatatggagttgaagactgcaaaccttcttatggatgatcaggaaatagaagtctactaccacactcacttctcaagaaagtggactcttagctttggaagcaagtattatgagttgtacagaactactgatgaagtttga

SEQ ID NO: 22894 - DNA, 132 bp, Zea mays
  Peptide Sequence Number=SeqID_66269
atggcaccgccgcgggcaagcctgtgcgccaccgttgctgctcaattcgccgctgcgcagagccaagacagggattggatcgcccttcataaaatctggtccgttgatttagtattggacggcgtggattag

SEQ ID NO: 22895 - DNA, 1050 bp, Zea mays
  Peptide Sequence Number=SeqID_66270
atggtggcactggcgaagtatgtctgggcagttacttcctacagcgggcagatgtctgtgaaggtctttgccaaaaattattgcctgcattggcagaagaggaaaataggaaataagatagcacaattcggatcgtgcaccttcacgccgaggactgggaagacttcggctgaggtggaggaggaagacgaagatgaaggggcccttcgacatgttgcccgcctgagtagcgggcgtgacttggttgaggaatttattgcctatcgagtgtggcccttggtgcatggctgggtattgggcgaagtgaccccctgtcggatgccaaccctgggcgaccagctggtacgatgtccaaccttcatagtggatttacacggtcgcaacacggccacgtttgtgcgtgaagtggaggccgaagtcgcggagattgtaggaaaatatgtgtcgaagacgaaaactctgaggagttgggatatccgcggttcaaatgttaggttgaaccgtttgccgtatgctggctacccgggggacgactatgccaatgttgttgttcgcaggaggaaaaaggcgatgacaacggccgacgagggcccttcatggggaacagcatcgggcacggccgctaagaataggaaattaggtactgcagctgaggggtcgagggcttccgattgttttgctatggatttgatggagacctgcgtggttcccggggagacgatgtcttcgcccgagctccgggaatcttctgcgcgaatgctaaagtttaccgggggtcgctggcctaggaatgttccaattcaccgagcggccgggaaggacatgtttacatctcgattagctcgtgagatgaaaattttcccttatggacggaatgttggtgttgttgtatctgtagtgatggagaaggatcgccaagacacgccacggaaacaccgggcgtttgccaggttgggggacccgaggcgcaaggggaagatggcgcgggcgagcacgaagcctgccgcccccagcgccagcatgcctccacctgccgcgcccacacattag

SEQ ID NO: 22896 - DNA, 789 bp, Zea mays
  Peptide Sequence Number=SeqID_66271
atgaagtctcgcacggcactgggatcacggagttcagagaaatcccagccgaagtcggggtcgtcatcttcctcggaacccgtgggtccagaggttgagacggccgtcagcaggtcccaagttgaccacatatgttaccccggaaggtcaggatacgcccttgcgaaagtgcttgccgaagtggggtcgcttggtggatcgaagctgaatctaaaaggaataggatggaaaactgatggtacctcctggttggtgggtggtggcgaagttgcattggagtcggaatgtgtcgatatctcaggtgcgagactaacacccgacaagtccttcgcgagggtgctggcatcatcagtccacctggggttggcatgttgctgggaaacgacacccgtcgttgtctcaggtgcgaggacaacacccgacatgtcccatgcaggggtgccggcgccgtcgactcgctccggtccaacagccgacgaggtgctactttctgcctggccacggttgctccgtctccttctccttcggcgaggagggtggcgaggggaggagtaccatgtcgtagatgtcgtcgggggacatgaactcgagactcccaaagcggagcaccgtcccgggctaaagaggttgctgaagattgtccatctggaactcaacgggaaagtatttgtcaacacgcagcaggacccctacctggcgcgcctactgtcggcgttttggacccgcgaggaccctcaaccggctagtgaatttgtcgctgcgtgtccctgcccagatgggttgatgtaa

SEQ ID NO: 22897 - DNA, 579 bp, Zea mays
  Peptide Sequence Number=SeqID_66272
atgtggtggccttcgcaaaagtccaagaactttttcccagtgaactgcgtgccattgtcggtgatgatggagtttgggaccccaaaccggtggatgatatttgtaaagaacgccaccgcctactcggacctgatgctggtgcgtgaagcccctgggtgccttctgcaagggaccgacgaggtccagaccccacacggcaaacaaccaagttatgggtattgtctgcagagcctgagcgggcagggcctcaccctcggcggccgagggtacctcgggctaggccgaggtctcctcgggttcgggcgcgtcattgagtttgacggatggttgatatatgtccctggacaagatattcagtggaaccgtcatccgtcccgaggctattttagccagctcatccgcagtctcgttgtaccgtcgagccacatggttgagttccagcccatagaacttgtcttccaggcgcggaacttcgtcacagtaggcctccatttttcgatcacggcagtgagagttcttcatgacttggtcaataacaagctacgagttgccacgagcgtcgaggcgccgaacccctag

SEQ ID NO: 22898 - DNA, 1107 bp, Zea mays
  Peptide Sequence Number=SeqID_66273
atgatgaaaatccttgaagccgagcgatcactaaagagcaccaacccccacgaggtcgtgctcctccaacaacagcgagaagaaggcgacactggtgcaccccatctggaggcccggaaggtggaaagacgcgatgaatgtgagaagtgcgaaggcatggctactgcccgggggatcgatccctttttaaaggcagatatccccactcgtgccccaaagcatcacgggcaaagcctcccccgacatgctccagggttcccaccctacgacacgggggctaggtcccacatgtcatacaaactgacccgaaacgcgaagatggcgaaccgccgcaaacgaagcatgcaaccgcaccgcggttgtgcaccctttcagcttcgctgcaaccggcggtccagcatggaggcctgggcccacatgtcatgtaaccggcgtgttggttaccatgtgcaaaataaccgcaccgccacttgcgccaaggccgcgtcttctcggggctacagaaccagtgcaacgactcgaggcagccccgcgcatgacccaacagtgccaattaagtgcgacggtcacggggatcgagaaaggggatatttcaaaaagatccttctcggcgatggaaacgggcctcgagccctcctactgatcaggggttcgaaggttgcgccccacggggttcggcaaccgccccagagcactcgggctccgagccctttactgatcaggggttcgaaggttgtccctcggagggatttgacagccgccccagaacatgcagagtcagggatgaccctgggtacgtccgttacatggccaaggctcgggctacgctcccgaggtacccttggacattttcgagaccagcgggaacggtttgtaatggaatcccaccgaagtgaggcaccgagccattggaccctatcgaatgggtccgggtccagcaaatcacctacagaggctcgggggctgctctcgcaccaggctacgaccacattgttgaccacgtcgacaaaccagcttaaaaactcggagcctggccatgcacccgggctgcggccagaccgcatgagggaacaacaaggtcaaccgaggaatctcaagaagaattaa

SEQ ID NO: 22899 - DNA, 1344 bp, Zea mays
  Peptide Sequence Number=SeqID_66274
atggatttttccatggatgacttgttcgacgcccacacgggactggatcctgctggagcggagttcgggcaactggctgttgtcccgtcgacggtgatggctggttcgatagccgtggcaaccgtggcgaaggggtcctcgcaggacccatggtccaagttctgcgctggcggcgaaattgcctctgtcgtcgctgcaaaggacgtggccgcctcatttgggcagcagctaaaacatgtgagtgtgaacgaggctatccgagacaagtcggtggcagaaaacaggagtcgtaatctgcttgaaaagctgacggcggcggaggctgagaaggaggacctcatccatcggcttgtggtggaaagggaagacgcggaaaaggctcgcaccgaggccagtcttgctctcaagcgcgccaccgacgcggagtcggggcagagaagtctgcgtggctacatggacaggacagaggccgccacccgcgctcgggtcgatcgagcgcacacgttgctcatagacgcgcatttcgaagtatttgatcgggtaaccgaggacttcgaccatagaatcttccaggtcggagatgaggtgctaaagcagtccgctggggcgctttacgacaggatgtggggccctcaaggccgcgacactgtccgggagagggtcgacctaccgttggagcagaagatgcgaggatgggggctaaagagcaatcggtgccacaagccgaccctggcggagaccctgcagcggcggctgtgccggctggcgatgaccctgcagcggcggctgctccttcgcaggtcggttgcagcacaggttccgacgttcgggcatgcgcaagcaacccctactgatgttgatattaattttgtggcggctgcgaatgcagtgcctgctaatggaaattcgtctggttctaaaactgagttttggtcatcagacgtgggtgattttgggagcccgttttcgtggattgaggagtcttctgatgaggatttagattattttgctacgttggatgtggccgcggcggagtccttgtcgcagcctgaattgcgcgaagggtctgctcccccggctgggacgatagccgaagaccaccgccggcgaaaaatggtgtcgaagcacaatgtaaccaagtaccttaccctggcgtaccccgaagacacacttctcagggttgagctggagtcgtgcgtcgcgcatgttggcaaatgtctctgcaaggttggccaggtggtcctctttgcttttgcttgcgacgacaatgtcgtctacataagtgaagttgttgtggcccacttggttttcaaggaccttcttggtgaggcgataaaaggttaa

SEQ ID NO: 22900 - DNA, 405 bp, Zea mays
  Peptide Sequence Number=SeqID_66275
atgccttcccggactcatgctcaggatggggctagtacctcccgtgggagggaggcaacaccaaacccacctccagtacccccgacacttgccgaggctatcgccgccttggtgaatgctacaacagataatactcgtttcctacgggagatggcagaagaccctttagaggcggatgaatggatccgcgtcattgagcagaaatttggacgtcttcggtgttccgaaactcagaagccctgttcgcagctcagcaattgcgtggccctgccagcaccttgtggggaaactttatggccgttcagccgaccgatcatcagatcacctgggatgaattcaagctggccttcagagagcattacataccggaaggagtactccacaagaaacaggaggaattcatga

SEQ ID NO: 22901 - DNA, 219 bp, Zea mays
  Peptide Sequence Number=SeqID_66276
atggtgggtacaagtgcggtcactgcacggcggcagccggggtcagtggagcattgtatgccaaggcgggatcttcgaacaagaacccacagtatgaagaagcatggaaacaatacgaaggatggaacagagccgaagctgtgcgcaagggagcttcggcatggtggcagaaaggaggaaactgacttaaagaggaaaagactatctagacccagataa

SEQ ID NO: 22902 - DNA, 237 bp, Zea mays
  Peptide Sequence Number=SeqID_66277
atggcgccaaaaccacttgggttctataccaaaaatgtggtataccacctaaggcaccccctggaaaatgtggacaccgagacttggacgtttgacaggatttggcatcagttttgtcgcggtgtgggcagttctctggaggagatggttgctgggataacttggccgtccaccttgccaccgggttggactgttgagtgggaccctgcctcggctgaggaggagcatgaggagtga

SEQ ID NO: 22903 - DNA, 837 bp, Zea mays
  Peptide Sequence Number=SeqID_66278
atgacttcccatggatcctccgatgacggaaatgcactgacccacactgacggacttgcacgagagggctttccccgcattttgtgggaggtacttcagggggctggatacacgacaccccctcagtacgcggtgcagcagttcgagaagcaccgagtgcctcgctgtagggtgaggatgaccttggagcctcatcccctgcagccaggatggcgctccttggactccaagtcttttgggtaccgggcagaggacacgatcgaggcgatcgctctgcatggattgactactttctgcgggttccatcccttggagctggctacccaccccattggcttgttccccgctgagaaggaggacgacccaatgtggaaggatcgggtggagcatgccaaggacatctgggctatctacccaggacagactgcgcacttgacagtgatgcgcggtgaggcaatgtcccatctgatggcactgctggaggcaacaaagatcacgttggataacagagaggagctcgtggttgatttatctcaagaaatggtggagaaggacttgcaggtggagcagctatccactgatattcaggagttggaggagctggtaggcaccagggagaacaccatcgaggttctcgaggatcagctcattaacactcagcagcagcttgctgaggctaacaagcacctggacatgcatcaccaggagatccaggaccaggaggcaaacgaggacgtcgacattgagggaggagatgagcctgcctctagtgtggacactgctggctcgggaagaccaccttcccccgagtcgagtgttgcttcgttcgctcactag

SEQ ID NO: 22904 - DNA, 264 bp, Zea mays
  Peptide Sequence Number=SeqID_66279
atggcagccggtgtggtggccgagttgaacccctcctcgctgttctccgtggtgcccatcggctgttcgacaaaatgcgcagcaagcagcgcgctgcagcagacctcccgttcgatctccactcccctcgtcgtgtgtcgtcgctctcgtgctcgctgcgcagccccatccgcgacatcgtcgaaacccgtgtggtcgacgccgcgcttcgcgccttgcccgttcgacgaaatgccgagccatgtggatagcccatgcatctag

SEQ ID NO: 22905 - DNA, 624 bp, Zea mays
  Peptide Sequence Number=SeqID_66280
atggccaggacagggaagggtaaaaacgaggtgggagacagagcatgcgtccagggagcgagcaacgagccgaggccatggggtgcgctggggctcggcgaccatgggctgaggggggtgctgctgcgcagtagagagaagagctgggcacagggaggaaggggccgagctgctcgcctgcagggagcgagcgctagggggaagaagggcgccctgctgctgctgcgcaagggagatggatcaggggcgtcgagcagctggaggagggagagctcgtggccatcgggggagaagaaagggcgccgtcgagggagcttcaacagtggagcgccggcgttgagagagagtagggcgctgggagggaggaagaaggcagaggacgccacgggaggagcttcggcggccatggaggaaaagctcctgctccctgctccatccgaactagacaagggaaggagatggcgtggggaaagccaggcggctggtggaagagaagtggcggctaggggggaaatggaaaatttccaatttgcaagggagagggctcctatttatagaagaaaacctagggttagggtttcaaatgggccaaatgggctgggttgggctggcccagaacgctaa

SEQ ID NO: 22906 - DNA, 1056 bp, Zea mays
  Peptide Sequence Number=SeqID_66281
atgcaggcggcatgcaaccgcgccaggtggacgcgcttctccgactcccaacacgccagcatggagacccaggcccacaagtcacgcaaccggcgcgccagatgctgcatgcaagcaactgcaccgccacttgcgccaccaccgcgcctcttcggttgcggaaccaataccgcgactcgaggcagcccagcgcacgacccagcagcgccagcctggcgcgacggtcaatgcagccgaaagtgggccggcagtgatgcggtggcaggcgggctggagcagcggtcacgtcgtcggccagactcacgtcccatccgggggcagcaagagaaccccctctcacggcgtgaagacgacgcgcccgtgatccgttcctcggacggctcgcgcacgcgcaacggccgccctgccaaccactcgccccgtcgcattaactccgcggcaggacaggcggcgcttctagcaggagaagcgggcgacgcttcgccatcgctggaccgggaaagggggataccccgaaaaggatccttccctgtgaaggaaccgggctccgagccccctctactgatcagaggttcgaaggctggccccccgaggggttcaacagtcgcctcagatcacgtgggccctacacccactactggtcagaggctggcccccgaagggttcacagtcgcctcagacgccgagcgagggatgaccagggggctcggactcgggctaagccccggaagatggcgaactccgctccgcccgacccagggctcggactcgggctcagccctagaagacgacgaactccgcttcgcccgaccccagggctcggactccgccctggcctctgccgaacaacctccgcctcgcccgacccaggggctcgggctcggcctcggccatgaaagacagactcgacctcggcttcggaggagcctccacgtcgcccgacctagggcacaggccagccacgtcaacaggaagcgccatcatcaccctaccccgagccgactcgggccgcagagaacaagaccggtgtcccatctggctagctccgccagatag

SEQ ID NO: 22907 - DNA, 174 bp, Zea mays
  Peptide Sequence Number=SeqID_66282
atggagagtcatgatcttcgggcagaaagggaatcacggcttgtgggtggtgttgagaatgttggttttggtattgactctggtaatggttgtcagcattgcaaccactgctcaggaaaagatgaagtcgtggaaggagacttccaggagttccaagactacgacgagttctag

SEQ ID NO: 22908 - DNA, 309 bp, Zea mays
  Peptide Sequence Number=SeqID_66283
atggcgcaacacgacaagcgcgaggagaggcgtggttgtgggatttctgatgtggtgcagcatgcgggagcagtagggtgtggctgcatggggcattgcaaggagagtgacgtcgagacaacgccgtggatccacaacgctacaacgcacagtggggcgacactgatggagcagcgcgctggagaaaaagtcgacgatgttgtccccgacacagtgctccacaccgacatttcaacaaacaccaaaaggggcgagcagggtgccgcacagatggaggagcagaagtcgagcagagccccaggcccatga

SEQ ID NO: 22909 - DNA, 1536 bp, Zea mays
  Peptide Sequence Number=SeqID_66284
atggagcccgcagccgaggacgttgcagccgccgcgccggactcgtgggaatcggccgacatcgacgggcccataagccggcttatcctctccgcgcgccgcgtgtcctcctcgccggacctcgctgacaacccggacccgccccagccgccgcctgcgctgcagccgcagggcccgccttcggttccctcggctgcgcgcgaggatttgatggctcaggtcgatcagttcctacgagaggctctagagaagccgagggagaggctttctgtgctaagaatggagcaagaaattttgaagttcattggtgaccctaggtttacagagtatgaattcaatggtcttccaacttcatatttgcgtctcgctgcacatcgcctggcgcagcattacttcctgcagtccattgccataccagacaacagtttgcctgatggaactggttcgcatatcatccttcgtaagacatcatctgagtgccaactgcctgatgtctgccttgcagatattccagttaacctaccacaagaagaaaacatctctgtggcgaaagtagctattaagcagaggcctcaaaagaatctccatggcatgaacagctcaagtgctcactcctttagagacaatcaccagaaaagcgttgaagaaagaaaagaggaatacaacaaagcacgagcgcgtatatttaacaacggcgtcagtaatgctactgatgggagatcagctgaggaagtgacttcactcactactcttcacaggtccacttccttggagttgaactcaaacaatagaatgggccaaggggctgaaattactcttgagaggaccttgactaccacttcagctagcagcatgtcaaatagaagcaagagtgataaggagcctgcagtcaatagaaacagacagaacaatagggttgcaattttcagagaccgtgagtcagagcgcagggatcctgattatgacagaagctatgacaggtatatgcaaagatttgatcctggatttggatttagtggagggtcatacacaattcgacctctgtatgcccctgctgttaactacaacactgaattccctcagcttggttcagcacaccaatcacctgttgctgtcgaacagcaacctcgtccaatagctcagcacatgcctgtgacatggtctgcggctcaagcaaccaatgcaattggctatgggccagatggtgtcatggggccttacagccctggccatattcgtgcacctcaatatgccataccttcacgccctggagttccatttgtacatccacaggaatccatgggaccatttgcacaagttgagatgctgaaggagcacatcttgccctatttgaatgggctctgttgtcgaaggactgatgacgatgatgaaaaattgggattcgcagtgagtgggcgatcagggaggagagcaaagattggggtggtccagtttagaagcagaggcatctctgttgacacaattgatggtcaggtttacaagcagactcatctggtagtcagtgttgtgttgtaa

SEQ ID NO: 22910 - DNA, 420 bp, Zea mays
  Peptide Sequence Number=SeqID_66285
atggggacggcggcgcttggcctcggagacggtggcgcttgggctcggggacggggaaggggacggtggcgcactcggagatgggcacggcggcgcgctcgggctcgggtacggggaaggggacggtggcgcactcggagatgggctcggcggcgctcgggctcggggacggggaaggggacggtggcgcactcggagatgggctcggcggcgctcgggctcggggacggggtggagggcgcctcggatgacggtggcgctcggggacggggacgggcgcccagctcggagacggtggtggttgggctcgggctcggcgacggcgtggagggcgctcacggctcggagacggggacgggaacggcggcgcagcagcctggcggcgtagtatcagctccgggcgaaaacactaaaccctaa

SEQ ID NO: 22911 - DNA, 439 bp, Zea mays
  Peptide Sequence Number=SeqID_66286
atggcgcctcctgttgacgtggctggtctgcgccctaggttgggcgatgtggaagctcctccgaagccgaggtcgagtctgtcttccgtggtcgaggtcgagtccgagcccctgggtcgggcgaggcggagttcgtcgtcttctagggctgagcccaagtccgagccctgggtcaggcggagcggagttcgtcgtcttctggggctgagcccaagtccgagccctgggtcgggcggagcggagttcgccgtcttccaggacttagcccaagtccgagccctaggtcgggcggagcggagcggcgctgtccttctgtcaggccggtcagtggagcggcgaagtgaaggtggtcacttcagctctgccggctggggggcgcgcgtcaggataaagctttatgctgatgggggttaccagctgagaattaggagccttgagg

SEQ ID NO: 22912 - DNA, 150 bp, Zea mays
  Peptide Sequence Number=SeqID_66287
atggcaaaggaggtagatgggctagattacgatcgtaggaccaaggacatcgatagagatgccctcatgagggtcggaggaggcaagaggcatggacgacactatccactcgtactctgtctcagtttcaaacttgttatacttatgtga

SEQ ID NO: 22913 - DNA, 195 bp, Zea mays
  Peptide Sequence Number=SeqID_66288
atggaggggggcggtgttgctggcggtgatggcggcggtgggtgcgctgcaaagggggcgtgggcggcggtagtgcgctgcaaaatggggcgtggtgcggtggttgggggcagggcacgcgtgtggggggcacatggctctagccaaagtgaagaaaaacttcactacccaatgcatgcagaggactgggaataa

SEQ ID NO: 22914 - DNA, 726 bp, Zea mays
  Peptide Sequence Number=SeqID_66289
atgaaggattgtccctctcgcctaaggatcggtttgtcatcactccttacctatactcttatcaagtacgaccactcgagactgtatgggcagtcactcaatctgaacttctacggtccaaaccccagggttatgatggctggggagcaccgggagggtaaggagggggaatattttgtccggtttgggcatggtggtggcctgactcctttcggtataatcgttaagagaagtagatcactgatcggatgttacgatctcatgtgcttgctctttgcattatgtagatgggactctggcagcacagttagtgaatttgatgggcactcaaagagggttccaagctgtgacttcaagccaacacgtccatttcgcattgtgatatgtggtgaagctattctagctaacttttatgaaggaccaccatttaaattcaagcattccataaggcatcaacacttttcctatcttgtttctgcattggcaattacacagagatcgctactctgttacctgtattcaggtgcccaaaagctgaacagagctgagcttgaagtcgcttgtgaagattttagcaacatcgtcaacacttttcctacatgtaccatgttcaagggcatattatcaggtggggtcgagatcggcgttgtctccactatcatatcgtcgagcaaagactggtctaggagcgcagaaacatgcttcaagaaaaaggtttatggctaa

SEQ ID NO: 22915 - DNA, 336 bp, Zea mays
  Peptide Sequence Number=SeqID_66290
atgacactcgctcccaggtgcatgaattgtgagctccaatcaaggatgggcatgttacgagcatcaagggatatgatccgctgtgatgtgctaagttcatcggaaaaaaatgtcctgggggctgcaccaaaatttaaagtgctcgctcggtcatgtaaagcaattttcccttatatatatttctactactctatagtccttattgtaggcttccacacccctgttctggtggcttcagtttgtacaaccctgacccatacctattgcgaggatgcgtatagcttgcttcagaacttggacataaagaaacttctgatattcaaccacagatggtga

SEQ ID NO: 22916 - DNA, 465 bp, Zea mays
  Peptide Sequence Number=SeqID_66291
atggcgtatgttttcacattttggacctgctatgtactattacgtgagtatgaagtagttgcaaagatgagactgcgatttctttcatcagagaaacgcagaccagatcagttcacggtccttgtgcggaatataccgcctgatccagatgaatcaattagtgagcttgtggaacatttctttcttgtgaatcatcctggtcactatctgacacatcaggtggtttacaatgcaaataaacttgctaaattggtgaaagagaaagcaaagatgcataattggcttgactactatcagctgagatttgaaaggaatgcatctaaacggcctactactaagactggttttcttggttgttttggtacgaaggtggatgccattgaatactacacatcagaaattgagaggatagaaagtgaaaggacgctgctggagaggagggagacgaggctgttaggaaagtaa

SEQ ID NO: 22917 - DNA, 78 bp, Zea mays
  Peptide Sequence Number=SeqID_66292
aataagtaaactagcaccaatcaaggattactttcctaacagcctcgtctccctcctctccagcagcgtcctctacac

SEQ ID NO: 22918 - DNA, 459 bp, Zea mays
  Peptide Sequence Number=SeqID_66293
atgggcaagagcaacaagcgcaagcgcgaaccgactcctccatcggaggatttcggtgactcggaatactcggaggaggagttctcctccgagtccgagggaactccggctcccgtctctcccccggcgtcgtccgatgactcggacgactcccaggggatagccgcggaagtctggtcatacatccgggccgtcgagcgctccgggctcgagggctcggatgagtcggagtactcctcggatgaagaggactctgacggaggcggcgaggacgaggacgacgacgacgacggcgacgacgacgacggtggcgacggcgacggcagcggcagcggcaggggcagcggcgacgacggcagggacggtgacggcggcggtagcaggggaagcaccaagggcggcagcagcaagggcagcaccaagggcggcggcggcagcaggggcagggccagtggctag

SEQ ID NO: 22919 - DNA, 429 bp, Zea mays
  Peptide Sequence Number=SeqID_66294
atgggcaagaacaacaagcgcaagcgtgagccaactcctccatcggaggagtttggtgactcggagtactcagaggaggagttctcctctgggtctgaggggtctccggctcccgtccccctgtgtgagtcgtctgacgactcccaggggctcgcggcggaggtctggacgtacatccgggccgtcgagcgctccgggctcgagggctcggatgggttggagtactcctcggatgaggaggactcggacggcggcggtgaggacgaggacgacgacgacgacggcggcgacgacgacgacgatggcggcggtgacggtgacggcagcggcaggggcagcggcgggggcagcaaggacggtgacggcggcggcagcaggggcagcaccaggggcggcagcggcggcggcagcaacagggccagtggctag

SEQ ID NO: 22920 - DNA, 258 bp, Zea mays
  Peptide Sequence Number=SeqID_66295
atggcgcacgccggaatcagcagggtcgacgacgtcgaagcagcgaaatcagcagggtcgacgaggtcagaagatcacgagcagtcgcgtgaagacgcttcccaaaaaccttattcgccctctcccggtgcaggacctagaagacgaagggttccagagacctgctctcctgatcgcagatgcacgtctgcggtcgggatgaagagaactagaaggcggcttagctgtgaagagaggcgaaagcaaaaactggattga

SEQ ID NO: 22921 - DNA, 288 bp, Zea mays
  Peptide Sequence Number=SeqID_66296
atggacgagtctggtgtgaaaaggagatcgggtttgtctcgtttaagcagatctggaatcatctgttgtataaatgtgtttactagcctcccgggactagtaattgtatcacatttgagtcccagaggattggggcgctacatcacggccttctgccagggagtacgtgatgaaaagatgttggagaagttggcctcgcatgacgtggaaatggtctccactctctttgctcaggccgacaagtgcgctagggctgctgagggccgtgtgtggcactcagcgccatag

SEQ ID NO: 22922 - DNA, 465 bp, Zea mays
  Peptide Sequence Number=SeqID_66297
atggctccccacctcgtcgcctacccggcatggaaagggccaatgacaaagaggtggccgcggccgaaccagacctcagttaaattttgcatatgtgtacaccagcccggtgagttttcagataataccttttatctaacccacccgcacggctcccatctgtcctcacatgacgacatccgaattgagcagccaggcttgcagtttaggacctcctttacgaaagctgggaggtccgacagcctgggggccggttccaaagaacgggagctcgttccatggagtggtccggagcagtgtagccgattagcctggtcccgtaccataagactgcacagcccaccattctatgatgggtgccttagtattgggagctatagtcctgtgggtctgataacctggggtccagctccagaaaatggacacttgtatcctggggtggtccggagccgtgtagccacttag

SEQ ID NO: 22923 - DNA, 2049 bp, Zea mays
  Peptide Sequence Number=SeqID_66298
atggacaaggatcgccaaggcgcggcgcgaaaacgccagtcgactgtgagggttcacgaggcccggccgaaaaggcagcggggaacggcgaaggctgaggcctccggcggaggcaagccgccgctgccggcgaaggtgggcgcctccgcgcctggcaaggcgccggaggcgacggtgggcgccggaggccccaagctgtcgaaggtggcgccgtccgtcagcggagtggcggaggctgcgaaggcggcccgatcgttaccgccgtctggcaaacgcgttgccgacttcggcaccgagattaatgtggaggattatcttggggggtcggacgagggcccgcttgctctagttgtgcctggcgcggcgatcgcgacggctgcgccagcgccgaaggcgggggtagagacccttggcgttggaggcgaggtgtctgccctcgcgctggtcagagacgaggcgggcgtggcgacccgccggctgaagggagcgacggaggcgctgagtcgtgcgacggaggcgctgagtcaggtggctgacttcaccagccgcactgcgtcgggggcccttacggcggcgttgtctgccgaggtcgagagacttcggacgcaacatgcggacgctgtccgtgagaagtcggcctccgacagcaagtgccgcaaactggcggagaaggtggccgcccttgagaaggagaaggcagacctccggcgccagctgacggaggagaggagggaggccaacgaagccatcgccaaagagcaggctgcgcaggcggaggccaggctggcgcgggcggaaggcaatatcgctaaagagctcgccggagagctgcagcggcggcttgccgccttcgagagccgcgcggagggggccgaggccgcggcgcgagcggaggccgaacggacgcgcacgcagctcatgacttcatatcgcgagctgggtgtgcggacgggtgacttcgaggtgccggagcgagaggccgaacttcgctgtctggagtgggtgcaggaggaactgcaggagctccccactgtcttggcggggttgatgtcgttcacctccctggtcacctgcgaggcagcgatgaacgcgctctctcgcgaaggctgccggcactatgaggccctcgaccaggtggatgaggattttgggcgagatatctttgaggtcgaagaccccgtggtgaaggagtccgccggggccctctatgaccggatgtggggttcatacggtcgtgaggtggtccgggcgcgggccgaggctgcgagggctcaggcggagcgcggcgagcgggtggacgaccttggggcgctgaacagcgcgctgcctgagccggagacgacccctgcggaggccgcgactggagtcgccccgggactgaccccggtgaccgcggaagatgcaccaggcgcccctgcacctgctgcggccggcgaaggccttcccccaagggtggccgaaggcgcacctgatgcccccgcagctgctgtgccgagcgctgaagatccagcggaggtgggggcgggggcagcgacggaggcggcggcggaggctcccgcagcggcagggccttcgcaggttcaagattttgggcctgcgcacgcaaccgctactactgagtttttggcggcttcgaccgcggaagatggaaatgaatgtggtgggtctgtttctgagttttttgattttactgactctgggagctcggttgagtggaccgaggagtcgtcggaggaggacttggactattttgcggccttggacgtggctgcggcggaggctgcgccacatgctgcggacgcgccaggcgtgcccggtcctagcaccgggcaacgacgacgaagggcggttgcgaagcgtaggattagtgcggaggaaggggctcggcttcgcgttagtagggttggtcggcaggagctgctgtctttgccggccgtctcgggtgtaggggaaggggagctgcgaagcctttttgcgggtgaggagcttaggataatgttatttaattatagagagatggggattattcctaaggttgagccgatgtag

SEQ ID NO: 22924 - DNA, 2169 bp, Zea mays
  Peptide Sequence Number=SeqID_66299
atggcgagggtgtgtttaggcctcggcggccgcaggaaacacacgctacaagacaatccgatcctgcaggctcgaaccttgacggctgaagggagcagcagcacccttggcatcgacgacaccttcggcgagggccaacctagcctcggacggcgacgcggtccgaggatctccactctggaggacgacgtcatcaccatgcccgggccatcgccgctagggtcttctccgggaatccggcctgagcgggcggctcggccagtcaccccggggcctcggccagttacctttcgaggacgtcaatccggcccgagcaggcggctcggccggtcaccctggggccttggccagctgccctccaaggacgtcagcccgacccgaggcctcggctggtcaattccggcgtcggtcccgctaacggacgacccggccaggctccggccaaccaggccccgacagccacaacgaacaaaaacaccggcactcaaggtgccgttacaaacggaactccggttccgtccccgcgggtatggacaacccccaacgacgaggcggaaagacggcggatctcccccatccgggggcctagaaggtggaaagacacgatgcataagggagcgcgaagacatggccgccctccaaaggggtcaccctccttttaaggacggttctccctactcgcgtccccagccgtcacgggctgagtcttctccgacacactccaaggtcctcccctacggcgcgggggctgggtcccacacgtcatgcaagccaactcagggcagaagaagccgaaccgccgcgcgcggtgcatacgaccgcccagcggttacaagcgaccctccacttttgcccagaccaacgggcgaaaggggaccgggaaagggggacaccccgaaaaggatccttccccgagaaggaaccaggctccgagcccccctactgatcagaggttcgaaggctggccccccggaagggttcaacagccgcctcagatcgtgtgggccctacacccactactggtcagaggttcaaaggccggcccctcgaaagggttcaacgaccgccttaggctactcgggctccgcgcccaatactgatcaggggttcaaaggctggcccccgaaggaatcccaccagagggaggcatcgagcccttggaccccgtcgccaggggaccgggtctggcagatcacccgcagctcgtcggagacaccatgttcggcgcccatcgagggcaacatggcgctttcccccctcctccttgtggaaaggcgacgcaggggcaggctcgggggctgctctcgcaaacccggctccggccgaaccgttgacagcgtcaacataccagcccgagaacttgggacccgaccgtacacctgggctacggccagttcgcatgagggaacgaccagaccagccgaagcactacgtgaggcagtaagacctcgaaggagtgaaaccactcctccgaggcctcgggggctacacccggcaggtgcgctcgcgcgcacccaccggaacaaaacacaaccgagaaaggctggtccccttgcaaaaaagtgcgacgaaagcctccaagcgagtgcaaacactcccttcgaggctcgggggctactgtcggggaccataattaggggtaccctcaaggctcctaattctcagctggagcatttaatgcaaaggtggcctgacacccttatcctggcgcgcaccccccgccggcaaagccgaagtgaccgccgtcacttcgccgctccactgaccggcctgacagaaggacagcgccgcatacgccacaccgactgcagtgccactggacagagtaagactgacaagcagtcaggccctgccggaggcaccataggaagctccgcttcgcctgaccaagggctcggactcgggccaagtcccggaagacggcgaactccgccccgacccagggctcagactcgggctaagtcccagaagatggcgaactccgcccccgcccgacccaggggatcggacttgggctcggccctagaagacgacgatctccgcctcgcccgacccagggctcggacttgggctcggccccagaagacgacgatctccgcctcgcccggcgcagggctcggactcgggctaagtcccagaagacgacgatctccacatcgcccaacctag

SEQ ID NO: 22925 - DNA, 1731 bp, Zea mays
  Peptide Sequence Number=SeqID_66300
atggcattgctacgtaccgtcgtcggcggcgggcggtctgcttcactcgagccagaacgccggcgagcaaagggagcagcggaggaaaaggagcagcaagacggcgggcggctagggttttacggagcgcggaaagcagaattcaaacagcgccgcccccgccccccttttataggcagggcgcgactcttcgggaaacccgcaatccgacaggccgcgacgcttcgggaaacccgcaatccaacagtacgccgtccatcaacggtcacatcaaaaacccccgcggaaccacttcgagcgagggcagcgtctccgccatctagcgacgtcttcggcaccaggcgtctgagggcacatgcgtccttaacacaagacgctgggcactcagatacctataaatacccccgcacagtgcccgaagcagaagagcgtgaaaaaattgtaaaggatcccaaatccattgtaccagcagcatttgtttccttccgatcacgttggggtgcagcagtttgtgctcagacacagcaaaccagtaacccaactgtttggttgacagaatgggctccagaacctcgtgatgtgtactgggataatttgtctattccatttgtctcccttacagttcgaaggctgataattgcagtggcattcttcttcctgaacttcttttatgtgttcccaatagcatttgttcagtctcttgcaaatcttgaagggattgagaaggcagcgccgtttctgaagcctctgattgaagagcatactattaaatcattcatccaaggtttccttccgggaattgctctgaagatcttccttatattgctcccaagcatattaatgtttatgtctaaggttgaaggattgacctcaatatcttcactggagagaagatctgcatcaaagtattatattttcatattcttcaatgtatttctggcaagcattattgcaggatctgctttagagcagctaaaaagctatattcatcagtcagcaaatgaaataccaaggacgattggtgaagcaattccaatgaaggcaaccttttttataacatatacaatggttgatggttgggctggggtagctggtgagatattgagattgaagccactagtgatcttccacctgaaaaactttttcttggtcaagactgagaaagacagggaagaggcaatggaccctggaagtattggttttgactcaagcgaacctcaaattcagctgtatttcttacttggtcttgtctatgcggcagtgacaccatttttgctcccttttgtattgatattctttgggtttgcgtacgttgtataccgccaccagctgcttctccttgggttacttagcacaaaaggcgctggccagtcaacacctgtgctccttgttcttcctgtagtgaccttctatttccacaagtactgcaacaaccgctacaagccgacttttgtgaaatgcccattgcaggaggcgatgaagaaggataccctggaacgtgccagagagccaggatttgacctcaaaggatacctaatgaatgcctacatccacccggtgttcaaaggtgatggggacgacgacaagttctcagtcgttgatcaaccagaagccgagcaagtcctggtggcaaccaagcggcagtccaggcggaacacccccgtgcccagtaaatacaatgggtcggaatcaccttcgcttcctgaaattgtaaatgaccaacggctataa

SEQ ID NO: 22926 - DNA, 822 bp, Zea mays
  Peptide Sequence Number=SeqID_66301
atggaggtccattgccaaaccagcttttgccagaatgaagatggtttccccaagttgctgagagcatgcacagttcgcctcgaaatcaggagccagccagagtatgatggtcgtgaattcatcgagcatagcacagagaagtgtgtcgtgactgtatacattggatccagtccgcaccatgtggaatggagtgtcactgctgcagggcacagattcaaagacacctaccaagtcgtcgcccgcaaggcattgagggccctatctcaagcccgtgcaactgcattggaaagtcgtgaagtcattgtggttgaagccctgaagcaagccaaggatgagcatgtccagaagctgatagaggcctacttggtaacccataaccaacatagagcccagcagatccaagagtctactccatccaacccagttcaacccatgagagctgaagatccccatattcttgaaggtcacctggtctctatcagaggagagaagaaggcttgggaactcccagaaggagccatagtcttggaaagaattccagtcttccctcaggctatgaataagcaagagcaccccaaatcctcccaagattccccgccagagttgtttgagcccctcaccatgaagaagattccagcaccatcccttgaagtcaaggaagaagctgcaagcaccccgccagcaccgccgccctttgaggagctacaagagccagtcccgcttgaagaagagttcaaccccatcttgccatctcagtccccgccagaagaagtcattaacatcagctccctcttgacccatccaggagatgtctcagattga

SEQ ID NO: 22927 - DNA, 108 bp, Zea mays
  Peptide Sequence Number=SeqID_66302
atggggtctaggcacagtgcttgctctgctgaggctgagtgccgaggtaaagaaggcgtcgaggcggatctccaggagttccaggacatcgacgagttcgaggattaa

SEQ ID NO: 22928 - DNA, 114 bp, Zea mays
  Peptide Sequence Number=SeqID_66303
atggctgatctgctgtaccacgctatggtgctgctcagagtcaaggatgtaaagatggaacaagtccttgaggtcctgaggaagagattttcgcagtctgcttcagcggtctga

SEQ ID NO: 22929 - DNA, 656 bp, Zea mays
  Peptide Sequence Number=SeqID_66304
atggccggctctggagggtcgccggcgatggaaggagatgtcgttcgtcttgatccagagacagagggaggagttggtggtaactcactggtgacaccaccgcctgctctaatgggtcctgagatcgccgagatgagcataggtgaaagtgcattcatcccttttgtgagttttggtgatttggataacaacacatttaaaggtctaacaaatgttgatcctagggcaatagatcttgccatgagaatcgccgaaaggatgttcctcaaaatgaaggaagatgaggcgaagaacaaaattgaagaagaaaataatcgatggagaccaaacgacgaatccacctcttcacaaggttcgtctttcaaatccacttctcatatgtgctttattgctaatgggagtgatagtgaaagcgaaagtgaggatgaagaggagcaagaaagtgatagtgaagatgaggaagatcttcaaaagttcttcgctcaactaagcaagaagaaccggatgagcttgctcaaactcatgaaaagagcggaagaacaaaaggaaatgcttcataagcaagaagatatcctcatcgaaaaaatcaaagacttggagaagttgaccaaagagaatgagaagctaaagtgctctcatgatgatttggtccaaag

SEQ ID NO: 22930 - DNA, 345 bp, Zea mays
  Peptide Sequence Number=SeqID_66305
atggcggcggccgcaccaacacacgcgcccgtgtcctcctcagcgtgccgcgcgggattctcctctagcggtgtatccttccccaattttcgctcggcagcggcttcggcccctgggtggcggcgcagggagccgtacccggcagtctccgtagtgtcgagctccccgcagtctgtggcaggagctataaccgtcgacaccgaggaccaaatttgttggggattggagcggactgtaagccactggggcggtaatccgttccgagccttaagtgccctgctaggggcgaggagtgccacactgccacatgatggatacaagccctggatgaggatccaccattag

SEQ ID NO: 22931 - DNA, 549 bp, Zea mays
  Peptide Sequence Number=SeqID_66306
atgctgatgtggtcggagatgctgaaatggatgaaggagttcggaactgacaccatcctcgaggtggtcactgccagccaattctggacagcaagcaaaacttgggagatactaatctctgtttgttgctcatggttgatggaaatggattgctccacgcgcgaggttggacagaaacgtggaagattgcttgcagatctagaagaagatgaacaacctaaaaagaaggggtttaagaatttctccaagactgcaagagaacttgtgcaccggatgcagaagattgatagcgactattatctcgaggtgcttggttcgaactaccagagcaggcttcttgaagtaatagattcgagtgagctgccagaattccttggcggttcatgcacatgtagtgacaagggtggttgtctaggatcaaacaaagggccgtggaatgatcgttatatattgaagtggcaaggcttgttaagtgatacatcaaatgctgaatcaggatctgatgttgatgattttggtgcatcatttgtccagttcatgaggaagtaa

SEQ ID NO: 22932 - DNA, 240 bp, Zea mays
  Peptide Sequence Number=SeqID_66307
atggccgaccgtgtatggaggacgacgggcacggttagcacagtcgccgtcggagggggtggcacatggggaaagtgccatggatgggggacggcgtcggcgtccacggccaacagggaagggcgtgacgcctgccatggagggggagtcgtgagagcttcggcagggggagaaagagggcctgctcgccggcctagggaagaagggtgccgccaagcagggccagagggacggcgatag

SEQ ID NO: 22933 - DNA, 849 bp, Zea mays
  Peptide Sequence Number=SeqID_66308
atgaagtctgttgatcgcccgcccagtaatccaaaaagattaaccattgaatccagtcaggaggttttttcaattgacatttccagacgtacaagatccagcagctcagctcaccaagatgatattccccaaaatcaggagcagaatgagccacagccagccccaatccatcgttttcgcagaaaggcgttagcttgtcgtttaaaaagaaaacctcctacttcatccacactgcccgacgacgatttcatggatgctccatcgttgaagcgccaattcagatctgcctcaccttctccttcagaacaaatcagtgcaaagaagttaaaagtaccttctcctcaagttcctgatgtgaaaagaagtccaaagtctaatatcattacaaaaaaaaactctcctaaacagaagactcctagaaaatcacagaaactgaatatccgctgcattccctatgatgttattgtatcatcttggataatgagcgatcggcagcgcgatgctgtcgctagattgggattttcaagcatatttgatttgcgaactgatgctttagagagcagatcactcatcaggtggttgatggataaattggatccacatgacatgaccatacgcccaggggctagcaaggaactgaagataacaaaagatacagttcatctgattttgggtttgccatgtgctggaggaggcagggagtttactgattggtatggtgaagtggatgctgctgcaaaactgagacgtgatctcaatgttggtaaagaagaatttgatgttgtcaagcttcaagacaagatagtgcttggcaacgatgatgagctatcaattagatgctttttctga

SEQ ID NO: 22934 - DNA, 888 bp, Zea mays
  Peptide Sequence Number=SeqID_66309
atggcgcttcccattgacatggctagcctgcgccctaggttgggcgacatggaggctcctccgaagccgaggtcgagtctgtcttccatggccgaggccgagcccgagcccctgggtcgggcgaggcggaggtcgttcggcagaggccagggcggagtccgagccctggggtcgggcgaagcggagttcgtcatcttccgggacttagcccgagtccgagccctgggtcgggcggagcggagcttcctatggtgcctttggcagggcctgactgcctgtcagtctcactctatcaagtggcactgcagtcggagtggcgcaggcggcgctgtccttttgtcaggccggtcattggagcggcgaagtgacgacgggttgcttcttagcgaaggcagggcctcgggcgagccggagatgtgtccgccgttggaggggggcctcgggcgagacggaaatcctccggggcctttgcagctttatgctgatgggggttaccagttgagaattaggagtcttgaggcctttctcggttgcattttgttccggtgggagactacaccaccgcctgccgagtgtagcccccgaggcctacgaggacagcatggctcttctttctcgctccaagccgagataaagtctgcgaggagctgctcccctgtgcttcccctggaggcgccccctgcaccatcactgggcgccccagcctctggagtatctgctggaggagacccggacgacggaggtggcgacgactgctcgagccacgacatcgacttctctgctaaccatgagccggaaggatgggttgctcgacccatcactcgcgacgctgctcacgggtgtcacttccacgatgcgctcgacaccctgctacgtcgggcactttaa

SEQ ID NO: 22935 - DNA, 156 bp, Zea mays
  Peptide Sequence Number=SeqID_66310
atgcaggcggcatgcaaccgcaccaaggggacgcaccctttcgacctcgacgcatccagcatggggcccaggcccacacatcatggaccgggaaaggggatactccgaaagggatccatctctgcgaaggaagtgggccccgagccctcctactga

SEQ ID NO: 22936 - DNA, 429 bp, Zea mays
  Peptide Sequence Number=SeqID_66311
atgtctgcgcacgactgtccgtatgccacgacagtgtcggtgcacagcgaactgcagttgactgccacttcaggaaatgaggacgcgctcgctataattcaccgactgtccggtgaagcacggacagtgtcagctgtcacacggactgtccggtgtgccagcggagcaacggctacttcgcgtcaacggtcgactgcaaccgcattcaatgcgctacagtacgcgccagagtcagagcacgcgcagttggcgcgccggacagtctacaggacctgtctggtgcaccactggacagcccagaggccccagcagtcagagctccaacggtcgaaccctaacggccgggtgacgtggctggcgcaccggacagtgtccggtggcgcatcggactgccggtgcgccaagcgacagcagcctccaccaaactag

SEQ ID NO: 22937 - DNA, 156 bp, Zea mays
  Peptide Sequence Number=SeqID_66312
atggggccctttaatcggcccggtaaagcaacacagccacttccatcaccagcggattccggctctcatcaagtgactccgccccctcacgttgactttgcggacagatgtctcaattctagtggtggagctacgaacaacaatctgatgtcctga

SEQ ID NO: 22938 - DNA, 75 bp, Zea mays
  Peptide Sequence Number=SeqID_66313
atggcgggcagaattgagctcgccggagctaagggaaagtggctggccagtgaggagaacacagatgatcattga

SEQ ID NO: 22939 - DNA, 75 bp, Zea mays
  Peptide Sequence Number=SeqID_66314
atggcgggcggaattgagctcgccggagctaagggaaagtggctggccggtgaggagaacacagatgatcattga

SEQ ID NO: 22940 - DNA, 846 bp, Zea mays
  Peptide Sequence Number=SeqID_66315
atgaacgcgctctctcgcgaagggtgccagcactatgaggtcttcgaccaagctgatgaggatttcgagcgtgacatcttcaaggcggcgcgtggcgagagggtggatgacttcggggctttgaacagcgcgctgcctgacccggagtcgaacccgacggaggctgtgtccgaggccgccctggagccgcccccggaaaccgctgaaggcgctcctgatgcccctgcagccgctgcggccggcggaggcccgcccctggagaccgccgaaggcgctcctgatgcccccgcagccgctgcgccgatggctgaggatcctgtgacggtggcggcggaggcgacagcggaggctcccgcgacggctgggtcttcgcaggttcaagattttgggcctgcgcacgcaaccgccactactaattttttggtggcttcgaccgtgggtgatggtaataaatcagatgggtctgcatctaagttttctgattttgatgactctgggagctcggttgagtggactgaggagtcgtcggatgaggacttggactactttgcggccttggatgtggcagcggcgaaggcttcgccgcatgctgcggatgctgaagctgtgtctggtccgagtactgggcgtaggcggcgaagggcggttgcgaagcgtagagtgagtggggcggacggcggtcggcttcgtgtgagcagggctagccggcaggaactgttgaccttgccggtcgccgtgagtgcaggtgagggggaattgcgaagtctttttgcgggtgaggagcttaggacaatgttatttaactatagggagatgggaattattccgaaggttgaaccgatgtag

SEQ ID NO: 22941 - DNA, 354 bp, Zea mays
  Peptide Sequence Number=SeqID_66316
atggccttgctctccacagtggaaacatgctctgtttccaacttgagctggtgctgcctgttgggggccttcggcttacgaaggcatcttcggactcaaggcggtatcacagcagaccaaaatattacgaaggttgatacagcgccgaaggtgaacagtacccccgtactgttcacgctgatctggcattcgcttttgcgtcacgcttgtactttcatctccttcaagttgaagtgtatctatgaaggcatcttcggactcaaggcggtatcacagcagaccagaatattacgaaggttgatacagcgccgaaggtgtgagcaggaaagcttcggcatgatagcaacaaaatga

SEQ ID NO: 22942 - DNA, 1692 bp, Zea mays
  Peptide Sequence Number=SeqID_66317
atggaggtagtggagttggttccctgcgcccgcaacaagtggggcaattggcaagatttttggttctacgtcacggagggtaccgtcgaagaccatccgaggctccccgtgtccaagatgtgctcgcatttctactcagcatacccgccttttgaagtggcggaggaggatgcggacaaaggggccctccggtgcgccgccggcctgagcagtgggcgcgatttggttgaggaatttattgcgtacggggtatggcctttggcgcatgactgggcgttgggcgaagtgtgccctcgccggatgccttcccatggtgggaagctggtgcgaagtcctgtcttcgcgctggatctgcatagccgcgatccggccgcctttgtgcgtgaggcggaggatggggcggtgcggatcgttggtcggtacgtgccgaggacagagggccagcgtagctgggatatccgcgggtcgaatgtccgtttgaacagggtttttgaattgaatcgactgccgtatggcggttatcccggccaggacgatgtggatcgtcgcgggaagaaaccggtggtagagtctggagacgaccccgcgccggcggccgccccgccctctaagaagaggaaactaggtactgctatgggaggacttggggtttccgatggttttgctagagaattgatgaggacatgcgcggccccggggggaaggatgtcttcgcccgagctccgggagtcttcggcgcggatgcttgaggtgatggacaaggatctccagggagctacacagaagcgccaggcggtcgtcaggcttcatgaagccaggtcgaagaggcagcggggggctgcgaaggctactgcccccggcgaaggccagccgccgctggcagcgaagtcgaccgtccctgcatccagcagggcgccggaggctgtggctgccgccggtggttccaagtttgcgaaggctgcatcggcatccggcagggtgccggaggccgtgaaggtggctcgggggttgccgccgccggtcaagcgcgtcgccgacttcgccaccgacattagtgtggaagactatcttgttgggtcggacgaaggccaacttgtcgttgttccgcctaccacggcgaccacggcggctgccatagtgccaaaggcgaagggtggtgctcttagtggtggcggcgagatgccggcacttgctgcttcagggacgaggcgggcgttaccgcacggcgtctgggccctcacggcagttgtgtctgccgaagttgagagacttcggacgcaacatgccgatgccgtccgggaaaaatcggtcaccgacagtaagtgccgcaagctggcggacaaggtggccgcgttggagggggagaagactaacctccggcgccaactggcgaaggagaggagggaggccaatgaggccctcgccaaggcgcaggctgcactggcggaggccaatttgacgcgggtggagggcagtcttgccagggagcgcgccgagcagttggaggagcggctcagcgccctgcagagccgtgtggagagggctgaggccgcgacgcgcgcggaggctgagcggacacgcaaacagctcatggattcataccatgagctgggcgcgcggaccgctgacttcgaagtgccggaccgagagcccgtacttcgctgcctggagtgggtacaggaggagttgtag

SEQ ID NO: 22943 - DNA, 840 bp, Zea mays
  Peptide Sequence Number=SeqID_66318
atggagaatcatgatctctgggcagaaagggaatcacgacttgtgggtaaagtggcaatgagattgatggttcttggtattgactctggtaatgcaggagatagagtctgtgaggagctgctcccctgtgcttcccctggaggcgcccctgcaccaccactgagcgccccagcccctggagtagctgctggaggagacccagacgacggaagtggcgacagcagctcgcgccacgacaccgacttttctgctgaccaggaaccagaaggatgggttgctcgacccatcactcgcgacgctgctcgcgggtgtcacttccacgatgcgctcgacaccctgctacgtcgagcacttgaccggtacttgttctatcgagtatcgctgtgtggtcttccagcacagtcgcgggagcactattctatctctaagcgggactcaactgaggcggccatgcaagatgccgcacggcgtgcgctttcgcactactactcggttctcggcggggtagctgacggcctcaacctgaagtattacccctgccgtccatctggcagcacaggaggtgtgattgtctcacccgttggtgaggacaatcctaggttgagcagcacagtcaacctagccgccgtgctaaacacggagctggaccatgaattaaacgagctgagtagggcttgtgctgagatcgcccagctgcgggctgagcgtgtggagtgtcgtcacctggatgatggttcccccgctcccgtcgggactcagcacccgtaccgctcacctcggcgtggacaccagtcttatggcaaccccgactgcaagaccaagatagacttagaaccatag

SEQ ID NO: 22944 - DNA, 276 bp, Zea mays
  Peptide Sequence Number=SeqID_66319
atgttagtaagtcatgacctcccccgagttcagcctcgggcgcaacagggagctccgcctcgcccgacctcaagcctcggcctcagcctcagcctcgagcgcaacagggagctccgcctcgcccgaccccaggcctcggcctcagcctcggcctcggaggaatcaccgcctcgcctgaccccaggcctcggcctcggaggagtcgccgcctcgcctgacctcggcctcggaccgactacgccacaggggatacatcattaccctacccctagctag

SEQ ID NO: 22945 - DNA, 444 bp, Zea mays
  Peptide Sequence Number=SeqID_66320
atgaagaagcttggttactttggcagcaacaccgaagtgcgacttcctagcgaagaaacaattcctaatccaaagaagaatgaaattgttgtttacagaagttttttcaaagctgggtttcgtctactgatgtaccaacttattgcgaaaattttggaaagaatccttgagttgcattatcagatgaaggccagggcggataacttgcacaacaactttgaatgctacaactttgcatacccccgcactgggtggaaactgctgaagcaggtgaagcacaaagatggtgaacttgtcaccctagccttcgagtttagagagcaatcaccgtacaaggctccttccgaagggtggttgaagctgattgagatgaagtgtaatgaaatttgtgggaactacttgactagagaacatgaagatatgtcatccaccttcgggggctga

SEQ ID NO: 22946 - DNA, 159 bp, Zea mays
  Peptide Sequence Number=SeqID_66321
atggcttcgaaggttggcactatgtcttggcgcacctccgaatatgttggtgtgatcatcttagcagttgagcggattctaaccatctgcgagaatttcatgaggatgctcttgccgaaggtaaatgttgaagggtggatgaagctggccttcgggtag

SEQ ID NO: 22947 - DNA, 648 bp, Zea mays
  Peptide Sequence Number=SeqID_66322
atgacccggtacgcttcgcggacggtccgatccacatcagacggacctcgtactcctatccgaaacgctacgcagtcaccaaatccggccatcaaaagggagatccaacggtcgggcgatcatctcccccaactcaactcaaccacggcatcccccatcttcacggcggcgcccctggccggagcggccccaattcggcgctccctcaaccaaagcccgctacgattactcctacgcgatgtccgaagagtggtgaatgcattagggaaatccttacctacggtggcagcgccaaatcgcgtgaccatgcggcagtgcagcattgcggtagtttgggtgacggtgaagaaatcagaccatcccgatgtccaatgcgcgccaaatctctaccctgcccgctccaatcgcacggtcgggaaccctcttactgcaccgcttccatcgaacggcgaggtcggcaagggacggcggcacgagctggaggcgacacgcggtgacctgctcgccctgttgagcgattttggcccccagtcggttgatctcaagtcttcgcgatgtagcacccgtacaccacacatgctggtgaactcctcctccttccgattgctgggtgcccgcgaaggtgagaagcgccattggcggtattga

SEQ ID NO: 22948 - DNA, 672 bp, Zea mays
  Peptide Sequence Number=SeqID_66323
atggctgggaaaattaggcgcttaatgaaccggtacgcttcgcggacggtccgatccagatcagacggtcctcgttactcctatccgaaacgctacgcagtcaccaaatccggccatcaaaaggagatccaacggtcgggcgatcatctcccccaactcaactcaaccacggcatcccccatcttcacggcggcgcccctggccggagcggccccaattcggcgctccctcaaccaaagcccgctacgattactcctacgcgatgtccgaagagtggtgaatgcattagggaaatccttacctacggtggcagcgccaaatcgcgtgaccatgcggcagtgcagcattgcggtagtttgggtgacggtgaagaaatcagaccatcccgatgtccaatgcgtgccaaatctctaccctgcccgctccaatcgcacggtcgggaacccttttactgcaccgcttccatcgaacggcgaggtcggcaagggacggcggcacgagctggaggcgacacgcggtgacctgctcgccctgttgagcgattttggcccccagccggttgatctcaagtcttcgcgatgtagcacccgtacaccacacatgctggtgaactcctcctccttccgattgctgggtgcccgcgaaggtgagaagcgccattggcggtattga

SEQ ID NO: 22949 - DNA, 213 bp, Zea mays
  Peptide Sequence Number=SeqID_66324
atgaccgcagtcacttcgccccctttactgatcgttctgacagggaaacaacactattcaccccgttctgactactgtgccaacccccatggtaaaactgatgacagggatgtccagggccttcccaagaggcaggcagagaaggcgagggtggaggcgaaggaggccaactcagacggctcactccaaggccaaaccctctctctctcgtga

SEQ ID NO: 22950 - DNA, 286 bp, Zea mays
  Peptide Sequence Number=SeqID_66325
atgagggtcactaaccgaggaatcgggactcacagaccattgtccgcgacgcagcgcgagttggcggcacctgagcatcgcacggtggttcttcgccggcgaactcactgccccgcacccccgtgctcccgtgtagaggacttgcgtggcctgcggaccaagatccacacggacgtagaggagaccgtggatacggatccgccgacgaggaagagccgagcgccgtcagtggcggccgacgcggaggatgagacgaggacgggccgggcttttatacaccggaggg

SEQ ID NO: 22951 - DNA, 198 bp, Zea mays
  Peptide Sequence Number=SeqID_66326
atgaggcatgataataaaggattaagtacacttcaagacctcaacggagccggttatacgaagcctccccagtacgcggtgcagctattcgagcagcaccggctaatgggcttggtagaggataccaagatcaccctggataacagggaggaccttgtggtagacctatccactgagctggtggagaaagacctctag

SEQ ID NO: 22952 - DNA, 78 bp, Zea mays
  Peptide Sequence Number=SeqID_66327
atgcctcgacgtgaccgcaaggacttcccggagctaaccccgcccttcgccggaccttcgtcatcgccgagcttgtaa

SEQ ID NO: 22953 - DNA, 1068 bp, Zea mays
  Peptide Sequence Number=SeqID_66328
atggagccagccgtattgaaccgtgaaagagttgcattggacaagaaaaacaggatgcctatgttgttcgacgactatagcgatgaagatttttatggggtacaacggaagtatagtattgtcgctcgagttgaagttaaattcccgattgaaccacgttatcgtgacaggcaacattacattttgtctgacatcaatggagccaaaatcgaggccattgcaactcggtatgagatagtcaaatacttcaacagtttgctccatgaaaagcatgtctacaagatgcacaacgtatggtttggtcttaatccgggtgcatttaactttcgacatctaaatggtaccatagagttgtatttcacccaacagactgtcgttgagccctacgctgtcccagttcaaatgccgccatttccaaaacatatattcttgaaccttgatgatattgccgagctgccaaacaggactttagttgatattatggctattgtagtccacttggatacaatccatcgcacaatgtggggtacattcaggaagattgttataatggatgctagtgtctcgaatcaactgaccatacaacaatacacttcaaaccgttccatcacaacacccattattttgaacattagatgggacataatgtcggtcgcaaaccattcacagacatctctagcaatatcattagaggtcccaacatatacctctgaggttctacaccctacagcatatgtatcggaacctgattcatcctctgataacgcatgcgactgggttatccctgaatacaccagtacacgtttcatgccagcttcaacacaaactgaggatgtcggttcacccgatatgtctactgagccactaagacgtaaacattatgttctgcgtggtgaaagacaagctatcttagcccgtcaaaacaagaaatttgaagcaaacgttgcacgtaacgtggctactttgactgaggaagatatcagtgacgtcggacaaatggatgattcgacacaacccggttcaactatagagatcaacaacactagtaattatactaaccagttttaa

SEQ ID NO: 22954 - DNA, 435 bp, Zea mays
  Peptide Sequence Number=SeqID_66329
atgtggctcaacgtcgtggccgcagcccgacagtcgcggaggttctggaggattaaccatctgctgcaacgccaacgcctgggacatgggatgcaggagcaagtgccatccagacattcgctttcctttcctcaatcaagagcaggacaacttgtaatgaaaccgctaacagaatgcatcacaaagggtccaaggatgagagagccccttttagcagacattgtccaagcagaggatattaaggagctatgcaagcttttagtggtggtatcaagagaagctgcaaaagcatatgttggatcagatcagccggggagtcgcaacaagtgttttggtgctattattcttcaggatcagatcagctggagttgggagaatgcaataaatctgcttggtgacagggcaattccagcagacatcaaaggattaaaatga

SEQ ID NO: 22955 - DNA, 1926 bp, Zea mays
  Peptide Sequence Number=SeqID_66330
atgtccttgtctcataacaagccaaaaaaatcggtgactactacaatagttccgaaagattatatttgcaagcagggtgatcttgcactcatcgattggattaaagaaatcccttgtgaaccaagggtagaagtcgtgcttattgatgatgcctttgtggaaaggaagtggatggaatgtctatttcaaccggacgcatatctaggtgatgaggtgacagactgttacataaatttaataaaagctcaagagcatctaaaatgccgatctggaggtcgtgtacacatagaaaatgcttttcagttcaactttctaaagcgagatggtgatgttgaaactaaaacagatgagttatatccaagtaaagacatggcacaaatatctagcgctgaaagaagggttttactttatctagaccatgacagggtgtttattccaataaatatccgagaaatggattggtatcttgccgtgatcaatgcaagaaatatggagatacaagtgctcgactcacttggtacatcatccggtcgcaatgacctcattgacactataaaaggactccaaagacaaattgatatggtatctcagcgtaaggagttaaaagatcataggtggccagacctccgagttgcttcttggccacttagagaaatagaaatggaatatgcaaagcaaacagatagctcctcgtgtggcctctttctactaaactatatcgaatactggacaggggatgaactatctgataattttacccaggaaaaattggctgctatattactatcttcagatataaacaagagaaaggggtgtccgttatacaagtatgacaaagaagttgatgctggatgttcctctgatgttcagatattagatagtcccacaaatcctaagaagaggaaactactttgtgtatctgaagaaagcgaagtattgatggaagatgatgatggccccatcactcaagcagacttagaaaggtggtttgttcatgattgggataaaagaactcctataaaaatcccgaccgatgagtgcactaatgaatttttactgagtggcctttccacaaaggacatgccagtgaccaaagccgatttaatagatgttctatgtgattacatcatgacaatccaagatgatacgacattagagatgacatgggtgcgaagtttcaacccttttaagatagaaatatctgtcaaagacctgcaaaacgtattaagggtaaatctagatatgactctaaaatgttttgacatggctgttcgattgttggccattaaagagtcacatatgtcgaaagatgaaatgataaaggataaaaaacattatatggacatgcgcttctggagaatggttggttttgctaaacttccaaagtaccatcaggatcctacagcagaagagttagctaaaacactcgactgttggccttcattgaactattatatcactagttgtaaatatgttcttatgccatggaaattcaacggatgctacgcacttttcataatcgatcatggtaaaaagcacgtaacttttatagactttacacccactcaagattggtgtaaacacatgccatacaagaggtttgcggaagcaattatcatggcctctaagaaatataagattgcctacaataagaaacattctggatgggcagatgatatttttaagtgggaacatacaattcggtctggtcttccaatggacttaaaaggggttaatacaagctacttcgttctacaagctatggtcatgtgggggagtggtagacgaatggaatttaatagggatgcaaagattcttcgaagaaactttgtaatttatctattaagttacgaggagaattcatgccgttatgctatccctccaaacatacaacaacgacttatcagtatcgctaaaaaagattag

SEQ ID NO: 22956 - DNA, 295 bp, Zea mays
  Peptide Sequence Number=SeqID_66331
atggcgcagcaaatgctgtcgctgcgggttcctatttatatgcccaagcgcattgcaacttggtgggccctacatgtcattgactttcgctattctagcgaagggaagactgttacaggaggcttcaactttgagataaaggcgctggcgtgtgggaccggaactccagctgcgctgcggtctgcactcctcaccgccatgtggtccccctcgacagtcagttcttcgagccctcggggcaccgccgcgaagccgcgtcacaccgtgggcaccccaaatcccaacacctccgacg

SEQ ID NO: 22957 - DNA, 264 bp, Zea mays
  Peptide Sequence Number=SeqID_66332
atggcgaactttttcagaggcttccgtctatctgtctttgcaggtctatgcttgccgaaggtgttcgaaactcaaaaagtggaagtgagttcaccggaggtgggcgccaatgttgagaacaagtccccaacactacctttggcacagataaggaacaatcaatacttacgagaatgccgaagctacaaagagatatttcttcaagaatgcagagctaaaaatcgcattaaaaatttcaccgaagctacaaaaagtcgttcttaa

SEQ ID NO: 22958 - DNA, 288 bp, Zea mays
  Peptide Sequence Number=SeqID_66333
atggccaaatgtgcaaatgtctgcaaatgcaaggatgacttctgccttcatacctctaaggatatgaagccgcatcgtacccctcctcgggcaacgtacgatgctaaaaatgtaccgggaataggatgcaaatcaaacggtagcatccaccactgtatttacttgccttcatcggaaatttggaatggtactaagggtgtgtttggtttgacttttggcttttggcttttgccccctaaaagccaaaagccaaccaaagtgctggatccaggaagcagctttttctaa

SEQ ID NO: 22959 - DNA, 297 bp, Zea mays
  Peptide Sequence Number=SeqID_66334
atggcgggcggcggtgctcgcttttcacggcgagctccggtgatctctggctcgggcgaggctcggggtgtggaagcgccaacggctaaggcctctggaggcatttataggcgagagaatggcacaggcgcgcagggcggggcgaccacacgcggggcgcgcgctaccgtggccagtccgcactcggccggttctttggaggacatggttgctggagtgacttggccgtccatcttgccaccgggttggaccgtcgagtgggaccctacctcggcagaggaggagcatgaggagtga

SEQ ID NO: 22960 - DNA, 147 bp, Zea mays
  Peptide Sequence Number=SeqID_66335
atggcgggcggccgtgctcgcttttcacggcgagctccggtgatctctggctcgggcgaggctcgagagaacgcgattgatctttggaaaggggctgaaattcagatttctgaatttctgaatttccccccaagtgcattagtttag

SEQ ID NO: 22961 - DNA, 1398 bp, Zea mays
  Peptide Sequence Number=SeqID_66336
atggggagcgccttcgttgctttcgtcttgctgtcgttggaggagcgcaacttcgcggaagttggtacctttcagccatcgctcggcttcaaggattttcatcaggcagcccgactgcatccccttgccgatggtcacccaagacggggcagagggcgagctgagccggagctctacctcccgtatgggtcggtgggccacctcctccttcatcatttaggggagagggcgctcgccggcttagcggaaggggcggacttcgacaacgcggtgccgatcggccgcaagcgtcgtcagctccagcatgcctggcggctgttgcgccgcgcgcaccgaggggaccgcccaagacgtcgcgcgctgctagggcggcgttcgtgttcttgggctgtcctgcccttgctccggtacgacgcttccgtgcggaggtcggtgctcgcctgtccgggaggacccgagtggggatctgccggtgggcagatggctgctgtcgtcggtgctgaggtggtggcggctgaagaagtcctcgtcgccgatgagatcgccgccaccatctgcgctccgggcctccggctctttggctttgatagtttgtcctcgcccctcgagtggggacgtgggcgagggccttatcgcagcagcatctgccctgaggtcatcgctgctgctgtttggccgcccggagcggagatcgttgtcgctgctgccggagtgggcggcggcgagccacctgggattttgtcgtcccgcaggccctccaacgtggggggttgttctttaagaaaccctcggccgctctgcgatgagccggagccggaggcagcggtgtcagcatggacagaggcggagttggctcgaaaagaagacttcgtcggcccaggagcaggtcctccgaccgtgtcaccgtccgaggccgggtcggattccgccgaaggtggagttgatgccgagggtgctgctgctccccctactgatgacttgttcgtcggtagcagaattgtttatccgagcgagagttacttattgcggaaggtgatgagtgagaaggtgatgagtgaggatcccactatcgaagtagtcgaaaagcacgaaagatgttctggcagaaagactttttccgaggaaaattttgacgcagagggggtcatggaattaccactagacgcgcagagcagcggaagacgtctcgatgtagacgaacgcgtcgagcagtgccgtgcagtcgccagcgtccttcacgtcctcgcacggtccgtccaagtgctccagatgcagcacctccgaggtatccacacgtacagggaggaagcgccgcgtaccgaactgctaggttcgcgacggcggcttggcgagggcgagaggtgggcggcggctgttagttcgctggtggcgaattag

SEQ ID NO: 22962 - DNA, 714 bp, Zea mays
  Peptide Sequence Number=SeqID_66337
atgcaggcggcatgcaaccgcaacaagggggtgcaccctttcgacttcgacgcgtccagcttggaggtccaggcccacacgtcatgggccgggaaaggggatactccgaaagggatccttctccgcgaaggaagcgggccccgagcccccctactgatcaggggttcgaaggctggcccctcggaagggttcaacagccgcctcagagcactcgggctccacgcccactactggctggcccccaaagggttcgacagccgcctcagagcacgcagagcgagggatgaccctgggtacgttcgatacataaccaaggctcgggctacgctcccgagaaaggcgacgcaggggcgtatgaaaaaagctgagtctgtccttgaccgtcctctcgctctatgcggaggctcgggggctgctctcgcaaacccggctccggccaaaccgttgacaactccactcaagggacacgatctcgcctcgcccgagcccagcctcgggcaaaggcagccgaacccgaaggattcacgtctcgcccgagggccccctcaagcaacggacacacctttggctcgcccgaggcccagtcttcgtagagaaggccgaagtgaccgcagttacttcgccgctccactgaccgacctgacaggaatacagcgccgcctgccctgctccgactgccgtgccactcgccaaagtgaggtcgacagcggctaa

SEQ ID NO: 22963 - DNA, 401 bp, Zea mays
  Peptide Sequence Number=SeqID_66338
tacccgcggcggaagaaagggcggaggggcttaccggcggcaagattgctccggcgggggagctcgtcggcgacgaggagtccggcctatccagggcaaaattgaccaatcaaacgggtcagagagcttcaccagggatcaaggaagtgaagttctgccgggtccgagggcttggaaagcttcacgggcctatggcggagctaaccaaagcgctcgcgcgacttgggggtgactggagtgggctagccacggtggccgaagctctggtggtaatggcgggcggaaaagagctcgccggagctaaggaggggtggctggccggtgatgagatatggagcccggaaatccggtctgtctcccagctcaaacccgaggcaaatccagagtttggtcgtgtctag

SEQ ID NO: 22964 - DNA, 555 bp, Zea mays
  Peptide Sequence Number=SeqID_66339
atgcacccactgggactcttccccgctgagaagagggatgaccccatgtggtgcaaccgagtgagacacgtgaaggacgtgtgggccatgcatcccgatcaagttgggaggatcactgttcagtgcatgagcgcactataccgccttcaggccctgcaaagcgacgccatggcacacctcactaaccttgctcagaccactaagctcaccctcgatagtcgagaggacttcgtggccttcaacgatctgtgccagtatgcggggtatcgtgcagattatgatgagaagaagagagaccgtttccatagaggtctcaacaccaagctgcgtgagcgcctcaacaatgttcgagctgacagcttcaatgaattggtcaacttggccatatcacaggaagattgtattgtagctcaccaggcagagaagaagcggaaggcaccaatgtcaggaccctcagctccaccccaaaggttctggattgtcaccaacagtcagagcagaggatttcagcagcaggcaggaagatgggttatcaggccacctcagcagccgtaa

SEQ ID NO: 22965 - DNA, 1314 bp, Zea mays
  Peptide Sequence Number=SeqID_66340
atgtcttcgcactccatgtatcgcgtccttccaccttccgagcccctggatggggagcgctcgcgtcgctttcgtcttgctgtcgttggaggaacgcaacttcgtggaagttggtacctttcagccatcgctcggcttcaaggattttcatcaggcatcccggctgcatcccctcgccggtggtcacccaagacagtgaccaccagttcgatggtggggagaagcgagccgggctgcggcctctgccccaccctcagcttcaaggatcttcatcatccttgctggggaggagggtgggctgagccggagctctacctcccgcacgggttcgtgggtcgccctcttcttcagcattcaggggagggggtgttcactggcctagcggaaggggcggactccgacaatgcggggctggtcgaccgcgagcgtcgtcagcttcagcgcgttgggctcgctggctcagctggctctggctcggctcctggtgccccctcccgccgtatgagcggtcgccgcgccacgcgcaccggagggccgcccaagacgtcgcgcgctgctagggcggcgttcgtgttcttgggctgtcctgcctttgctccagtacgacgcctcttgcgcagaggtcggtgctcgcctgtccgggaggatccgagtggggatctgccggttggcagatggctgccgtcgtcaacgttgaggtggtggcggctgaagaagtcctcgttgccgacgagatcgccgccaccatccgcgctccgggcccccggctctttggctttgatagcttgtcctcgcccctcgagtggggatgtgggcgaggagctcgtcgcagcagcgtctgccctgaggtcatcgctgctgttgtttggccactcggagcggaggtcgttgtcgctgctaccggagcgggcgtcggcgagccacctgggtcaaagaaaccctcggccgctctgcggtgagccggggctggaggcagcggtgtcagcatggacagaggcagaattggctcgaaaagaagacttcgtcggccggagcctggccgggccgtccactggcgggaccagcgccggagtcggagatccttcacccgtgttgccgtccgaggctcggtcggacttcgtcgaaggtggagttgacgccgagggtgctgctgctccccctccatcgacgtctgagcctgcaggatcggttcgcctgtacaggatcgctcatctgaacacgagttacttctcgcagaaggcgatgagtgagacttcatatgtaaacgaggtatatgaatggcttgaaaacatcttaagggtagaagtgacgtag

SEQ ID NO: 22966 - DNA, 942 bp, Zea mays
  Peptide Sequence Number=SeqID_66341
atgaagaagagaaaattaggtactgtagctgaagggttcggggtctccgaccattttgctgtggagttaatggggtcggatgcggggcagctggttgttgtcttgactccggtggcggccacttcaccaacggtggcggcgggggcaaagggtgcttcgcaggacccgtggtccaacttctgcgcgagcgacgagatttcgtcgaccgccgccgctaaagatgtggcgggctctgtgtcccagcagttgaagcatttggcagaggagaggagggacgtgaacaaggccattgctgaagcgcaggctgcacaagccgaggccaaacttgcgcgggcagaggccagtctcgcccgccaacgcgccgaggagctggaggcgacgctcaacagcctgcgcaaccacatggacaaaactgaggtctcgacgcgcgcggaggtcgagcggacgcatgcgcagttcctggacacataccaggagttgggtgcgtggatcgctaccttcgacgcgtccggccaagaggtgggcctccacttccttgagtggttacaggaggagctgggggtgctctcgacaatcatgacgggcctcatgtccttttcctccctcgtcacctgcgaggggggtcgtgaatgctttgtcccacgaggggtcgaggacccggttctgaagcggtcgacgggggcgctcttcgataggatgtggggccctcacggccgagagacggtccgggagaggtccgaccaggcaatggatcagatggcgcatgacaaagaggttgaggaccttagcaatctggacagcacactgctcgacatcacgctgcccgagacgtcggggggtggggctggcgccgccatccgatgcggacaagggcccctcggtgacccccgcgccaactggagctggcaaagaccccgcgccagcccctgcgctgatgggtga

SEQ ID NO: 22967 - DNA, 147 bp, Zea mays
  Peptide Sequence Number=SeqID_66342
atgaccaagatcggtttagcactggagccgattagcgcgggtagtctacaagacatggttgatggtgtgacttggccttccaccctgccaccgggttggacggtcgagtgggatgctgctccagcaggagaggagcaggaggagtag

SEQ ID NO: 22968 - DNA, 324 bp, Zea mays
  Peptide Sequence Number=SeqID_66343
atggcaattgctctattaatccagcctctcaagggcactgtacgggggtcatgtgaggacgtgggatggagagacttcgttgtaggccttcgtcttgcagtgaggaggacaaagggtgggccgcgccgtgaggaggacgaagggtgggccgcgccagttagcttgcctccattggggcagcgagttgatgaaggactggagcgaagggtagcgtcttcgccttcgccccagcagcagccaggtgtttttgtcttgaggaccttcggcagagaagaagaccccaacaattttgttggctcgctctaccaaaccattggattctag

SEQ ID NO: 22969 - DNA, 684 bp, Zea mays
  Peptide Sequence Number=SeqID_66344
atggcacccaagagagctagttcgaaggcagccccatccgtcgatgaagccgcgaaggcagcgctgctagctgagaaaaagggcaaggccctcgcagacaacacccccctagaagcttgcgaagacgaagctctcagcaagagacaacacaacgaacaacccactcccgagggcaccctacgcacctgcagctccgaaggacaaccacaagcactgcccccaggctttgctccactagagggtgaggacgcaacagaggacggcgaagtcatcggtgtctcagcagaagagcagctacagctacgggccctgcgcatcaagaaccacaacctccaaaagcagaaagaaatcctcgaggccaagcgccaacgtgtctccgtgcaagccaaggtgcgccagatgatacgagacgaggagcagagggcccgggaactcgagcaagagattgcgctcatgcagcacgaaggccagcacgatctgcagcatggcccgcccctccaacagcgcgcgccagccggagacctattcataccccagcgtggacccttcatcccgcacaccgcagcttcccaaggcatcaactacattgacgagcgaagccccctggccccgcagctccaagcatcaccatacccccgccaacttcagagcaggggaataccccaagtacaacggcagcactga

SEQ ID NO: 22970 - DNA, 198 bp, Zea mays
  Peptide Sequence Number=SeqID_66345
atggcccaagacacgacaagtcaggggatggggcgagctgcaggagcaagggagcggtctgcaggcacgatcgaagttgaaaccgagcagaggatgggcgagctcggaccttcctggtggccgtcactaacatctacaggagaagaacaggtggtcgaagaggagccgcctaactctgaggatttcgacttgatctag

SEQ ID NO: 22971 - DNA, 369 bp, Zea mays
  Peptide Sequence Number=SeqID_66346
atggctcctgttctacggcaaggcaaccacaacatgagctcctcaagtgaagagatccatggtagccgcaggggtgctggtaacgttgaggtcatctttcctgagtctcatgtggttggtggagcccctgcatcctctgttgctgacagcaccgagcctgtgtcgacatcgttggccgctgcagatttttcggcacttgctgaaaaggacattgcagcgctgtctcctgagcttcatgcacaagcaactgatccgaagagcaggcaaggtcacaggaccctggacggaagtttgggaggtgaccagacactgtcacactgcgaaggactttgttcagtgtattttctgtttgaagattcttccttctag

SEQ ID NO: 22972 - DNA, 636 bp, Zea mays
  Peptide Sequence Number=SeqID_66347
atggcggtggcaggcgggcggaagcagcagtcaaatcgtctgcaggctcacgtcccctcctgggacagcgagagagccctctcccacggcatgaagacgacgcgcccgtgttctgttcctcgaacggctcgcgcatgcacaacggctgccccgccaaccactcgtcccgtcgcattaactctgcggcagggcaggcgacacctttggcaggcgaagcgggcgacgcttcacctccgccatgatgaccacgtcaaaaaagggaccgggaaaggggatactctgaaagggatccttctccgcgaaggaagcgggccccgagccctcctactgatcagaggttcgaaggctggcccctcggaagggttcgacagccgcatcaaagcactcgggctccgcgcccactactggtcagaggttcgaaggctggcccctcggaagggttcgacaactgcctcaggccactcgggctccgtgcctactactgatcaggggttcgaaggctggccccccgaagggttcgacagccgcctcagagcacgcagagcgagggatgactctgggtacgtccgattcatggccgaggctcgggctacgcttccgaggtaccctagacatttccgagaccagcaggagtga

SEQ ID NO: 22973 - DNA, 411 bp, Zea mays
  Peptide Sequence Number=SeqID_66348
atgttcccaggacggacgctgccgccagaaggctctcgttcgcgtccccactcaagggacgagaaccagatattaaagccaaagagccggagctgccaccacctcagcaccgtcggcggcgtccacctgcccaccaacaccgcaccagtgggcgccggccgccccaaagcgcaccggcaggtcctcactcccgtccttgccacgaaaacgagaatgggaccgtcccagaacatgagtaccgccctcgtggcgtacgacgtgttgggagaccccccggcggtatgcaactgcaccaaggggatgcaccctttccacttcgacgcgtccagcatggggcccaggcccacacgtcatgtaaccgacgcgccggttactacgtgcgagaaactgcaccgccacttgcgccagtga

SEQ ID NO: 22974 - DNA, 870 bp, Zea mays
  Peptide Sequence Number=SeqID_66349
atggatgaaggaactcccctcggtggtctggagtctgaggacgacaccaagccgagccacgggcttcacgccgttctttctagtctatggggccaaggctatcttgcccacagacttagaatacgtccctgcgacgctaccacgcccgaggggttcggtcccaagacctccaggtgggcgacttggtgcttcggctacgacaagacgcccggaggccgccacaagctcacactccctgggaatggcccgttcatcatcgccaagattttgaagcccggaacatacaagctggccaacagtcaaggcgaggatcagacatcagtagggggagcagcagcaccatcggcgtcgactccaccttcggtggaatccgacccggtctcggacgacgacacggtcggaggatctccacctcgaaggaagatgtcggcaccacgcctgagccatcgccgccagggcctcctccaggaacccagcccaagcagatggccggaccggccgctccgtagcctcagccagctgtcccccgaggacatcagcccggctcatggcctcggcagcccgacttcggcgttggtcccgctagtggacgactcggccaggtttcagccgccgctactatacctcctcggcctgggaagtcacctgctcctgggccgacgaagtcttcttttcgagccaactccgcctctgtccatgctgacaccgctgcctccggctctggctcttcgcagagcggccgagggtttctttaactgggcaagagaagcctcgggcggcaaggccgaccgagccaagggactcctacgcctccgggatacggatacctcactcgtcaccttccgcatagggcaactcacacttggttaa

SEQ ID NO: 22975 - DNA, 657 bp, Zea mays
  Peptide Sequence Number=SeqID_66350
atgcaggtgttcctggtctgcctggtggcggggtgcagcatctgctggttcaacacggtgtgcttcgtcctctgcatccgcagcttctccacgagcaaccgctccctggccctctccctctcgataagcttcaacggtctcagcgccgccttctacgcgctcttcgcaaacgccatctcacccttcaccccaaccatctacctcctcctcaacgcggtcctccctctcgccgtctccgtcctcgcgctcccagcgatcctcctctgccacacaggcgacagcaacaaccacctccgcagcgcgcccaggccgcaggacaggcgcgtcttcctcggcctctacatcctcgcggtcatcaccggcgtgtatctcgtgatctttgggtctttcaccacgaccggccccgccgcgtgggtcatcctcacgggcgccatggtcctcctcgctctccctctcatcatccccgcctgctccagctgctcctatttcgatacacaacatggcacaggcaccactgaccctgcatcgcaactgaaccagcatgatgacccaaacaaaccactccttgtcagtgacagccatcagatcgagcctgatggcgtgacgcagaagaaccggagcaccagctgcagggcggttgttgtgaaaccttactga

SEQ ID NO: 22976 - DNA, 237 bp, Zea mays
  Peptide Sequence Number=SeqID_66351
atggccaatgacgataaagacgtcctcatagcatggcatgtggttggtggtcccaatatcaaggtaccagacactgtcatcgtggttcgtctcgccatcgagctacagccagagctcatgctttttgccttgcctaaggcctcacccacaaccaccgtggttcttgccactagcatcggtagagccactccatcacacctctccttggacttgtggagcttgagcctgatgagctag

SEQ ID NO: 22977 - DNA, 141 bp, Zea mays
  Peptide Sequence Number=SeqID_66352
atgggcaagaacaacaagcgcaagcgtgagccaactcttccatcggaggagtttggtgactcggagtactcagaggaggagttctcctctgagtctgaggggtctccggctcccatccccctgcaaatagctgccgagtaa

SEQ ID NO: 22978 - DNA, 432 bp, Zea mays
  Peptide Sequence Number=SeqID_66353
atgggcaagaacaacaagcgcaagcgtgagccgactcctccatcggaggagtttggtgactcggaatactcagaggaggagttctcctctgagtccgaggggtctccggctcccatccccctgcgtgagtcgtctgatgactcagacgactcccaggggcttgcggcggaggtctggacgtatatccgggccgtcgagcgctccgggctcgagggctcggatgagtctgagttctcctcggacgaggaggactcggacggcggcgaggacgaagatgacgacgacgacgacgacgacggtggcgacggcgacggtgatggcggcaacggcggcggaggcagcggcggcaagggcagcaccagaggcggcagcagcacgggcagcaccaagggcggcggcggcaagggcagcggcggcaaggccagtggctaa

SEQ ID NO: 22979 - DNA, 777 bp, Zea mays
  Peptide Sequence Number=SeqID_66354
atggatatgggtacgaggatatggatagttatagctttatgggacggacatggcccatttgtccatctatacctccgcacgataatgattgtcctcgcctcagtttccgccagctcgttcaccatcctgccttcttttctctctcccctatgtctccgcctccgcgccaccccattctcaacagagggcataggagcaggcgtctcctccccgtattcgtctgacaccaaccccgacaccgacccgtgcggctattgcacgtccatgaggacgtttcacagcatgcgcgcaccatcgttttcgccgtcgtcggacgtcccgttcgtcttcctgcccttcgccctgtcctttctccccaacctactgcccccgcccacggttgcagccgcgagccaaccgaggcttatcaacgcgggtatggggcgactcggtcttgctcctggcctttcttcgtgcgtgccgccgatgaggacacggtggcgcttgtcacgcttaggttatcttgtcgatgaggagtccagcggtatactacttatgccgcctccagatacccaggtcttcgtcgtgtccttctccgacaacgaacagcgcgggaaagtcgggtccctgttgcgattcattcgttcgacgttgtgggctcgtccgggggatatctatcccccacaagcccccgatctttgggttgatttagagaggtcggcattttggattgtaagattctggacttcattgggtgcaccggaggtgcacccaatgggtgtagccctcgacctttga

SEQ ID NO: 22980 - DNA, 195 bp, Zea mays
  Peptide Sequence Number=SeqID_66355
atggatgtcgatgatatttgtgacattgacaacaatgtgtcccatgaagatgaaatacatggtaccggggaggatgctaatggtaacaacagtgaacacatggtggaggaggaccatgttcctgcacctattggtagtgagggactatgcgattttggtgatttgtactacggactgtccgtggttttaccttga

SEQ ID NO: 22981 - DNA, 102 bp, Zea mays
  Peptide Sequence Number=SeqID_66356
atggcgcagctgaccatgaccgggcgcgcccacctggggaaaaatctcctctcctataacagtgcggttttgcaaaagaatccttatgatcttagagaataa

SEQ ID NO: 22982 - DNA, 330 bp, Zea mays
  Peptide Sequence Number=SeqID_66357
atgaagccgtggaaggagacttccaggagttccaagactacgacgagttctaggtgtgggttagcggcaacccccagtcggctgcctgtgaaggccgcggttatctacgtttcttttccgcacttatttattgttgtcagcattgcaaccactgctgaggagaagatgaagctgtggaaggagacttccaggagttccaagactacgacgagttctaggcgtgggttagcggcaacccccagccggctgcctgtgagggccgcgtttatctatgtttcgttttcgcactttgattattgtaaagactatgtggatgtctcagacatatga

SEQ ID NO: 22983 - DNA, 3063 bp, Zea mays
  Peptide Sequence Number=SeqID_66358
atgtccgtgtccgcctccacccgccccgtcgcggccgccctcggcgccgccgcgttcgaggaggcgctcacgctgcggtccccggtctacttctcccgcggcgccaaggccgtcgtcaagtacgagccccgcgcctttgctgtctccgtcgccgcctccactctcgacctcggtaagcacgacgtcgacctcacccgccttctcccgctctcgttcgacgatctcgaggacggcggcgactccggcttcgggaagtggagcaccagcttccggctgtccggccccgcccgcggcgcgcggcttaacgtaaccttctcttgctcgctcctcaaacacagcctgagtgcagtgcagtgcatattaccaaaggagtgggagggaatctactttggggggctggggagggcggtcatgtacttggacttggactgccgatttgatgtgctacggctggctcaaattctgaggaatcgtattgcagagggctgccgtttagcacaccttggaaatggagaccctgaaaatgatgtcactaaagatgagtttcagtgttctcttcaaaatacactgttttctgattgtatgcagcgcttcttgtatgctcgatgttgcaaaagtcctgaattcatagatgctttgaagtgggtcgtttctggatgttggagaaaattaatcactgcagtgccaaaagaaatgtgtaagggcctcagctccttgatgatcttggtggcgtgggaggtctggaaacaccgaaatgatagtgtgtttgagaatttgagtccaagtactcaggctgtgcttaggtcagtaagcatggagcagcacatgggcggggaagtggcggggctgcggcgcgggtcgatggcgcggccagtgtcagtgcaagcgccgacgcctttgcccgcgcggagcagggacgtgagggttctccacgaggtgctgcctagcttgaggtctgccaggccggtgccttcttctgttgctgacggggttcctgatgcgaggaaggaggagctggcagcaccggactgcacggaagaggggtctccggaggcaaagcactgcacatcggtagaggttaaaaagggggactcggtgcatccagatggcgattggggcacggtggagttcaatgttgtggagcatggagttgaggttgcttcagatgacccgcaaaggctcaaacatgtggaaaccagcaatgcggctggccaggaggaggattcagggttcaaaattgacgaagagggatcgttcaggcctttgcaagtaagtggtgatgtcgctgaagatcagactgttggagtgaaaactgaggtggccgtcagtgacgttgctgttcaaagggagaatatggaagacaaacaggatggaatagtcaaagctgcttcactgcctaccgctgctcttgaagcagagggtcagtttggagcagatgcggaactggaggacctggaaagtattttgaacgagctctcagttgctgagccagaggaatttgaatcaccagttgtagaagataagcattctcggcgattgagctgcacaggtgtgactgatagttacaagtctgccagtaggaagggcagatcacgcagcatggatgcttcaacagattctgttgctaatgagttcctggatatgcttggaatagagcatagcccagttgggcaaccctcagatagtgattccgagtcgccaagagaacggctttggaagcagtttgaaaaggaagccctagcatctggcaatgctattcttggcttggactttgacgatggaattgaaggacctatttgtgataatgttgtggaggattttgatctctctgcaatgatacatgaggctgagctcgagcttcagaatggaagccaacccattgataccaaatttcgagctaagtcgctggaagacgaagaaactgaggccttaatgcgtcaatttggtctaaacgagaagtccttccaatcttctccacctgaaagtagaagtggatttggtagccccattagcctcccacctgagcagtccctggagctaccgccattggctgaaggtttaggcccatttattcagaccaaagatggaggatttctgcgatcaatgaacccagccctgttcaaaaatgcaaagaacaaatgcagcttggttatgcaggcttcttctccgattgtactgccagcggagatgggatctgggattatggatatattgcatggtctggcatcaattggaattgagaagttatcaatgcaggcaaacaagcttatgcccttggaagatgttaatggtaaaatgatgcagcagattgcccgggaggctgctccagctctggagtctgctgaaagatatgatgcattggactatcatagcatcggtgctttggtagaagggtgtggaaatgctccctctggtaagaagacaggtaggtgtgctgatctttcatccttgggtggggagaatgcttcggaatatgtttcacttgaggaccttgcaccattagctatggaaaagattgaagccctgtccattgagggtttgaggatacaatctggcatgtcagaagaagatgcaccctccaatatcagtgcaaagcctattggggaattttcatctctgcaaggaaagtgtgcagagaatacttggtcccttggtttagagggaactgcaggtttgcagcttctggatgttaagcaaagcggagaagttgatggattaatgggcttgtccatcactctagatgaatggatgaggcttgattctgggaaagacttgtcatctctctggaacctcgatatgggtggtaaagtgactggagcagtccagttctgtggagtgagattagggcagttgaaaccttatgtagcggaccagaatgccaatgctaattcttatgcagcgtccctccatttatccagtttgcatgatcaatcagtccaaaagtcaggcggccttggacatgattacggaattagccgtgtcgatatagaaaaagctgctgctctgcactacaatggtgtgatgaaatcttggcttgacttggggaaacatgattataaataa

SEQ ID NO: 22984 - DNA, 1869 bp, Zea mays
  Peptide Sequence Number=SeqID_66359
atggacgcctgggaggccaccaaggcggtgttcgaccgggtgcgggcgctggacccggacaacgcgtccaagatcatgggcctgctgctcatccaggacaacagcgacaaggagctcatccgcctcgccttcggccccgaccacctcctccacgccttcgtctccgccgcgcgcgccgacctcgccgccaagcccgcgtccccgccgtcgcccgtgctgggcccgctccaccagacctggggagcgccgccgcacccgagccctaccgctggctccgaccaccaacaccaggcccccttcgccgccgacctcgcgctcggctacgacttcgacggcgccggcgccggcgctgacgcgttcttccccgacgactacgactgctggtcaccggccggcgccgcccaccgccgcagcttctcgctcagcgacgccgaggccaccgccgccgccgccggaggcgctgcgtggaggccatgcatgtacttcgcgcgcgggttctgcaagaacggctcctcctgccgcttcctccacggctttccggaggacgatgacgccgccgcggagcgcgagatggtcgtcatgcgcgccaaagcccttgccgccgccgccgcgcgcccccagcagcagcagcagctcatggcgtccgcgtttcccttctcgccgtcgccgcccaagggcgtcaacctcaacttcctgctccaccagcaccagcagcagaacgagccgcaaagggcggcggcggcggcggccatgctgctccagggcggcgacgacatgcacagcaggttcccggtgcggtcgccccggatggaccgcggcgagctcatgtccagccccgccgcgcggcagatctacctcaccttcccggccgactccaccttcagcgaggaggacgtctccaactacttcagcatgtacgggccggtgcaggacgtgcgcatcccgtaccagcagaagcgcatgttcggcttcgtcaccttcgtctacgccgagacggtgaagatcatcctcagcaagggcaacccgcacttcgtttgcgacgctcgcgtgctcgtcaagccctacaaggagaagggcaaggtccccgacaggttcaggaagctgcagcacccgcaccacggcgacttcgccggctgcacgtcgcccaccggactgctggattccagggaccccttcgacctgcagcaaccgcagattggacctaggatgatgtacgggaacgttgctggccacgaagcattcctgaggaggaaactggaagagcagcagcaggcggccgagctgcagcaggccatcgagctggaggggcgccgcttcatggggctgcacctcctcgacctcaagagcaggggccaccaccacctcggctcctcccccgcggccatggccaccaccactctggggcaaggcgacgacggctgcaaaggccgcagcgccaacgggaatgacaatgccgtcgccttccatttggaggatgccaacatccaagatactcctaccaagatgaacagtaacagccttgcaatgagtggtgggcctgcagccggtgcaggaggcgagcacgaggagcagcagcaggatggggacggggatggcagtcccaagcaggcagtcaaccctgggaaagaggagaagacggaatctggtcctgtcacagccacgcccattgttgcctgtggattccaagaaagtggcgtggtggagcacatcttgcctgacagcccctttgcgtcccccagcaaggcctccactcaaaatgggagcatcatcagcaatgcggcttcatccctcttccccccgcctgcatccaccatggagctgcccccgtacagctcttgcttcttccaggcgcccagggactatcggtga

SEQ ID NO: 22985 - DNA, 1921 bp, Zea mays
  Peptide Sequence Number=SeqID_66360
atggcgtcgcgcggccacctgctgctagcgctgctcgtcctggcgtcgtcgtcggcggcggcggcgagcggcgcgcgacaccaggcgcacgggaggcggggaaagccggcgcggccgcggccgcggccgcggctggagctcgttcccgccgcgccgggcgcgtccctgcccgaccgcgcgagggacgacgcgcgccgccacgcgtacatccggtcgcagctgctggcggcgtcccgcacccgcgggcgccgcgccgccgaggtgggcgcgtccgcgtccgcgtccgcgttcgccatgccgctctcgtcgggggcctacaccggcacgggccagtacttcgtgcggttccgcgtgggcacccccgcgcagccgttcgtgctggtggcggacaccggcagcgacctcacctgggtcaagtgcagcggcgccggcgacgggaccggcgatgcgccgcggcgggtgttccgcgccgccgcgtccaggtcgtgggcccccatcgcgtgctcctccgacacgtgcacctcctacgtgcccttctccctcgccaactgctcgtcgccggccagcccctgcgcctacgactaccgtacagcacagcgtgttgcggccgaatctttacttgcacgcgggtggcggatcctggcgctgacgtggtggcaatggcgcggcaggtacaacgacggctcggcggcgcgcggcgtggtgggcaccgactccgcgaccatcgcgctgtccgggagcgagagccgggacggcggcggcaggcgcgcgaagctgcagggcgtcgtgctgggctgcaccgcgtcgtacgacggccagagcttccagtcctcggacggcgtgctcagcctgggcaacagcaacatctccttcgcgtcccgcgccgccgcgcgcttcgggggccgcttctcctactgcctcgtcgaccacctggccccgcgcaacgccaccagctacctcaccttcggcccgccggggcccgagggcggcgccgcggcgtccagcagctcctcctccgccgcagcgcggacgccgctgctgctcgaccgccggatgagcccgttctacgccgtggcggtcgacgccgtgcacgtggccggggaggcgctcgacatccccgcggacgtgtgggacgtcgcccggggcggcggcgcgatcctcgactccgggaccagcctcaccgtcctcgccaccccggcgtacagggccgtggtcgccgccctcagcgagcgcctcgccggcctgcccagggtctccatggacccgttcgagtactgctacaactggaccgccgccgcgctggagatccccgggctggaggtgcgcttcgccgggtccgcgcgcctgcagccgccggccaagagctacgtcgtcgacgcggcgcccggggtgaagtgcatcggcgtgcaggagggcgcgtggcccggagtgtcggtcatcggcaacatcctgcagcaggaccacctctgggagttcgacctcagggaccggtggctccggggacctcgcgcagaactcctcagcctcgggaattttcagaagccagcgcgctataattcaccggactgtccggtgtacaccggacagtgtccggtgctccaagaagacgcggcttcggaacttggcagcctcgggaaatcacaacggctgctccgctataattcaccggacatgcctggtgtacaccggactgtccggtgcatctgcggggcaacggctacctcgcgccaacggacgcctgcaactgcaattaatgcgcgccagagcgcgcaggcgtcaggcatgcccatgctggcgcaccggacattctacagtacatgtccggtgcaccaccggacatccaggcgggcccagaagtcagaactccaacggtcgaatcacaacggctttggtgacgtggctggcgcaccggacatgtccg

SEQ ID NO: 22986 - DNA, 243 bp, Zea mays
  Peptide Sequence Number=SeqID_66361
atgcccctcataaaagattacaacaatgactcaaacacttgtggactaaaagacagtttcagtcgaagctatttcttcctgcaggaccttcggcgacgaagcatggtcccaacagttttaaaagacgggtataatgtaagcatcaaggtaagatatagaggcgacaagggtaaagatgatgatcgtgaaagcataaccaaggatgcagttaaggaaaaactctcaaagtggcgaagtggatga

SEQ ID NO: 22987 - DNA, 159 bp, Zea mays
  Peptide Sequence Number=SeqID_66362
atggggtctaggcacagtgcttgctctgccgaggctgagtgtcgaggttctttcgttttgcttttgttagtcaccctcctgcggggagaggttgcctttgggtgcaatctatgctcaagtaaagaagaaggcgtcgaggcggatctccaggagttctag

SEQ ID NO: 22988 - DNA, 222 bp, Zea mays
  Peptide Sequence Number=SeqID_66363
atgacgcttatggatgtgtacgccaagaccagccggctcgagctggtcctgcaggtgctcggcgaaatgcctagcaggaacgtggtctcgcggaccatgcttgccgcctcgctggtttgcgtgagcagtgatgcatattggatctatcctagatttctcaaaatacgagatttgactccgcccattttcaaccgtatcggtgaagatagggacaagagctga

SEQ ID NO: 22989 - DNA, 249 bp, Zea mays
  Peptide Sequence Number=SeqID_66364
atggcgaagccgaccgttgcagatgcgggagccgttggcgcaccggacatgtccggtgcacaccggacagtccggtgcacaccggacagtccggtgcccccttccgaccgttggcttggccacgtgtcccgcgcagatcgcgcggccgaccgttggccctgccgaccgttggctcaccggacagtccggtgcacaccggacagtccgaggataaattctcctgtgacaactgctacagattatgcctag

SEQ ID NO: 22990 - DNA, 2298 bp, Zea mays
  Peptide Sequence Number=SeqID_66365
atgaacaagacaccggcactcaaggtgccattacgaatggaactccggttccgtccccgcgggtatgaacaacctccacaccggggagcctgcggggcgacaagctccctgcgactcgccagcgacctctgcagcagcagctatggtcccaggacggacgcagccaccggaaggctctcgttcgcgtccccgctcaagggacgcgaaccagacattaaagccaaagagccggaggttggtccgttggcggcaccgacggcctcgacggtggggaagcttcttccagctgccaccacgtcaacaccgacggcggtgtccgcctctccaccaacgccgcaccgcaacagttcgccttccccggcatggctggaggacgcctcttccgcagagctggaggatggtttccaccaccagaagctggaagaggaggtggccagccgacccgcgtgggaggtagagccccggctcacctcgctctccgccccagcaaggatgatgaggatccttgaagctgagggtgggaccaagatcgcagcccgacttgcttctccccacccaagagctggtggtcaccgtcttgggggctcggaaggtggaaagacgcgatgcataagggagcgcgaagacatgatcgcctttcaagggggtcgccctccttttaaaagcgactctccccacttgcgtcctcagccatcgcgggctgagtcgtctccaacacgctccaaggtcctccccctacgacacgggggctgggtcccacgcgtcatgcaagctggcccagggcagaagaagccaaaccgccgcgcacggtaccagcgggtgaaagggcggacagccacgcagtcggcatgcaaccgcgccaagtgggcgcaccccttcgactccaacgcgcccagcatggaggcccaggcccacacgtcatgcaaccggcgcgccggttgctacgtgcgagcaactgcaccgcccctcgcaccactaccgcgcctcctcgactatggaaccagtaccgcgactcgaggcaaccctgcgtatgacccaacagtgtcagctaggcgcatcagtcacaggccagcgggcggaagcagcggtcacgtcgtcagccaagctcgcgtcccctcatgggagagcgagagaaccctctcccacggcgtgaagacggcgcgcccgtgttccgttcctcgaacggctcgcgcacgcgcaacggctgccccgcgaaccactcgccctgtcgcattaactccgcggcgggacaggcggcacctttggcaggagaagcgggcgacgcttcgccttcgccataacgatcgcatcaaaaaagggaccgggaaaggggataccccgaaagggatccttctccgcgaaggaaacgggccccgagcccccatactgatcagaggttcgaaggctggcccctcggaggggttcaacagccgcctcagagcgctcgggctccgcgcccactactgggcagaggttcgagggccggcccctcggaagggttcaatggccacctcaggccactcgggctccacgcccactactgatcagagcgggaacgatcttgtaacggaatcccatcagagggaggcatcgagccctcagaccccgtcaaaaggggaccgggtccggcagatcacccgcagctcactggagacaccatgttcggcgccctccaagggcaacatggcgcttccccccccccctcctccttgcggaaaggcgacgcaggggcccgaccccggaggatttacgtctcgcccgaggaccccctccagcaacggacacgccttcggctcgcccgaggcccagtcttcaccaagaagcaaccttggccaagtcgccacgccgaccgaccgtatcgcaggagcatttaatgcaaagggcttggactcgggctcagccccggaagacgacgaactccgcttcgcccgaccccagggctcggactcagccctggcctcagccgacggtctccacctcgcccgacccaggggctcggacttgacctcggccttggaagacagactcgacctcgacctcagaggagcctccacctcgcccaacccagggctcggaccgaccacgtcacaggaggcgccatcattaccctaccccaagctaactcaggctacggggaacaagactggcgtcccatctggctcgccccggctccagcgctcctccgacggccacgacaccacacgaaccgggtgccaaaacctctccggctgccacgatggcatggccctcttacagagggttggccgcgcgtggaaggacgggacggcgctcgcgtaa

SEQ ID NO: 22991 - DNA, 402 bp, Zea mays
  Peptide Sequence Number=SeqID_66366
atggcaagtgggtccaggctccgtcatttgcccatatgtctctctatgttcattggccactcttgttcagatgcatattcagagcttcatgcacccggtggtgcttttggcggaaataggggggtgaggcctgtacctcctgaaaaaggtgtgttcccattggatcacttacatgagtgcgacttggagaagaaagattatcttggctgcctgaaatctacaggattccagtctgaaaaatgtcggcagttctcaaagaagtatttggagtgtcggatggagagaaacttgatggccaagcaagacatgtcagagcttgggttcagaattgtggatgaagcgggtacatctcctgacaagaacagcaaaccggagagccctcctaatcagccaaaggattaa

SEQ ID NO: 22992 - DNA, 1359 bp, Zea mays
  Peptide Sequence Number=SeqID_66367
atggaggactacttttcacgcttcctaaaccttggttggcagctaagacaatacttgacagaattaatagaaaatttggttcggaccattaatcggattcctcaacgtcttggagtccaattctctgctagccatggaggatcattgactggcaccacagtatactttcatgaaagggcatctacgttatctgttaatactattaccactacagaaaaacagactgcaaatggaacatctgaaggcgcaattttcagaaaaggactttccagtatttacgaaaggtcttcctatcttttacatggcttcatgctggtacgaagattggcattcagtgtgcgagatctgtggaatctattttcaagtgaagtacacgccaaactaaccaggatcttacatcgtttctggacaacactacagggatcttgtgaagacataggatggttgcaaagaactcgggcatcacttcgttcagttgatgggacaggcctttttagcaaccacagtccactttacttcaccaatacgaaacgattcttttcaaaaatgggattggcttgccatattgcgaaaattcatagcgaggcgtcagtggagaagaacgcgtgggaactgaaacagtacattgaggagctctactgggggtctggtaagcaggttctgctccttggtcatagcaaaggtggagttgatgcagctgcagctctttccttgtactggtctgagctcaagggtaaggttgctggcctggcgttggttcagagcccatatggtggcaccccggtcgcctccgatatccttcgagaaggccagatcgctgataaggagacaaggaggatcatggagctcatcggcgacatcagggccttggaggacctcacgtatgccaagagaaaggacttcatctcccagcacaaactccccatcgatgagctgccgatcatctccttccacaccgaagccagcaccgcgcccacagcgctcgcgtcgctgacccgtgtcgcccaagccgagctcctcccatggctacccctgccacggttcttcctgtctgcatccgagtttgtcgagtcaatgctcgcctctctgaaggtccccgtggttgcgcctgtgtctgcagccatggcggtgacagccctccacctgcggctgcgctatggggagaggagcgacgggctggtgacacggcgcgacgccgaggtgcctgggtcagtggtagttagacccgagaggaggctggaccacgcgtggatggtgtactccacgctgaagatgggcagcgctgaggccgatgcgagcgagatgtgcgaggctctgctggccatgctcgttgagattggcaggaagaaattttgctga

SEQ ID NO: 22993 - DNA, 1101 bp, Zea mays
  Peptide Sequence Number=SeqID_66368
atggcaactgccgcgggtggagccaccgccggctcgcgccgtcgggcgctgctcctgatcgcgaactacgccgcgctgctggtggggtccgtctcgtcgagcctgctgtccaggttctacttcgcgcgaggcgggcggaaccggtgggtggtgacgctggtgcagtcggcgggcttcccactgctggtcgtcgccgtcctcgtcgccggccgccccgccgcggcgccgcgccccttcacgtggttctcgaggcggttcctcacggtgtgcctcgtcatcggcgcgctcatgggcgccaacaacctgctcttctcgtacagcacgtcgttcctgcccgtgtccacgtcgtcgctgctgctgtcgacgcagttggcgttcacgctcgtgctggccgccgtcatcgtccgccacccgctcaccttcgtcaacctcaatgccgtcgtgctcctgaccgtcagctccgtgctcctggcgctccgctcgggggactccggcgagaacccggacgggggcggcgcggccgcggcgcactatttcgccgggtacgtggtcacgctgggcgcggcggggctgttcgccgcgtacctgcccgtcatggagctcctgtaccgccaggccgtgtccggcgggttcgtcctggccgtggaggtgcaggcggtgatgcaggccatggcctcgctggtggcggcgatcgggctggcggccaagggaggcctgggcggcgacgtggcgcgctggaagggctcggcggcgctctactgggtcgtggtgtccaccctggtccttacttggcaggcgtgcttcatgggcacggcgggggtgatctacctcacgtcgtcgctacacagcggcgtgtgcatgaccgccgtgctgacggcgaacgtgctgggcggcgtggtggtgttcggcgacccattcggcgccgagaagggcatcgccaccgcgctctgcgcatggggcctcgcctcctacctctacggcgagtacaccaagaaaaagaaagaagaggaggatgaggccgtcgccgtcgccgacacgtccgctgacagcgtccggaagagcctcacaggcggcgccggagacgagctagaagccgtctga

SEQ ID NO: 22994 - DNA, 822 bp, Zea mays
  Peptide Sequence Number=SeqID_66369
atgcccgccccgcacatccccgtgatgcccatggacgagaggagggagatggattcggtgacggacgcccaccgcgtcgcgtggctccagcacggcctcctcgtgctccgccaactccaccccatccgcccaagcatctgcctccacctccacggggacgctaccgtccgtcatcctatcatgggtggcgcgcgtggccacgggggacagctactactacccgaggcggcctccgcacgcaggttctttgcgggcgccagggaccggaggctcttcttctatgaccacgccatgggggaggggaggggtccgacgctaccgagcgccgcagcctggccgttctcaggaggagggccaccagcggcttcccgcgagcccccgcgggtgcatcgccatctcaccccccaccccaccgctccctcaacccgcatcccgctggtttgctcgatctccgcccagatctgcaatccatggagtggtcctcgccccagcctctccaaccgcgttctccatggattctgcttcctcggcaaagatcgacgcaatccatggagtctccccacctgcgcccgaccccttcatgaccacatcatcgcggagaggaagcggcgacagaagatcaaccagcgcttcatcgagctctccaccgtcatccccggcctcaagaagcgtagtgcccggcgacgacgctggctccccatcgtgggattcgtcgggggcgtcgcctgcgacgaatcagttgccggagatagaagcccggttcttgaacaagaacgtgatggtgagaatccattgcgaggatggcaagggcttgcactttga

SEQ ID NO: 22995 - DNA, 75 bp, Zea mays
  Peptide Sequence Number=SeqID_66370
atggagcaatcaggacttgggtacctccacaagtcgagtaattggtatctaaagttgtttaatgctttcggttga

SEQ ID NO: 22996 - DNA, 2373 bp, Zea mays
  Peptide Sequence Number=SeqID_66371
atgacgctgctgcttggcccgccgtcgtccgggaagaccacgctgctgctggccctcgcgggcaagctggacccggcgctggtcgtcgccggcggcggcgaggtctcctacaacgggttccgcctcggcgagttcgtgccgcagaagacggcggcgtacatcagccagacggacgtgcacgtcggcgagatgacggtcaaggagacgctcgacttctccgcccggtgccagggcgtcggcaccaaatacgatcttatgacggagctggccaggagggagaagggggccggcatccggccggagcctgaagtcgacctcttcatgaaggcgacttcaatggaaggagtggagaacagcctccagacggattacactctcaggatactggggctggacatctgcgccgacaccatcgtcggcgaccagatgcagcgggggatctctggcggccagaagaagcgcgtcaccacaggggagatgatcgttggcccgaccaaggtgctgttcatggacgagatatcaactgggctggacagctccacgacgttccagatcgtcaaatgtctccagcagattgtgcacctgggcgaggccaccatcctcatgtccctcctccagccagcccccgagaccttcgacctgttcgatgacatcatcctgctgtcggaaggccagatcgtttaccagggacctcgtgaatacgtcctcgagttcttcgactcctgcgggttctgctgccccgagcgcaagggcactgcggacttccttcaggaggtaacatcaaggaaggaccaggagcagtactgggcggacaagcagatgccttacagatacgtttcggtgccagaatttgcgcagcggtttaaacggttccatgtcgggctccagcttgagaaccacctctcgctgccgtttgacaagagcaggtgccatcaggctgccctcgtattctcgaagcactcggtgtcgacaaccgaactcctcaaggcatcctttgacaaggagtggctcctcatcaagcgcaattcatttgtgtacatcttcaagaccatacagcttatcattgtagccctcatcgcgtcaacggtgtttctgagaactcacatgcatacgacgaatctagatgatggctttgtttacattggagcactgctctttactctgattgtgaatatgttcaatggttttgctgagctttccttgaccataacaaggttgccggttttctacaagcaccgggacctgctcttctatcctgcttgggtcttcacagtaccgaacgtcattctcagaatcccattctccattattgaatctatagtatgggttcttgtgacatattacaccatagggtttgctccagatgctgacaggtttttcaagcacttgctgctcgtgttcttgatccagcaaatggcaggtgggcttttcagagcaacagctggactttgcaggtccatgatcattgctcaaactggtggagcactatttcttcttatcttctttgttcttggaggctttgtcctgcctaaagttttcattcctaactggtggatctggggctactggatctcacccttgatgtatggatacaatgctctagctgttaatgaattctatgcccctcggtggatgaataagtttgtcctggaccaaaatggtgttcccaaaagactggggatagctatgcttgaaggtgccaacatctttgttgacaaaaactggtactggattggagcagcagggctcttgggtttcaccatcttcttcaatgtccttttcacactgtcgcttatgtacctgaaccctctcggcaagccacaagctgttatatcagaagaaactgcaaaggaagcggaaggcaacgggcattcaaaaggggcaataagaaatggaagcacaaaaccaaaggacggtagtcataacaaggaaatgaaggagatgaggttgagtgcacgtttgagcaactgttcatcaaatggggtttcacgactcatgtccattggcagcaatgaagctgctccaacaagaggaatggttcttccattcaaccctcttgctatgtcttttgataatgtgaactactatgttgacatgcctgcggaaatgaaacatcaaggagtgcaggatgacagactccaattgttgcgtgaggttacaggatcattcaggcctggagtgctgacagcacttatgggtgtcagtggagctggaaagactacttctttatggatgttttggctggaagaaagactggggggtatattgaaggagacatcagaattgcaggctatcccaagaaccaagcaacattcgcaaggatttctggatactgcgagcaaaatgatatacattctcctcaggtcacagtaa

SEQ ID NO: 22997 - DNA, 381 bp, Zea mays
  Peptide Sequence Number=SeqID_66372
atggcggattcgaaggccgctgcggcggtgacgctccgcacacgcaagttcatgaccaaccgtcttctctcccgcaagcagttcgtgctcgaggcggagctcaaggagaggctggcgaagatctacgaggtgaaggacccaaactgcatcttcgtgttcaagttccgaaccaacttcggaggcggcaagtccaccggcttcggtctcatctacgacaaccttgaggccgccaagaagttcgagcccaagtaccgcctcatcaggaacggccttgctaccaaggtagagaagtcacgaaagcagatgaaggaacgtaagaacagggcgaagaaaatccgtggtgtgaagaagacaaaggctggagatgccaagaagaagtaa

SEQ ID NO: 22998 - DNA, 1440 bp, Zea mays
  Peptide Sequence Number=SeqID_66373
atggacgtcgacatgcaagcccgcggtggcggtgctagccatggcggcgaacttgacgacgacggcaaggagaagaggacagggacggtgtggacggcgtcggcgcacatcatcacggcggtgatcgggtccggcgtgctgtcgctggcgtgggcgatggcccagctgggctgggtggccgggcctgtgatcctgctgctcttcgcggccatcacctactacacctcctgcctcctcaccgactgctaccgcttcggcgaccctgtcaccgggaagcgcaactacacctacactgaggccgtcgagtcctacctaggcggcaggtatgtctggttctgcggcttctgccagtacgccaacatgttcggcaccggcatcggctacaccatcacggcttctgccagcgctgcgtacgtaggcgtctccctagctcctcaactaatgactcgtgctctgtgcagggctatcctcaagtccaactgcttccactggcacgggcacgacgccgactgcacccagaacacgggctcctacatcgtcggcttcggcgtggtgcaggtcatcttcagccagctctcaaacttccacgagctctggtggctctccgtgctcgcggccgccatgtccttctgctactccaccatcgccgtcgggctcgccctcggccagaccatctcaggtcccacgggcaagacgacgctctacggcacgcaggtcggggtggacgttggtagcgcggaggagaagatatggctgacgttccaggctctcggcaacatcgcgtttgcctactcctacaccattgttctcattgaaatccaggacacgctgcgatctccgccggccgagaacaagacgatgcggcaggcgtcggtcctgggcgtggcgacgaccacggcgttctacatgctgtgcggctgcctgggctactcggcgttcggcaacgcggcgccgggtgacatcctgtcgggcttctacgagccctactggctggtggacttcgccaacgtctgcatcgtgatccacctcgtgggcggcttccaggtgttcctgcagccgctgttcgccgcggtcgaggccgacgtggcggcgcgctggccggcctgctccgcgcgggagcgccgcggcggcgtcgacgtgttccgcctgctgtggcgcaccgcgttcgtcgcgctcatcaccctgtgcgccgtcctgctgcccttcttcaacagcatcctgggaatcctcggcagcatcggcttctggccgctcaccgtcttcttccccgtcgagatgtacatccgccagcagcagatcccgcggttcagcgccacgtggctggcgctgcaggccctcagcatcttctgcttcgtcatcaccgtcgcggccggggctgcctcggtacagggcgtgcgcgactcgctcaaaacctacgtgcccttccagaccaggtcgtga

SEQ ID NO: 22999 - DNA, 945 bp, Zea mays
  Peptide Sequence Number=SeqID_66374
atcaacccagatgtctcatcttattcggagactttaagtactttgaagtttgctgaaagggtttctggagtggagctaggtgcctcaaaggcgaataaagaaggcaaagatattagagaatttatggaacagctctcactgctcaaacataaaatggcaaagaaagatgacgaaattaacagattacaacaactcaagacgcaaactccaagggtcaggactgcaaaacgtgcagattccccattgaaacattcgtcgtcgtccccaggcatatctaatttaggaagcaaaatccaacatagaaggacagtatcaagtggaaaggcaatgagcattgccagtagagctgggtctgataccttctctgacaccagtgacaggcactctgaatctggttctatgcagtctgttgatgatatcctaccacgtagggggattatgggtcttccgaagctctctattggtgaaatgggtcagaattctgctgaccctgagcttgtttgctttgactatgctgattcagaagagagattaagtgatatatcagatagtggtctttccatgggtacagagacggatgtttcagtaagcagtatagttgagttgacacgttttcaggagcaggaaaacatacctagcactctgaaagaacaagagagtgcacgaaaaattccaaatgatcagttgtccaaggtggccacccgagttcagaagacaacagtacccaaactagctcaaacttccttgtggcctaaactaagagatcctccagcccttagatccccaggcccttgcctgcttgacaggtgggcgtcagactccgtccatagtgagattttctctatggccttcgctgcctacatggagagggagaatcacaacacaaacaatatctgtaccaaggacgtccatgacttcgaagagatggacataagtcaagtttga

SEQ ID NO: 23000 - DNA, 663 bp, Zea mays
  Peptide Sequence Number=SeqID_66375
atggagcacgcagccacaaggatcgggtcgggcgatgtggctaggagcagaggccgacagcgcccggcggctagggaagagggggtcgcggtgggggagccctcgcgtcagggagaagggcggctgggggaccagcggccgacggggaacgagggggaggaggccgggggagatggtggtgtccgcgcctgcctgtcgcggatgcaggggtggctgctagcgcaaccagcaagccccaacgacgtgcgcgtctgcagtgggacggcggcagcagcgccacccgcgcctgcacacgagcggcggtggaagaagcagaggggcaggggcagcggccggggcaaggggaagggccggcggcggctggagggaggagagggctgggctggcggcgccggagaggtggcactgcaggctgctgcacggcggcgggtcctgcgcgcctgggacggcaggggcacgaggaaggaggccggcgcgcaggagcgcggcccaggcagccgacggtggggtggccggcagcgcgaggaagaaaggagggggtcacgggaggggtcggcggccgacggctggggggttggggaagccgacggctgtgggtgggagaagagagatgaaagtggctctggtaccaagttggagaatgaaaacgttaaccctaattag

SEQ ID NO: 23001 - DNA, 1359 bp, Zea mays
  Peptide Sequence Number=SeqID_66376
atgcaggcggcatgcaaccgcaccaagggggcgcaccctttcgacttcgacgcatccagcatggaggcccaggcccacacgtcatgtaaccggcgcgttggttactacgtgcgagaaactgcaccaccacttgcgccagtaccgcgccttctcgactgcggaaccgatgccgcgactcgaggcaaccctgcgcatggcccaacagtgccaaccgagcacatcggtcacgggacaggcgacacctttggcaggcaaagcgggcgacgcttcacctccgccataatgaccgcgtcaaaaaagggaccgggaaagggggatactccgaaagggatccttcttcgcgaaggaagtgggccccgagccctcctactgatcagaggttcgaaggctggcccctcggaagggttcgacagccgcctcagagcactcgggctccgcgcccactactggctggcccccgaagggttcgacagccgcctcagagcacgcagagcgagggatgactctgggtacgtccgatacatggccgaggctcgggctatgctcccgagaaaggcgacgcaggggcgtatgaaaaaagtcgagtcagtccttgaccgtcctctcgctctgtgcggaggctcgggggctgctctcgcaaactcggctccggccaaaccgttgacagcgtcaacataccagcccaagaactcggaacctggctatgcacctgggctacgaccagttcgcatgagggaacaaccagactggccgaggcatcgcgaaaggcatcaagacctcgaaggagtcaaaccactcctccgaggcctcgggggctacacccggtggctggtaacccccatcagcacaaagctgcaaaggcctgatgggcgcgactccgggctcggactccacctcgacctcggaagacggactccgcctcgcctgacccctgagctcggactcatcctcgactctggaaggcggtctccgcctcgcccgacccctgagctcggactcatcctcgactccggaaggcggtctccgcctcgcccgaccccagggctcagactccacctcgacctcggaagacggactccacctcgcccgacccctgagctcggactcatcctcgactctaaaaggcggtctccgcctcactcgaccccagggctcagactcaacctcgaccttgggcgacggtctccgcctcacccgacccccggggctcggactcaacctcgaccccggatgacagtctccgcctcgcccgacccccgggcccggactcagcttcgacctcggagcagcctccgcctcgcccgacctcgggctcggaccgaccacgtcacaggggggccatcattaccctacccctag

SEQ ID NO: 23002 - DNA, 819 bp, Zea mays
  Peptide Sequence Number=SeqID_66377
atggctgaaaggtaccaactcccacagagttgggttcctccaacgataaggcggaaggattgcgggtgtcccccatccgggggctcggaaggtggaaagatacgatgcataagggagcgcgaagacatggtcgcctttcaagggggtcaccctccttttaaaggcaactctccctacatgcgtccccagccgtcgtgggctgagtcttctccaacacgctccaaggtcctccccctacggcgcgggggctgggtcccacgcgtcatgcaagctgacccagagcgggaggagccaaaccgccgcgcgcggtgcatgcaaccgcccagcggttacgagcattcctccaccttcgcccagaccagcgggcgaaagggcgggcagccatgcaggcggcatgcaatcgcgccaagtgggagcagcggtcacgtcgtcagccaagctcacgtcctgtccaggggcagcgagagaaccctctctcacggcgtgaagaaggcgcgcctgtgttccgttcctcgaacggctcgcgcacgcgcaacggccgccccgcgaaccactcgccccgtcgcattaactccgcggcgggacaggcggcgcctctggcaggggaagcgagcggcgcttcgccttcgccataatgaccgcgtcaaaaaagccgcctcagagcgcgtgggctccacacccactactggtcagaggttcgaaggccggcccctcggaagggttcaacggccgcctcaggccacttggggctccgcgcccactactgatcaggggttcgaaggctggccctcgaagggttcacagcagcctcagacatag

SEQ ID NO: 23003 - DNA, 507 bp, Zea mays
  Peptide Sequence Number=SeqID_66378
atggtggtgaagatccatgacaagacgacgcaatccgtctggacccaaacagggcgattgggatgtgtcgcgtcctcgaggacgtgcggggtaagggcgtacttgccgagcacggtgaggaacatgccacacgcatttggtgtaggtgttggtagccttgttgaggatgatggggatcagcgccttgacgttgacgacagtggtggcctatgcctagatagcctcatgggcggcttcaaaattggtgagggctgcagcgtggaggcgtgccgcttcggtacggagctcggcctcggcgcgggcttcggtttcctgagccgtcgcggcggcggcagtcgcgtcggcgtcatccaccatgggagtggtcgtgtgctggtgcacacgcggctgctcccctctgagtctctgacgcagcctgagcatggtgacgcaggcaggaatgggtcccgactcccgacggatcagggaaatccccggcgagcagaacaggcagagtttaaacgctaa

SEQ ID NO: 23004 - DNA, 1029 bp, Zea mays
  Peptide Sequence Number=SeqID_66379
atgtatcaaaggatggctagtgtcagacgacgggtcctacggaacacgctggtatccaacctcgtcacatcaagcctgcatccgaggcgggggggcaggtaccagggggatacacaacaggaacaggcggaatggactatgctgcaccagcaggagtcgcgctggaagctggctccggacagcccccaccaacagtggcgaccacctctgcatcgacggatcaccagcgacagtgaccgcctatgcaccagcagcgacaacgacctccgctccgagcggctcgcgagcagcagcgatcacctcagggtgagcgctactgcgaataggtcctcacccccgtcttcctatgggggcgacaacgaggccattaaagccaaagagccagaggtccggcggcgggtggcactgacggtctcgccagcggaggcaaccacatctgcagtggggagcctcaccagcggcggcgaccacctcagcaccgacgacagcggccacctgcgcaccagtgccgtaccggcgaacggtggccgccccagcgcgcgcaaagaggtcctcgctcccgtcctcgctgcgggagtgaggacaagaccatccaagaacgccgccgccgcccccacggcgtacgacatcttgtacaacctcccggggcgggcgtcgacgcgggagaagccgtgggtgtggccgacctgcgcacggcacgaccgtcgcccgtgcggtggacggacagccacgccccatccaaacgataggaggcagcgccgcgcatggcccaacaaacctcagagtaagggtcgaacctcagcaaggtcccagaatgaggaggaccctggcgtgagtaggggtccggtgctgacacgcggcgtcaaggtcatccagcaggcggcacgcctgctgggtctgctggcgaatagtgcgcccgtgccaagcggcgcactatgttatctcttctacaagaagcttcccctgcacgctgaagatacacagatctcagacgacaggacacaaggggattgccccggcagcaaataa

SEQ ID NO: 23005 - DNA, 420 bp, Zea mays
  Peptide Sequence Number=SeqID_66380
atggcagcgacttgggcgagatccaaactagagcagcagcacaccgacaagcagggacgactggcaaactccggtttaggtgaatggaacgcgacacagggagctggctccacggcgaaccgagaaaccggctacgcgcaggggcagaggaccgcgcatgcaaggcgagcagcaaggcgacggcgcgcaggaacgggaagcctcgacagggcgctgtacggaggagttcggctgggactcggcagggaggagacctcggctgggggcttggcgcgcggcgaagcagacagcagagggagctcgcggccatggaggaataggggggattctgccgggctgggcgacagcgcagtggagcagagagtgcgcgcaggcaaccagaagccgggcgagtgggagggagaagaccccggacgctga

SEQ ID NO: 23006 - DNA, 186 bp, Zea mays
  Peptide Sequence Number=SeqID_66381
atggtgggatcttactgcaaagctccctgtgatgctcttttcatccttgggaacagaaacaatcctaaggatggaagttttaactttgtgctgttgttgatggtgttaagtgccggtgggctcggccttcttataagtctaagtaacccttctatacttcttattaaggatggtcacttgagctag

SEQ ID NO: 23007 - DNA, 945 bp, Zea mays
  Peptide Sequence Number=SeqID_66382
atggctgagaagctgatcacaagaaagctcattggtgaacatgtggttattctactccatatcattattacaacatctgccattgtctatccagttgttgtgactcttaagtgtgactcagcagtactatctggatttgtgctaatgtttcttgcgagcatcatgtggatgaagcttgtctcttatgcacatacaaattatgatataagggtattgtccaaaagtactgagaagggtgctgcatatggaaattatgtcgatcctgagaatatgaaagatccaacctttaaaagtctagtgtacttcatgttggccccaacactttgttaccagccaacttatcctcaaactacatgtattagaaagggttgggtgacccagcaactcataaagtgcgtggtttttacaggcttgatgggcttcataattgagcaatatataaacccaattgtgaagaattccaaacatccactgaaagggaattttttgaatgctatagaaagagtcttaaaactctcagtgccaacattatatgtatggctttgcatgttctattgcttttttcatttatggctgaacattgtagctgaactcctctgtttcggtgaccgtgaattctataaggactggtggaatgccaaaactgttgaagagggtgtagctattctaatctcgtttctggtttcagctgtattccatgagatatgtattgcggtgccgtgccacattttcaaattctgggcattttctgggatcatgtttcagataccgttggtattcttgacaagatatctccatgctacgttcaagcatgtaatgctagcagctggtcagcctgaaaatgcttctattccaggcggccgtgctgggatgcagcgtgtacattaccagcgatgcaacgtcaacggttaccaagcgcggataagcagtgctcgtggcatgtga

SEQ ID NO: 23008 - DNA, 552 bp, Zea mays
  Peptide Sequence Number=SeqID_66383
atggagggcaatgaacagggctgtggagggctgccgcaaaggcctcccgtgctcggtgcgtccatgcaaccgccgattaagaagctggtaaggcagctcgacttcaactcggcggcattggcgggaaaccccgcgatggcggtggccgccgccgccgtatctagggttctgcagccgaaggcgtcgtccgtggggttccagcatccgcagcacgtgggggctgccatgccgatgggagtaccgcagcagctgcaccagcgtgtgctgccggtgatgcgcctgcatcaggtggtggggcatgtgccgctggcggtctctgtaccgcagcttcgtccggtgccgccgcagccagtccagcgccccccggtcgccgttcccttgcgctcggagaatacttggcgccttgcccgcctaggcgctaaggtggtgatcccatttgcttgctcgccttaccgccgtaagaacactggtagatacatacatgtacatcgtgtcatagttcttaaggcggtaaggcgagacaaggcgatgggccaccgcctggacgcctag

SEQ ID NO: 23009 - DNA, 1922 bp, Zea mays
  Peptide Sequence Number=SeqID_66384
atgccgcgcacgaagaatgcgtcggcgtcagggggtggcgatgacgaggaccctcgtcgccccttcaggcaggtgaaggggaagactgtctttttggagcagcaggaaggccgcaagaagcggtgttcggacagagaggctcgtgcagcagcagcagctgcagcagccgctgcacaggcagcacttggagatcagtcggatgttccatcagatcagattgctttccgtgctcgtcgtctcgcctcccggtctcgctcctccactcacacctccgcttccactccgccacccactctgcctgctccagtcactcctattgctccatccacctccaccgccatacccactaccagcactacgccagcttccactgctacccctgcccccgcttccgcttcagctcctcctgtccctccacctcgcttccgggaacgtgatgagactgaggtccgtcctctggtttcggatcctcgtctgtttgatcttcagcgtgctactgcagcccgggtacgtcgattccggtacgtacccgtggagtcttggctgccagctcagagagacccagcagcaggagttcttttcagcacacggattcaggagtcattcttcagggctcagatgtctgctcagattgcgctacgagtgcaccgcctattggatcttccagccttcttgctagcagtcggtgctgagtctgaggcgcatctcacctatttgccaggccttctgtcctttctgactatcagcggcagatatgttgaggagtgggtccgcgtcttctatgcctctatttggattgactcggatcatcattggatgaggttccgctttgagcgcgaggatgtcacgatcactgctagtcagatccgacagctttttggattccctgagtcgacgactcgccttcacagtctctgctacggcacttcagatcctccatgtcgccctcacggcggtgtggctccagggacagctcacgtcgcggctctgttccgcccgcctttcacagatgggtcgcgacgttctccagcagacttcactactgcagcgaagtacttatatgagctcgtcagacggacactcctgcctaggatgggatacagggaggctaccactcatattcagctttggctccttggtgccctggtatcccactctgagtttgatgttgtggactttctgatctgtgagattgaggacaccgttctagatgggattcgtgctcgtcggccgaggatgcagcacttcgacagtttgacaccccagggtacagcagctgatgatgatgatgattttgggattcctcctccgcctccgcctcctatgcctccacgctcacatgatcatgaggctgggagctctagtgctgcccctgctactcctcaggctatggaccctgcccttgcttcgattctccagactctctctcagcagcaggctcacctggcagccgagcaggcccgtttatccgataggatgctctcgatgtttcagaacatgcaggacaggcaggatgcacttcagcagcagcttcttcaggatagggcagagaatagggcattcatggccctcatgcttcagcattctggtatctcagcacctccggttcagtctgctccgccttcttcgcttcacgctccagtggtgccttcgatcttgtctgcaccccctgctggtacctctccgctccggccggtcaccttggcgttcacttctccggttctcagctctatctgcccgcagccgccagtgccaccagcatctgctgttaccactaccgctgtggcagtatctgtgaccgcttctgttccgatcctggatccgagactgactctgaccctccgtcggcattcgctctgctacctcgacctcgaccggatgcgcccccgccgcctcctcctgcttcagatgtttaggttcag

SEQ ID NO: 23010 - DNA, 651 bp, Zea mays
  Peptide Sequence Number=SeqID_66385
atggcctcgttcctagtttgcttcttgtgtcgaagccatgcccttggcctagatacgaaggggttcctccctcatacggaggtcgggatgccgacctacctcaaggtccccctctcgtcttctctttgtggctacgagggcgattggttttacgtcaagaaccttgggggcatcgcgctgccgtttaatggcttggttccggtgtccagtgccgagtggcattatggtgcagaggccaagtggaaatcgaaggtggggtatatgctaaatgtgatcatcacgttgaaggaacgagcactcaccagtgtgcgactggtccgcacatttatgcaacgttcagttcaaccgttcatggcccgctataacccaatgtgggcgtacaacggcctaaaggaccccggtcgctgctcccccgagccccttttcgagacaaaggttaaggctcgcgtcacagatgttaccacgttggcctcggtgaatttcatggatgaggatttgcccttccctcttagcaaggggatcttgagtgatctggtagttgcaagtcttagtgaaaagagtaggattagcttcccgaccttgaaagcattagaaataagaaaatatccaaggcattcatactatgctcttggggcttgcttaagtccatag

SEQ ID NO: 23011 - DNA, 246 bp, Zea mays
  Peptide Sequence Number=SeqID_66386
atgaccgtatgggagctcatcattgctataatcacactaggtgaagagcagaatgcgccatacaacagtctaccaaaagcggccgactgtatatacacaggaggttcgacgaatctggtgcctccacgggatactcgccaccatgagacttcccagtatcaagctccagttgcatcatcaatcaaacgttctgataaatatcatggcagacttggaatcggccgtctagattgcgaaggtcactaa

SEQ ID NO: 23012 - DNA, 354 bp, Zea mays
  Peptide Sequence Number=SeqID_66387
atgacccgggtggccgcgctcgagaatgtcacctccgtcttcgattcctggcggccgcacgtcgaggcgacagtggatggcgtgaaggactccgtcgaggccgtccgcgcggagctgtccaaggtgtcccgattcctcgaacgaggggccatccacgactcggcggatccgcgcggcatcctcgggcctcatcagtcggcggcggagcgcgtacctgctgccgcgtggagcgccgacggcccaatcgggcaccgcctcgacactcaaccacgggagacgggttttgggggtttttactcccatcaccccctcccggcaatgggaggaggtgcgcgagggtaccagacatcgtga

SEQ ID NO: 23013 - DNA, 216 bp, Zea mays
  Peptide Sequence Number=SeqID_66388
atggggtccaggcacagtgcttgctctgccgaggctgagtgccgaggttcttttgttttgcttttgttagtcaccctcctgcggggagagagatacttgatcagagatggttggttcacaggtggtgacaaggatgatggtttgactatggtaatggttgcctttggtgcaatctatgctcaggagttccaggacttcgacgagttcgaggattag

SEQ ID NO: 23014 - DNA, 1131 bp, Zea mays
  Peptide Sequence Number=SeqID_66389
atgacctgcctcgtctccctcgggggaggaagatggcgcacaccatctcctgccccagagttcagaccagagtttgttctcacaccacatgcaaagatcgcccacgccatcttcccaatggagctccagttccatccccagcagcaccacagctaccaacaacaacaacaaccaccaccgccagccacgaaggaacccaaacccaagccaagaacgagaaccaagtgcggcggcggcggcggcggcagcagcaagttcgtgggcgtccggcagaggccgtcggggaggtgggtggcggagatcaaggacacgacgcagaaggtccgggtgtggctgggcacgttcgagaccgccgaggccgccgcgcgcgcctacgacgagggccgcctgcctcctccgcggcgccaacacgcgcaccaacttcgccgccgcgccgccgcccgactcgccgctggccgcccggatccgcggcttctcgaccacaacaacaacaacgggccggacgccgccgaagaagaccttaccgcaccgccccaccgccgcccgcttctttccccgcagccgcggccagcaccgctagcacctgcagcagcacggccagcccgaccagcagcagtcctagctccagcatcagcttcgccaccagcacccacgcccgcgctccccattcccacccctcccggatcctcggagtcagagcgcgaccgaggaagctttattacgcgccgtactcggccaccggcggcggcgaagagttcccagctagccgcgaccacgcaccagtacgaacaacagtcatgggcgctcaacgccgccagcagccccctaacaccaccaccacctccggacgcacgcgacgtgggtagcgtgaacgctcgccgcttggcggtcgcggcggagacaggcagagacaggatgatcaagctggagaagaagagcagctctgcgtcgctgtcgctgtcgccccacggcgtcatcgacaggggtccggacaaggatctagcgtttgacgtggggaatgatgcgtctgactccctctgggatctgccgccgatctgcccactttcttcttgcaggagccaattccgtacagaagagtgtatgaggaatgatggccagcaagcagagtaa

SEQ ID NO: 23015 - DNA, 96 bp, Zea mays
  Peptide Sequence Number=SeqID_66390
atggcgtgggcgatctttgcatgtggtgtgagaacaaactctggtctgaactctggggcaggagatgatcttcctagtgcgataaacgatggctga

SEQ ID NO: 23016 - DNA, 474 bp, Zea mays
  Peptide Sequence Number=SeqID_66391
atgtacaactcctttctacataggataggaagtgagggtcttctttgtcatgcgtcaagtaatactctggatgggttgaatggttttgatggtacagatacacattactttcacagtggtccacgtggccatcactggatgtgggattctcgcctatttaactatgggaactgggaagttttaagatttcttctctccaatgctagatggtggctcgaggaatataagtttgatggtttccgttttgatggtgtgacctccatgatgtacactcatcacggattacaagtaacatttacggggaacttcaatgagtattttggctttgccaccgatgtagatgcagtggtttacttgatgctggtaaatgatctaattcatggactttatcctgaggctgtaaccattggtgaagataacactagaactttcgggtttatactgagcctggactataaagaagatttctcttga

SEQ ID NO: 23017 - DNA, 405 bp, Zea mays
  Peptide Sequence Number=SeqID_66392
atgacgatcactcccctccctgagacagacaacatcatcgacgacaggaggacacgtgtggagtatcggcgcttactccgcgcctcagggccattcaatggccccctaacttcaagaaggcgccgactaccttcgagcaactgttccgggaagccgacctctacatcaccgccgatgagcgagctcaggacctcatcggaggagcaaagctggcaccagcagcaccgcgacgcgacacgaatcagcagcccgataagcgttgggagaagagacctcgcgaagaagtccacgccgccggaccacctgcctctcgcgcccgaggaggacctcgtggaggcgaacgcacgctggacgacatcctcgacgcccagtgtgtgggggatagatgtcccccgggtccactaa

SEQ ID NO: 23018 - DNA, 384 bp, Zea mays
  Peptide Sequence Number=SeqID_66393
atgacgcggatctcgcacccacgtgcgccgcagcccttcgcctgcgccggattttggcaccgaaatgcccgcgcacaagcgtaccgctcgggaaaccccatgaacgccgcatctcgcacccacgacgccaggcatgacgcggaacgcccacctccctacgccagcggaacaaccgcggagaaactctcgcgcgccgcgaaacgccagccgcgatacgcccgcgcgaaccccaccccagccgcaaacgccataaacacccgcacgcacgcgcgtgattcaccccaatctcaatacccgcgcgtggccccgcccgttcattgcccagccagtgtgccgctggagaggaaggacgcaggagaagtagcttgccccgccgatggataa

SEQ ID NO: 23019 - DNA, 378 bp, Zea mays
  Peptide Sequence Number=SeqID_66394
atggccgtgaatggaaaaggtacagatcaagacaaggcccacctgtccaatgtctataccgatgtgatgcacagcatatcaaagaaagaaggaattccaagagcctccagtttatccagtattgattatattatgactccaagacggatgtcgcttggggatgttgatacatcaagtagtacagtggcaagcacagaaccatcaaactataacctgaagaagtgctacaccctcaagcacatcatggatcattctgaccaagaaccaggtccaaagcaagggctgatagaaattcagttggagcatgattcactgacttgtgaaccattacctttatgggaaaagaaaaactccataagcagccctctggccgtctga

SEQ ID NO: 23020 - DNA, 1299 bp, Zea mays
  Peptide Sequence Number=SeqID_66395
atgacctcctcctccagctctccctgctaccgcgtgacgaaaccgcccatacaacaaccgtgctgccgctacaacctcactctgcatagcgcgaactatgactccatcaagccgaccatggacgaggaggaagagcgcgagatcgggcctgggcagcacggacatcacgtgttccaagtgcgcgacggcgagggacctgctctgctccaaccgggtcatcgcgtcgtcctagacatgtccctcaggccgcgaatgcttgctagggtagcagaggcgcggttgggtttgctaatcgctattctgatgctgattccaggactgccaaagatggacagagcgcaaaatttgtccaggatcgatgaggcaaaggggatcattgataagatgaaggttaagttcccagataaaattgagggatggaaggaggtgaaggaagtgggcgagctaaggggcgcgcgagaggacgtcagggccttttgctttactattctcctctttatgatccagcatcagccactattttattggaactttctgcagacttcaaaacaaggaggcttccccaatattcagtctacgcaacatgttcccagtacaagcatttcatcgggtcttcctctcccacaacaattgcctgtatactctcagccaactctgccccttgggccttttaccagcctggttggctatccatatttgcctcagaactattacttaccttcatcgccattccagcaagcgtactcaagtaatgggcctttccatcaatctgctgctcctgccatgcctggagctggtatgaagtatccgatgccacaatacaagagcagccctcctgcttcgaccctaccacaaccatcatcactctctggttacggagggttcggaagtgcaaataatatccctagaaatttcagccaaaatcagggtgctgccgctgcacccacaactttgggattcgatgaagctttaggcacacaattcaaacaccccaatcattatgcagcactacagcagagtgataattcagcaatgtggcttcatggaggcgctggttcaagaacaatttctgcagttccgcctggtaacttctatggtttccagggccaaagtaagcatggtggcttccgccaggcacatcatccatctcagtacggtggtcttgggtacccaagcttctaccagtcgcagaccagtctgccacaggagcacccccagagccccactgagggaagcttgaacaatccctacggggtaccatcccagccttcacaccagctctggcagcacatatactaa

SEQ ID NO: 23021 - DNA, 906 bp, Zea mays
  Peptide Sequence Number=SeqID_66396
atggaagagggaggcgacccgcagcttccgagcatctccgcacgcaccacgtccgaaggcgcggggggcgtcgacttggatctccttgagcagctactgtctgacgacaacggctggctcgaggtggtctcacgctcgcccaactcggtagcgtttcctccactctcagccttcttctcggctgacgtgacagccaccacagtgacgacgacggcgacggcagcgccggccgcgaacgccagctgcgagcaaccgttcacgctcgaccaccgctccgacagcctcctccggttcagggaggtgtccaccaagtaccagttctcggccaatgttaagtcgggggattcgccggggctgtcagggagggtctttatcggcaggctccccgagtggtcgccggacatcaggtacttcaccagctacgagtatcccagggtaagggatgcacaatacctcgatgtccatggcaccatgggtctgccagtgttcgagaagggaagctacaactgcctgggcgtcatcgagctgatcatgataaggcagaagataaacttcacctctgagctcaacaccatttgcagtgctctccagttcagcactgcttcctacaaagatgctttaccagagatactggaggtcctgagagcagcctgcttgacccacaagctgccattagctcagacatgggtcacatgtgctcaacaagggaaacgaggcaaccgacattccgacgagaactaccggtactgcatctccaccattgatgaagcatgctttgtgaatgaagccgagatgcggggcttccatgagacctgctccgagcaccaccttctgcgtggggagggggttgcaaggaaggcctttacaacaaaccagccatgcttcttgccggacattggatcctga

SEQ ID NO: 23022 - DNA, 342 bp, Zea mays
  Peptide Sequence Number=SeqID_66397
atgggaatccttgggagatttttgtgctgggcatgcgtgccttcggattgtagggtgtgggtggaaaagaagctttctaaggacaacgtgaaagatttatcagctgatctacaaaaagtcatagatgactacatgaaaaagatcgaatccatccagaagcagaaggaacaaaactcagctgaggctcaaagcgaggactcgatccaacccaagcgaggcctgcaagagcggttgtcttggcgttgctttctttcacaatgcatgggtctctgcctgcttggaaattggaatcggtcaacatgcatgagtacattgcttgcttgtaatctacgagaggcgtag

SEQ ID NO: 23023 - DNA, 744 bp, Zea mays
  Peptide Sequence Number=SeqID_66398
atggcgttcgcggtttctggggcggtgctcggtggggccgtaagggctccccgactcaccggcggcggggagggtagtctagtcttccggcacaccggcctcttcttaactcgtaatgatcctgcaactcctcctccctctctgatcaagtgtgggcctgattcggggggtgctcgagttggatgttcggggacgcacggggccatgcgcgcggcggccgcggccaggaaggcggtcatggttcctgagggcgagaatgatggcctcgcatcaagggctgactcggctcaattccagtcggatgaactggaggtaccagacatttctgaagagacaacgtgcggtgctggtgtggctgatgctcaagccttgaacagagttcgagtggtccccccaccaagcgatggacaaaaaatattccagattgaccccatgttgcaaggctataagtaccatcttgagtatcggtgcgtttggttggggagccactgggatggagcggctccattccagtttctaaaaattgagccatttcattctgtgtttgacaagcagaacggaaccacttcattttttgtttggttgaagagtagaatagagcggagccgctccatttattgtttggttggagagccatatgactgttgcgtggaggagagggatgagagcgcttgcgtccgcgagagcgctcgcatcggatcgttttggtggagcgagagcatcccaaatatttgctatttatag

SEQ ID NO: 23024 - DNA, 936 bp, Zea mays
  Peptide Sequence Number=SeqID_66399
atgggcaccgaacatggtgtctccggtgagctgcaagcggggcccacgcgatctgaggcgactgttgaacccctcggagggccagccttcgaacctctgatcagtaggggggctcggagcccggttccttcacagggaaggatccttttcgggggcagccgttgcgcgtgcgcgagccgttcgagggacggatcacgggcgccctgtcttcacaccgtgagagggggttctcttgctgcccccagacgggacgtgagtctggccgacgaccatctggcgcgccggttgcgtgacgcgtgggcctgggcctccatgctggcgtgttgggagtcggtgaagcgcgtccacctggcgcgattgcatgccacctgcatggctgcccgccccttccgcccgttggtctgggcaaaagtggggggtcacttcccggctgcacccctccaccggcggtcacccaagatggtgacctccagcttgatggtgggggaaagcgagccgggctgcggcctctccccctccctcatcctcaaggattttcatcaccaaggctggggaggggactgcagcgtgcccggctttcggacgcgagtggcttcggagccgctcgcggcgccggcgtctgccgcggcagctggaagaggttcttccgccggcgtgatagccaaggctggccacggaccgacctccaactctacggccttctgcccgtccttgcctcacaagttttggcatgggcgggggcctcctggcagcagcatccgccctgaggtcagtgctgccgctgttcggccccccagagcagaagtcgtcgtcgtcgccgctgctggagcaggctcctctagcttagttaaagagaccccttggccgctcttcgatgagccgaggccaggggtagcgatatcagcacgaacagaggcggagttggctcgaaaatga

SEQ ID NO: 23025 - DNA, 174 bp, Zea mays
  Peptide Sequence Number=SeqID_66400
atgtcgtcgttgtctcagtggggatcccgagtctcacttcgaggtagccatgggagaacactgaagctagccgcccgatcctcgccattcaccccagatccaaagtttggaattataactaactcgggcctaaacatgagcgtccactcgagacctaatgttgagagcacctag

SEQ ID NO: 23026 - DNA, 369 bp, Zea mays
  Peptide Sequence Number=SeqID_66401
atgaaggaggcttggaagccttctcccgtagttatgagaagtttggatttaatcgcagcattggtgggtgacttcaacaactgggatccaaatgcagatcgtatgagcaaaaatgagtttggtgtttgggaaatttttctgcctaacaatgcagatggtacatcacctattcctcatggatctcgtgtaaaggtgagaatggatactccatcagggataaaggattcaattccagcctggatcaagtactcagtgcaggccccaggagaaataccatatgatgggatttattatgatcctcctgaagaggtcttcctttcccatattctgtacttacaaattttaaatatacctttgttcctactttag

SEQ ID NO: 23027 - DNA, 315 bp, Zea mays
  Peptide Sequence Number=SeqID_66402
atgaggcaagcgaacccacaaaccctccaaagttcaagtttgcaagccaaacctcaaggaagctggaagcagcgaagcggtaccaggaagcggagaatggttcgtggtctctattttaacactcacaagagaattaagaatgaggattttgaagtgttagcaaagtcacatcaactgcaagcaaacagctggtgggggaagctagatatcaggggaggagagaaaaacattgctaaagcacaaagaaaaactgaggcaagggatttcaaagcaaatgaaggttctgaatatctgcaaagatctagcacctgctga

SEQ ID NO: 23028 - DNA, 546 bp, Zea mays
  Peptide Sequence Number=SeqID_66403
atgcctgctgatcttgagttgtcacctactgacaagcatatctttattgaggagataatgtcaaatttactgtattattatggcatgggtaatgtcgtgaaggatattttgttgcaacgctactttggaaagtttctaaatcaacggcagtgcattaatgtgtggcgatttatccaaactatcaatgagagaaaagacttgacagagaacctgaagcagctacagtgcaggacacttatttttgttggtgagaattcccagttccatgctgaagctgtgcacatgactgcaaagcttgataggcgatatagcgctcttgtggaggtacaagcttgtggctcggttgtgacagaggagcaaccacacgcaatgctgataccaatggagtactttctcatgggatatggactgtacaggccaagccagataaactgtagccctcgtagccctctgaatccgttttgtatatcaccagagctcctctctcctgagagcatgggggttaagctaaagccaatcaagacacgagccaaccttaaagcatag

SEQ ID NO: 23029 - DNA, 216 bp, Zea mays
  Peptide Sequence Number=SeqID_66404
atggacttcggcctcgcttccgctgtcaccacgctctggacctgcaccgatgtcacgcacctcgcgcacgtgctcctgcagttccgcctcgcctggtgcggcaagctaatccgttatacccgcgccgtcgccacacactacgtctgctccgtcaagggcctctgctttgacctcttcatcattagaggtggaaacagagctttcaatgcatgctag

SEQ ID NO: 23030 - DNA, 453 bp, Zea mays
  Peptide Sequence Number=SeqID_66405
atggaaggcagcctcggatccctgtcatcgcgtgtccgtgctgccacagatttgtgccgaggatcgcgccgccatcaatcacggaaggtggccgacgatctctgccctagcctcctccccatgtcgtcgatgaaacttcgcctcgcccgaccccagggctcgaactcggcctcggccccggaagacgacgaactccgcctcgcccgaccccagggctcggactcggcctcggccccggaagacgacgaactccgcctcgcccgaccccagggctcggacttggcctcagccccggaagacgacgaactccgcctcgcccgacccaagggctcggactcgacctcgacctcggaagacagactcgacctcgacctcggaggagcctccgcctcgccctacccagggctcggactgaccacatcacaggaggggccatcattaccctacccctag

SEQ ID NO: 23031 - DNA, 138 bp, Zea mays
  Peptide Sequence Number=SeqID_66406
atggaggcaaactcagacagctcacctcaaggccaaaccctctctctctctcgcaacgctgcaattctaaaaactttggtggcgcgggacaaccgtcagtttgctgttacatttcttgaagaacaaaggcgtagatag

SEQ ID NO: 23032 - DNA, 513 bp, Zea mays
  Peptide Sequence Number=SeqID_66407
atggccctcttagagagggttggccgcgcagggacgaggacgagacaggcgctcgctcggagccgctcgcttccctctcccgcgtggacgcttgtaaccccctactgcaagcgcacccgacctgggcgcgggacgaacacgaaggccgcgggattcccacctctctcacgccggtctccggccgcctcgctctccccccttcgcgctcgccctcgcgctcgacccatctgggctggggcacgcggcgacactcactcgtcggcccagggaccccccggtctcgaaacgccgacaacggggtactacctcgctgatgagcccggggtgcacttcgtttggcagcccaaccaagagtcatcggtactcgtcatgtcgcgtgcgttcgacgactactatatcgaggattgtggcgtcatcttggcgccggaggtgacacagaggaggatcgacaacagtgaccagttcgtcatcctcgccaccgtcagggtagcttttgtgccggcctgcctttaa

SEQ ID NO: 23033 - DNA, 1563 bp, Zea mays
  Peptide Sequence Number=SeqID_66408
atgtcatggtcggggccagaactggcggagtggtcgcgtgacggccaggaagcggagcaggagcccgagtcggtgcctcgtcgcaagtcatggtcggcgccagaactggcgcagtggtcgcgtgccggcaaggaaaaggagcaggaggagcccgagtcgtcggagcctcagcgcaagtgggtggccctcgtctccgttgccgtcgtcctccccggcaacgaggacgagcgggcccatgagatcatccccggcaccgacatgctgatgctcgacatcaacgacccgccgctgccctcctacctggtgcttcacccccgcgtcgcccccaatcccaggcgcaccaacgagccactgtccgcctacatcctcgccgccgaccgctccggctacatcctcctccaggtcgtcgaaggaaaccgcccggacttcttcctctgcaacacccacactcgtaccgtcaccattctccccccggtgtcctcctatacgcgggccagccacggcgtcgacatcctccccgaactcagcatgggtctaatagccgacccgcagcgcagcggccagttcgtggtcgcccagctccaccccaccatctcctaccacgagcccaacaagctcctctacttctccaccgccaaaggccggtggttcgtcaggaacctcactcgggcgcggcaacaggtcctcatgcgcaaccccaactccgagatcggagtggtcgcccacgacggacgcctctggtggttcgccccctcctatggagtgttctgctgcgaccccttcacgcccgtcctcgagtgccctgagctgcgcttcatcccgctcccggccaactccgagatgttcggccacgtcgccttcgaccccgtcgtcaggcccctcgtcataaagcgccgctgcgtgaggcccagcgagggcaagctgcgcttcgtcgcgatccgcggcctctcctacaaagtgcccgtcgacgagtctaaccccaccgtatggatgtggacgctcgatgacccggaaggcccgaacccctggacattcgagtacgaggtggccttcgcggaaatctgggaggacgagacctacgccgccgccggcctgcagccgggcaaggtgcccgacgtcgccctcgtcgaccccaacgaccactacgtcgtctacttcttccagggctcgaagctcttcggcttggacctgcgcgagaagaaggtcgtcgcctgcgaggaatgcctgatagaccgcgatcgactcgagtaccaatcctcccgccccatcgtcgacgcctgggagctgtcgccaccgccacccattctttcgggcgatgacgactcttcgacagacgataaagatcggtcgagacaggcttacgccgagaaaaagaagcgccaggtggcggagtccgttgactcttggctaaaccaggcccggttggagtggacgagggacgcggacgtggacgcgtcgaactggaggacatggaagatggcgcctccacaatctgatgaagaggacactggtggccaagctgatgatgagccggagatacagttacccccttcttctccctag

SEQ ID NO: 23034 - DNA, 1167 bp, Zea mays
  Peptide Sequence Number=SeqID_66409
atgacggttaacaaagcacagggtccgactattcccaatgttggtgtatacttgcctgagccagtgttctctcatggccaactatatgttgccctatctagagcgacaacacgatcgaacataaagattcttgtcatcccagccgtcgatgggaggaaaaagtcgaggaagggtgtaaagaaaaaccccaccgtagattgtgggacatataccaagaacatcgtctacaaggagggtgatcttaccatcattgattttattaaggaaattccttgtgaaccaagggtagaagtcgtgcttattgatgacgcctttgtagaaaggaagtggatggagtgtttatttcagccgaacgcgtatttaggtgatgaggtgtttattccgataaacatccgagagacgcactggtatcttgccatgatccatgcaagaaatatggagatacaagtgctcgattcacttggtacttcacaagaccgcaaagacctcactgactctctcttatgtggcctctttcttttgaactatatcgaatactggatagaggatgaactgtctgacagttttacccaggaaaaaatggctgctatattactatcttcagacttgaataagagaagggggtgtctgttatacaaatatgaaaaagaagttgactttggaagcccatcagatgttgagatattagaaaacccaatagattctaagaagaggaaactactccacgtgcttgatgatagcgaagtagtgtatgaagatgaggaaggccctattactcaagtagacttgcaaaggtggtttgttgatgattgggataaaagagctcctgtaaaagtctctaccgatgggtgcaccaatgactttttaatggttggtctttccacaaaggacatgtcagtgaccaaagccgattcaatagatgttttatgtgattatatcatggcaatagaagacgatacaacattagaatatgttcttatgccatggaaattcaacggatgtcacgcccttttcgtaatagattatgttaaaaagcatgcgatttttatcgactttacaccgactcaagattggtgtaaacacatgccatacaagaggttcgcggaagtgattatcatggcctcaaagaaatataagattgcttacagcaagaaacgttctggatga

SEQ ID NO: 23035 - DNA, 1227 bp, Zea mays
  Peptide Sequence Number=SeqID_66410
atggctctagtgcggaagtttggtaaaccagacatatttcttaccatgacatgtaaccctaactgggatgagataaggagggagcttctccctgggcagacaccgcaagatcgtctagatcttgtagtgcgtgtctttcatgcgaagctacaagagttaaagcataggctgactaaacatgatattcttggtaaggtccgagcctacgtctatgtcgtggagtttcagaagcggggtttgccgcatgcccattttatactcataatgcagaggaagtacaagctcacatgtcctgagcagtacgaccttttgatctcagccaagatcccaagcaacaagtaccctggactacgaaagatggttatcaagcatatgatgcatggcccatgtgggtcgctaaaccctaactacccatgcactaagggtcgtaaatcgtgcaagaatcattaccctcggcctttcagtgacacaaccttgcaagggaaggattcgtaccctatttacagacatcgtgacgatgaccgtaaaggaaaggcatgtgggagcatcaaggctgttaaatacctgttcaagtacatatacaaaggccatgatcgtgcgtctgttgttatgagagatgcgagcaaggcagatgatgatgttgatgagatcaagcagtatagagatgcaaggtgggtgactcctccagaagccttgtggaggatatacagctttgagcttagtcagatatctccacctgtgatgcagctgcaactccatcttccaaacatgcacatggtggcgtttcatgagcggcaaatggtcgagcgagtcgtcaactatccaggtgttgataggtcgatgctcacaacatattttgaggtgaataggctacatgaggaggctcgtggcatcctatatcgtgacttccctgagtggtacacttggcagagtggtaagggcaaatcaatgggaaaggacataaggacattccctctacctcctatcatcgacgcgtatgacgatgctattagtacttctagggaggtttacgaggaggaaagtatccaaccgatagcgggagatgtggctcttaaagactctcttaatgaggaacagagggccgcctatgataagattatgtctgccattaacaccgatcagggcggattgttctttgtggatggacctgctggcaccgggaagacttatctatacagagtgctgctcgcgatgctacataactag

SEQ ID NO: 23036 - DNA, 630 bp, Zea mays
  Peptide Sequence Number=SeqID_66411
atggacagcgcggtgcagctgctctggaccgcgtccaagcggcggcttcacgagagcttgtcggtgatgatggtgcctcctgttgacgtggctggcctgcgccctaggttgggcgatgtggaggctcctgcgaagccgaggtcgagtctgtcttccgtggccgaggccgagtctgagccctgggtcgggtggagcggaggccgtcggctgaggccagggcagagtccgagccctggggtcgggcgaagcggagttcatcgttttctggggctgagcccgagtccgagccctaggtcgggcggagcggaggctgagcccgagtccgagccctgggtcaggcggagcggagttcgccgtcttccgggacttagcccgagtccgagccctgggtcgggcggagcggagttcgccgtcttccaggacttagcccgagtccgagccctgggtcgggcgaagcggagcttcctatggtgccttctgcagggcctgactgcctgtcagtctcactccgtcaagtggcactgcagtcggagtggcgcaggcggcgctgtccttctgtcaggccggtcagtggagcggcgaagtgacggcggtcacttcggctctgccggggggcgcgcgtcaggataa

SEQ ID NO: 23037 - DNA, 738 bp, Zea mays
  Peptide Sequence Number=SeqID_66412
atggcggcgcaaggggcaggaagggcggtttcctcttctctggctaagtctctcggattgcgaaaacctaagagggaggcaggaagcggagcaaagaaccgtcaccagaccctctcccggggaccgggaaagggggatacccagaaaaggatccttccccgtgaaggaaccaggctccgagcctccctactgatcagaggttcgaaggctagccccccggaagggttcgacagccgcctcagatcgcgtgggccctacacccactactcgtcagaggttcgaaggccggcccctcgaaagggtaccacggccgcctcaggctactcgggctacgcgcccattactgatcagggcgggaacgatcttgtaacggaatcccatcggagggaggcatcgagccctcggaccccgtcgccaggggaccgggtctggcagatcacccgcagctcaccggagacaccatgttcggcgcccatcgagggcaacatggcgctttcccccctcctccttgcggaaaggcgacgcaggggcgtatgtaaaaaagccgagtctgtccctgatcgccctctcgccctgtgcagaggctcgggggctgctctcgcaaacccggctccggccgaaccgttgacagcgtcaacataccagcccgagaacttgggacccgaccgtacacccgggctacggccagttcgcatgagggaacgaccagaccagccgaagcattacgcgaggcattaa

SEQ ID NO: 23038 - DNA, 465 bp, Zea mays
  Peptide Sequence Number=SeqID_66413
atgggcaagagtaacaaacgcaagcgcgagccgactcctccgtcggaggacttcagcgactcggaatactcggaggaggagttctcctccgagtccgaggggtctccagctcccgtctctcccccggcgtcgtctgatgattcagacgactcccaggggattgccgcggaagtctggacatacatccgggccgtcgagcgctccgggctcgagggctcggatgagtcggagtactcctcggatgaggaggactcggacggcggcgagggcgaggatgacgacgacgacgacggtgacgacgacgacggtggcgacagcgacggtgacggcagcggcagcggcggcggcgacgggagcaagggcagcaccagaggcggcagcagcacgggcagcaccagaggcggcagcagcaagggcagcaccaagggtggcggcggtggcagcagcagcaaggccagtggctaa

SEQ ID NO: 23039 - DNA, 1227 bp, Zea mays
  Peptide Sequence Number=SeqID_66414
atggacccgtcctcgtcgggctccggcggcaactccctcccgtccgttggccccgacggacagaagcggcgcgtgtgctactactacgacccggatgtgggcaactactactacgggcagggccatccgatgaagccgcaccgcatccggatgacgcactcgctgctggcgcgctacggcctcctcaaccagatgcatgtgtaccgccccagcctggccagccaacgcgacctctgtcgcttccacgccgacgactacatcaaattcctgcgctccgtcacgcccgacacgcagcaggagcagacccgcctgctcaagcgcttcaacgtcggcgaggactgccccgtcttcgacggcctctacagcttctgccagacctacgcgggcgcctcagtcggcggggccttcaggctcaaccacggccacgacattgcaatcaactggtcgggcggcctgcaccacgccaagaagtccgaggcgtcgggctactgctacgtcaacgacatcgtgctcgccatactcgagctgctcaagtaccacgagagagttctgtatgtcgacatcgatatccatcatggggatggagtggaggaggctttctacacaacagacagggttatgaccgtctcgttccacaagtttggggactatttcccaggaacaggggatatccgtgacattgggcattcaaaggggaagtactactccctgaatgcccctctagatgatgggattgatgatgaaagttaccagtcccttttcaagccaatcatgagcaaagttatggaggttttccgacctggcgcagttgtgcttcagtgtggtgctgattccttatctggggataggttgggctgcttcaacctctcaatcagaggtcatgcagaatgtgttaggtacatgaggtctttcaacgtaccattgttgctccttggtgggggtggatataccataagaaatgttgcacgctgttggtgctatgagacgggagttgctcttggccaagagcttgaagataagatgcctgccaatgagtattatggatactttgctccatattacactcttcatgtcacaccaagtaacatggagaacaaaaatacacgacaccaactggatgatataagatcaaaacttcttgataatcttagaaaacttcaacatgctcctagtgtccagtttcaagagagagttcctgatacagaagtacctgatgtgagcaactga

SEQ ID NO: 23040 - DNA, 1431 bp, Zea mays
  Peptide Sequence Number=SeqID_66415
atgaagtctcgcatggcgctaggattaacgagcccagagaaatcccaaccagagtcggactcgtcttcttcctcagaacccgggggcccgcacgagatcagcgcccgacgtgtcccccgctggggtgccggcgtcatcgactcgctcgaccgccgacgaggtgccgcctcctgcttggccacggttgccccgcctcctcctcctgcggcgaggaaggcgacgggacaaacccggatgctgctcttccgccatggggggaagacgtcgccaagtccgccgccgccgggcgggctgacgaccgtcgttgtcgctgtcgcgctgcgggggaaggagtaccatgtcgtagctgccgtcgagggacatgaactcgagactcccaaaacggagcagcgtcccgggctgaagaggttgctggagactacccatctagaactcgatgggaagttgttcgtcaacacgcagcaggcccttgcctggcgcgccaactgtcggcgttttgaccccggggggtccctggaccgacgagtaaattgtcgctgcgtgccccagcccagatgggttggcgcgagacggaacacgaaggggggaaaacattggctcgtgttatcctgcgccagagtgggtgcacttgcagtaggggttacaagcgttcgcgagggagagagggagtcccgcgcgaccaacttcctgtatgagggccctggcccttccttttatagattcaaggagagggtccagggtaatgatgtaccccctgcggcgtggtcggtccgagcccaaggtcgggcgaggcggagactcctcctgaggccgaggccagggtcgggcgaggatgcgattccgctcgaggtcgaggttgaggccgggccctggggtcgggcgaggcggagaccaccttccgaggtcaaggttgaggccgagccctggggtcggacgaggcggagaccaccttccgaggccgaggcgggggccgagccctggggtcgggcgaggcggagacttctcctgaggccgaggcccaggagggtatcacgtcgtcttcatcgtgcagcggctcgttgtggatgctggtctctagcgagcgttgacgtgcagctgcctgtgcctcctatgcaacaggacgttcagcctcccatttgtgcagttggaccatctacagctggattgagctcctcgcgatcgacgcgggacacgtttgaggacgtggcccacgacgacgaggacgaggacgacgaggacgacgacgaacacaacgacgacactggcactggcgccgcaggtcaggaggagattggaccatcacaattgcaggatgctcctacaactcagccatcacaactgacaccacgtagaaggcatccacgtgacccttacactccaggcaccgacgctcttggggccaagggcaagggtaagactaggaggaaatga

SEQ ID NO: 23041 - DNA, 117 bp, Zea mays
  Peptide Sequence Number=SeqID_66416
atggaagccggtgaagatgtagcacatcaggatcatatcaatatggcgcatccacaacaaggactgaacatggccagcacggttgtgagagcacctagagggggggtgaataggtga

SEQ ID NO: 23042 - DNA, 1179 bp, Zea mays
  Peptide Sequence Number=SeqID_66417
atgctcagccgactcgccgcggcgaggcgacagctactgctatccccggccgtcgcgtaccgctcctcctcggcagcggcgacggcgtcggcggtccacgagagagcagcgcccgcctcggcctccgtgctcccggacaccctcgaaaggggctccgacgcgtaccagcgcaacacggccgccgtcggcgggttgctctccgacctgcgcgcccgcgtctcccaggtgctgcgcgggggaggcgccgaggcggtgaggcggaacgcggcgcgggggaagctgctcccgcgggaccgcatcgaccgactgctcgaccccggcgcgtccttcctcgagctctcgcaggtttcgctcgccgctcccgctcggaccctcgtcttccttgcgttgatctggccgcattgtgaagtgaactctattgcctgctcagatgtttatgatgaagcattaccatcagcaggtataataactggcataggacctgttcatggacggttatgtatgtttgtggccaatgacccaaccactaagggtggcacatactatcctcttactgtcaagaagcatctgcgagcacaggaaatagcttcggagtgcaaactgccttgcatatatctcgttgacagcggaggtgctaatctccccaggcaggctgacgttttccctgaccgtgataattttggccggatattctacaatcaagctaagatgtcttcagatggtatccctcagattgcagtagtcttgggttcttgcactgctggtggggcatatattcctgcaatggcggatgagagtgtaatagttaagggaaatgggactatatttctagcgggtccaccacttgtaaaggctgctacaggagaggagatatctgctgaggaccttggtggagcatcagtacattgcaaggtatcaggagtctcagatcattttgcacaagatgaaattcatggacttgagttggggcgaaacattgtgaagaacctgcacttagctgctaaaggaacaaatattcagagttctgcttgtggttaccaagagccattgtacgatgtagaggaacttcgctccattgcaccagctgatgtgaaacagtccttcgacattcgttcaataatagcccgtattgttgatggaagtgaatttgatgagttcaaaaaattgtctggatcttaa

SEQ ID NO: 23043 - DNA, 342 bp, Zea mays
  Peptide Sequence Number=SeqID_66418
atgacgcggtcctgggcgcaggctggggcgctgctcggcgggcgcgcgtcgggtggccggtcgcgcagggcgtcgcgtgctgggcgtggctccgtgcacactatcgcggcatggcagggcagttgggtcacaggggctcggggcgggtcatgtcaggggcactcggctggtcggccggatgcgctgctaggtggtgcagggcgcggcggctgtgcaagggcgaggtcctggcactgcgcgtgggagagaacgggagagaagagagtgacggatggagagcagggcgcgctagagacaagcgcgcgtgctagggtaaggagggcgcagctgggctgtgcgtag

SEQ ID NO: 23044 - DNA, 114 bp, Zea mays
  Peptide Sequence Number=SeqID_66419
atggcgtccgcggagtgtggcttggtggttgaggacggacctgacaggttggcaccaccatccagtggcacaggcgcatgtgttcacccagcacagaaggttgaagatgtttga

SEQ ID NO: 23045 - DNA, 300 bp, Zea mays
  Peptide Sequence Number=SeqID_66420
atggggcggcgagcagtaagggtgctgagtcccaataggggccggggaaccatcctcctgatggaggcgctccgcgcgctcagcacgcagttccgcaatctccgcccgagccttgcccaactcgtcaagggtgtggtccagctctgtgttgagcacggtgaccaggtttactattctgctcaatctgggatagccctcaccaaccgggagaaggatgaaccaattctgaagatacgtgtgaagaagcttcgtcttagcagtgggaaatcgaaccgacttaaagaggaaaacgctatctag

SEQ ID NO: 23046 - DNA, 552 bp, Zea mays
  Peptide Sequence Number=SeqID_66421
atggccgtgatgggttcaacatcggaaaagatgtacctctgccaggtaattttacttaactggacaaataaaactggatttttaaggatgcactttagtaagcatttctgcaaaacagagtctttgattattgaaaagccttaccttgactcccttaaccagcatacccttgagagtcttttctttagtcggaaaatgccaccgcgcacaaggagaacagcgcgcaaacatactggaccgattggtgtgccatgtcaccagctggccccaagacatgataatagtagtagtggaagcaacgatcctataggggatctcgaagcagaagtgagtcggctccaagcggaactccgccgcaggacggctatatgggtcgtagatggtgaccgaataaatgagttgagaagagacgttcgccatctgcgtgatcagctcgcagaccgggatttggcactcgactgggttgttcaatctcgttcgcttgcatgggccaaggaggaaaaggctcaagctcgagtagccgagctcaacttggccgttgataacctgtag

SEQ ID NO: 23047 - DNA, 192 bp, Zea mays
  Peptide Sequence Number=SeqID_66422
atgttggtatccaacctcaacacatcaagcctgcatctcaggtgggggccaggtatgaactacctccacaccagtaagggccgtgggatggctagctctgagcggctcgcctgcggaggcaaccacatcagcaccgacggtggtgaaagggaaatgtgcccttgggccatttctaagtattttggtgattga

SEQ ID NO: 23048 - DNA, 330 bp, Zea mays
  Peptide Sequence Number=SeqID_66423
atggcgggcggaattaagctcgccggagctaaggaaaggtggctggccggagaggagatatggagccaggaaatctggtctgtctccctgcccaaacccgaggcaaatccaaggctagggacagggagttgtagcgtcgccaaggtgccagtgtcagaatgcctggtcccgaggtcaaactgcgccaaaaccgtgtcaaatgaatttggtttgagttcaaacttttccaggatgtgttcaagggaatttggcacaactttgatatttggatctcctggctttgagtttcgaaaaacagagaacgcagatgatctttgggaagaggtctga

SEQ ID NO: 23049 - DNA, 354 bp, Zea mays
  Peptide Sequence Number=SeqID_66424
atgtcaaatgaatttggtttgagttcaaacttttccaggatgtgttcaagggaatttggcacaactttgatatttggatctcctggctttgagtttcgaaaaacagagaacacagatgatctttgggaagagcccagcggctgtaatgcagcagcccctggcactgaagctttcttcgacggcatgactaagttgaagggggacatgcacaaaggggaagcttcttgtagaagggatgatgagcattgtgcgccgctcggcacgggtgcactgttcgccaacagactgctcaggcacgctgtttgctgggtgaacctgacgccgtctgccggcggattggacaggacgcattaa

SEQ ID NO: 23050 - DNA, 552 bp, Zea mays
  Peptide Sequence Number=SeqID_66425
atgcctcctcgagagctccgggctcgtgctcacaggggtccggtgctcctctgtggaggtccggacccaacggtgcttcctgggacgtatcatccatcctcgccacgtggtgcccttaggcctgcccatgtggtggggtcgggtgctgctctccgtgtgaccaggaggtgtcgtatgggtgcagcgccttcgtactgtaggagaggaggagtgcaaccccatgggagttggcatccttcttctattgctcggcttcaaggattttcatcatgcagctcggctgcaaccccccaccggtggtcatccagagggatgaccaccagtcttgtggtggagagaagcgagccgggctgcggcctcccccctgccctcagcttcaaggatgttcatcatccgtgctggggaggagggcgagacgagttggggctccgcctttcgcatgggctggcagcccgcttcttcctccagcattcgggggagaagggcgttcgccagccttgcgaaggaggcaaactttggctacgcggggccggccgtctgaggcgccgttag

SEQ ID NO: 23051 - DNA, 114 bp, Zea mays
  Peptide Sequence Number=SeqID_66426
atggaacagtggccgcagaggaaggaaggggtggaggggcttaccggcggcgagactgctctggcggagatgctcgccggcggcgaggagtccggcctaaccagggcacgatag

SEQ ID NO: 23052 - DNA, 597 bp, Zea mays
  Peptide Sequence Number=SeqID_66427
atggcgctccacaagctctatgacgacggcggcccccagctctcttacggaagcaggacgacgtcagcagggactcgaccgctccaacagctgtccctccgccaggctccgccgcacctccgacagccacgacatcacgccagcaggcactctgctacaccccccattgtacacctggatcctctccttacgactataaaagggaggaccagggccttcttagagaaggttggccgcgcgggactgaggacgggacaggcgctctcttggggccgctcgcttccctcacccgcgtggacgcttgtaaccccactactgcaagcgcacctgacctgggcgcgggacgaacacgaaggccgcgggacttccacctctctcacgctcgactccggccacctcgcctctccccccttcgcgctcgcccacgcgctcgacccatctgggctggggcacgcagcacactcactcgtcggcttagggaccccctgtctcgaaacgccgacagtttcagcatcaaaatgtgttccattgtccacagttatgtccttcggcacgcctaagcgacaaacaatattttgccagaagaatttatggact

SEQ ID NO: 23053 - DNA, 362 bp, Zea mays
  Peptide Sequence Number=SeqID_66428
atggggtcgggcgaggcggaagtcgttcggccaaggccagggcagagtccgagccctggggtcgggcgaggcggaagtcgttcggccgaggccagggcggagtccgagccctggggtcgggcgaggcggagtttcgtcgtcttccagcccgagtccgagccctggggtcgggcggagcgggagttcgccgtctttccgggtcttagccccgagttcgagccctgggggtcgggccggagcggagttcgccgtcttccgggtcttagcccgagtccgagccctgggggtcggggcggagcggagttcgccgtcttccgggtcttagccccaagtccgagccccgggggtctggcggagtcgaa

SEQ ID NO: 23054 - DNA, 255 bp, Zea mays
  Peptide Sequence Number=SeqID_66429
atgccggggtcgtcgtgcccacgccgaggcctcgcctgcgctcggaggtgccacaccgggcctccatgccagcgtcgaggttcacgcatcgcgcccgcgcaggggccagggacgccacacccgagcgcgcgccggggccacgcccgcgccgaggctgaggctggagccgccatttgctggatccaccacacaagtgccgccagagggggagccatggctggccgccgccacgtggagcagttaggtttgctgtag

SEQ ID NO: 23055 - DNA, 285 bp, Zea mays
  Peptide Sequence Number=SeqID_66430
atgacgcatttcttcagcggcctcatcaatcttcttctgaagatcggcgagatgaagcatcttttcctttttcctctggacctgttgatgaatggcttcgaggtccctgatttcttggtccaactcctcctcctgaggtgtcggactgcccctagccctgaagacttcttcggcggcatgacgaaggtcacagcttaccgaaggtggtcaaatgagttcgccggaggcacaggaagcagcctgggtaaaattacatccatgtccttgacatttactattgactaa

SEQ ID NO: 23056 - DNA, 174 bp, Zea mays
  Peptide Sequence Number=SeqID_66431
atggagagtcatgatctccgggcagaaagggaatcacggcttgtgggtgacaatgagattgatggttctggttatgactatggtgctggttgtcaacattgcaaccactgctcaggagaagatgaagttgtggaaggagacttccaggagttccaagactacgacgagttctag

SEQ ID NO: 23057 - DNA, 462 bp, Zea mays
  Peptide Sequence Number=SeqID_66432
atggcccgcgcccgcgcttataaaaccctcccagacttagattgtacccttccgcgcaccctcaaacctcaccggagtcgagctcgtcgccgtttgcccgtgcgcagcgagtccgcggccgcccactccctctgccaccgtagaccggccaatagagccattcccaaccccgtccagccctcggagaagactgtgcacaccttcgtgaggctccccgagcaaggaatcggagagtacttcgccggagaagccagtccacgctcgccggagctctcgcccccgccggagtacgtggaccaggatagggaaaatagaaaatactgtaatcttgctgacggagagtacatcctcgtgccggagcaaggagctgctcaggaggtagccccagacccagcacccgagcctgcaccagaggacctgcctgccactgctttggaaggcaagccccggttttatgcataa

SEQ ID NO: 23058 - DNA, 198 bp, Zea mays
  Peptide Sequence Number=SeqID_66433
atgtacctgagaacatgccactgcgggtcgagccgtgaccacccgaggtttgaccacagtcgtttccaaggttgtgctggatctcgacgagggcccttttttcatgaggggtaccctctcagctttatatacatgaccgaggagatatccctgtacatattggagtacttgtccatgtttatccgttactcacggtga

SEQ ID NO: 23059 - DNA, 507 bp, Zea mays
  Peptide Sequence Number=SeqID_66434
atgggtaagcttagcctcggttggaccaatacgagaaaggccggtccacgatgggagtggagagatggcgagagtatcgtgtatccacctggcaagaggttggatggtggggtactgagctctcggttggcgtggacccgttctggtcttgagaaacccgtgggatccactattagtaagcttttctgcaaaattgagtctttgaaatttggtaagctttaccttgactcccaacaaaccagcatatccttgaaagtcttttctttagtcagaatggctcctcctaagcagacaccccgcatgcgtgttcgagcacgaggtgtgcccaagcatcagatggctccacgtacagtggaggtaggcagtagcagtcgtacaccttcgacgcaggtggagcagctgcatcagagcctagatgtatccttcaatgagcggtgccttgactcagctcatattttggaactactggcggaaaagaagcacgttcagaaggaattggcggagtag

SEQ ID NO: 23060 - DNA, 831 bp, Zea mays
  Peptide Sequence Number=SeqID_66435
atgacttctcacggatcctcgaacgaagggaacacacagtcccacacggacggacttgcacgagagggttttccccgtatcttgtgggaggtactacagggagccggttacacgacacctccccagtacgcggtgcggctgttcgagaagcaccaagtgccccgctgtagggtgaggatgaccctagagcctcatcccttacagccaggctggcgttcgttggactccaagtcttttggataccgagctgaggatactatcgaggcgattgctctccacgggctgaccaccttctgtggttttcaccccttggagctgtctactcatcccattggcttattccctgctgaaaaggaggacgacccaatgtggaaagaccgagtggagcatgccaaggatatatgggctctttacccagggcagactgcacacttgatggtgctatgcatggatgctctgtgtcgtctgcaggctaccaagattaccttggataacagagaggaacttgtggtagacctgtccattgagatggtggaaaaggacctacaggtggaacaactgtccaatgagatccaggagcttgaggaactagtaggaaccagggagaacaccattgaggttctcgaggatcagctcatcaacactcagcaacaacttgcgaaagctaaccaacatttggatatgcaccaccaggagatccaagacatggaggctaacgaggatgtcgacatcgagggaggagaggagccagagcctgcatccagcttggacactgctggctcagggagaccaccttcccccgagtcgagcgttgcctcgtttgctcactag

SEQ ID NO: 23061 - DNA, 747 bp, Zea mays
  Peptide Sequence Number=SeqID_66436
atggagggcaaccaaatcagataccgcctcccccaccatcggcaccactcaatcctcctggtccccaaggcagtttccctgctctcccagcaccatatcatgggaataactatcatcggcctccaaccacatcaatgcctaatgagggatataatctgcaaccagcaccccctccaccgcctccaaatcaattcccttctgtgccaccagaacaccaacataggccgcatcactggggtaataactgtccaccgtgtcctgagagatatcggtacaatggacatgatcgaggtcatcacagacatgatcgaaggcatcatgcgcacgacagacaacaccattatgatgatagaggataccgctatgatgatagaggatatcactatgatgatagaggccattactttgatgatagaagacatcagtttgatgacagagggcatcacttcgatgagagagctattagggggtcaatgcacaatgaggctgctgacaggtcaggatatccttttccaccaggacctcctccgattcctgaccattttgaagctccaccaggcccaatgcactatgggcgaccatcagatcctccaccagggcattgtgcaggctggtctaggccgcctaggatatctaataactattctccctcaagacattctgtggagcctccagtttcccatgcagctggagctggagatgttaatattcttctctataagctgggtcaaacttaagacagtttga

SEQ ID NO: 23062 - DNA, 2175 bp, Zea mays
  Peptide Sequence Number=SeqID_66437
atgaggagggtttttggaagggataaactgaggaaagccttcctccacaaatgcggagaggctgcttcgaaccttcggtttgttgatgagataattgaagtttatgattctctaaaggagaaaggtagtaacaaggatgacttggctgctgaagtaaagccaggtgtagaaaagtttgctgataataatgtttgcatggatactgaaaatatggtcagtagctcctatatacaaaatcatcaagagatagatgatcattatgtcactaccaagggtcatgacatgatcaagtctgacaggctttcagtcactataatgagtgacgaacgctgtgttataaattctgctcctgatgagcctactgaaaatgtatctgtacttgatgaaatgagggagatttctttgcgtactaactcattttcaaataagcaaagggatgcacagccacaaaattgctacacacgtagtagggttccatctctgcgaaagtcaaggagttcaataagtgttgaatcaaggaaggctcaaggttctggtaatttttttgatcataccaatttgtcttctattgggtcagttcctaatgaaaataaggaacgctccagtcgtcataggcatgcggatgacaaagctaactcaggttctgtttctatattagataatgtctggttgcattctggcagaggcacttccaaccaacctgtaactttggggactacttgtaacggcagcaaaatgttgaatcctcctgttaaggcggatagtacttgtaacagtgaagcatctgaaaatggaacttcagagacagaattgaaatcaaatggcacatctaatctacccatgaatacagaagtaattttcaggagaataagaaaatcagatagaaaacctgttcctcattatgaagattgtacaacaccaaataaagatgaattacgtgctgagtacagtgaaatcctttcagattctccaaattcaaagaatgaagtatgcaagtcagatggagatgagcacttgccattggtcaaaagagcaagggtccgaatgggaaggtctcatttggaggattcaccagttgatgaagttgatgtttctaataagaagccagagcttacaacaacctcagaccaatgcgataggaatggtaaacctgcaagtcctgtcaatgattattcagctgatcaggtgtccacagttgtaagttctgcttctaatccgtcctgcaaatcagacatgcctatcctgtcaaaggaaggtcatcttccttggaagaataaagaataccacccaaaaattttagcattagatgtggaagctgctttgcctccttcaaaacgccttcatcgtgccttagaagcgatgtctgctaatgtcgctgagaatgtcaagaatatacctgaagtgacaggaccaaatgaaatggctctaaatggctctctgttgacagcaaacaaccattctaataaatctgctgatgcagtagtcacagtatccaataaacctgtaatagttcaatgctctgaaccttctctagacacacagtttaagcatacccaatcagtgaacaatgtgggagatacggcaagcaactcttcaatggctactaaatcatccagtatacaatccgatgcagacacccggacttctgaagtgcatacattctcatctctggcgttgaaagaactgaaccatagaaaaattaaggacagaagcacttctccagattcaatgccgatgaaagaacttatagctgtggcacaagctagaaggttttctcgactgacttcctttccagatatcttcctaaatgccaagtatattcctgaaagagccacaaatacacctcccaaggaaggctcacacaggcagttgtcaccctcaaatcggatattcaggtccacctctggaaatgataatgttcattctaggagtccttttgatattatccaacagaagaaattagcagggcatgttgaagccaatgcagcacgaaggtctttcaaagatttcctcagtacattgacaagaaccaaagaaagtatatcacgcgcgacgcgtcttgctattgagtgtgctaagtttggcattgctggtgaggcagttctacctcgaatactctatgctgctgcacctcctgggaactcagcatgggagaatcgaaagcaatgcctaaag

SEQ ID NO: 23063 - DNA, 777 bp, Zea mays
  Peptide Sequence Number=SeqID_66438
atggccacagccctgccgagccgcagcaccgtcgacgagccctgctcggcaccacctgaattcgccccgacgtgctgtacccccacactcccgcacgcaccgcagcagctaccggttacgacgagcgtcgcatcgacgagctcgacctcccacggcacgaggtggtgcggcgcctccgcgtgttgcgcgagcccgtcacgctgttcggggaggacgacgacgcccgcctcacgcgcttcaagctcgtgctcaagtccggcgcttcaagctcgtgttgatggtggagacgggggtgctgccgaaggcagtgcagatgacggagatgccaaggggagcggcgatgatgctgacgcagacaaggactccaagaggatgacgaccaagtttgaggagctttgcaatgaagacaagatcttggtgttctttaagaagctgcttaatgagtggaaccaggaattggatgagatgactgagctagagaagcggacagtaaaggagaagtccatggttgcaacattcaagcagtgtgcacgatatctcagccggctgtttgagttctgcagaaagaaggtaaggaattttgggatgctgcatttggcatcacgggacaggacagaagatggcttaaatacaccccctgatattcctgcagcagtcaatagcaagttggcaatggccccaaaaacatcatgtacggcgactcagaagtcagaactaccaatgtgctctcaagttcagaccttccaagttccaacctctctgcccaaacatctctaa

SEQ ID NO: 23064 - DNA, 612 bp, Zea mays
  Peptide Sequence Number=SeqID_66439
atggtgcggacgaagaatgtcacaccgtcagggggaggagacgacgaggaccctcctcgccccttcagacaggtcaaggggaacactgtctatcttgaacagcaagagggcaggaagaagaggcgtatggacagagccgctcgtgcagcacttgcagcggcagcggcggtagatcaggctgaacggggaggccagctccagatttcttctaatcagatagcctatcgagtttgtcgcctcatgtctcggcctcgctccactggtccccccactccttccaccacagtctccactccacctcccacttcgccagctcttgtcgctcccgagccatccaccacgcccgctgtgtccaccacctccaccactccaacttccactgctctagctctcgcttccgctccgcccattccaccacctcgcttcagggagcatgatgagatcgaggtgagaccgcttgctgctgatcagcgtctgcttgatcttcagcgagccactactgcccggcttgaaggaaagcaaaaataccagcgtgaagcaaaagcaaatgcccaatgtgtgattaaaggagagcgtgtgaacagtacaggggtactgttcacctatttatag

SEQ ID NO: 23065 - DNA, 613 bp, Zea mays
  Peptide Sequence Number=SeqID_66440
tccactcaagggacacgatctcgcctcgcccgagcccagcctcgagcaaaggcagccgacccggaggattctcgtctcgcccgagggccccctcaagcgacggacacaccttcggctcgtccgaggcccagtcttcgcggagaagcagccttggccagatcgccacgccaaccgaccgaaaaacagcgccgcctgccccgctccgactgttgtgccactcgacagagtgaggctgatagcagctaagtccagcctcgggcgccatgggaagctccgcctcgtccgacccagggctcggactcagcctcgaccccggaagacggactccgcctcgcccgaccccagggctcggactcagcctcggcctcggaagatggtctccgcctcgcccgaccagggctcggactcagcctcggcctcggaagacggtctccgcctcgcccgacccagggcccagactcgacctcgacctcggaggagcctccgcctcgcccgacctcgggcccggacccgccacgtcacagggaaggccatcattaccctacccctagctagctcaggctgcggggaacaagaccggcgtcccatctggctcgccccggtaaacaagtaa

SEQ ID NO: 23066 - DNA, 645 bp, Zea mays
  Peptide Sequence Number=SeqID_66441
atggcagggatgcgggtgaggaccgctaaatcttgtatggacgtccgggatccaacagccagcacgatcagggctgtcggtcctaatcgcagcggcgtccctcgactctgcggtgagctctcatcagaggcgagggcacggtcacagcaaaggtttaggggattggggaaggacttgggcgcactcagggcgacacagcggactcaaccgtgggcacaacgctcgcgcgggggcaccagagggcgcaaaatgcggcggagtggcccgacggcggtgcagacttgctccggcgagcaatcacgcgaagaagagggcaacaaatggagaaataggggcatgggggattgctcacctcgagaggaaactctggagtaccagggcaacgacggggatgcaaggatacctcgggtcgatggtggcgggcttcggctacacggggagaacgccggtgagctcggacctggcgaaatagagaggctagaggcaaaccagaaggtgtcccgcgttgttggcgaaggggcagagctcaccgaggcaatggacgcggcagacgctcgacgatggccacagaatggcgatagaccttcggcggggttccacgggcgcgtgcgcagagtgagacagagagcgagggagttcagctga

SEQ ID NO: 23067 - DNA, 156 bp, Zea mays
  Peptide Sequence Number=SeqID_66442
atggccgtgatgggttcaacatcggaaaatatgtacctctgccagaaccccagtggcgagttgacatatgcaagggttaagtgctacatatgtcatgtgattggagatcctcagctaagtattaatattcggatcgccgttacttcttggacatga

SEQ ID NO: 23068 - DNA, 192 bp, Zea mays
  Peptide Sequence Number=SeqID_66443
atggacagcgacacatgcgaccacgtaggactgcttctagaggtcgaactgacagtcgccaagcttcttctcgtcatcgatgagcgacgccaacgcgagtgcctcctgctaatggtgtttgttcggggtttcaaacatgggctgtacgggggaatgagaataggaatgggctttgcggggagggaggaatga

SEQ ID NO: 23069 - DNA, 870 bp, Zea mays
  Peptide Sequence Number=SeqID_66444
atggcaatggtggtccatgggctagaatatgattcgaggatggaggacattgacagagaagtcctcgtgccggttgcaggaggcatgggtggtactagatttggcgatgtcacaatcgactcaccctctagttgcactctatctcaggcccaactagaagacgagaggaggcaacatgtggagttcgaggcgaggatgagggccaatcgggaggccgagcgcgtgactcgctttgccaggcagcaaattatgatggagattcttcaatacatgcacttcacaggatgcaaaagttacttggaccaaggcattgaggaaagcaacacctcaagagaagacatgaagagcaagagaagtccaagaaacaaaggaagtgttgcctgcggactatctggtctagagcaccggactgtccagtggcacatcggactgtccggtgccacacgccggactgtccgatgcaccaggaacagtggcactatggagagaagaccaccgaactatctgcacctaggggcatctttaattgaaattcctgaaattattaagaaatatggttctacttcttgctttgatttaactgatgattctaacccctacaaccaagttcctgttgagaacattgttgtagaaacatgttcagatgaggttgcaaaggaaaatgagcaattaaggcaagaagtggctcgccttggcaaggatttgtatgacaagaaaggcaaagccaaacaaatccaacctccacaggataacaccactgtaggagtgaacatgcctgtgaagggagaaactgtgatttgtaggttatgccataagaaaggctacaattctttccaatgcaaggcgatgaccggggataagcaaaggtaa

SEQ ID NO: 23070 - DNA, 348 bp, Zea mays
  Peptide Sequence Number=SeqID_66445
atggagtggtcgtggggctcgctcgtggagatccgtgcttcagctcttgcggtgtcattgcttcggatctatacatcaagcggaaagacagaggcgaacactgcctttgtgccgatagagttgcagaattcccggaagtcttggttttcgaactattttatattatcgattgttagctctgatgggactccgaatcgacacatgatgttttgccagaagaattttcgcgttgttttggaagttattgcagatacggttctggcctcgatccacttggtgaagtattcaacagcgacgaagcttcattgtggtcagatgggtggtagtggccctgaagctatagggtga

SEQ ID NO: 23071 - DNA, 540 bp, Zea mays
  Peptide Sequence Number=SeqID_66446
atggcatctgcatgtggcgcgctacgtaggtcgacatctcttgcatcgaaggttggtgaaggattggttcgttgtggaattattgttggtggtactgctgggggtgctcttttgtctgggatactcctgacaaagagctatgtctccggtggggtgtgggttggtgatggtgttgacttgttgctggttgcgggttgggcccttgaatgcgatgatgaaagatttggccatggtggcgtcgtcccctccggaggatgcaatagcaacctggtagctcatgatgtactgggctgggtctatgctatcgttgtacttggggtggatgaagcctggcgggggtgcatgtggtaccccctcagaactgtaggtgcgtgcagtgccctccggcgtaggcaggttgtcctagcgttgccttttgctgttgactgcatcatcatcgaaggcctcgtgagggatgtcatctacaatgggatccttgcctttcttttcagccagaagggccgccttcgctgcatcgtcgatggaagcgatggcctttga

SEQ ID NO: 23072 - DNA, 624 bp, Zea mays
  Peptide Sequence Number=SeqID_66447
atggccttcgaggtcttcagtcttgaatcctctgacactggcctctcgagcaaggggggcgttacgccttcaccccaacatttgccctctgagggaccagttcgactaagtcagctggtgccgaagtctgtcagatctggcctgcatcaagcagatcgttcgccaccgccgacgtttaaggtggtagagaggggtcaagacgaggaggcccttcgctacatagcccacctaggtagtggatgtgacttggttgaagagttcatcacttgcgaggtgtggtccttggtgcatgggtgggatttgggcgagattatacctcgccggatgctaaccctgggagataaattggtgcgaagcccagccttcaccgtggatctgtgcgggcggaatgcggccactttcgtgccggaagtggagtcagaggccgttaagattgtcagaaaatatgcgttgaagactgaaatgttaaggagctgggatattcgtggttctaacattaggttgaaatgtgtcttcgaattgaataaattgccttatggtccctacccggagggggactccgctgatgccggcgatgatcgaggcaagcaagtgaaaccccaggccgacgaaggatccttatag

SEQ ID NO: 23073 - DNA, 240 bp, Zea mays
  Peptide Sequence Number=SeqID_66448
atgaagaagagcgaaaaagatattcatgacgctcgagaagcagcgaaagaagctaagaaagctgtagaactcgagaaacgaatagctgaactatctcctccaccaaaactgttcgaccccctggcagacccggaaatgaaagaagccattgatatcattaatgtagcagaatctattgttgacgaagttgttaacaagctgctaaatgaagttgcggagaaggtcctgagagaggactag

SEQ ID NO: 23074 - DNA, 441 bp, Zea mays
  Peptide Sequence Number=SeqID_66449
atggcacgcatgttgaggtggtcatcgccgctggggaggctgcctggcgcagaggtggtcgccgccgctggtgaggctgcccgttgcagaggtggttgcctctactggcgagccgctcggagacaaggtagtcatcgctgctggcggaccgtcggtgcagagaccagcatacctaagaaagagttggcgatggcccctaggagagtggtggagcgtgcaggcccacggtacggaaccagactgagcggctacacgggctctggaccaccccaggagacaaatgtcaattctctagctccggaccccagaccaacaggccgggcttatgagggcggacctcactgggttggcgtacacccatttctgcatggacttgtcggaggcctggacccgtggggagtccaggagggtttccgagggaaggcaggcttcgacccgtag

SEQ ID NO: 23075 - DNA, 5123 bp, Zea mays
  Peptide Sequence Number=SeqID_66450
ctgaaagtgtgcgagagactatttctgttataatgcgtacaattgctgaggaagatgcaatagcagcagagtccatgcgtgacgctgccttgaaggatggtgctcttctgaggcatttactaaatgctttcttctttcctgctggagaacggcgtgatgttagtcggcaacttgttgctctttgggctgattcctatcaacctgcacttgatttgctatcaagaatacttcctcctggacttgttgcttatctgcatacacgttcagatgaagattcacggagccagtatgatgaagcaccgttgagcagaaggcagagacgaatacttcagcagaggagggttcatggtactaaaactatggcagtacaagaacaagggataccccccaatggtgttgaggatggggaacccttcaggcacaccagtgccggcacttacggaggagcagatgttcatcagaggcatgttggcctgtactcttccacccactctccttcgccaggtataaacattgatccttctcacactgtttcagttccacatggttctgtacctgaggccctttctgaaaataatcaacaaatcgaggcaccacagctggattcacatgtttattcagtggactccaatgccaatggcaatcttgtgagctcattgcattcagatttttcagtccctgcacaggttgtggtggaaaacactcctgtgggatctggcaggctcctgtgcaattggtatggattttggagggcattcagtctagatcacaacagagcagatttgatatggaatgaacgcactagaggggaattgagggcagcattgcaagctgaagttcataacttggatgtcgagaaagaaagaacagatgacattgtccttggaagttcagtcactgaggatgctgctggtagtgacaacttacctcgaatttcatggaattatgctgaattttcagtgagttacccaagcttgttcaaagaagtctgtgtggggcaatactatttgcggctcctgcttgaaagcggaagcaactatcgagcacaggattttccattacgtgatcctgttgccttttttagagctctgtaccatcgatttttgtgtgacgcagatattggtcttactgtggatggtgcagtacctgatgagttgggatcatctgatgattggtgtgacatggggagattagatggctttggtggtggtggaggatcttctgtgagagaactttgttctagggcaatggctatagtttatgagcaacattataaagttattgggccttttgatggcactgcacatattactgtcctcttagaccgaacagatgatagggtgttgaggcatcgtttgctactacttttaaaggccttgatgaatgacctttcaaatgttgaagcatgtgttttggttggaggctgtgttttggctgttgatttgcttactgttgcacatgaaacatccgaacggacagctattcctttgcaatctaacctcatcgcggcaactgcatttatggaaccttcaaaagagtggatgtacattgataaagatggcacacaagttgggccacttgaaaaggatgcaataagaaggctgtggtcaaagaagtcaattgattggacaataaaatgttgggcttctggtatgtctgactggaaaaggttacgggatatacgggaactgcgatgggcactttctgtaagagtacctgttttgactcctacccagattggggacactgcattatctatattacacagtatggcatctgcacgctctgatcttgatgatgcaggtgaaatagtaactccaactcctagggtgaaacatatattgtcaagtccaagatgccttcctcatgtggcccaggctatgcttactggggaacccagcatcgttgaagcagctgcctcattgcttaaggctattgttacaagaaatcctaaagctatgattcgattatatagtactggtgccttttactttgcattggcgtatcctggttcaaatctcctatcaattgcacagttgttttcggccacacatactcatcaagcttttcatggtggtgaagaggcagcactatcttcatctttgcctttggcaaagcgtagtgtactgggtggactactcccagaatctttgctgtatgtcttggagcgcagtggcccttctgcttttgcgggtgcaatggtgtctgattctgacacaccagaaattatatggacccacaagatgcgagcagaaaaccttattcgtcaggtcctgcagcatctcggtgactttcctcagaaattagcacagcattgccattcgttgtatgattatgctcctatgccacccgtgacttatccgaatctgaaagatgagatgtggtgccatcgttactacctccgtaacctatgtgatgaaattaggtttcctaactggcccattgtagaacacgtggagtttttgcagtcattgttggtaatgtggcgtgaagagttaactcgtcgtccaatggatttatctgaagaagaagcctgtaagatactggagatttcacttgatgatctcgtgcttgttgagaacggtagcagcaagcggccatctgacttaagttcggctaattccggaaacaaaactgaaaacattgatgaagagaagcttaagcgccaataccgaaagctagcaataaaatatcatccagacaagaaccctgaaggaagggagaagtttgttgctgtgcaaaaggcctatgagcgattgcaggctagtatgcagggattgcagggaccacaagtctggaggctgctactcttgctgaaggcacaatgcatcttgtacaagagatatggggatgtcttggaaccattcaaatatgctggttatcctatgttgctaaatgcagttactgtagataaggatgacagcaattttctttcatctgatagggcccctcttcttatagctgcttcagagctgatttggctgacatgtgcatcatcttcattaaatggagaagaacttataagggatggtggtatccccttgttggcaacacttctttctcgctgtatgtgcattgttcagcccacaacaccggcaaatgaaccagctgcaagaatagtcaccaacataatgcatactttctctgtcctcagtcagtttgagtcaggaagagttgaggttcttaagtttggtggccttgttgaggacattgtgcattgtacagaacttgaatttgttccttcagctgtggatgctgcactgctgacagctgcaaatgtttcggtgtcatctgagttgcaaaatgctttgctcagggctggatttttatggtatgtgctacccctgctgcttcagtatgattcgacagcagaagagaatgagatatgtgaggcacatggtgttggggcaagggtgcagattgctaaaaatctgcatgctgttcatgcaactcaggctttgtctaagctttctggtctcagcagcgatgatatactaccccactcatgtgggagctaccagcctaccagcactagttctgtccttaatatcatatggaattcgtccaccagaggggagcttctcaaatttgtagaccagcagcgtgctagtcaaggccctgatggttcatatgatttgacagaatcacagtctttcacctatgaagctttatccaaagaattgatcgttggtaatgtatacttgagagtttacaacaatcaaccggattttgaaataagtgaccaggaggaattttgcattgccctgctcaagtttatagcagagttagtacaacagtggaattccgttaacttggaggagacgattcatcaacatggttcagttattgaagcatctatttctgaaaatgatcaagtcagtgattcaactattgaaggaaaaatggacaattcatcaggaaaacaaagtacagatggagattctgaagttattataaacctccaatgtgggctaacatcacttcagaatcttcttacaagtaatccaggcttagctgctgtttttgctaccaaggagcgtctgatactccactgcaatcctccttgcagggatggagctcttgctgtactatattctttagccagcacaccagagcttgcctgggctgctgccaagcatggtggtgttgtttacattcttgaacttatgttgccacttcaagaggaaatctctatgcagcaaagagctgctgctgcatctttattgggcaaacttgttggacaaccaatgcatggccccagggtggcaatcacccttgccaggttcctgcctgatggtttggtttctgccattaaagatggacctggtgaagctgttgtttcttctcttgaacagacaacggaaactcctgaactagtatggacacccgcaatggcagcttctctttctgcacagttagcaacaatggcatcagacctctaccaagagcagatgaaaggacgtgttgttgattgggatgtacctgaacaagcatctgggcaacatgtaatgaaggacgaaccacaggttggtggaatttatgttagactttttcttaaggaccccaaatttccactgagaaaccctaaaagattccttgaagggctcctagatcaatatgtctcctctgttgctgctacgcattatgaagcaattgctacagacccagagcttcctttactactgtctgcggcattggtttccttactacgagttcatccagcacttgctgaccatgttggctacctcggttatgttccaaagcttgttgcggctatggcttatgagggaagaagggagactatggcatctgggcaggctaccagtgcatcgaaggcagaacctagcgaacatgacaactcagctcactccgaggccactgtacagactccacaagaacgtgttcgccttagttgtttgcgtgttctgcatcagcttgcgtctagtacaacttgtgcagaagctatggcagcaacaagtgcaggaactcctcaggttgtaccactgcttatgaaagcaattggatggcaaggtggaagtatactggcattggagacattaaagcgtgtagttggtgctggtaatcgggctcgtgatgctcttgttgcacaggggcttaagtaa

SEQ ID NO: 23076 - DNA, 324 bp, Zea mays
  Peptide Sequence Number=SeqID_66451
atgccggaccctaggtttactcttggtccaccccgccttgtggcatcagcaactctaccatcgctcctacctctgccaacacacttggttccatcgtggaacatgtggtctagtgggtgggatcagctgccttttggtagctcgtttagcacgatgaccgtgattcctgccgtcaccgactgggttactaacttcgacgcctcctaccacaccactatggatgttgttatactctcttcttcccacccacatctaccatcttatccttcttctatcattgtgagcaacaaaaacattctctcagtcccttcccggaccccttaa

SEQ ID NO: 23077 - DNA, 1995 bp, Zea mays
  Peptide Sequence Number=SeqID_66452
atgaacctgtggacggacgacaacgcctccatgatggaggccttcatggcttctgccgacctccccaccttcccctggggagcgccggccgggggcggcaactcgtcggccgccgcggcgtcgccgccgccgccgcagatgccagcggcgacggctcccgggttcaaccaggacacgctgcagcagaggctacaagccatgatagaggggtcgagggagacctggacctacgccatcttctggcagtcctcccttgactccgccaccggcgcctcgctgctcggctggggggacggctactacaagggctgcgacgaagacaagcgcaagcagaagccgctcacgccctccgcccaggccgagcaggagcaccgcaagcgcgtgctccgcgagctcaactccctcatctccggcgcggcggcggctcccgacgaggccgtcgaggaggaggtcaccgataccgagtggttcttcctcgtctccatgacgcagtcgtttctcaacggttcgggcctccccgggcaggcgctcttcgccgggcagcccacatggatcgcctctggcctctcctccgcgccgtgcgagcgcgcgcgtcaggcctacaacttcggcctccgcaccatggtctgcttccccgtcggcaccggggtgctcgagctcggctccaccgacgtcgtgttcaagaccgccgagagcatggctaagatccgctcgctctttgggggcggagcagggggtggctcgtggccgcccgtgcagcctcaggcgccgtcgtcgcagcagcccgccgccggagccgaccacgcggagacggacccgtccatgctatggctcgccgacgcgccggtcatggacatcaaggattccttgtcgcacccgtcggccgagatctccgtctccaagcctccgccgcatccgccgcagatccattttgagaacgggagcacgagcacgctcacggagaaccccagcccctccgtgcacgcgccgccacccccgccggcgccggctgctccacagcagcggcagcaccagcaccagaatcaggcgcaccagggcccgttccgccgggagctcaatttctcggacttcgcgtccactccttccttggcggcgaccccgccgttcttcaagcccgagtccggcgagatcctcagcttcggcgccgacagcaacgcccggaggaacccgtcgccggtacctcccgccgccaccgccagcctcaccaccgctcccgggagcctcttctcgcagcacacggcgaccatgacggccgccgcggcgaacgacgcgaagaacaacaacaagcgctcaatggaggccacctcccgggcgagcaacaccaaccaccacccggcggcgacggcgaacgagggcatgctgtccttctcgtcggcgccgactacgcggccgtcgacgggcacgggcgcgccggccaagtcggagtccgaccactcggacctggacgcgtctgtgcgcgaggtggagagcagccgcgtggtggcgccgccaccggaggcggagaagcggccgcgaaagcgcgggcggaagcccgcgaacgggcgcgaggagccgctgaaccacgtggaggcggagcggcagcggcgggagaagctgaaccagcgcttctacgcgctgcgcgccgtggtgcccaacgtgtcgaagatggacaaggcgtcgctgctcggcgacgccatctcctacatcaacgagctccggggcaagctgacgtcgctggagaccgacaaggagacgctgcagacccaggccatgatccgcgtgcagtgccacaagcgcaaccacccgtcggcgcggctgatgacagcgctccgcgagctcgacctggacgtgtaccacgccagcgtgtccgtcgtcaaggacctcatgatccagcaggtcgccgtcaagatggccagccgcgtgtacacgcaggaccagctcagcgccgcgctctacagccgcctcgcggagcccgggtctgccatgggcaggtaa

SEQ ID NO: 23078 - DNA, 1188 bp, Zea mays
  Peptide Sequence Number=SeqID_66453
atggtgggtggagactgggagagagagagggcgaaggggaaagcgaaggaaatggttcagaatgcggattccgtgggattatggcgcaaacccgaaaacgcccgagccaaggatgggcgcttgtctcgcttcttgtccggctgggcgagggcaaatacgggaacatgtcgtcgcccggggtcagggcgggaccaggtaaaacgggtaatccctcaggttgatttaggagggcaaacctacattccagggccagccgccgcaccgtcgaccccaaccattgccgcacggaggtccgccttgggcctccacgatgctccctacatgcagtggaggggcgccaacttccttgccacgggggagcacaacggacacggtggagggcgccccagtctacgcccggcggccggaccacggaggaaggcagccaatgacacagtggagcccatcctgttcctgaagccgacctcgtcgttcctccacgctggcgtggccaccgtcgccgtcgagatcccagagccactcaagtctctagaccacaaggccgagctcgtcgtagtcatctcctggcgtgggcgtgacgttcctgaggcgtctgccatgtacttcgtcagagaagttgttcactactttgctttgtcaaagaatgattcatatgtcatgtctgcttctggaggaaaaatctctttgttcaacatgatgactttcaaggttgggtttatacttcactcttttcagcaattcttcgcccatgcaagtatagtaataactctatacatatttgttgcatgccaattaccaatctccaagttggttttcaaagggaatagagagcccacccaggataatctaaggctgccagaaattaagggaaagtttgacccatctaaggctgctgcccttgggcttaggcctggtcccaagtaccgtgaacttcaagttgggaattctatacagtctgatcaatttgatgaaatgcatcgagaaagctccatgtcctttaagaccatggatgatggccaagttctttatgttagcctatatgagatagttgtcgttggttcaaaggtgaagaaatactctacatatggccccattcacctctaccaacaggtgctgaatgcaggggatgacatgattggtgttgagtgcttagaagaagattctgatggcaaggttctatttgtttga

SEQ ID NO: 23079 - DNA, 477 bp, Zea mays
  Peptide Sequence Number=SeqID_66454
atggcggcaacagcacggcgcgtgccgcgtgcggacgatggaggggcaataccgcggtgtcgatggtgcataggagtcggacacgagagcgggcagcgaggaggagtgtcgtaccttcacttattgcagagcagggcaaagcctccagatcgcagcggccaacccttcctccaatcccctcccgcccccaccactaacggcggcggcgcgccgcagaccagattcgtgcacctcttggtcgcagccgccggagccatggtggacccaacacaggtcctgcaccccgcccctagagtccggcgcgatgtcgtgtgccttgttgaggttgagccagtggagcacaacccgtgtgcaagcgtccctgacggcgatgcagccgtggctgtcccccacggcgaggcggagcggacggcggtcgtcgtcgtcgtcgtgtcgttgagggatggcgtgtcgggggcgtccaacgaacgacggtga

SEQ ID NO: 23080 - DNA, 1347 bp, Zea mays
  Peptide Sequence Number=SeqID_66455
atggaggcagttggagctgctgaaacacggcatggagagtggtcggtaacaagattacgttctgctgcgcgtggcactgctaatattgagagcttaagtttgggtgttggaccaaggggtgggcttggagaacagggtgattctgtctctcgtctgcttgttcttacaagtacttcacttgttgaaagacgtccagagaactatgagggcgctggctggaagcagttggatcccaggagggcaggtcttgtacagcggtggtcctgcgtggatggcagctggctggaggcgggtgggacctggcggatctggttggaggcggcgaagtcctggcggttccctccgcgatccggcgcagaagagtcctgcgcggaggccggcggacgtggaggccggcgtggaaggaagccgcggacgagctgcggtcgaggaggcctcgacggcagcctgagacggagtggctcaagcctcgacgatggcctgagaaggcgcggacgtggagggcgcgacgacgcggaagaggcctggtgcgacggtggcttgaggcagcctgagacggcacagaagtggcctgcagacgtgcagacccgacgccgcgacaacgacggcaacctgaggcaggctgagaaggctggccgcgacggcggcaggaaaaaaaggagattaggccctaaccctaacctgctttggtaccatgctgccattgtacgaccactctcagcagtaagtgctcttgttcgatttgctgaagagccacagatgtatatgcaagcacttcccgtgataatctacttgcaacagttcttgacattttacaaacccagaaccaagcctgcgacagaggggtataacctcgccggagaagacagctatccccatggaccgacacctggtatcagctccaggttatcctcaccaccaccagccgccgcgccatcagccgccgcaacgccctctccaactccagatgcattcactcggctcgaagagagttttggccgtttcgcagagaagtgggatcagttcgttgtgatgttccaccgctacaaggagaagacagagaaggaactccaagcagcggtgcggcttcaggcggcatcgcgagggttcctggcacgccgccaggtacagtcccttcgtagggagaaacaccttgctgtggcctccagggccaccccatggccgtcatcacatgagcaggccatggtgcgcctgcaagccgcagtgcgcggcttccttgttaggcaggcgaagtcgagatctgggtatgcagcccccctgcacggccaaagagggtcgtctccttcattcgggcagctgccttggtgctggacagacccaacataa

SEQ ID NO: 23081 - DNA, 771 bp, Zea mays
  Peptide Sequence Number=SeqID_66456
atggaaattcttagcatacataacaatgagctaacaactaagctagaaagcatcggtagcaccccaggagcatctttggttgaaattcctgaagttattaagaaagatgcttctacttcatgcttagatttgattgatgttaattctaatccatgcaatcaagttcttgttaagaatgttattgtagaaacttgttcggatgagattgctatggagaatgagcaattaaagcaagaggtggctcgccttggtaagactttgtatgacaagaaaggcaaagcgaaacaaacccaaccaccacaggataacaccaccgcgggagtgaagaagcctatggagggacaaaccatggtttgctggctgtgtcataaggaaggccacaagtcttaccaatgcaaggtgaagactgggggtaagcaaaagcaaaagccaacaagcaagatatccaacacctacatcaacaaggtggataaaaaggccgctacaccatattttgatcaagaagaaaaagaatggaaaggtgatagcgatcaaggccaacaagcaagccaacaaaggaaagggggccaaacgcatctgggtgccaaaggagattatctcaaccatgaaaagcaccaagaaggtttgggtcccgagagggaaggtgctagagaggattcgactgaggctctgaggatgcaatgtaacaccccaggtgtttatttcatgttcgacatcgactacggacttaagtacgggatgtcgatgaatataaccgtcactaaattctaa

SEQ ID NO: 23082 - DNA, 441 bp, Zea mays
  Peptide Sequence Number=SeqID_66457
atggagctgacggttgcgcctttctgcatcttctacttgggcaataatctgacggtggtgccgagccaagagatcatactgtgcatccatggtaagcagggtgctacagcctccttgttgccgaaccccaccgcggggagctccacggtgacctcgttcgcttccctgttccgctcccgctccctctcacgcttggaggcagcggttggggcagaacagggggatctgggctccgggggggagacgacagttggggcagaacacggaggaggcagaatagttggcgcctgcacgggcgttatagctggtgttgagcgggaaggcgccgacggtcctccagtccaccgcatcgggcgccaccgccgtggaggccccactacacggacgctctggtgcgccggtggacggcggcgcgcagagacggcacggacgcgcgtctag

SEQ ID NO: 23083 - DNA, 468 bp, Zea mays
  Peptide Sequence Number=SeqID_66458
atgaagctgtggaaggagacttccagcagttccaagactacgacgagttctaggtgtgggttagcggcaacccccagtcggctgcctgtgaaagccgcggttatctacgtttcgttttcgcactttgatttattctgtgcgaggccagaattctatatcatgagctccgagttcgcacgcccatttggctgttctccctactgcctccctgttgcgaagtatgtcccctatcgagaacccggtaactactatgactttgtggtcgtcgaagtagtggcgcagctttcgtgcagtcaggagcacagcatacaacagcttctggacctagggatttctgaccttggagggtccgaggacctcgctgatgaagtacactggatgttgaactggatgtgcatgtccttcttcctttcgctcgactaccaacgcggtgcttaccacgtgagtcgtgcacgaaaggtacagtag

SEQ ID NO: 23084 - DNA, 501 bp, Zea mays
  Peptide Sequence Number=SeqID_66459
atggatggagaatggtggaatcgagaaggccggtgtcacccacaagatcgacatcagcgatggccccgtgctcccagtcccgtccgcctcgaatccattcgtttgcctgcacaggagaagaaccacgcgtcgttcgacttcatcttcatggacgccgacaaggacaactaccccgagcgactgctcaagctggtgaggccgggtggcctcatcggctacgacaacatgctgtggaacggctccatcgtgctcctggacgacgcgcccatgcgcaagtacatccgcttctaccgcgacttcgtgctcgccctcaacatggcgctcgccgccgacgagcgcgccgagatctgccagctccctcgttcatgtgaaaaggccaaattcagagaatctaatgtttctgctataagaggatatctcaagatccgcaagtattatgatgcattagcagcttttggttgtctcctagagataaacaaccctcagtggatgtatcgttga

SEQ ID NO: 23085 - DNA, 125 bp, Zea mays
  Peptide Sequence Number=SeqID_66460
atgggggcggggagaggtgtcgagggagccggcagcgggagggacaacgcggcggaggtggaggtccttgacagagacgccgctgacaccgatgtggaagaggacggtccggaggggacgcagag

SEQ ID NO: 23086 - DNA, 654 bp, Zea mays
  Peptide Sequence Number=SeqID_66461
atggcgctgaagaatcagcttgattcgttcttgaggcaagttgtgcccttgaccatttttttaccaataatgttctttaatgtcacatactcatgcatagctgccttggaaaatcatgaagtcattgctgttgaagccctagagcaagctaaggacgagcacatccagaagttaattgaggcctacttggtcacccacaaccaacgtagagcactgcggatccaaaagcctgcttcatccaacccagttcaacctatgagagctgaagagccccagattctggagggcctcccggtctctataaaaggagagaggaaggcttgggaacccccggaaggagccatagtcctagaaggaataccagtctcccctcaggctatggataagcaagagcatcctgagccctcccaagatccaccgctagagatgtttgagctcctcaccataaagaagattccatcaccctcccttgagtccaaggaagaagctgcaagcaccccgccagcaccaccaccctctgaggtcaccatagagctacaagagccattcccgcttggagaagagttcgactccatcctaccatctcaatcggcgccagaagaagtcatcaacgtcatctccctcttgacccatccaagagatgtctcagattga

SEQ ID NO: 23087 - DNA, 2049 bp, Zea mays
  Peptide Sequence Number=SeqID_66462
atgaaggtcagagcttcaccagtttctacatctacgaagaaaggtttccctaggctcttgagggacagtatgtcacgccttggaatccctggttacctagaataccgtggaatggaattcatggagcatcgtaaaaagaagtacatggttatcgtgtacattggggtcaagtctaaggacacttgccatctcgtggctcgtgaagcgctaaggacactatgctcggtctaccgagaagaagtgggaaccacccccatgagattctttccacctctccacaagacccatcaagagtggaagacccgagtgcaagctttgagagagcaaaggcacagtggagatcccacaacagcataccttgccctctatctgcttgccttggatgaaaagtgtgacaagatagttgctcaattgcggaaaacaaccatgcgagtggagaaagcagaagcccttctgttgcagtgccaaaaggatctggtcgatgcccgaagtcagaatgcagccacaaggaacttggaactaatggcactcgctgatgtaacgagaagtttaagagaaactcctgtcgtcaccagcatccaaggtcttgccttcacagcaggcatggcctatcaagttcttggagaatcagcagagagctcgtctgctcaagcaagagtctcaaggcaacccctcaacgaccaagagaagaaggaaatgggaataggattgggacgcttcacaggcccacgcatcgaaccccgtgagtgttcgccgacgtggcccggcgtcagcgtcgcgtcgatctctctgccgaggacctcgctctccaccaagaggcggtcatcggagcagtcgtcgctgccggtgctgttggcttccttctcaacgatggtcaccacggcggggcactacaagctgtgcgttggccgttggctcgtcctccccgcctccccggcgacgtcgcgggggcagcaaccgtactaccacggcgcatatgcggagtccgggtccgaccgcttccactatgcgtaccagcgcgctggtagctccacagcatcggcgctgaggctgcgcatgaggggcgcgatgtccaaccgtaacatcacgctgtcagtcagcgcgcacaccaacctccttgccggcaacgaggaagggaacggtgaagtggaaatagtggctggcagcagtgaggaggatgaggcaaaggagtggagacggcgtacatcctccttgtcgggtgccatgcgagggtcgccgtcgcaggctgcgcagcaggtgtcgccccagcagcaatataggcggtggtggctgtgcgggcccaggcactggcccaggcaagccaaagaggtcgggctgcaggctgtagctgccgccgagctgctcctggcgcttctggttccagtcgccaactcatcagacagtcctgtggagaacaaacggactgctaggagcaagccaaaggctaaccagaaggataccaatgcaaatattcatccccatgttaacgcccccaatcaagttaatgctccaaatgcttatcaagcaacaccgcaggtgaaccaaatgacacttatgaatgggaacgttgtttatggacctcatctcccacattctgaagacgtcatctatggacctcatcttccacatggatactcagctgaaggaagcagcttcttttggaacacaagctccggcgagaagatctggcaggaggccatggccacaggcggcagcgattcagccttcttccccaactacctcctccccgagaacgccgtcgtgctactccacgtgcgccccacctccgtcctctacagcgtcgactggggctccatcgcgacagtagtggttcctttcctgggttctatatttgttttgtcagagttgctcctctcggcgtgcggcggggtctggcccacctcgctagccccccgtgctgcgaccttctccgaggacgactctgagggccgcgacggcctgctctggtggcgcgacctcacgcgctgccacaccggcgacgtcgccgttgcccaggccaaccaggtgctcttggaccttttctcataa

SEQ ID NO: 23088 - DNA, 768 bp, Zea mays
  Peptide Sequence Number=SeqID_66463
atgcggagagtgggccgtttcgcgtcccgtcaagccgcccacgacgagaagcgccatgatgaaccccgcgtttttaccacgccgccggaactgcttcacgccaggcaactccgcacgggtccatccctggagaccgcgctgcgccccggcgagcaccgcctatgggcaactccgcacgggtccgtccctggagaccgcgctccgattcggcaagcaccgcctatgggcaactccgcacgggtccgtccctggagaccacgccccgccccggcaagcaccgcctatgggcaactccatacgggtccgtccctagagaccacgctccgctccggcgagcaccgcccatgggaaacccacatgggtccgcccctggagaccacgtcccactccggcgagcgccgcccctttgcaactccatgtgggtccgtccccggagattatgctccgctccggcggacaacccaaaggaccaaagttttgctaggaaccaaagtaaacccccaagaaatcctcacggattactcgggggctcgggggctacatcatactgatgcgcttggacgcaccaagggctttgatcccgagaaagcctccgcccgactccaagaagtcgcacgaaggctcgggggctgctgtcgggtacctaggaacggggtacccgaaggtgaggcctgtgacccctttttggcccacttgccgagcaagtccgcgagggacctccgcatcggggtctctacagtgacccgtactctagaaggggacggggca

SEQ ID NO: 23089 - DNA, 450 bp, Zea mays
  Peptide Sequence Number=SeqID_66464
atggccggctattcagcgttcaccgggggtgagtctttcgctcccagaagcaagatcaccttcggctctctcgacttcctcgccgagaagaccggagagctccgtctcgtcagccctagcatggctagtgccactggcccggggcccaggcattccaccaaaaccaaggcggagaagcagcgcctcagaaggcgcgccaccgctcaaaagcggcgcctcaacaaactcgccgctgccgctaggcagcaagcggaagtcatccaccatcgactatggtggccgtcgtcggtcgccggcctgcatccgtcctcgacctcctcgaggacggctcgagccacactgtcagactccgacgaggcgcaagaaagggcctgcagcgcctccgcccgagcctccgatcgcacaagaaggcgctgggagagcgaaccaagcggacaaggaccggcgtga

SEQ ID NO: 23090 - DNA, 516 bp, Zea mays
  Peptide Sequence Number=SeqID_66465
atgccgtccctgctcacctcaccttcgtcggccgtccttggacgccgtgctcggcgcccgagctccctacgccggccaccatccttcccatggcaggagctccgatcggcccctgctgaccttggcactcggcgtggctccaagcagcgccttctcccccaggaccggctcaccgtcagccgcgagctcctctccctcacgtcccctacagacaagcaggttcgaccgtcgcccaaccccctctccagcgcgcgcatggactcctccctgctcacgccggcctgtgcagtgtcgccggtgagcagcagccacagcaactccgcgctccgccggcttgcggttttgtcaagcccagtagacagcagcaaccccgatgtcttcacgtcgtgcgctccaccccgatttgcgcagcccctgcgcgacgtcgtccacccggtgaggcatcccactgtccccctccattgcgcattctttgtgctcgatgaaattgccaaattagtaaactcgggtgattaa

SEQ ID NO: 23091 - DNA, 165 bp, Zea mays
  Peptide Sequence Number=SeqID_66466
atggctatcctcgtccgcttcgtaggggttagatccaggcacaggcataccggatccaccggcgctggtggcggcattgtctcgcgcaagcgcgagaagctcttcccgccccagctggccaccacttggggtcaccacggagcatcgtcgccggcggggggctag

SEQ ID NO: 23092 - DNA, 462 bp, Zea mays
  Peptide Sequence Number=SeqID_66467
atggcgggaaagaaggacggcaagggcaagcgcggcaagagcagcgagtggaagcgccctccgaccctgccgtcggaggacttcggagactccaagttctcggaggaaatactttcctccgaggacgagaagtctctgccaccccctcctcggtcgtcctcgtccgaggactctatgggtctctcgcatggcgagagggcctacatccggtccgttgaacgggccggattggagggctccgatgactcggacgacggctccgaggaaagcttcgaggaggaggaccaagacgacgacgacgacagcaagggcggcggcggcgaggacggcgacaaaggtgacggtggcgagggtggcgacggcaatggtggcagcagcaagggaagcaacagcggcgggggcggcagcgacgacgacaagggcaagggcagcaatggcggtggcaaggcgccaccagcttag

SEQ ID NO: 23093 - DNA, 102 bp, Zea mays
  Peptide Sequence Number=SeqID_66468
atgacgactgacaggccgcttgagctactccacatggatctattcgacccgattgcttacataagcatcggcgggagaaaatcacaaacccagagaccttaa

SEQ ID NO: 23094 - DNA, 594 bp, Zea mays
  Peptide Sequence Number=SeqID_66469
atggctcgccgcaggctcactgcccataagtctacgggaggacgcgttcctcgtcaccagctggcagagcgtgtttcccgccgccacagcacctttctgtcagagtacggcatgcctaccttgttgtggcgcactctcttcgctctgggatatccagagggaaaggagccgcgttacttctgggatcgggagcctgcacctgatggagaaggtatctgggtgacagcagtggtaaagcctagaggtgatgacccagcttggggtggctggcactttggatcgtcaggccgcacgcccatggaaggagctgggaaagcagcatatctgatactccgggacttgatggacaacttccctgaagagcttgctattgccatgcctgggatctttcctagggatgatccttccaactctaagtgggagcagccggaaggtagtgcactagcaggaggtgctagtgagcagcagcacagtgacacagcagctatgagtgctatgtttgcggttatgcagctttatgaccgctctgagcgcaatttggggatggtcacaagctctcttgctgtggctgatagtcgcctagagggggggtga

SEQ ID NO: 23095 - DNA, 285 bp, Zea mays
  Peptide Sequence Number=SeqID_66470
atggatacggaggtggtcccagcactggcggtggtggacgtgcagttctgtgcggcgggcacgaccacactggctgaggccaaagtgttgagcatgtccggcagcgagggcacaacgggcatgatggaggtggatgtatctgctcgacgtgtgaaccaccgcctcaccgagaaggagatcgctgtcgtcctctcctctgcctccacgacctccatcgagagaagtgttgccatcgtcgaccgcctcacctccctcatatctcacttccatgacctcaagagctga

SEQ ID NO: 23096 - DNA, 171 bp, Zea mays
  Peptide Sequence Number=SeqID_66471
atgggaggggggatggtgttgctggcggtaatggtggtgggtgcgctgcaaagggggtgtggggcggtggtggtgcacatggaggcgggcacacgtgcgggggcacggcttattccaggcttcaagggtaagcttcccggtatcttcttgggcaaggtgcttttctcttga

SEQ ID NO: 23097 - DNA, 1488 bp, Zea mays
  Peptide Sequence Number=SeqID_66472
atggtggatgtggaggaggtcgggaacaagatgcaatcgcagatgcgcctgcacgcggagccggatgacgccgccgccgacctccccctcccggcgctcttcgacagggcgtcgcggcttcacgccctggcctccagctccgccctcgaccaggtgcctctccgtctcccatatcctggcaaccgggatggcctcgcccttctcccgctcaccaagagacagagatcgggcgagcggtgcttacgcgcttgttttttttttcctttccctgccgcgcaggatgggatccgcaccggggttgagctgctgcggcgctgcgacgagatggtcggcaggctcggtcttttctcccccaacgagaccaaggacgacgtctccaccgcaaacctcaagtacctactcgtcccatattaccttgcggaaatgaccgagaagatggcgcaggaggatcggatcccggttcttaaggcgtcgcaggaccatttgaaggagttcattgctctatgcgaagtactagagcttattccagaggatgagctagaattgtctaggcagaagcagtctgatactatggcaaacagaagagcacagaaggttgcccggttcaaacgtcaaaaggctgcagaaacaaagctccaagagatcagagagagaaaagaaaggcgtggacgctcattgagagcaactgctttgtctgccccagttgaagctggagaggaagatgacctggaggatgacggggaggaagaaagggaggttcttagacaactacaggctgtcggctacataccctgcaatgcttcttttagtgcataccaagcccataaggatcttttgttctctttggcttggttagctaccatctcattggctatctgcaaggcttttgatcttctcgacatgttaaagaaggaagaagaaatgcttctagctgtaaaggaaaggaaggcaaaggacgggaatgcatttgctcgtgaaatgctcgacgaacggacaaagaaggctgaagcatggcaccacaaagctgccagtcgtgtggcgtattccaaaccagccgatccgatcacctgtgcaacatttgctcaggatgtcattgaagggagagcgagcgtttcacaggcccacgagcacaaacaccagcccctgatatttggacctgcaagccttgttggcggcggtctgaccagtgaaagggaaagaatggcagcgcaagtttttcagcccagttacaggatgccaacaatgagcatagaagaggctggcttgcgcgagatgaagatgatggagaggtggcaagagaggaccgccgagatgatgagagaagcaaactccgcgtggcacaagggcggcgacagcagcagcagctcgatgccgcaaggggagggcggggacgaggatgccgaggaggccaaggcacgagcgtgggacgactggaaggacgacaaccctcgcggcgctggcaacaagaagctcacgccctgtggctag

SEQ ID NO: 23098 - DNA, 1083 bp, Zea mays
  Peptide Sequence Number=SeqID_66473
cctcgaaccgggtccgccgcgcgccgcaccttcttcgagctctgcccgttccccagggccgccgtcgccgtcgccaaccgcgccatccttgaggccatggagaacgaaaaggttctgggctctgtgctggtgctcctgcacgacttcagccgtcgcccaggcgggccgccgcacctgcgcctcaccatcgtccacgacgaccgggacctcctcgccgccatatcggcgcggctgaccgaggaggccgaggagctggacgtgccattccaggtgcaccgcgtcgtgggcaagatcgaggcgctggaccccagcgacctgcacggcgtgctcaggctccggtccggcgaggcgcgcgcggtcgcgtgcacgctgcagctgcaccgcctgctcgcggtggccgacgacgacgaccacccggcgggcggcggcgccaccctcagcgccggccaccgctccagccggacggcgagcgtcgccgtctcgcggctgcagcggatggcgtccacgtcgtgcccgccgagcgacgtcgacgacagcggcagccccgccacgccgctgggcttcgtctccccgccgccgtccacgccaccgccgccgcagcagcagcgccagacgccgccggcgctggcgagcttcctggcggcggtggcgcgcgcgctggcgcccgcggtggtggtggtcacggagcaggaggccggccacggcggcgtctccttccgcgagcgcttcggcgaggcgctggggtactacgccgccgtgtacgactgcctggacgcggccgccgaggcgtaccgcaggcccgccgccgagcgggcggaggtggagcgcgcggtgctgggcgaggagatccgggacgtgctgctgcgggccggcgcgcatggagctgggcgggttcaggagcgtggcgctgagctacggcgcgatgagggcggggaacgacgtgctggacaggtgcggcctcagcgggtgcgcggcgacggagagcagggagcagggcggctgcctgctcttgtgctggagctcgtggccactctactcggtgtcggcgtggcggccggacgcatcaggctcgtcgggagctga

SEQ ID NO: 23099 - DNA, 1470 bp, Zea mays
  Peptide Sequence Number=SeqID_66474
atggcggacggcctggtgcgccgcctcatcggcagcttcaccggcaggggcatcagcggcgcgctcatcgactcgtgcggcgactacttcgaccgccagtccgtccgcgcggcccgctgcgccttctttaagctcctgcccgcgctcagggtggccttcgtcgccatcaaccgagccatcctagacgccatggagaacgaaaagttcgtgcacgtaatcgacctgtccggtccggcggctcacccctggcaatggctcaagctcatgcgcgccttccacggccgcccgggcggggcgccgcagctccgtatcaccatggtccacgacgacgaggccttcctggcccacacggcggcgctgctccgcagggaagccgaggcgctggacatggcgttctcgttccaccccgtcctgggccggctcgagaccctggacctcggcgacctgcaccacgccctcgccatgcggtccggcgacgcgcgcgccttcagctgcgccctccagatgcaccgcctcctcgcggttgacgacaccgacacccagcagcagctggccgccgcggctgttggaaccggaccgagtgttggcccaagagcggcgtcgtcgtgctcatgctaccctccgggcgacgtcgcgtgctactactgccccccggagaccgccaagacgagcctccccgaccccagcccgacgacgccgttcgctgcacaggcgtcgtcgtcgtcgtcgccgcacccgcagtggaccgccgtcccgcggccggcgctgctgccacctttggcgggcttcctgtcggcggcgcgcgcggcgtcgcccaaggtggtgtgcgtgatggagcaagacgccggcgacaacgtggccggcgggctcgcggcgcggttcgaggaggcgctgcagcactacgcggcggtgttcgaggcccctggacgacgcggcgggttctgcgggaaaagagcgggcggcggtggagcgcgtcctgctctgggaggaggtccgggacgtgctggcgcgggacgggcccgagcggcgcgagcggcacgagcggctgcaccagtgggccgcgcgcatggccggcgccgggttcgccggcgtgccgctcagctacgtggccaagatggaggcggacgcggcgctgcgcaggtgcgggctgcgggggtacgagaccagaggtgtcggaggttgcctcctcctgtgccgccgcgggcgccctctctactcggtctccgcgtggcggccgtggccttcccggggctctgcctctgcttcttcttctgggagtgggagcaggagcagcaggctgccacagctcgtggcggcgccggtgcagatgccgtggccgctcctactgcctcctccggtttaccacactcactgactcacacgactcagtatatatatactcgcaagaacagacatctacaccgaatccactctaacaatccatctctctggacatgtagtagttactag

SEQ ID NO: 23100 - DNA, 723 bp, Zea mays
  Peptide Sequence Number=SeqID_66475
atggctagaggtgaacgaaaggtacaagatgatattgatattactaatgatagtgatagtgatagtgatgaggaatttgcttcaccttcctatgatggactagctgacttgcttaaagaatacattcaaatcattaggaagtcaaaagctaaatgtgataagttgaaaaatgaaaatgaatctttaaatgccaaatatgacatagttatgaaagctagtgatgaaatgaaagaagagaacaaaactatgtcatccactgtaaatgatctcacatcctccctaaaagacgctaaggataaatgtgataagttaaatgaagctaatagggagttgaaagatagactagtgaaaatcaaggaagactataataagattaaatttgatcatgataatcttcttgttgaaaatgaacttttatcttgcaatacacatgaggctattaaccatgttgttaagattgatgtagcaacctcatgtgatgatttgagtcaaggagagcaaactagtatacatgatgaattgaccgaaaaagttgaagtcttgactttagacaaccaaaaattgaagagatacttgactgatgcaactactataggaaaggttgctattgagaacaatgatttcaacaatgagttggcagttgtcggtgttttgggtccgaccgcacacccggggttgcccctcaaggtgtttttaggagtaggacggtgtcgacgactgtag

SEQ ID NO: 23101 - DNA, 450 bp, Zea mays
  Peptide Sequence Number=SeqID_66476
atgggcaagaacaacaagcgcaagcgtgagccaactcctccatcggaggattttggtgactcggagtactcagaggaggagttctcctctgagtctgaggggtctccggctcccattcccatgcgtgagtcgtctgacgactcagacgactcccaggggctcgcggcggaggtctggacgtacatccgggccgtcgagcgctccgggctcgagggctcgaatgagtcggagtactcctcagatgaggaggactcggacggcggcggcgaggacgaggacggcgacaacgacgacgacgaaggcggtgacgacggtgacggtgatggcagcagcaagggcggcggcggcggcagcaaggacggtggcggcggcggcaggggcagcaaccggggcggcagcagcaggggcaacaaccatggcggctgttggggacttgttctcaaatgctag

SEQ ID NO: 23102 - DNA, 2475 bp, Zea mays
  Peptide Sequence Number=SeqID_66477
atgccttttcacggaggaagggtggtgcgaagtcctgccttcgcactgactttgcgaaaccgtgacccggccgcctttgtgcgtgatgcggaggacttggcggtgcggctcgtgggacgttacgtgccgaggacggaaggccagcgcagctttgatatccgtgggtcaaatgactgtttgaacagggtcttcgaattaaatcaattgccgtacgacggctatcctggtcaagacgaagcggaccgccgtgggaagaaaccggcagtggagactggaggcgaccctgcgctggcggccgccccctcctcaaaaaagagaaaattaggtactgcgatgggaggacttggggtgtctgatagttttgctagagagttaatgagaacgtgtgcggccccgggggaaaggatgtcttcgcccgagctccgggagtcttcggctcggatgatgagggttaccgggggttgctggcctagaaatgttcctatcccctgcgcggctgaggaggactgttttatatctcgtatggttcatcagtggagagtttttccttacgggcgaaatatcggtgctgttgtgtgggcagtgatggacaaggatcgccaaggggcggcgcagaaacgccaggcgacggtcaggattcacgaagctcggccgaaaagcggagtggcggaggcttcgaaggcggcccgagcgctaccgttggcgggcaaacgtgttgccgacttcggcactgatattactgtggacgactatcttggtgggccggacgagggccagcttgctatagttgcgcctggctcggcgatcgcgacggccgccatagtgccgaaggcgaggggcgaggcgcttggcgccggaggcgaggtgtcggccctcgcgttggtcagggacgaggcgggcgtggcgacccgccggctgaagggagtgacggaggcgctgagtcaggcgacgaaggcgctgagtcaggtggctgacttcaccagccgtactgcgtcgggggcccttacggcagctttgtctgccgaagtcgagagacttcggacgcaacatgcagacgctgtccgtgaaaaatcggcctccgacagcaagtgccgtaaactggcggacagggtggccgccctggagaaggagaaggctgacctccggcgccagctggcgggggagaggagggaggccaacgaagccatcgccaaagagcaggctgcgcaggcggaggccaagctggcgcgggcggaaggcaatattgccaaggagctcgccggacatctgcaggagcggcttactgccctggagagccgcgcgaagggggccgaggccgcgattcgagcggaggccgaacggacgcgcacacagcttatggctacatatcgcgagctgggtgcgcggaccggtgacttcgaggtgccggagcgagagcccgggcttcgctgtctggaatgggtgcaggaggagctgcaggagctccccactgtcttggggttaatgtcgttcacctccctggtcacctgcgagggggcgatgaacgcactctctcgcgaagggtgtcggcactttgaggccttcgaccaggcagatgaagattttgggcaagatatctataaggtcgaagaccccgtggtgaaggaatccgccggggccctttatgatcggatgtggggtctgtacggtcgtgaggtggtcagggagcgggccgaggctgcgagggctcaggcggagcgtggcgagcgggtggacgacttcggggcactgaacagcgcgctgcctggcctggagccgacccctgcggaggccgcgaccggagtcgccctggaaccaaccccggagactacggaagacgcgccaggcgcccccacatctgctgcggccggcgaagacctgcccccaaaggtggccgaaggcacgcctgatgcccccgcagctgctgtgtcgagcgctgaagattccgcggcggtggtggcggaagcagcggcggagccaacggcggaggctcccgcaggtggcgtagttcaagattttgggcctgcgcacgcaaccgctactgctgagtttttggcggcttcgaccgcggaaggtgggaatgaatatggtgggtctgtatctgagttttttgattttactgactctgggagctcggttgagtggactgaggagtcgtcggaggaggacttggactattttgcggccttggacgtggctgcggcggaggcttcgccacacgccgcggacgcgccagacgtgccaggtcctagcaccgggcgccaacaacgaagggcggttgcaaagcgtagggttagtgcggaggaaggggctcggcttcgcgtgagtagggctggtcggcaggagctgctgtctttgccggccgccgcgggtgcaggggaaggggaactgcgaagtctgtttgcgggtgaggagcttaggataatgttatttaattatagggagatgggaattattcctaaggtggagccgatgtag

SEQ ID NO: 23103 - DNA, 885 bp, Zea mays
  Peptide Sequence Number=SeqID_66478
atggacgagggttgcactcaatccctttcaagtgatccaatgatcaacttgaataccacgactttctttcttatagtcttcttcccgtttgcgaggaatctccacaagttggagcctctcgcccttacaagattgatcacaaagaacgcacaagagggtcccttttatagccccaaggcagctagaagtcgttcgaggccaacttggaaggccaaacttgccttctatcgggtgccttactacccaaatatggtccaggattcaaaaaggaggaaaaagaagaagatgacgatgaagcgtagcaagattctaaagaaatggtctaaggctacactttctcatacattagaagagattttgcaggctgcacccgaggttgtgacgctgtctgctatggaggaggcttctttgattgttgcagctttggagactctagaagcaaaggccaaagaggttactgttccgaaggttcaaggggttgctgctttggaccctctttcaaaaagcgaagcaaaagaatatgaggagcgaatagctccggtcatgagttcatttttttctgattatgacgaagatgaagacggcaaggaagaagaccccgccacaactaccttagcgatgaaggatgctgcactgcatgttgtggttgtggcgaggctagagagcccaaaggctgggctagcacttccagtcaaaacaccttcgacgatcattgtgaccgaagagaatacttgttctacaaatcctgttatggtgaaggacaagggaaaagggcccacaaaaactgaagaaggcaaaaagctattgaggatgacacgctgcttggcaaagggccttttgatcaagagcttggggccgaaaatacagggttcatcaagcagctag

SEQ ID NO: 23104 - DNA, 648 bp, Zea mays
  Peptide Sequence Number=SeqID_66479
atgaacaggtccctcaagaagaggcgtgtgatcaagggggagcacaagatgtccaagatgttgaagaagaagcaccacgggcccctccaactcaagttcggtcgacgattcaaaggaatcatcccgttgtcacacccgggttttgggacaccaagacccgggcgcgaacataatcaccagggaatccctcgcatgaccgccatcgcagcaaaatcatcccaagggcctccctacactgaccactcccctactgcccttgcccctttcgggtaccaggatgattcttcagatcctcgtgacctcactgctaatcgtagcaatacaaacaaacatggtggtgcggcggtggactccgcacgattggttgccgtggagctcggatttgttgcgaagttcacggcatgggagaaacagttgacgaggcaggaccaccatgcttccgctgcgtgccgcacggggttctgttgcgcccatctcggagaagaggttgaagagggcgctgctggtctggaccaccaggcagtgtcacacccgaagcacgcgggggaagatggaagagctgaccacgcacgcgagaaggacgagagagctaatcgcgcgaggacgatggattccgttgtaacagccccgatccgagctgggagatga

SEQ ID NO: 23105 - DNA, 822 bp, Zea mays
  Peptide Sequence Number=SeqID_66480
atgacgaggatcctcctcgccccttcaggcaggtcaagggaaagaccgtgtatttggagcagcaggaaggccgcaagaagcggcgtatggacagagcagcccgagcagcggcagccgctgagcaggcagagcaaggagctcagttgcagattccttctgatcagattgcctaccgagttcgtcgtcacgcctctcgtccttgctcctccgctcctaccactccctccactgccaccactccaccacccacttcgcccgctcccgtcactcctgcgccatccaccacctcagccatacccaccacctccactactccagcttccactgctccttccgctcccctttctgctccacctatcccacctgctcgcttccgggagcgtgatgagactgaggtgcgaccacttgctgcggatcccaggttgttttgatcttcagcgtgctatagcgtcacgagtacgtcggttcagatacgtacccgtggagtcttggttacctgcacagagagaccctgcaacggcagatcctttcagcaccaggattcaggagtctttctacagagcacagttgtcggctcagattgctctacgagcgcaccggcttttggatctccctgccttcctgctagttgtcggtgctgactctaaggttcacctctcctatctgcctggacttctcactcttttgactaccagcggcagatatgttgaggaatgggtccgagttttctatgctactgtatggatcgaccctgatcaccactggatgagattccgatttgagcgagaggatgttaccattcatgacagtcagattcgttag

SEQ ID NO: 23106 - DNA, 771 bp, Zea mays
  Peptide Sequence Number=SeqID_66481
atgagctcggtagtataccagttttacactctgcagaggtggtaccctttacccacaagtcatgttacccatctgccaagggatcgcaacttcccatacacctctaccgaggaggcgaggcaggggttcttgcctaaccgccatcgcagcaaaatcaaccaaggacctccctacactgaccactcccctactgcccttgcccctttcggggcggcggcgcgcgcacaccgcgcggcacagggcactccggtgaacccccaccggcgattccgtgcgccaatcgtcaatccgggcctcgcaggacgtatagtagagcataacgaacatgggagagggtcacataccaatacggcggcaacacagccaccggttcacgcgctcgagcggctcctccgcgtggtcgtcgctccggcgagcaattcacgccgtgcaaaggactctcaggcgccaatccctcctccgactggatccacgcacctggccgaagcaccgcggaggatacggatgacggggtctgcggcgcggctcagtcttatattcccccgagtccggtcgattccgcaccggcccgccgtgatcgtgcccgcaagctccgccgaggtctccgtgaagccgttgaggatgggtctagcgagtgggggccatcggcagcgagttgaatccacgaaacgcagtcaacacggcggagttagcgcgcggcatgagactgacgtgtcgggtccactagtcggcgcagcaactctgctgggccgcgcggaggcaggggtttaa

SEQ ID NO: 23107 - DNA, 296 bp, Zea mays
  Peptide Sequence Number=SeqID_66482
atgcgcctcatcctgtggtacctgttcttgacctgtggagggtgtgagacagcaagagtgagctcacatacgttcatcgctcaacaagttgtggggaataatgtgcatgaactcgccaaagaggtggtaccctttaccccacaagtcatgttacccatctgccaaagggatcgcgacttcccatacacctctaccgaggaggcgaggcaggggttcttgcctgactgccatcgcagcaaaatcaaccaaggacctccctacactgaccactcccctactgcccttgcccctttcgg

SEQ ID NO: 23108 - DNA, 471 bp, Zea mays
  Peptide Sequence Number=SeqID_66483
atgggtcggcgcgagacggagcgtgaaggggggaggcagccggagggagacgggcgtgagaggtggaatcccgcggccttcgtgttcgtctcgcgcccaggtcggcctgagtcagcttggggtagggtaatgatggcgcctcctgttgatgtggtcggtccgtgccctaggttgggcgatgtggaggctcctccgaggtcgaggtcgagtctgtcttccgaggccgaggtcgagtccgagcccccggatcgggcgaggcggagactgtcggctgaggccagggctgagtccgagccctggggtcaggcgaagcggagttcgtcgttcttcggggctgagcccgagtccgagccctggggtcgggcggagcggagttcgtcgtcttctggggctgagcccgagtccgagccctggggtcgggcggagcggagttcgtcgtcttccgaggctgagcccgagtccgagccctag

SEQ ID NO: 23109 - DNA, 900 bp, Zea mays
  Peptide Sequence Number=SeqID_66484
atggccactgacaggatcaagtaccacaatctcactcgatgtgaccgcacttgtacccaccataaccggaatgggagaccacgtctcaggtcacgtgaggggcaaagtctgcgggcactaggcttaccgatttacaatatttctcgtatccgcggcatagattacggcggcgaggcttaccggcggcagaagagctccggcggggtggtcagtgacgtccgggaggtcacgacggtcacgtcggtgtgcgggtcggcgtcggaggtggtcggagctaccctggccacgaacacaggcggcgggggtcgtcggcgactcctgttccggccaaaccacgacggaagctatctgagggcttggatcgaacggaggaggaagggaaaggggctggccacggtggttgctctcgggcgggtcgcggggaggtcgctggagctaagggctgactcgggaagatcagccgaggtacggaggaggcaacggggaaggcagctgagcactggggcgggctttatagccgtggcgcgggcgtggtcatgggcggccgcgggcgcgcgggggttcgcgcacaggcgtgctctgagcgcgctcccggatgtcagctcacgtcgaacacgtggaagctcgcttctgccatggttcaacggcggatttgagcaccatagcatgatgcttcaagtgggatgggatgttttcaaaaataaaactggatggtggatccatcatggtcgtgatgggttaaacatcggaaaagatgtacctctgacagactattaccagaataagacaacacgcaatgggagtggagagatggcgagagtagcatgtaccctccgtggcaagaggctggacggtggtgtatctgtgctctcagttggcgtgaacctgatctggtcttaa

SEQ ID NO: 23110 - DNA, 972 bp, Zea mays
  Peptide Sequence Number=SeqID_66485
atggggacccctctggcggattatttgccaagtgctgtcaggcagacactcggcaaaggtaactcctttgccgagtgtcgcctgggacactcggcaaagactctgtctccgtcacccgtcgctgtctccaatggggtcattactgacgctgctgctctcctcatgccttggagccagctgatgccgagggtagctccgaccacctccgacgccgacccgcacaccgacgtgaccgtcgtgacctcccggacgtcactgaccaccccgccggagctcttctgccgccggaatcctgttgaggtgaatactagctggcgctctttggactccgagtcttttggataccgagctgaggacacgatcgaggcgatcgctctgcatggattgaccactttctgcggattccatcctttggagctggctacccaccccattggcttgttccccgccaaaagggaggacgacccaatgtggaaggatagggtggagcatgccaaggatatctgggccatctacccaggacagactacgcacttgaccgtacggtgcatgaatgctctgtaccgtctacaagtgatgcgcggtgaggcgatgtcccatctgatggcgctattggaggcgacaaagattacgttggataacagagaggagcttgtggttgatttgtccactgaaatggtggagaaggacttgcaggtggagcagctatccactgatatccaagagttggaggaactagtgggcaccagggagaacaccattgaggttctcgaggatcagctcattaacactcagcagcagcttgctgaggctaacgagcacctggatatgcatcaccaagagatccaggacctggaggccaacgaggacgtcgacatcgagggaggagatgagcctgcctccagtgtggacactgctggctcggggagaccaccttcccccgagtcgagtgttgcctcgttcgctcactag

SEQ ID NO: 23111 - DNA, 74 bp, Zea mays
  Peptide Sequence Number=SeqID_66486
atggccggcgaggctggggcgccaaggccgggccgccacggccagggcaaggcgggcgccgtggacgtggcatg

SEQ ID NO: 23112 - DNA, 129 bp, Zea mays
  Peptide Sequence Number=SeqID_66487
atggcgggcggaattaagctcgccggagctaaggaatggtggctggccggtgaggagatatggagcaaggaaacctggtctgtctccctgcccaaacccgaggcaaatccaaggttttgtcatgtctag

SEQ ID NO: 23113 - DNA, 429 bp, Zea mays
  Peptide Sequence Number=SeqID_66488
atggcgggcggaattaagctcgctggagctaaggaatggtggctggccggtgaggagatacggagccaggaaacctggtctgtctccctgccaaacccgaggcaaattcaaggttttgtcatgtctagggctcgcgtcccaatgccatcttctggcacacgacagagggactataaccttgctgacggagagtacgtcctcgtgccggagcaacgagctgctcaggaggtagccccggacccagcaccagagcctgcaccagaggacctgcctgccactgctttggaaggcaagccccggaatcctgttgaggtgaatactagttctctggaggacatggttgctggagtgacttggccgtccatcttgccaccgggttggactgtcgagtgggaccctacctcggctgaggaggagcatgaggagtga

SEQ ID NO: 23114 - DNA, 795 bp, Zea mays
  Peptide Sequence Number=SeqID_66489
atggaagcaaggagacgtcagcaaggtcccagcagccgcgacagttgtgcttctacagggctcaagcgctcctccgacggccacgataccgcaagggtgcctggtgtggctcagccagcgaccagtgttataatggtgcacgacttcgtctcctttcctgacttcgaagtcagggaaaaggaccctgatgagatggtgttgtgtcgtgcaagggtgatgagcggtggtagagatttagtcgaagatagtgcgacaaaggatgccgttgaagagcgcttttttgggaaagatgttatggttgtaagccccgccttcgctgttgaacttggtggttgtgacgggccagcctttgtgagcgaggtcgaggcggaggctgtgaatatttttggaaagtattctgcgaagactcagatgacgaagagcttggagatccatgatggcaacattcacttgaccagagtcttcgaaatgaatgagctagggtataggagataccccgaggatgtggagcggggagaagaggaggattctattgttactgtgaaggagaagaaagcaaaggggtcaaaatatccagatgaagcgaaggctgcgtttgaggactttgctagtttgagaaccatggcaactgattttgctgaggaaaaagtggagactacaggtgaatctacgtcgcccgagtctttactggcagcgcacgcgatgtcggccacagttaccggggtggtcatggagaaggaccagaagtcgaaattcaagaagccaaaggaagttattcatatcatggattcgtga

SEQ ID NO: 23115 - DNA, 195 bp, Zea mays
  Peptide Sequence Number=SeqID_66490
atggatgttttgatgattacgaaccttggagagaaccagcaaggacttgggaaaggcataggtgttgaggaggaggagcaagggcgccacaacaggaaggagatcaagcaggaattagccctcgtggtgaggtcaatcacgcagtgcacggttgataaccagaggagaagtggtgctacgattgcgaggttctag

SEQ ID NO: 23116 - DNA, 801 bp, Zea mays
  Peptide Sequence Number=SeqID_66491
atggcgagagtagcatgtacacttcgtggcaagaggctagacggtggtgtatctgtgctctcggtgaggaagcagcaaacttttgttgcttttgttctaaggtggtgccaaaagaggaaactcaggaatgaagcctcgggaggatgttgtccaccttttaagaacactttactgttaagcgggaggggtttttgcctcccaagttttcccccttatggagatatgccgccacgcacgaggaaaactccgcgtaagtccaccagacctatcggcgtacctcagcatcagttggctccaaggcatgaggagagcagcagcggcagtaatgaccctattggagacctagaagcccaagtggaacagattcaaacggagatatgtcacaaaaacagggtgtgggtagaagatggtcagcgtataaatgagttaagagccgacgtcagacatctgcaagacgagcttgctgaacgggatttggcaatcgattgggttgtcaattcacgttcacttgcttgggaccgggaagccaaagcacatgctcgtgtggcagagcttagcacgaccattgacaactcgcagacgtacctgccgaccctgttggaatgggagccggaccttctggaacagcagatgccatccaggactcgtgcacatgacggtgctggtacttcccgtggtcgggaagacacgcccaatccaccgcctgtaccgccaatgttggccgaggctatcgctgccttggtcaatacgaccaccgacaacacacgctttctacgtgaaatggcgggaaatcaattttag

SEQ ID NO: 23117 - DNA, 183 bp, Zea mays
  Peptide Sequence Number=SeqID_66492
atggcgatgcacctggctttgttccttaaagccgggtgtgacaggcaggaagacgaggtgcctgctgattctgcctctggaactgacctcctcctgactgactgttctggcgattctgatactggtgctgaggatactgtctttggaactactgctgctgaggtggacgctggttctgcctga

SEQ ID NO: 23118 - DNA, 2232 bp, Zea mays
  Peptide Sequence Number=SeqID_66493
atggctagtgggctacaggcctacccggcaagcggtatggtcggcggcggccctatgcgtagcggagcaatgcacatagaggttgaccagcgtgcgctccgccgggtccgctcctcgccgcacctacggcacgccgtcgcgtacgtatcttacggcagcgctgctgccacgtccgccgccgtggggctcgagcgcgcacaggatccaaaccgcctcatcgttgacctggctgcggcggggcgcgtgtgggacgcgcgcaagctgttcgacggaacgcccgagcgggacgtggtgtcctggacagcgctggtgtccgcgtacgcgcggcgggggatgctgcgcgacgcgcggtcgctgttcgaccgctccgacgcgcgccggaacgtggtgacctggacggcgctcctctcgggctacgcacgcgccggcctcgtcgacgaggccgaggtgctgttccagcggatgccccagaggaacgtcgtctcctggaacacgatgctggaggcttacgctgtggcgggaagggcgggtgatgcctgcgccctgttcgaccgcatgccagtcagggatgccggctcctggaacattctgctggccatgctagtgcggtcggggagcgtggataaggcgcgcgagctgtttggaagaatgccggagagggatgtaatggcttggacgacgatggttgacggcgttgcgcggagcggtaatgttgacgaggctcgattgttgtttgatagcatgccagagaggaatgtagtttcttggaatgccatgatatctgggtatacaagaaaccacaggcttgacgaggcactggatttgttcacgaagatgccccatagggatattgcttcttgcaacattatgatcactggttttatacaaaacaaagatttgaagagggcacggaagctctttgatgaaatgccagaaaggaatgttgtcacttggacgaccatgatgaatggttacttgaaaggcaagcagagcgagctgtcattggggttatttaggggtatgttaatgtcaggtatcagaccaaaccaagtgacatttttgggtgcacttgatgcatgcagcgatctggcgacactatgtgaagggaagcaggtgcatcaaatgatatgcaaaacagcatttcaggttgatacttttgtcggctctgccctgatgaatgtctatgcgaagtgtggtgaagttgggttggcaagaaagttgtttgatctttcaagggagaaggacttgatctcttggaatggaattattgcggcatatgcacaccatggtgttggcatagaagcaatccacttgtatgaaaagatgcaaggaaatggatataggcctaatgatgtcacctatgtggtgttgctctcagcatgtagccactctggtttggttgacgaagggcttaagatcttcgaatcaatggtaaatgatagatcaattgcagtgcgtgacgaacattatacttgtttgattgatctttgtagccgagcaggacgacttgatgatgccaaaagattaattcactatcttaagattaagcctgcatcaggttctgtctggagtgcccttctaggcgggtgtaatgcacatggaaatgagagcattggcaatttggcagctagaaatctcatacaagcagaacctgataacgctggaacctatactctcctatccaatatctatgcttcagctgcacgtgataagtctcacagtgaatctgatttaatctatggtttgctgcaaaatatccattacatgatgaggattgttggaactgtccccagtgaccttgtgcatgttgatgaggaattgatgatggccacactgccgagcagcaaaccaaccagcccacccgccggttggtcacgctcctccccgatcccgaattcccgatctccggccgacgccatggcagccccctccgcggccgtcataggggtgctcgtcctcctcgtcgtgggggcctcgggcgcgcgcctcccaggccgcggcagcaccacccggggagctgcgctgccgcgcgggggagcgccggccacggcggtgttcgcgctgggaagcttctggcggtcggaggcggcgttcgggtgcctccacggcgtgatccgcacctccgtcggctacgctggcggctccaagtccaaccccgagtaccgcaacctcgccgaccacgccgagtgcgtcaaggtgccgttcaactgttcaaatagcctcatgagtagt

SEQ ID NO: 23119 - DNA, 702 bp, Zea mays
  Peptide Sequence Number=SeqID_66494
atggcaagacagggtcgaaatctttttcaagctggactgactcttgtagctcctcagagggcggtggtgctggtgggagaccgggtgaccttcaagaatctggggatcttcagctctcctgggttgaactgggttggacgaagcgggttcttggattcgcacgactctacgttggttatgggttaccaagtaggcctccatcaacttctggacgtgctcatctttggcttgtttcagggcttcaacaacaatgacttcacgactttccaaggcagctacacgggcttgagttgtggtgagatccacatggagcttacgattgcgcttctatgcatcttctgctcgggcaatcatctgacggtggtgccgagcctagaaatcatattgggcatccagggtgagcagggtcctcaatgccttgcgggcgacgacttggcagttgtctttgaatctgtgcccagcagcagtgacactccattccacatggtgcagactggatccaacgtatacagtcacgacacacttctctgtgccatgctcaacaaattcacgaccatcatactctggttggctcctgattccgaggcggactgtgcatgctctcagcaacttggggaaaccatcttcattctggcaaaagctggtttggcagtgaacctccatctgacttctgagagaaggaaagggggaaagcatttttga

SEQ ID NO: 23120 - DNA, 375 bp, Zea mays
  Peptide Sequence Number=SeqID_66495
atggtactaaatccggtttatcaggtcaaaaacacaatttaccttatgccagtcgcggttaatcaccggttcgagacagtttaccatcggtttggcgcctggctcttagcagggcatcggtttggagtggttaatcagctggagaagctggtttatcggctcaacgaagcaatttaccggcagttggcatggttaaccaagggcacgaggaagaggcggccgcacgtaggcgaggctggtggtaaaccggtagcgctcaccggcaatttcggtaaacagtgcggtttactgccggttaccaccggttttgtaaagcttggacctgaggctaaggcttctgcatctgttgtatcagcaattcactccaataaatga

SEQ ID NO: 23121 - DNA, 96 bp, Zea mays
  Peptide Sequence Number=SeqID_66496
atgaagcttttcaacttggaagatgatggcaacctattcgatcaaaggaagtacctctttggttggcttacgaatgtagagggggaggccaagtag

SEQ ID NO: 23122 - DNA, 963 bp, Zea mays
  Peptide Sequence Number=SeqID_66497
atggagtatgggggtttaggcaacacaacctggaatcacttgagtatttggcatataatcctgcaacacttaggcttggcagctcttgcacctttagttacaagctatgatgcacggatacttcacaaaattcacgtacccgtgtcagataatgtatcatataccgatacttcgtggatactcccggatacgtatcaccgtattaggctccacacaggttatttgtttgacttagcgggaggtttaccagtaatagtggtgttctcttcagagtttaattctgtgaagttcactgctcgcctgcttgtcgaagcactccaaagtatatcagcacttgaagaggtctacactctacagagacatctcttttgccaattgaagcaggacatatcacacccttgctgccatttagaagctgatgttacgaacactggacaaactatttgctatcgtgtgattttgcaatggttgtttaagggctcatctgtcttgagcaatcagtacacatctaaagaggatgaggttctcgttacaagcacagggaattggatggatccatgggcatggatcccatataattccctggtcacaaaaccagccctaagtgtgcacccaacactgcactttgttgggaaaaaagcccaaagggtttactcaagccaattcaagaagttccgatgctcacgtgaaactccagaatcgctgccaaacggatggcaccgacagttggagctatcagctagctctgcagttaaattaggtggtccgcctgcaactgcaagtgccacaccgatagaggatatggttcttttccgagactgcggcaccgacgttctcgcggatcgagccttcgacatgggacgtgcctggagaacgacggcagtagggcactgcgactctgctagtctgccctctgcactgccccctttcacttttcgtgcaacatacctttgcttgctttga

SEQ ID NO: 23123 - DNA, 297 bp, Zea mays
  Peptide Sequence Number=SeqID_66498
atgtccggtgcaccagaggactccaacgcaaactcgtcaccttcgggaatttccggaggcgactccgctataattcaccggactgtccggtgtacaccggacagtgtccggtgcgccaaggaaggcaagagacaccaatcttgtggtggtccttgtgggaactttgtgttccaagtgattgagaagaaaaagctcaatcgatccgtggatcgtttgagagagggaagggttgaaagagacccggcctttgtggcctcctcaatggggagtaggtttgcgagaaccgaacctcagtaa

SEQ ID NO: 23124 - DNA, 693 bp, Zea mays
  Peptide Sequence Number=SeqID_66499
atgttcccgtgccgccccttggctccgccgcacctgccgcgtgccccttccctcgcgcggcttccactgtcgtcgctgcggccgccgtcgtcgtcgctgcgcgtggtgcggtgcatggcgaaggagcggcgggtacggatggtggcgaagcagatccagcgggagctcgccgacatgctcacccgcgaccccgtgctgcagcgcgccgtgctccccgaagccgcgctcggcgctgaccgctacctgtcgtcgctcaccaccatcgccgacgtcgagctctccaacgacctccaggtgtgcaaagtgtacgtgtccgtgtttggggacgagagggggaagaaggtggccatcgaggggctcaaggccaagaccaagtacgtcaggagccagataggcaggaggatgaagcttcgcctcacgccggagataaggttcatcgaggatgagtctatggagcgtggaagcaggatccttgctatacttgacaaactaaaggaggaaagggagcaacaagaaggaaaagatggagaggaagatgatgattcatatatatcagaagaagatgatggtgactgggatgcagatgagccagatgaggaggacatcatttacttcctagtgtcaggacctgtcagggcccaagggtgctgcggcaaggagcgcatgtcaaatgataagaagattagttgctag

SEQ ID NO: 23125 - DNA, 720 bp, Zea mays
  Peptide Sequence Number=SeqID_66500
atggcgcataaaagccaaagctacgcggccctcctcctgcagctccccacactgggttccatctctagcgcatgccccctctctgctcaaatccgacggccgtcgagcactacgcccgcggcgcgctcctcgatccccgagatatcttcttcctcgctaaccatcgccgcgagcatcaggggtgcgcgcataccgcccacgggtgactccctggcgtgtgggtcctacaccggcttcacactcacagtcgcgccctcgtgtcaccgccatatggaccccaccctgctagagtcgtcgtccagctcgattcgttgcaaccgaatgcgtggtggccgccaggaatcacggatcaaacatgacctggcgacctgcgcttcctacaacctcccgctccacattcatcgcaacagcaacttgcggatctcgcgcctacctcgatttcctctgcgcgggcatcggccatggcgcataaaagccaaagctacgcggccctcctcctgcagctcccccacgctgggttccatctctagcgcatgccccctctctgctcagatccgacggccgtcgagcactacgcccgcggcgcgctcctcgatccccgagatatcttcttcctcgctaaccatcgccgcgagcatcggggggtctgccgctggcgagtttcgtgcatgcgccgccatcgagggaaaaatcactccactgtcgattggccatcagtag

SEQ ID NO: 23126 - DNA, 519 bp, Zea mays
  Peptide Sequence Number=SeqID_66501
atgggggcgggtacctataatcctgacctccagcttttccttcccccaatttctattttctgctacaagatttgggccctcatcggtggtctgggggttgcccaggtgacctgccagccaccgcttgccatgagctatggctggcatggggtagacgaaacgaggggaggaataacgctgtcgtggtcctggatcctctgcgtgccgcctttgctgcgtgccgactgcgatgatgcggccgccatggcgcgtccgcgcctccgtctccgcctgctattccgcggacagcccatgagcaccgcttccagctttttagttggtggtcggggacgtttgtggcatcactggggagctcccatggccgcgtcgagggaaatctgctatctgggcaaatccaattgctcgccgaaattgagtttttgtgccgggactgccatatgccgtggccgagccttcagtcgcctccaccgctggtatgatcgggtcccagctatttgcctcttcctccacatcgcgtag

SEQ ID NO: 23127 - DNA, 537 bp, Zea mays
  Peptide Sequence Number=SeqID_66502
atgaagaaatggcaacaagagttggaggacaaggccaacaacatttcccttgccgaggagaacctcaaggagaagggtacatccctagacaggcgggagacggacctcgccgggcgggagaaggatctcgccttcagggaggagatgcttgaaaggtggggcatgttgctggccgagcacgagctcaaggtggaggagaaggagcggaagctagaggagcggatccgctggttcgaaccgacgcaggcagcgccgggtccccaggtgacgaaggccaccaagaaggccctggaagatctccaggcagaacaccgcgctggggtccagcggatagctgagtgggccggcgaggcgagcacggcgctggtgccactaaggataagtcctatcccagtgtcggagctgccagcgtcgatctttgacgccctttcggtgctggactccaccgctgaacgcctccgacgcctagaccagatcctcggcgcccgcctggaggcagagggcagcaggctctgtcggtggtggattatgtgctga

SEQ ID NO: 23128 - DNA, 926 bp, Zea mays
  Peptide Sequence Number=SeqID_66503
atgtcctttgcctccctcgtcacctgcgagggggccgtgaatgcgctgtcccgcgaggggtgcagtcactatgagggcttcgacggatccgatgaggacttcgggcgcgagatttttaaggtcgaagaccctatggtgaaggatgccgcgggggccctgtttgaccggatgtggggcccccacggtcgggaggcggttagggagcgggctgaccgagcaagggatcagatggcgcgtgctgaggacgtggaggacttcggacgcctgaacagcgcgctgcccggagcggaggtcaacccggtggtggccgaggctgaggtcgacccggcgccgctcccagaaaccggtgaaggttcccacgctgcccctgcgtctactgtatctggtggaggctcgtcgtcagccactgtgccgatggcggaggatcccccgaaggtggcgacggagccagcagcggaggttcaggattttgggcctacgcacgcaatcgctactgctaattttgtggcggcttcgaccgtggtcgctggaaatgaatcagatgagtctacgtctaagttttctgagtttgatgactctgggagttcgattgtgtggacgaaagagtcttcggatgaaggcttggattactttgcggccttggatgtggctgaggcggaggcttctccgtgtgttacggatgctgaagttttgcctggtccgagtgttgggcgtaggcgacgaagggcggtggcgaagcgtagagtgagtgaattggatggtggtcggcttcgtgtgggcagggctggtaggcgggaattgttgtcctcgccggttggggcgagcataggtgagggggagttgcgaagtctttttgagggtgaggagctgaggataatgctttttaactatagggagatgggaattattccgaaggttgaaccaat

SEQ ID NO: 23129 - DNA, 108 bp, Zea mays
  Peptide Sequence Number=SeqID_66504
atgggcgggtccggaaccaccacgtgtccagagaaggtgatatactccaaggcatcaacagtgagtccggacccccatgggaagggactatcaaacgctattccgtaa

SEQ ID NO: 23130 - DNA, 612 bp, Zea mays
  Peptide Sequence Number=SeqID_66505
atgactccatatggtaagagctcgacagtacttcaacaaccagcaatagggacgggatgttcaaccatatatcaagctttagaaatgcaagacaaagaaaatgttgatacaaataaacatctagactgcctacatacaaatgaaaaagacgtgccgcaaaatcaaagcacttcagatatggatcctgacttatttattggtgaagattctgcatttgaatcatatcgtgtgcttgggtactcaaatcatacggaagacccatatgactatgtctaccaaaatttaccagcaacacaccatttactaagaaaatttacagagtttactgctgatgttctaacagcaaaaacatttcaccaagctgtgactatctgcttgagcatccaggcggagcatggcaagattctcaaggacttcaagaagggcttaatgaaaaacaaggacatagagaacctgagggcggagccgcggaggtcgagaagttccccacttcatttgagatgcctggattcagggtgtctaacacgaagtacacaaattagactgttgactttggtgcaaacccttgctcctattttactgcaacgcaaagaaaatcgtttctcatgttag

SEQ ID NO: 23131 - DNA, 846 bp, Zea mays
  Peptide Sequence Number=SeqID_66506
atggtggtattgatcagcagcctcgacaagaccaagctctacgtggtgggcgcaggcatgttcagcggggtcaccgtggcgctgtaccctgtctcggtggtcaagacccggatgcaggttgcctctggggacgccatggggaggaacgcactggctaccttcaagaacatccttaaggtggacggcgtgccagggctgtaccgggggtttcctactgttatcattggggctgtaccaactaggatcatcttcctcacggcgcttgagacaaccaaagcagcctctctcaagcttgttgagcccttcaagctgtcagagccggtgcaggctgcctttgccaatggccttgccggtctgtcggcatctacatgttcgcaggctatttttgtcccaattgatgtgatcagccagaaattgatggttcaagggtattctggtaatgtcagatacaaaggtggaatagatgttgctcgcaaggtcataaaggctgatggcattagggggctctacagaggatttggactctctgttatgacctatgcaccatcgagtgctgtgtggtgggcgagttatggttctagccagcgcataatttggagtgcccttggccatttgcataacaaagaagaggctcctagccaattgaaaatagttggtgttcaagcatcaggggggatttttgctggtgctgtgacctcttttgttacgactcccatagatacaatcaagaccaggctgcagctgttccttctgctgacaaaccaggaccagtttgtcatggtttctgttataaggttatggataatgaaaataagccaaaagctggggaagttgttaaaagattga

SEQ ID NO: 23132 - DNA, 489 bp, Zea mays
  Peptide Sequence Number=SeqID_66507
atggcacccaagagaaccacctcgaaggctgacgaggctgcgaaggcagcactgctggccgagaaaaagggcaaggcccttgtcgacaccacccaccaagagccctgcgaagacgacgcaaacagcaagaggcagcgcaacgaacaacccactaccgaaggtagcctccacacctgcagctctggaggacaaccgcaacttcccccaggcttcgctccaccagagggcgcggacgccaccgaggacggcgaaatcatcggcgtttcggccgaagagcagctacagctgcgcgccttgcgcatcaagaaccgcaacctccagaagcaaaaagagatcctcgaggctaagcgccaacgtgtgtctgcacaagccaaggtgcgacagatgatacgcgacgaagagcagaaggctcaggagctcgaacaagagatcgcgctcatgcagagcgaaggccaatttggcctgcaacacgacccacccctccaatag

SEQ ID NO: 23133 - DNA, 183 bp, Zea mays
  Peptide Sequence Number=SeqID_66508
atggcaaaggtcttcaacgactggataaaggaccacaaggacctacctgtttgtgacatagctgacaaggtcaagaacaagacaacacaattgttaattattatggaccttcgtcttctgaagcattatctccacatggttataatgctcgtcagacgaaggcacgggacacagcccgggtaa

SEQ ID NO: 23134 - DNA, 249 bp, Zea mays
  Peptide Sequence Number=SeqID_66509
atggcgaggaggccctcgcccccgtcctcctatgggggtgacgacaagaccatccaagccaaggagttggaagcacggcggcaggcggcgcttgcggtctggccggtgccgcgtagccgaagtttgcctccaaccttcacaaggctggtgatcatcctttcctccgaatgttggaggaagaggcgggtcaccagctcatgtggaggacggagccgcatcccaactcgctctccaccaccgcaaggctga

SEQ ID NO: 23135 - DNA, 399 bp, Zea mays
  Peptide Sequence Number=SeqID_66510
atggcttaccggagagctcggtccatgcgcggcggcgggcgaccgaagtccggcgagggcgatctcgggcttccggtgatgttctgccaggtccgaggacttggaaagcttcacgggctaatggcaaagctaatcgaggggttggcgtggcttggacgcgactggagggagctggccacggcggccgaggctcggaaagcttggcggggcggtggcgcggcgtgctcggggcaaattccggtgatctctggcttgggcaagacttgtcgcgttgctgctgagcatggtgttgcccttctggctgctgactatgacccaagacaggtgctagcagtggtgatggtggcagctgggcccaggaagcttgagaatggcttgccgaagcgacagaagtcataa

SEQ ID NO: 23136 - DNA, 291 bp, Zea mays
  Peptide Sequence Number=SeqID_66511
atgggaaagcgccggacccctgtatatacagactggacctccaggcggagcctcgatgctgccacgtggcaaggtgcacgtgacgtaagccaacgggcagagcctgacgtaaggcctctgggccgtgcggccgctgcatttattgcgaataaggcgcgtcgcctgtctattccactggcagacaatgaagactcgtgcactcttgttttgcttagaaaccagggagaagacaaaaagggaaaaggatttgagcaggctagattcggactgcagaagaacaccaacctgtga

SEQ ID NO: 23137 - DNA, 849 bp, Zea mays
  Peptide Sequence Number=SeqID_66512
atggctgaagatcgaacagactcttggcctccagccatatccagggatattggaggatgtgacatccaaaagcaagaaatacgggaggcggttgaattacccttgactcatcatgagttgtacaagcagattggtattgatcctccaagaggggtgcttctgtatggtcctccgggtactggcaagaccatgcttgccaaagcagttgcacatcataccactgctgcttttatcagggtcgtcggttcagagtttgttcaaaagtacttgggtgagggccctagaatggtgcgtgacgtgttccgtttggccaaggagaatgccccagcaatcattttcattgatgaggttgatgctatagccactgctcgttttgatgctcagactggtgctgaccgagaagttcagcgtattcttatggagctactcaatcagatggatgggtttgatcaaacagtcaatgtgaaggttataatggcaactaatcgggcagacactctagatcctgctttgttgcgtcctggtagacttgacaggaaaattgagttccctctgccagaccggcgtcagaagaggcttgtttttcaagtttgcactgccaaaatgaacctgagcgatgaggttgatttggaagattatgtttccagaccggataagatcagtgctgctgatataatagagttcaagtgtggtgttaaagactatcgcttcaagattgctgctatctgccaagaggctggcatgcatgctgtccgcaaaaaccgatatgtcatcctccccaaggactttgaaaagggctaccgaaccaacgtgaagaagcccgagacagactttgatttctacaaatga

SEQ ID NO: 23138 - DNA, 306 bp, Zea mays
  Peptide Sequence Number=SeqID_66513
atggacgcctttcccacgtgctccctcacccagagtcgtcttgaagatctagagaggaagggattcctccacctcaagctgatctttggatggcaacttgagaaaggaggtggtgctccagcgccgcacgaaggcgaggttgtggttcttgcctccttttatgagtgcggcctcaggctccccgtgcacccgttcatgcgggggctccttttacaggttgcagcttcagaatctccacccaaacaccatccttcacatagcgtgcttcatcacgctatgcgaggcctatctcagcatggcccttag

SEQ ID NO: 23139 - DNA, 357 bp, Zea mays
  Peptide Sequence Number=SeqID_66514
atgacgcgaggaagaacggtcggcgcggggcacggtcgcggtgctgggcgcggcttggagtctgggcgctgggcgcgtcgggcctcgggactgcgtggtgtcctaggcgcgacggggctgggcgtgtgggaggtgggcgcggcttcgggcgcaggtgaggccggggttgacgcggcggcggctcggtgcgcggggcatcttggcggagcggtggcgtcgggtcctcctggcagtgcgggtggtgttacagcgggcaatctttataagagggctgaaattttgttaggagaaatcctgattttctttggggccctcggcttgagtggcttatttagggattttgcaaaacctttttga

SEQ ID NO: 23140 - DNA, 390 bp, Zea mays
  Peptide Sequence Number=SeqID_66515
atgagggcgagtagttgtacattcggaacctggaggggagtgtgcctgcgttcacaggccgcatcgcaatggcgccgaccgcatcgcaatggcgtgggcgactctgattgtcactctaccgtgaacctaatgaaggaggaggtggtggcccgcgttctcgctatcatagcgaatgtgacattggacttcatgaatgatagcggtcctctgtctttcaaccaggcaaggttgagcaacctggggcttggaaacatcatggtctctctgccccctcttcctgaagacgacgatatcaaggtgaagaagaagcgagaggtagaagaagcggcggtggcggctcacaagaagtgccgccataagagaaaaaggagaagaagcaggcacgtgtag

SEQ ID NO: 23141 - DNA, 837 bp, Zea mays
  Peptide Sequence Number=SeqID_66516
atggaacttgccacctcaaccatgccaacggaaactctcgaagggacgtcgggggcggtcgggccatcttccactcccaccgcgttggcagtgcgcgagggatgtggtgagaggtgtgatatcttggcccctgggatgcgtgtacgtgtcgggcaagacgatgaaggttgcgaccctcgcagcgaagggaggcgtatcggcctcccaagttctcgtcccaccgacatctactggggtgatccccctggtcgtcctagtcggctcgtccgtggtcgcggcgtccactactctcgatgtgggcacatcatcaaccttggtcgcccaagaggtactgaggtgcccattaccgacgtcccccctcctggggtgtgggcatcttcacctgacctcgaggtgatccctgtggacacaatcgttgctgcaggtgcccctctcacggcggatatggcggttgcctctttgccgccaccgttggccctgttgcctttgggtgttgcggtagcgaccggtgtgtctggagcggcggcgctggctacggcgaccgctgagcccctagctccgttgttgccaccactcgttgtatcctcctcctcccctgtggttgttctatcggtgcttgccgctcctagacgggacctcgagaaccttcccccgttcatccttgagggctcggagggggaggaaatggaggcagaggagtggcacctgatcaaggcggcttctgaccgggcctacaagagtctggaggtggtggagtgtttcctccgcaactttggcgaggcggtttcgatcttccgaacatcaatgaaatgggacataatccccatggccaggtga

SEQ ID NO: 23142 - DNA, 633 bp, Zea mays
  Peptide Sequence Number=SeqID_66517
atgacttcgatctccaaaggtgagaccgtgctcatgcctggcgtgcccaggcgacccgcaatagccacacgccgagaggaacccacacgcgatggtgaggatcgcgtgccacacaccgagagccaaaacggcggcgacgatgaacttcgacggcagcggcactcagcggacccgatggccaagtaccgaacacaggaggggcgagcgtcacagcgggaggggatggtatgcacaggagcttcaggtgtaccctcacgcgatctgctacaggtgatgaggagagggagtactgccagagagctagagccagagcagagaggcatggctgacggcgccgcgtttaggtggcagagcaagggggcggccggtttatttatcccttcccaggcccgagattctcggtcagatagttgcaggcgcgatcttcaccaacaaattccattgatgcatgcgacttcacaggaggaagacgacggtggttgttgcgatttcatcgcgcctggcaagctgagtggaggagggttctgggtgttggggtctgttagcaaccagtctgctaacagggatacgcacacgaactggagaagaggaagagagggatacggaggaattgggaaccttcccccgagatag

SEQ ID NO: 23143 - DNA, 789 bp, Zea mays
  Peptide Sequence Number=SeqID_66518
atggacgtcgtcgagccgcccgtgaccgcgcgtccgccggcgcaacgaacaccaggccgtgaccccgcgtccgccggcaacagtggtgcgggcgcgacagcggacgccgcggcgcgtagcgagggcgcgacgcctcctgaggcgcgaccgcctccgttcgcgcggttcttccggtacccgcagtacgcgtggcgccacgcggtggcgcgggaggacggcgtcgtggccgtggaggacgaggcgagctgcgcctccgcggtggcgaacgtggaggtgggcctggtggtggacgcgcacgccagcctccgcgtgatggcgccgcggcggcccaggcagctgctgaggctggtggccggggtgcaggcgctcggcctcgccgtgctgcacctcaacgtggccaccgcgcccgacgcgacgacgctctacacgctcagccggcaacagtggcgctctacacactcatcagcatcattccctggctcggcgcaggagaggctcgacttcctctacgagtcggggttggccgtcggcaagagctccgatgggttccaggcgctgcagcaatctgcaccgggggcagctgccgcgtccacttctgcacaggagagtgcggctgattcttccaaggcagctacaccgggagctttatttgaggataaaccccaatctgcaaatgatacatggagaaaactccactctgatcctctactcctaataaggcagcgagggcaggatgcgatttcaaggattaaaaacaatccaatcaagatggccgagataaagaaatct

SEQ ID NO: 23144 - DNA, 3186 bp, Zea mays
  Peptide Sequence Number=SeqID_66519
atggctaccggggaggatgagaaggcggcggggcgcgtggcgttgcaccggctgttcgtgttcgcggacaggacggacgcggcgctcatggccgtgggcgccgtcgccgcggtggcgaacgggatggtgcagccgatcatggccttcatcttcggcgacgtcattgacgccttcggctccggagccaccgacggcgtcgtacgcagggtcgtccaggtatcatgttggacaatcgccggagaaagacaggcggcacgaatcagagccatgtatctcaaggcaattctgaggcaggacattgcgttctttgacatggaaatgagtgctgggcaggcagttgagaggatggcaggggacacattcctcatccaagacgccattggagaaaaggcaacacgatcagtgacagcttttgcagaaggccaaggagcagcacatagaatgttcaagataattgaacgcaagccagatattgacatagatgataacacaggtatcatattggaggatgtcaagggtgatgttcaactgaaggacgtgtacttcagctatcccaccaggcctgaacatttgattttcgatggattctcgttgcaagtacaaagtggaacaacaatggccctggttggtgacagcggcagtgggaaatcgaccgtgatcagtttggtagaaaggttctatgacccacaggctggagaagtcttgattgacggggtcgacattagaggaatgaagcttggatggatgagaggaaaaattggtcttgtcaaccaagagccggtgctattctcaactacaatcagggaaaacattgcctatggaacagaaaagccaacacttgaagatatcaatagagcgatacagctcgctaatgctgctatattcatcgacaagttaccaaatggtcttgacacaatggtgggggaacatggaactcagctgtctggagggcagaaacagagaatagcaattgctagagcaatcataaagaaccctaagatcttgctactggatgaagcaaccagtgcgttggatatggaatcggagcgggtggttcaggaagcattggttaggataatggttgaaaggacaacaattgttgttgctcatcgcctaagcacggtgaggaatgctgatgtgatatctgtcctacaacacgggaagatggtggaacaaggttcacacgttgacctgatgaagctacctggaggagcttacactcagctgattcgtctacacgagactcaacaagaggcagaagatgtccaccctgacatggaaatttccaggagatcaacaagtaaaggctcctcctcttttgggcagtctatccctgctccacttggctcacccgatccaacggaagtcagtggtgctcctgacacagaggaaggagctacagacagagtgaaagtgggtaggtctcagaagaaagcttcgatcgccagactcttcaagctcaacaagccagagactcttgtccttgcacttggttctatagctgccgtagcgcatggcactatatttcctatctacggcacgctgatttccactgcgataaaggtgttctatgaaccgccacaagagctactgaagggctccagattctgggcaggcatgtttgctctgctaggcgcttgcgcgtttgttctgattccagtgcagtacttcctgttcggactagcaggcgggaagctcgtggagcgcgtacgctcgatgacgttccgaagtatcatgcgccaagaaatcagttggtttgataaaccagaacactcaagcggatcaatttgcgcgaggctgtctaccgatgctctgaatgtgaagcgactagtcggggacaatctagcactgaatgtccagaccgcatcgaccatcatgtcaggcttcaccatagcaatggtggcgaactggaagctggcgctggtcatcacagtcgtgatcccttttgtggctttccaagcctacgctcaaatgctgttcctgaaaggtcttaacagaaacgcaaagctgaggtacgaggaagcaagtcaggtagcaacggacgcggtcggtggcatcaggaccgtggcgtcgttctgcgccgagagtaaggtgatggacgcctacgagaacaagtgcgagtcgccgaggaggcaagggatgaaggaaggcgtcgttggtggcttggggttcggcttctcgttcgtcgtcttctacctgacgtacgctctgtgcttctacgttggcgcaaggttcgtccaccaagggacagcaacgttcccagaagtgtttagggttttcttcgtgctggctttggccacaagtggggtctcgcagacgagtgcggctggggcagacagtgccaaggccaacgactcggccgtctccatctttgcaatccttgaccgtgaatccaagatcgactacagcagcgaggagggcgtgaccatcgcgagcgtgaggggcgacgtcgacttccagaaagtctgcttcaagtacccgttgagaccgaacgtccagatcttcaaggatttttcactgaggattccttccggaaagactgtcgcgctggtcggagagagtggaagcggcaagtcgacggtgatcgccctgctcgaaaggttctacgacccggaatccggcaagatcttcatcgacggcgtggagcttgggaccctcaaggtgagctggcttcggcagcaggctgggctcgtcgcgcaagagccggtgctgttcaacgacacgatccgcgccaacatagcctacgggaagcaaggcggggtggtgtcggaggaagaggtcgtggctgccgccgaagcagccaacgcgcacgggttcatcgccgcgctgcccgacggctacgacaccgtcgtgggcgagagagggagccggctgtcgggcgggcagaagcagcgcgtcgccatcgcacgggccgtcgttaaggaccccaggctgctgctgctggacgaggccacgagcgcgctggacgtggagtcggagcgcgtggttcaggaggccctagaccgggtgatggttgggaggaccaccgtggtggtggcgcatcgcctgtccacgatcagaggcgcggatgtcatcgccgtcttgaaggacggggcggttttggagaagggcaggcacgaagaactgatgcaggtgaaggacggagcctatgcttcgcttcttgagctcagttctagttctgcatga

SEQ ID NO: 23145 - DNA, 532 bp, Zea mays
  Peptide Sequence Number=SeqID_66520
atgggggcccatgcccacgcgtcatgcgaccggcgcgccggtcgctacgtgcaagcaactacaccgccgctcgcaccactgccatgcctcctcgactgcggaaccagtaccgcgggcgggagcagcggtcacgtcgtcggccaagcttacgtcccatcctggggcagtgagagaaccctctctcacggcgtgaagacggagaagcgagcgacgcttcgccttcgccataatgaccgcgtcaaaaaagggaataggctccgagcctccctactgatcagaggttcgaaggctggcccctcggaggggtttaacaaccgcctcagagcgcgtgggctccacacccactactggctggccctcgaaaggttcacagccgcctcagacacggagcgagggatgaccaaggccccggaagacgacgaactccgctccgtccgaccccaaggctcggactcgggctcagccccggaagacgacgaactccgctccgcccgaccccaaggctcggactcgggctcagccccggaagacg

SEQ ID NO: 23146 - DNA, 114 bp, Zea mays
  Peptide Sequence Number=SeqID_66521
atggcattggttgatctagtagttaagactcaaggtctattcctatccgtggaagaacctcaagctttcaataagcaaggcaagtggacttctccctctgcatactctgtttga

SEQ ID NO: 23147 - DNA, 758 bp, Zea mays
  Peptide Sequence Number=SeqID_66522
gcgacagtgttgttattacccagttctacacaaaattagaggagaaacataaagctttagaagtagagaaggacgaggctgaggccaggaaaaaggaagaccatgacgttgctttaaaacaactaaggaagtcgttggtgattagagcaaaacccatgccatgcttctatcaagaagggccgctaccaaatgctgaactgaagaaggaagagcatgacgttgctttaaaacaactaaggaagtcgttggtgattagagcaaaacccatgccaagcttctatcaagaagggccgctaccaaatgctgaactgaagaaggtggttcaagtcagaacagtccaaaaaattccagtggccactctttcatcatcaaaatttttgactggtaagcctggggacacagatgctgaagcgaagttgaaccctggggtgtctaccttgtcaaattcacaacacgtgcatttaaacagaatcaggtatttcttgttctgttcattatatatctattattcacatatgaaaaatcttaaggtggttcaagtcagaacagtccaaaaaattccagtggccactctttcatcatcaaaatttttgactggtaagcctggggacacagatgctggagcgaagttgaaccctggggtgtctaccttgtcaaattcacaacacgtgcaaccaacaaatgttactaccaatttgaaggaccagccctgcaaatcaactggtgggactggtcctaaactgctgactgtaaaatag

SEQ ID NO: 23148 - DNA, 699 bp, Zea mays
  Peptide Sequence Number=SeqID_66523
cccacctcgccgtggggcacgaccttcctccatgacatctgcagctccgacgaccatgaggatgacatgctcgtctgcgccgcggccaccacaccttttgcctcctcccccaaatcaccgccgaggcccttctccacagctattaagtatgtgagcactcctcagatccgctacacctgtgtttgcctaatcttgcagcaccttgattcgccggagaacaagtcggccatgtgggagttctcgggggcgaatatgaagaagtcaccagttgcagttgtcgccgtcgcttctgcgacaactgcctatgctgtaattactaccacagatgagaaacctagagatattgttgtgacagatgattttgatatcaagagaactcaacctacaagtaattccaaaaagatcgttgctgaaactgatgtacttactggacagaatgctggtaaccccatcagcacaaagctgcaaaggcctgatgggcgcgattcaggtcaaggctccgtccactcaagggacacggtctcgcctcgtccgagcccagcctcgggcaaaggcagccgacacaggaggattcacgtctcgcccgagggtcccctcaagcaacggacgcaccttcggctcgcccgaggcccaggcttcgcggagaagcaaccttggccagatcgtcacgccaaccgaccgtatcgcaggagcatttaa

SEQ ID NO: 23149 - DNA, 171 bp, Zea mays
  Peptide Sequence Number=SeqID_66524
atggctgatgcttcgtatgcacgtgttgcctgttcgtatgaaacaagacgacgcaggcgccttgcaagcgcacgcggtaatagagttctcccgatgcaggggaaaccgatgatattaataactacgttgtttcgcttgtgcctggggaaatctgatgagaaagataattag

SEQ ID NO: 23150 - DNA, 153 bp, Zea mays
  Peptide Sequence Number=SeqID_66525
atggcagccaggccaggccaagcggcgacgactggggcccatttctttcagcgcctttggttcttcctagcgcccgggctttgcttctcatcaagcaagttgttgcgatccatcatctcgctgcaagtttggtgcctcctaaaaattaattaa

SEQ ID NO: 23151 - DNA, 2094 bp, Zea mays
  Peptide Sequence Number=SeqID_66526
atgtcttcgcccgagctccgggagtcttcggctcggatgctgaaggttaccgggggttgctggcctaggaatgttcctatcccccgcgcggccagcggggacgtttttacatctcgcttggttcgcaaatggagagtttttccttacgggcggaatattgctgctgttgtgtcggcagtgatggacaaggatcgccagggggcggcacaaaagcggcaggcggctatcaggattgttgaagccaggccaaagaggcaaaagcgggagtcggcgaaggctgcggcccccggcggaggcaagccgccgctggcggcgaagtcaggcgtccctgcatctagcaaggcgccagaggcggcggcgggcgccggaggctccaaaccggcgaaggctgtgccgccgctcagcggggtggcggaggccgcgaaggcggcccgagcgttgccgtcggcaggcaagcgtgtcgccgacttcgccaccaacatttgtgtggaggactatcttggtggtaagtcgctggggtggacgagggccagcttgctatggttgcgccctgccgcggcgatcgcgacggctggcatagtgccgaaggcgaggggcgaggctcttggctccggaggcgaggtgtcggccctcgcggttgtcagggacgaggcgggcgcagcgacccgccggctgaagggagtgacggaggcgctgagtcaggcgacggaggcgctgagtcaggtggctgacttcgctagccgtgctgcgtcggaggccctcacggcagctgtatctgccgaagtcgagagacttcggacgcaacatgctgacgctgtccgtgagaaatcagcctccgacagcaagtgccggaaactgacggacaaggtggccgtgctggaaaaggagaaggctgaccttcggcgccagctggcggcggagaggagggaggccaacgaggccatcgccaaggagcaggctgctcaggcggaggccaaactggcgcgggcggagggcaatcttgccaaggagctcgccgaacatctacaggagcggctcaccgccctggaaagccgcgcgaagggggccgaggccgtggtgcgcgcggaggcagaacggacgcgcacgcagcttatggatacatatcgtgagctgggtgcacggaccggtgacttcgaggtgccggaccgagagcccgggcttcgctgtctgcagtgggtgcaggaggagctgcaggaactccccgctgtcgtgggggggtttatgtcgtacgcctccctggtcacctgcgaggggacgatgaacgcgctctcccgcgaagggtgccggcacttcgaggcggatgaagattttgatcgagatgtctacaaggttgaagacctcgtggtgaaggattctgccggggccctctacgaccggatgtggggtccgcacggtcgcgaggtggtcagggagcgggcggagacggcaatggctcaggcgttgcgtggcgagcgggtggacgacctcggggcgctgaatagcgcgctgcctgacccggagccgacccctgcggaggccgcatccggggtcgccctggagccaacccctgagaccgcggcgattgcgacggttgcccccacatctgctacggccggcgaaaacctgcccccaaaggtggccgaaggcgcccctgatgcccccgcagctgctgtgccgagtgctgaagatcctgcggcggagatggcgaaaacaacagcaggagcggcggcggagccagcggcggaggctcccgcagcgtcagggccttcgcaggttcaagattttgggcctgcgcacgcaaccgctactgctaaattttgggcggcttcggccgcggaaggtagtaatgaatgtggtggatctggatctgaattttctgagttttttgatcttgctgattctgggagctcggttgagtggactgaggagtcgtcggaggaggatttggactatttcgcggctttggatgtggctgcggcggagacctcgccgcacgctgcggacgcgcaagatggctggtcggcaggaactgttgtctttgccggctgccgcgagtacaggggaaggggaactgcggagtctttttgcgggtga

SEQ ID NO: 23152 - DNA, 1134 bp, Zea mays
  Peptide Sequence Number=SeqID_66527
gtcaggatgctgcgcacgaagaatgtgtcggcgccagggggaggcgatgatgaggatcctcgtcgtcccttcaggcaggtcaagggcaagaccgtatacttggagcagcaggaaggccgcaagaagcggcgtatggacagagcagcccgagcagcagcagtagcagcagcagccgctgagcaggccgagctaggagatcagcctcagactccttcagatcagattgcgtaccgtgttcgtcgtctcgcctcccagtctcgctcctccactaccaccactgcttcagcttccactccaccacccactttgcctgctcttgtcacccctattgccccatccaccacctccactacaccagcttccactgctcctcctctcgctcttgtttctgctcctcctatcccacctgctcgctaccgggagcgcgatgagactgagagggaccctgctgcagttgacctcttcagcaccaggattcaggaatccttcttcagggcacaaatattcgccagctctttggatttcacgagtcgtcgactcgacttcacagcttatgctatggcacctctgaccctcctcgtcgccctcacgacggtgtggctccggcttatgagacagatacttctgtcgcggatgggatacagggaggctaccacacatatccagctctggctccttggtgccctggtctctcactccgagtttgacgttgtggattaccttatttgtgagatcgaggacaccattttggatggtctgcgtgcccgtcgacagctgccgtatgctcactacctatgtcacatttttgctcagctgattcggcctccccagttccaggggacacttgaggcctcacgccttgtctttgggtcctaccgtcctgcgcctgaggctcctgtgccagcttctgctccagtttttgacactcgggccgaggatactgctcttcatcagttcgaagctcaagatgcagcagttgatgatgatgatgattttgggattccacctccgcctccgcctcctatgcctccacgctcacatgatcatgaggctgggagctctagtgctacccctgctgcccctcctgctattgaccctgctctggcttcgattctccagacactttctcaatag

SEQ ID NO: 23153 - DNA, 498 bp, Zea mays
  Peptide Sequence Number=SeqID_66528
atgctctcgatgtttcataccatacaggacaggcaggattcccttcagcagcagcttcttcaggatcgggctgagagcagggccttcatgactcttatgctacagcattctggtgtatcgattctcctggttcagtcggcacctccaccacctattcaggctcctgttgtgccagcgattcttcctattgttggtccgtcttcctctacgctccggccggtcaccctggctttcacgtcaccggttctcagctccgtctgccctcagccgccagtgccaccagcttctgttgttcccactactgctgtggtggtgtctgtgaccacttcagttctggcagcctctgcagcgcagcctcagtccgagtcagtaccagctccagcttctacagcagatcctggatccgagactgactctgacccccagttggcgttcgctctcctgcctcgaccgcgtcaggatgcgcccccgtcacctcctcccgcttcagatgtgtag

SEQ ID NO: 23154 - DNA, 591 bp, Zea mays
  Peptide Sequence Number=SeqID_66529
atgattcctaggaaacttatggatgaacattatgatgaaaaccatgccccgatcaattgctccctttgtaaagaaacaatagaacgtgagagctgggatcttcataaaggtgaaaagtgcccacaaagaattgtcgcttgtgaatattgcgagtttgaattgcctgcagttgatctccatgaacatcagctacggagtacatcatgtaggttggagcgctcggtttggtttgactgctgtgaactgcatgagacactcatcaaatcaatctacctctgccgtacaaggctttggcttggatttaccccggtaaccatgttctccggtgaagttactccatacatgtgcaccgcttggccttggccccaagctacaaactggtgcaaaggcgatggaccagagacaggcaggcccttctgttggacgtacgacagtttagtacagaggcttactcgacagaagctgctgcttcctcgacaacaggccaagattggctgcgacgatgagcccccatggccatggcatgagggctgcagcttgcatgtgatgctttactgttacgactgtctaagtgttgagacagggccttaa

SEQ ID NO: 23155 - DNA, 138 bp, Zea mays
  Peptide Sequence Number=SeqID_66530
atggcgctgtccgtctttcccctccctccctcccctctctctctctctctctctctctctctctctctccctcgtccagacgttgttaatagaatagtaatgggatatcttagcagcggtaatggttaccggttataa

SEQ ID NO: 23156 - DNA, 2094 bp, Zea mays
  Peptide Sequence Number=SeqID_66531
atggagagtgacaaggaggagcaacagtgctgcatgagggagggatacatggatctagtgtttggtgctgctttgaaaggggaatgcagaaacataggtggaggtacagggagacatcgagtgaagtatgattatggcattatgggagtggatgggctgggaaggactgagttttcagcagatgaagacgctcatgttgtcggtgactgtgtaaagcatgttctccgagagctgccatcatcccccgtgcctgcttcttgctgtacagcattattggaagcgtttcgtctggagactaaggatgctaggataaatgctatgcgttcagctatatctgagacatttcctgagcccaatcggaggttgctgcagagaattttaaaaatgatgcacactgttgcatctcacacttctgaaaatcgaatgactgcatcggcagttgctgcctgcatggcgcctcttctgttgcgtccacttctggctggtgaatgtgagatggatgaggtatttgatatggatggtgacgattctgcgcagcttcttgctgcagcaaatgccgcaaacagtgctcaaggaattgtcgcaactctcttggaggaatatgagggcatttttcatgatgaacacctcagatgttccttgtcacctgaatctcaaattgaagatagtgaaaatgatgtagatcaagaaatggatgatgacaatggcgtggaacgtatacttagtgggaaattgagtgagagcagtggatatgctggcagtgacctctatgactacaaggcagtcaatgctgaggagtcagatgctgaacgccctgtgaagatgttggaaggaaatttgaatttgagcaaagtacagaacagcctttcaactgaaaatggttcagcgaatgtggatagcttactaagcgaaaataatccttctaacccaacagttggtcacgagactttgtctatgggggagatcctttcttcttttgatcctggaatttctgtaccgacccatagtcctgaatattctgtagagagacagacaaacaaaactaatggatctcacccacatgtgaagcggagtaacttttgggggaggaataatgcaaggaagggccaaaactctgaatcagtcgattcatctggagaagaagagcttgctattcaaagactagagattgcgaagaatgatctgcaaaacagaattgcaaaagaggtaggggaagaatgcatatatgtgttcattaatcttgatctagtggtttcctttagtctaatagtgtatagtcccctatctctggagcatgttattcaaactctcaagagcttttactatgaacttgctactgactgtttgggagatgtgatgattgaggtctccaggttgcaagaacaactgcaagctgaaagggatctgcgagctgcattggaggttggcttgagcatgtcttctggacagttttcaagtgctcgttcgatggacgtgaagacaaaggcagaacttgaggagattgctctcgctgaagctgatgttgcaaggttaaaacagaaggttgcagagcttcacctccaactcaatcaacaacgtcaacaccagtatggctctgtagtagatgcaaatgatcgtcatcaccgcctccctggtcatttctcacagcaaaactttgttcaacaaggatttgatatgaaccttgctttctgcaatcaagagaagcagagaaatgaggagagttcggtggagtcatcacaatggagaaacatcaagcagcatgtgctaccttatggttcttcgaggccactcacacgaaagctttcatttgatgcctcctcaagtgaatcaaggggcacagaaccctcaacaagtatgtcaacagagaacacctctgtgtccatcaacgtcccaaagctggcagagggcattgaatttgggaggcaaccaatggtcacatcctccactttggtagagctaacaactagactagatttcttcaaggagcgaaggtcgcaactgatggaacaacttcatagccttgatttgggacgtggatctgctccgcagggctttccattcaagccaccctctccttggaaccacccgaggtag

SEQ ID NO: 23157 - DNA, 398 bp, Zea mays
  Peptide Sequence Number=SeqID_66532
tgtgttgccgcattaatgaattacttgaaggttcattcgatagcgactgcagcagaggatcgtcgcctcacttgtctcgaggagatacggatccaaacaggttagccaagataaaacttgggtctaacatgccgacgagagccgaacggacgatacgaaagggtgactgtgaggtgcagatcatgggagagcctacgggggagttgtacgatgtcatactgtacttcgggatcatagacatcctccaggactacgacatcagcaagaagctcgagcacgcgtacaagtccttccagtacgacccgacgtccatttcggcggtggatccgaagcagtactcgaggcgcttcagggatttcgtgttcaaagcgttccaggaagacaggttcgacttgtga

SEQ ID NO: 23158 - DNA, 528 bp, Zea mays
  Peptide Sequence Number=SeqID_66533
atggcggacctagaggtgggctcaatttggtcagaggatgtcgggagggggctgcccgcggggaggtggcggagcttcgcagcggggttgccgccggtgagctctgggcgagcagtcgaggtgggggggaggggtgtattgcgttcgcggcaaggtgaggaagctgctaggctaactcaattgcttggtgggctaaccgagagggagagagaagagggggagggactcaccggagagggggaagacggtggcgcttccgacttgggctcggccgaggggaggaagcgccgcgagggacgctacggcggggcagtactggcgaggacgccggtcaaggggaggaggacggagcggtgccaaactttcctgtgcggcgaggagacggcggtgaaggacggcggtgaagggacggcgggggcgtcgtatgcgggggaggatgacgaagcggctgaccggtggggccggtctgccagtggaagcgagcgcgtgagagagagcggttggcaggtggggctggcttgtcagtga

SEQ ID NO: 23159 - DNA, 438 bp, Zea mays
  Peptide Sequence Number=SeqID_66534
atgaacaagaacactggcattcaaggtgccattacaaacggaactccggttccccctccgcaggtacgaacaaccccactccatgggggtgggcctgcggagcaacagaagactgacgagcggctcgccgccgcccgctctgactacggcgacaaccacccccgccccgggcggcgaagcaccttcggcagcggcttcggggcaggtgttacgacaggagggccctcacccgcagaggacgagaaccagccattcaggccaggagacggagacccagggctactggcggaattggcaatctcatcggtagagaagccacctccggctgccgacgcctcgaagcgcgccggcaggtcttcgccctggtcagaaccgcccagagcgtgggcgccgccctcgcgggacgcagcgcaaccgtcgtccggacggagggcgtag

SEQ ID NO: 23160 - DNA, 2805 bp, Zea mays
  Peptide Sequence Number=SeqID_66535
atgagctatgacaaatccaacagatccggcgatgatagaaaatatgagggcgccagaatagaaaacctaaaaaatcatggggaaaacagaaaacatgagggcacctcgctgcacgttccaccctccctcccctcctccactcctgaccctccaacgttccctccctggaagtgggccgcctcccgatctccccacaccgacaatgctgccgcgccgcgcgcgggcgcgcgggcgccggcgctgctaggatcctcgcgcgaccccgcgccacgccggcgagaaccccgaccactacccggcggggcgagggcgacccaatgcgcgagcgcgcccggcacgcgacccgggtgtcaccgatgccgccgcccacgggtgggcgaggaccccgaggccgacgcggcgccctcctgcagtggctcagccgacgaagccgacccccacgagcaggtgctccccaacggcgacatctacacgggccagtggcgcggcgccgtgccccacggcgccggcaagtacctctgggcggacgggtgcatgtatgagggcgagtggcgccgcggcaaggccaccggccgcggcaggttctcctggccctcgggcgccacctacgagggcgagttcctcgacggcttcatgcacggcgccggcacctacgttggtgcctcgggggacacctaccgcggcgtctgggccaagaacctcgagcatggcgccggcgagaaacgctacgctaacggcgactgctacgacggcgagtggcgcgcggggctccccgatggttgcggacgctacgcctggcgcgacggcaccgagtacgccggcggctggcgcgctgggctcatccacggccgcggcacgctcgtctgggccaatggcaatcgctacgatggcggttgggagggcggccgaccccgcgggcagggcacgttccgctgggccgacggcagcctctacgttggcttctggggccgcgaggcgcccagcggcgccgtccaccagaagggcgtttactacccgtccccggcggcgatgggcaactccccccgggcgcgcgacccgagggaggtgtttgcacgtgacctgccggagtgcgtgcgctccggaaccgaggcccaatcagcgctcacgtctctgagatccctcaaatggctgatgcggtcggtcagcgggcgcggcagctcgtcgtctggctggagcaatggctcgggaggcagcctcgtgcacttctgggggtcggacggggaggtcaagtgcgaccttggggacgactggagacggcggagcgtcagagaagggagggggctgccaccaccgtcgcccgctctggttccatacctgcccaacggcgcgcccctgcggttgtccaagaagcagggggtgaccattgccaaagggcataagaactatgagctaatgctcaatctgcagctcgggatcagaacactccgtaagctgttcaaggttgacccagctgattatatgttgtccctctgtggagatgatgctcttcgtgagctctcatcccctggtaagagtggaagcttcttttacttgacaaatgatgatcgttacatgataaaaacaatgaagaaaggtgaagtgaagatgcttttgaggatgcttcaagcttactacaatcatgtccgtgcatttgaggataccttagtgacaaagttctttggcctacattgtgtgaagtctggatcacaccagaagaagaaacaatggtaccaagagtttcaaaggcaagtggacaaggactgtgagttcctcgagcaggagaagattatggattacagtctattggtgggtgtacattttagaggtgccattgacattgatggtgacaaacccgcaacacctcgcgtttcaagatgggacagagatcattttcgttctgatccaaataggtggtcaaaaattaagcttggagcaaacatgctgtcaagagctgaactgacaatccgaaagaacgacagtgatgtttttggagagccaaccggggagtactgtgacgttatcttatacttcgggattatagacatacttcaagactatgatattggcaaaaggctagagcatgcctacaaatcttttcagtatgattcgacgtccatttcagcggttgatccaaaacagaattcggcagcttctttagggaaaggagtccgggtgattggggtcgctggagcacctggtggccccacagtttccaggaaacagattggccgtcatcttctgggcagcttctggccgccagaagcagaagctggagccaaacggcccacgcgacgctcctccgccgtcgtgaacccatcgcgccgccggcggtccgtctcctccccgcatcgtgggttcgcgctccgaggacgcagcctcctccccgtcgcaaaggaacctctccccccgtcgtcgttgtcgcagtgcaaccaagcagactccatagccgacaaggcaattggaaggatgcaagagattgcggacaagatttattccgtagctcgggaaacaattcgtctaggacgcgggttgacctcctttgacgctaccaaacttcgtgtagcattgaaggacattgctttcatgatggagcaagattctctggtgttccaaaagtatttggacaaggtcaacaacgtaacccaccagcctgacagcaactacgaaccctcagagttgtcctcaccaccccctggtgaagacaaccttagtccagactgggactttgccgagcacttcgaaaggttttggggtattgaatatgactccgatcagatgccttcctttagtgacaatgaggtttaa

SEQ ID NO: 23161 - DNA, 192 bp, Zea mays
  Peptide Sequence Number=SeqID_66536
atggccttaaagcccaccaatgatggttcacaatatgttgaggaaaagatgcaagagaatgtggctcggactcgggctaagccccggaagacggcgaactccgctccgcccgacccagggctcggactcgggctaagccccggaagacggcgaactccgctccgcccgacccagggctcggactcgggctaa

SEQ ID NO: 23162 - DNA, 189 bp, Zea mays
  Peptide Sequence Number=SeqID_66537
atggcgacatgcacgcacagatgcgacaggagcatcaagagatacgtcaagaaagagaggatatacgccgggagatgcgccaagaacgggaggagatacgtcaagagagaagggcgcaacagcaacaagcaccactgcctccgccaccaccaccagttctaccgcgggacaagcatcgggagttcatga

SEQ ID NO: 23163 - DNA, 165 bp, Zea mays
  Peptide Sequence Number=SeqID_66538
atgcaggcgacatgcaaccgcgccaagtggacgcacttctccgactcccgacacgccagcatggaggcccaggcccacgcgtcgcgcaaacgggaccgggaaagggggataccccgaaagggatccttccccgtgaaggaaccaggctccgagcctccttactga

SEQ ID NO: 23164 - DNA, 1713 bp, Zea mays
  Peptide Sequence Number=SeqID_66539
atgaagaagaagaagcgcatgcgccgcggcccggtggcctcgccggggcccagcgccgtgaccgtggccgtggcctcgcagacatgtggaaagtggcgtccagatgaatcacagagacctgaaatcgatgatgctcccgttttcgctccgacagaagaggaatttaaggatccaatcgggtacattgctagcattcggccgcaagcagaaagatatggaatttgccgtatcatcccaccatcttcttggagacctccatgtcctctgaaggagaagagtttctgggaaactgccgagttcaatactcgagttcaacaagttgacaagcttcagaacagggagcccacaaagaaaacaacacagtctcaagttcagaggaaaagaaagaggagaaagaggctgaggtttggtatgacacgcaggcgtcccggttcgagcgtgggctccgaagagaagtttggctttcaatctgggtctgatttcacgctagcggagtttcaggaatatgctaatgggttcaagcaggaatattttggaatgaaagggagtgatgaaatttccatttctagcattagaaaccgcataaaaatatgggagccgtcagtggaggaaattgagggcgaatattggcggatagttgtaggctctactgatgaagttgaggtggattatggtgctgatttggacactgcaacgtttggtagtggttttgctacattatcttctttggatggaaataagcaagatccatatggctctgttacctcatttgaagatgaggatatacctggtgttgtagttccatggctttatgtaggaatgtgcttctcttcattttgctggcgcattctaatctatccgttctatattacttcgctgcagcatgttgaagaccattttctttattctctaaattacatgcattttggcgaaccgaaagtttggtatggtgtccctagtggtgaagcagtaaagctagaagaatctatgagaaaaaacttacccaaactgtttgaagaacagcctgatctacttcatgagctggttacacagttatctccatctgttctgaaatcagaaggactttctgtttaccgtgctgttcagaagtcgggtgagtttgttctgacactaccgcgagcataccattgtggattcaactgcggcttcaactgtgcggaggccgtaaatgtctctcctgtggattggctgcctcatggacagtgtgctgttgagctctatagagagcagcgtcgcaagacatcgatatcacatgacaagctattactcaaggctgcaaaagaagctgccagacaactttggatgaatcacagaggtggtaaggtagaatatagatggatgaacacctgtggaaaggatggagtcctgacaagtgcaattaagacaagagttaaaatggagggtgcagcatgggaggtgaatgctcatttggaaagtaagaggatggacgaggactacgattccactgatcgggagtgcttttcatgcttctatgatctgcacttgtctgctgtgagttgccagtgcagacctaaccgctttgcttgcttaaaccatacaaaccttctctgttcatgcggaatggacagaaaaaccgtcttctttcgatatagcatggaggagcttgatactcttgtagcagctctggagggtgatccggctgcattttattggtggggacacaaccactag

SEQ ID NO: 23165 - DNA, 318 bp, Zea mays
  Peptide Sequence Number=SeqID_66540
atggtccacatcgtcgagcaccatgatttcatacccaaggacttcatggtggaggaggtggccgcctcttccacaccacgagccaccaacctcccggcgccaggtgctgctgcagtgcactctgcgcggcagcacactcctgcgcaaacgtccagagcgtctagggctgcgcctggggcgttgtctgcggctagggagttgctgtgccaccctcctagctccacggcctcgccgggggccatgaagcagtggcgtgacgacgtcgaccgcctgctcggcatggcgcactctggctcaaccaggcctaggcctctgtaa

SEQ ID NO: 23166 - DNA, 1428 bp, Zea mays
  Peptide Sequence Number=SeqID_66541
atggcatcgtccaccgaggaggagctagagatgaacaagaagaaggtgtgcgtggtcggcgccggcgtctcggggctggtatccgcccgcgagctacgccgggagggccacgacgtgacggtcatggagcagagcggaggcgtcggtgggcagtggctgtacgacccgaggactgacgccagcgacccgctcggtgctgccggcgtgcacagcagcgtctacgcctctctccggctcacctcgcccagggacatcatgggcttctccgacttccccttcttcccccgcagcaacgacgacggcgactcccggcgctacccagggcacgccgagttcctgaggtacatcagggactactgcgacacgttcggcctcatggacgccgtcaggctcaacaccaaggtcctgcacgtgggacgaccactgttggacgacgacggtgttgtgacgcggtggacggtgaggtactgctcgtccggacatggtgtctctgagcacgaggcggtcgcggaggaggagttcgacgccgttgtcgtggcctctggccactactcccagccacggctcccagccatcaacggcatggacaagtggacgaggaggcagctgcactcccactcgtaccgcgtccccgactccttccacgccgaggtggtggtgctcgtgggcttccaccagagcggcgtggacatcgcgctggagctctgcaaggtggcgagggacgtgcacgtcgtcagcgtcaagtccttggaaggcctcactcccggcatcgagtgcttgtgcgaggatgggaaggtcatgttcgctgacggctcgtgtgtcgtcgccgactccatcatctactgcactgggtacgacttctcgttcccgttcctggacacgggagggctggtgaccgtggacgacaaccgcgtgggcccgctgttcgagcacaccttcccgccggcgctggcgccgtcgctgtccttcgtgggcgtgccaagccaggtgcagacgccgctgttctacgaggtgcaggcgaggtgggtggcgcaggcgctgtcggggcggaggctgctgccgccggcggaggagatgctgcgggcggccgaggagtaccaccgcgccagggagaaggccggcgtgcccaggcgcatgtcgcatgccatcttcttcgacttcgactactgcgacgagttcggggagaagcacgtgggcttgccgcgcccgcccgagtggaagaaggagctcatgcgggcggccgttgcgcgcttgctccaagacacggagaccttccgtgacgactaccgcgacggtgaccttgtcctggagagcctgcgcctagagggctggtcctcagctccctccccgggcacgcttaacgacaaggagaatggaattgccatgcatgatatgatgcatgacagagatggagagacactggaataa

SEQ ID NO: 23167 - DNA, 834 bp, Zea mays
  Peptide Sequence Number=SeqID_66542
atgttgctggttcactggctcaaacgacatcggccggatctagcacgagccgaggaccgacctgtcctgggacgagctggaagtcctggtgagggggattaccgggcttcctccccttctgctcccaaggtcgtgcctcccctgcccccggctgctggcgccgagacagcatcaccgagctcccatgctccagctgggggttcggcagcggcggcgacaacatcaagtggcatcgcagcggcggagggggtcccagctgccccgacggctgccgcagccccaacgacggtgacgctgtcgagtacaccgtcggcatcggcagaagaggctccaactgcgcccgcccccgccatcgaggtcaacgccgggggcgcgtctagctccgtcccgccgcccactccggaggagacggaggtgatttttgggcggcggctccggtccagtgccgagccagaagcggcgccaattcccctcccccgggtgttgtctcgtgcccatcaggctcttcatgagaccgaggcggcgatcctacgagagtgggagtcgctgggggccgaacaccagcgcctcagcaactgtcgtacccagctggaggagcgcaccaaggcggcctcctgccagttcaccttcgagcggtccaagcttgagcgggaccgcaaggactacaagaaggacctccagaaggtgtacgcccgggagctggaggtggcccagaaggagaagaggttggccaagaaggaggagcacttggaccatagggaggaggtcgtcacagagctccaggccaagctgggcgccttcaacaaaatcctggaggaacagcgggtccaatag

SEQ ID NO: 23168 - DNA, 1047 bp, Zea mays
  Peptide Sequence Number=SeqID_66543
atggcgagttcagcatcgagtgccctggtgcaccgggcactgaccgggtcggatgtggggcaactggctgttgtcccgactctggtggcggccacttcgccaacggtggtggttggggcaaagggtgctccgcgggacccgtggtccaccttctgcgcgagcggcaagatttcgtcgaccgccgccgctaaagatgtggcgggctccgtgtcccagcaactgaggcaagcgtcgcagcagctgaagcatgctacgcaaaccgaggccaaacttgcatgggcggagggtagtctcgcccgccaacgcaccgaggagctggaggcgaggctcaatagcctgcgcaaccgcgtggacaaagccgaggcctcgacgcgcgcggaggtcgagcggacgcatgcgcagttcgtggacgcgtaccgggagctgggtgcgcggaccgccgtcttcgaagcgctttgccaagaggtgggcctccgcttcatggagtggttacaggaggagctgggggtgctcccgacaatcgtgacgggcctcatgtcctttgcttccctcgtcacctgcgagggggccgtgaatgctttgtccagcgaggggtgtgggcatttcgagctcttcgaccaatcagacgaaaacttcgaacgtgaaatcttccaagtcgaggacctggtgctgaagcagtcggcgggggcgctcttcgacaggatgtggggcccgcacggccgagagacggtccgggagaggtccgaccgggcaatggataagatggcgcatgccgaagaggtcgaggaccttggtaatatggacagcacgctgcccatgacatcgggggtggaggtggcgtcgccatccgatgccggcgagggcccctcgacggccccctcgctgaccgcgtcggctggagcgggcgaagactccgcgctagcccctgggcagacgggtgggaacacttcgaaggcgatggccaaaccagctgtcgaagacccccgcgacggcggccgggccttcgcaggttccgacgtttgggcctgcgcaagcaaccgctgctga

SEQ ID NO: 23169 - DNA, 600 bp, Zea mays
  Peptide Sequence Number=SeqID_66544
atgtcgtcttcttcttcatccgctgcgaatacgccgttgggcgaatcgtcgtccgaggataccatgagcgatttggcagcggtggagctgcacccgggccacacggtggagttcgacgtttcgaggatctcctcggtcttgcagaggtatgacgtgcagatccaccaattgactcctaatgccgtggtggccctagcgaagtatgtctgggcggtgacttcgtatggcggtcagccctccgtagaggtcttcgccaagaattattgtctgcactggcagaagagaaaaattggaagcaagattgcacagtttggatcatgcacctttacgtcgaggactaggaagacttcggcggaagttgtggagttagttccctacgcccgcaacaagtggggcaactggtatgattattggttttatgtggcgggaggcgaagtcgaagacctcccaggactctcggcggccatgatgtgctcccactgttatgtggcgttcccgccgtttgaggtggcggaggatgatagggacgaagtggcccttcgttgtgctacccgcatgagtagctggcacagtttagttgaagaattcatctgttattga

SEQ ID NO: 23170 - DNA, 348 bp, Zea mays
  Peptide Sequence Number=SeqID_66545
atgccctccctgggcaagcaacaagtgcgaagtccggccttcgcgttggatctgcgcggtcgggatccagccgcattcgtgcgtgaggtggaggacagagctgtgcggattgtggggcgttatgtgccgaggacagaggctctgcggagtagggatatctgtggatccaacgttcgcctaaataggttcttcgagttgaatcgtttgccatacgacggctatcccggggatgacgctgccgtggccgtcgaccgccgcgggaagaagccagtggccgtggctgaggaaggcccttcgcaggaggctgccccagacactaagaagagaaaaatagtgaaagtcgcctag

SEQ ID NO: 23171 - DNA, 222 bp, Zea mays
  Peptide Sequence Number=SeqID_66546
atggaaactatggagatgaccgtgaagggagtgatgaaggagcacgatgatctgctgaagtggtggttgaaggtggaaacaagggttcagaagatgaccgaggcgatgaagaccctgcagtcaacaatcgatcggttgccgctgaagcaaaaggtggaagaacctttgatcgagtttaaggatgcatcgactttcgcccacgtagaagtttcgcccatgtag

SEQ ID NO: 23172 - DNA, 300 bp, Zea mays
  Peptide Sequence Number=SeqID_66547
atggcacccaagagagctagctcgaaggcagccccatccatcgacgaagcagggaaggcaacactgctagccgagaaaaagggcaaggccctcgcagacaacacccatcaagaagcctgcgaagacgacacactcagcaagagacaacgcaacgatcaacccactcccgaaggcactctccgcacctgcagctccggaggacaaccacatgaaccacccctaggcttcgctccactagagggcgaggacgcaacagaggacggcgaagtcatcgacatctcagcagaagaacaactatag

SEQ ID NO: 23173 - DNA, 411 bp, Zea mays
  Peptide Sequence Number=SeqID_66548
atggcccgcacccgcgcctataaagcccccccaggcgtcgactacactcttccacgcacgctcaaacctcaccggagctcagctcaccgccgtttgcccgtgcgcgacatgtccgcggccagccgaaccactgccacagtagaccggccagcccagcccttcccaaccctgtccaaccctctaaggcgagtgtgcacgcccagtgaagctccccgagcgaggaatcgaagcctgcttcgccggagaggccagtccacggtcgccggagttcgcaaccccgccggagttaagaaaaatagaaaaggtgatttaaataatgaaccagagggcacacctatttttgttaaggataacttagaaaaaccctacaaaaataaccccaaggtgaaaacaccccaacccttgggataa

SEQ ID NO: 23174 - DNA, 126 bp, Zea mays
  Peptide Sequence Number=SeqID_66549
atggtggatacaagtgcgatcactgcacggcggcagccggggtcagtggggcattatattccaaggcggtacctccttgatttggttgatggtgtgacttggccttcgtccctgccaccgggatag

SEQ ID NO: 23175 - DNA, 735 bp, Zea mays
  Peptide Sequence Number=SeqID_66550
atggccttgatgggttcaacatcggaaaagatgtacctctgccagatttttaaggatccattattagtaagcatttttgcaaacagagtattgattcttgataagccataccttgattcccaaaaagccagcatatccttgagagtcttttattttgacagcatactcgtatctccgatgtgttgtaatatctgcatgacgggtgaaacgctcttgggcaagttggctctaaggcatgaggatagcagcagcggcagcaatgaccccattggagatctagaagcccaggtggagcagcttggaacgaagctacgtcacagaaacaatgtgtgggttgaggatgctcagcgtataaatgaattaagaactgacatccgacatctgcaagacgagcttgccgaacgggatttggcactcgattgggccgtcaactcacgttccattgcttgggaccgagaagctagagctcgagcccgtgtggaggagcttagcacggtcgttgataacttgcaggtgtactgcaatacattgcatgaggaagttcatgaattgtattcacacctgcaccccgacgtacctgccgatcctgtcgaaatgggagctggaccttctggaacagcaggtgaagcgcttggtggggaactagatcttttcaagccccctccttcaatgaacctggctgatgaatggacccctacactcgacaacgaagctgctaaggatgataaatactag

SEQ ID NO: 23176 - DNA, 162 bp, Zea mays
  Peptide Sequence Number=SeqID_66551
atggcgtcctccttcgaggtggagatccttccgctcgcgtcgccgtccgaggccagggcgaatctcaccgagggtggagacggcgccgagggtggagacgaagccgaggagaacgaggtatatgaacaacttgaaaacatcttaagggtaaaagagacgtag

SEQ ID NO: 23177 - DNA, 327 bp, Zea mays
  Peptide Sequence Number=SeqID_66552
atggcagcacgccaactcggcgtagtgcagagacaggaccgtgactggggttgcagccccggcaaccctgagtttgaatccgccactgtcatcgaggccaccacggtagatcttgggtaccagggagatttgggtagcatggagcagtgctggaacgcgaaagccgcgttttgcgcgcgtcaccatggggtgttggttggtcactggcttgacagcagctgcacccttcggaagcgacactggagatggaacgaacggctccggaacgacatccgtgcggtcccgatgcgtgtagacgttggtgatgacgcgcgcctgaggctgtag

SEQ ID NO: 23178 - DNA, 456 bp, Zea mays
  Peptide Sequence Number=SeqID_66553
atggcgctttcccccctcctccttgcggaaaggcgacgaagaaggaggtctccgcctcgctcgacctcagggctcggcccccgcctcggcctcggaaggaggtctccgcctcgcccgacctcagggctcggccctcgcctcggcctcggaaggtggtctccgcctcgcccgaccccagggctcggcctcaaccccgacctcagggctcggcccccgcctcggcctcggaaggaggtctccgcctcgcccgacctcagggctcggcccccacctcggcctcggaaggtggtctccacctcgcccgaccccaggtctcggcctcaacccggacctcagaaggaatcgcgtcctcaccccaccccggcctcggcctcaggaggagtctccgcctcgcccgaccttgggctcggactgtccacgccacagggggtacatcattaccctacccctagctag

SEQ ID NO: 23179 - DNA, 474 bp, Zea mays
  Peptide Sequence Number=SeqID_66554
atgctcatccgtttcgctgctatcttttctcttctctcgattgatcgcttcctccaccgaggcgaggaagcgcagcccagatcgtcggaggcgagcggcgatctcaccagctccgagcagcagcaggaaaacaacattgttcgccccactctggctactgtgccaaccaccagggtaaaactgacgacagcaggtctcgacctcccccgagttcagcctcgggcgcaacagggagctccgcctcgcccgacccttggcctcggggaaggtctccgcctcgcccgaccccaggcctcggcctcgggggaaggtccctgtctcgcccgacctcgggcctcggccacagcctcggcctcgggaggagtcacatcctcgcccgaccccaacctcggcctcaggagaagtctccgcctcgcccgacctcggcctcggaccgactacgctacaggggatacatcattgccctaccgctag

SEQ ID NO: 23180 - DNA, 624 bp, Zea mays
  Peptide Sequence Number=SeqID_66555
atggggcgcagaggagcacgaaggcgaaagggcgcactcgattggaagagaatgcgaaagggcagcccagtctatgacacggggggccgggtccacgagtcatgcagcgtgggtgcccgatttcgggtgcgagaatcgtcgaacgtggtagcacacctcctcattgccgccgcaagagacaacaacccagtctatgacacggggctcgggcccacgagtcatactccttgggtgccggatcccggcggtaacaaggcaccccgcgcgtggcccgacgaaaccaccaggcgtgggggccatgggtcagtcagccgcggggatagatatggcagttggcgtgacctaaggctcgcatcctcccctgagatgggcccgggggccactgtcggtaccttgaaattagggtaccccttgctactgtataaagatgcagtacccacgcggctatctcttagtcgcgtggacctccacgtgtgcaagccggacccctggaatgggatccggacccccccatatggggtccaggtcgcccacaatggggtcccaaggtcccaggacagaatatactcgggccttgaacaggacccaggctggggtccggtgccgacacgtgtctggacctag

SEQ ID NO: 23181 - DNA, 570 bp, Zea mays
  Peptide Sequence Number=SeqID_66556
atggccagaaaagatgatatactccaaggtggcgacagtgggtcaggacccccacgggaaaacgccggacccctggatgcgcagcccgggcctccgggcgaggttcgaaacctccacaagtacaaatcaggcccctgggacgggtcccggacccctcaggaggggtctgggctactcacagtagggtcccgggattccaagtcaaagaaaacccgggccttaatcaaggccagacgggggttcggtgctgacacgtgtccagaccataccgcgggcgctcccactccccgctcaggcagagacccgatgctgccacgtggcctactgcccgtgacggatgtgccgcctcagtatttaatgtgccctttccactctgctgacgggcggcggccagaccatcttgcaggcggcgtgcccgtccgctccggtggcaggcagtacgcctgtgctgcagcatacactgtgttcatcatcactcgtacgttgccagtgaagctttcactacacgccaatgctacaaaggctgttgatatcagggcgcaaggagaaggcactggcgaccagcattag

SEQ ID NO: 23182 - DNA, 1200 bp, Zea mays
  Peptide Sequence Number=SeqID_66557
atggccaagcacaaagcctcgcctccggccgcggtccgccgtcgcatcggcggcgccggggcgtccgccatccggtgggcgctgcgcgtcgcgaccagcatcgtagcctggacgctgctcctccacctcttcaccttcctcggcatcccccgcccgccgctgcccatcgcgcggccgtcctgcctgggcggccgcagcaactctaccgccgccgactccgtggtcgcggccggcgatgccgggcacctggcgctcccggctctgcctcccagacggctttacaagagtaatggctaccttctagtttcatgcaatggtggtctgaaccaaatgcgagcagcgatatgcgacatggtgactgtagcacgctacttgaacctcaccatggtgatacctgaacttgataagcaatccttctgggctgatcctagtgattttggggatatttttgatgtaaatcatttcatcgattcattgagaaatgaagtgaagattgtcaaagaactcccacagaagttcaaagaaaaggttcctctgtcaatgcaaccaatcagctggtctagtgagaaatactatttgaggcagatcttgcctctagtacgaaaacacaaggttgtacgttttagcaagacagattctcgccttgcaaacaatggcctgcctctgaagctccaaaaacttcgctgtcatgttaactacaacgcattgagatttgccccatctattgaggctctaggaaacaagatgatctcaactctcaggagaactggatcttttgttgtgcttcatctgagatatgagatggatatgcttgctttctctggttgtactcatggatgttctgatgaagaaacagaagagttgacaacaatgagatatgcatatccctggtggaaagaaaaggaaatagactctgagaagaaaaggcttgagggattgtgcccccttactcctgaagaaacaactttagtactcagagctcttggtttccccaaagacactcgaatatatattgcatccggtgaaatatatggtggtgaaaaaagattagccatattgaaaacagaatttcctaacattgtgcgaaaggagatactcttgtctgatgatgagttgcgaccctttcagaagcactcaactcaaatggcagcactggactatcttgtttctgtggcaagtgatattttttattcccagtaa

SEQ ID NO: 23183 - DNA, 141 bp, Zea mays
  Peptide Sequence Number=SeqID_66558
atgagggtgtttcacagcatgcacgcaccatcattttcgctgtcgtcggatgtcccgttcgtctttccagtcttcgccatgttcttcgtccccaacctgctgctcgtgcccacggtcgcagccattgcctgcattttttaa

SEQ ID NO: 23184 - DNA, 834 bp, Zea mays
  Peptide Sequence Number=SeqID_66559
atggggggagaaagagaggggatcggccatgggggagaaggagaggcagctagccacgcccaggctgcaggggattttgttgaggcatgggaggtgagcggctcacgcagggagaacggaggacacctaggagctgctgctggccgcggctcctccacagcgactcgcgagcaggagcctagctggggcggcttgccggaggaccagggtcggtgggggcacggctggggaggcatccggcggagcgacgcaagagcaggcagtgggggctgggctcagccgcgcgagggagcagggccccgacgcctgggcacacgggcgagccgccgcgcggctgcctggctgtctaccgcgccctgcgcaggagcccagctacgccgcagggaggggcgtataggtggtaggggacgagggcgccgtcgggccggcatggcatgcttgagaccgattgatgcaattcttgaggatctctttgacgtgtgggttaggacccacacacgctttcgctacaccactttgatcttgttggttgatgttggtcgcattgtcttcattgagagaggttggaggttgccaactggacaggtgcaagaggaaaggctacagatagaaaaggtacaagataagcatcgtggtaaagatcgagggatgacaagggttaaggtgataacgggcaaacacacaacaaggaatgtatttgaggcaagacctacaagatgtcaaaaaaggggagcagtcaattatgaaatagatgaggcattatcctcgaacagggatggaaaagaggaggctttaaagggtaagttcgaagtaagcatgaaggtaagggtatag

SEQ ID NO: 23185 - DNA, 99 bp, Zea mays
  Peptide Sequence Number=SeqID_66560
atgagattgatggttctgggtattgattctggtaatggtaaagaaggcgtcgaggcgaatctccaggagttccaggacgtcgacgagttcgaggattag

SEQ ID NO: 23186 - DNA, 333 bp, Zea mays
  Peptide Sequence Number=SeqID_66561
atgccgtgcggcggcaccgagaaccaggtgcgtaatcccctgaccccagacgccagcacacactggaacgatgcatcgatgccacaaacgacggcgaaccttcctggatatccaccaaggcccaagcgacggcgcacttgcagaactacgatggcaccacaagacgaggcgatggtggggcgctgggctctccaattccccccttcctctaacctgaaccgttctatatgccgcgaggaccaagaagaaggttcaagaaggtggctcaccagtaattccagacgccgcgacgtagctccaggtggtacacggatccgtggagatggtacgtaa

SEQ ID NO: 23187 - DNA, 99 bp, Zea mays
  Peptide Sequence Number=SeqID_66562
atgagattgatggttctgggtattgattctggtaatggtaaagaaggcgtcgaggcggatctccaggagttccaggacgtcgacgagttcgaggattag

SEQ ID NO: 23188 - DNA, 399 bp, Zea mays
  Peptide Sequence Number=SeqID_66563
atgacgcattgcctatccaggagtccaagatgtgacccgggaaaagaggagaagatagaaaccagtggatgtgagcgtgcgaaggacgtgcacctcgaggaggcggtcttggggctcatcgtagataagcaggatgatgcacgcgccgacatcctcgacgaagttggtgtaaaaggtgcctatgtaggaggtcgcggtggtgctgtgatcctgtcgcccgcgccatccgtcgggtgcgagacgatgccagggcgtccacaagaaccggacggcaccttcggcccaagtcgccaccgcgggggtggaggaatcactgttgtttatggtccctcttcgctgcctctgtccacgtcaaggttggtcgacctctacctctcttcacattctcgggacgcctaa

SEQ ID NO: 23189 - DNA, 609 bp, Zea mays
  Peptide Sequence Number=SeqID_66564
atgaaaccacaaagaaaatcgttggggcgtaaccctcttagcgacgcgccatatcggaacccgggcttcaagttgtggtacacggggactgcaacaaacaagaatggagtaggcgtcttgatcgataagagtcttaaggatggagtagtagatgttaagagggtaggagatagaatcatcctagtcaagctggtcattggggacttagttctcaatgttatcagcgcgtatgctcctcaagtaggccttaatgagaactcaaagagggagttctgggaaggcctggaggacatggttagtagtgtgccagttggcgagaagctcttcataggaggagatctcaatggccatgtgggtacatctagcaccagtttcgagggattggctgtcgctcgcatcgtcggcgcgacaatccttaagcacgccgacgtcctggcgcccttacgtaccatctccacggatccgtgtaccacctggagctacgtcgcggcgtctggaattactggaaggttcgccgtcgtttgtggcatcgatgcatcgttccagtgtgtgctggcgtctagggtcaggggattacgcacctggttctcggtgccgccgcacggcatg

SEQ ID NO: 23190 - DNA, 456 bp, Zea mays
  Peptide Sequence Number=SeqID_66565
atgatcaggggtgccgacgagaagggcccacccgccagcgacaatccgagggacgcagacgcggaaggtgttacaattggggaagaggaggcctttgttgacggcgatgttggcggcatcctcgtcggaggaggagtcagtggagctctcgttggagtcccattccctacacacgtgggcatcgccgctgttgtgggcctttgtcttccgaaggtcctcaaaaacatgactaacatattttccagtataatatataccgtcacaggtggcttcggctttgagatgaagcatttgagaacaagtgaccaacattggcgcccacctccggtgaactcactcgaccaccttcagcaaccatcgtccttcgtcatgccaccgaataagtcatcagggccagggactgcactgcagctgctggatgttaatcaagaaacgctacgcgaagctaggagctag

SEQ ID NO: 23191 - DNA, 642 bp, Zea mays
  Peptide Sequence Number=SeqID_66566
atggcggtgggacccggcccactgttcctccttccgaatacctgtcaggaatggaaagtaccaaattttcaaggagcttcgtctgagaatgatcctaacaataccactatatttgttggtgggcttgaccccaatgtcactgaaaatgtcctaaaacaagctttttctccttatggcgaagtcatccatgttaagatccctgttgggaagagacatggttttgttcagtttgttaccagcctcagcatgaatccatgcaatggggtgcgggtgtggctgctagtgttggtgattactatggtggctatggacaaggttatgaggcttatggcagtgggtctgcacaatctcagaaccctaacatgtatggttatggcgcttatgttggttatcccaattagcaatggcaaccagctgcacatcagccacaacaacaacaggtacacaatgtttgctaacgtcatcgactcgagccaggtgaaggttcagcgtggagcaactagcacaggcccaagggatacacatctcggcgcccccacctcccgttcattatccttggtcttcacctccacctacacctacatctccatctaccgaacatcagttgttgatatatttgttatgttatggaatgtggtgtaa

SEQ ID NO: 23192 - DNA, 543 bp, Zea mays
  Peptide Sequence Number=SeqID_66567
atggatgataagaagaaacaacttaagacagggtttcttgactcgttgacgatatcccaagctcgctacaaagaagttgctcggagacatggagaagaatacgaagacttggatgatgctgaatttgagaaagccgtcaaacagaatcagagaaagaaaatgaaggtaatggcagcatacattggacgagccatgtataatcatgtacaacatggcaaggacttaataatactccgcaccactttaatgcataccgtttttattggaaagatcttggcggcgaacatccagaggacaagcctaatttgtcaatatcattatttccatatggtgataaacaaccttccggttcctaaatctaagatcaatgctgaatggttagaaagagatatggtttccgtcggcatggctaaggttgtaaaagacttgctttactttatgcgccgtgaagttcttcatcaacaagggctattctacaatacaaatggaaatttgcaacaattcacagaactaagtttgtacacgatatcacacagtgtttag

SEQ ID NO: 23193 - DNA, 420 bp, Zea mays
  Peptide Sequence Number=SeqID_66568
atgaaccggagcaaagacttgagtgtggtgtggtctggcgcaccggactgtccggtgtgccaccagacagtgtctggtgcaccatgttcgtacgaagatgaaccaactactctcggtaaaactgagccgccggactgtccggtgtgccagcagagcaacgactactcactccaacggtcgactgcaacagccgctgatagaggaacagtgaagaacagtgtgcgcagagtcagagtcgcagagtcagaggcgcaccagacagtgtccggtaacgtggtggcgcaccggacagtctacagtgcctgtctggtggcgcaccgcacagtgcgggtgtttcctccagcactgaatttcaagaatgcaagtgcaatttgcaaggcaaaatttccgttggacgttgcccttgacggtagcaattag

SEQ ID NO: 23194 - DNA, 795 bp, Zea mays
  Peptide Sequence Number=SeqID_66569
atgggcgtgcctgacgtctgcgcgctctggcgcgcattaattgctgttgcaggcgaccgttggcgcgaaccgcgacaaattcccgaggctgccaagttccagagccgcgacctcttggagcaccggacactgtccgaaaagtgcggcaaagcctccaagcgagtaccaacattccctttgaggctcgggggctcctatcgggtcaaggcttcgtctacccaaggggcacgatctcgtctcgcccgagcccagccttgggcgggaactgtagtcccggacgaagttacgtctcacccgagggccttttcaggcagtgggggcaccctcggcacgcccgaggcccaactcgagcaggcttcgtcaagaagcaaccttggcccaaatcgcctctccaaccgaccgtatcgtaggcgcattcaatgcgaggatcgcctgacaccttatcctgacacacgtgcctcagtcggcaaggtcgaactgactgacctgacaggaaaacagcgccgctcgccccgctccgactgctgtgccacccaccagggtgaggctgacaacagccaagttcagcctcgagcgcaacagggagctccgcctcgcccaaccttaggcctcggcctcggaaggaggtctccgcctcgcccgaccctagggctcagcctcaacctcagcctcggaaggtggtctccggctcgcccgaccctagggctcggcctcaacctcggcctcaggaggaatcgcgtcctcgcccgaccccggctcgacctctggagaagtctccgcctcgcccgaccttag

SEQ ID NO: 23195 - DNA, 261 bp, Zea mays
  Peptide Sequence Number=SeqID_66570
atgatgctggtagactacacaacgggggcatctctagctgaggtgcaggggaaggcggcctctcagactccacatcccactgaggcgagggggaacagtcctgctgctcttgctcctggcgtcggtgctcctgctcctcgtgcaggcaacgatgcagtctctccatgtgactggactgacctgtcaccgtgcgacgcagtggacactccgccaggcgagaaggcaaaaaggggatcacagacttacgtgcagtgcacctaa

SEQ ID NO: 23196 - DNA, 309 bp, Zea mays
  Peptide Sequence Number=SeqID_66571
atggatgcagacgcgaagtgcgcgcagcaggcgcgcaatggggtgatcccgccaccgaggcgtgaccttgttctccatagtggaaacgtccttggcctcctccttgcgctagggtcgtctgactgttctgattggttgttggggcaagaaggcgaggtgtctggctgttctgcctctgatactgacttcctcctggttggttgtgctggcggtactgccgctgctgctactgagggaactgcctctagaactattgttgatgcagacgctggttctggtgttgatatccctgagggtgacactgcttga

SEQ ID NO: 23197 - DNA, 480 bp, Zea mays
  Peptide Sequence Number=SeqID_66572
atgtcctcgcgcatcggctcagcagaagcgcaccaatcgcaagaatcagcgccatttccgccgagatccaagcggaccgttgaacccgaccgcggtggacggattctggtggacccgagtcgatccccctgcgcctatagatgctcgagccgcgaccccctctccatatccgttcacgccaccattgtcgaccacaatcgccgccgcggcatctcctcaaaactgcaagggttcggagtcaaacaactgtgcaagaagattcgctggtgggtgaagatcgcgttcgtgagggatttgaagctcgtaaggactcggtggcttggagatttctcgccggaggtactctccaccgcggattcgccccccctgtcgcggtcagtgctcgtcggggcgttatctccgggcggggttgcacctgggcggttcgccggagttcgcggccctggtctatgcgccgccgcgcttcggcgcgagaggtag

SEQ ID NO: 23198 - DNA, 195 bp, Zea mays
  Peptide Sequence Number=SeqID_66573
atgacgagggcgctgaacgcgtggctcgacgggcacgcggcgcacggggctcctgctgcgcagcacgccaaggggagaggacgccgaggggagggagggagaaggagagactcaccggctcgcggtgatcgtcgacggcaggatgagctcagcgcggctactgcacgatggcgagctacatccgatgttgtttaa

SEQ ID NO: 23199 - DNA, 1464 bp, Zea mays
  Peptide Sequence Number=SeqID_66574
atgcatcgcgtccttccaccttccgagcccccggatggggagcgcccgcgttgctttcgtcttgctgtcgttggaggaacgcaacttcgcggaagttggtacctttcaaccatcgctcgacttcaaggattttcatcaggcagcccggctgcatccccttgtcgatggtcacccaagacggtgaccaccagtttgatggtggggagaagcaacccgggctgcgacctctgccccgccctcagcttcaaggatcttcatcatccttgctggggcggagggcgagctgagccggagctctacctcccgcacgggttcgtgggccaccttctccttcaacattcaggggagaaggcgctcaccggcctagcggaaggggcggacttcgacaacgcggggccgagcggccgcaagcgtcgtcagctccagcatgcctggttcgctggctcagctggctctggcacgacttccggtgccacctcccaccactgggcggagtgcggctatctgcccgccgtacgggcggctgttgcgctgcgcgcatcaggggaccgcccaagacgtcgcgcgctgctagggcggcgttcgtgttcttgggctgtcctgcccttgctccggcacgacgccttcgcgcggtggtcggtgctcgcccattcgggaggacttgagtggggatctgccggcggacaggtgaccaccgtcgttggtgctgaggtggtggcggctggagaagtcctcgtcgccgacgagatcgccgctaccgtccgcgctccgggcctcggctctttggctttgatagcttgtcctcgcccctcgagtggggacgtgggcgagggccttatcgcagcagcgtctgccctgaggtcatcgctgctgctgtttggccgctcggagcggaggtcgttgtcgctgctgccggagtgggcggtggcgagccacttgggattttgtcgtcccgcaggccctccaataaaccctcggccgctctgcgatgagccagagctggcggcagcggtgtcagcacggatagaggcggagttggctcgaaaagaagacttcgtcggcccaggagcagatcctccgaccgtgtcaccgtccgaggctgggtcggattccgccgaagatggagtcgatgccgagggtgctgctgctccccctattgatgacttgttcgttagtaacagaattgtttatccgagcgagagttacttattgcggaaggtgatgagtgaggattctgctatcgatatagtcgagaaggcacgaaaaatcgtttcggcagaaaagctttcgagcgttaagacttgttcggccagcggaatcgcttatccgagcgtgagttacttatcgcagaaggtgatgagtgaggatcccactatcgaagtagtcgaaaagcacgaaagatgttctgacagaaaggttttttccgaggaaaattttgacgcggagggggtttcccccttctag

SEQ ID NO: 23200 - DNA, 5391 bp, Zea mays
  Peptide Sequence Number=SeqID_66575
atgatgggatcgccggatgggcggctcgtggagttgttcggtgcggtgaagtcgtggatgccgcggcggggcgaccactctccgccgcccgcgttgcagtcggacgcggcggctgggcagccgctgccgcatgacttgtcgagggacttctggatgccggaccagagctgccgcgtgtgttacgactgcgacgcgcagttcaccattctgaatcggcgccaccattgccggcactgcggccgtgtgttctgcgcccggtgcacggctaactctgtgccccgctcgccgggggacgccgcgagggaggacggcgagaggattagggtctgcaattactgctttaagcgctggatggaggaggaacccgcagcgcggggggccgctgcagggcaacagccgtctagcccgtctctgtctgccgctagtgtttgcagtgacaagtccagcttcactgggacgaatgggcaaatgtcgtcttatgcgaatattagctactccgaatttccggtccatggagagggcaactgcggcgaggatgacggctatcgtgaggagcagcagcctgctatggaccccgctccaaccatggagcctgcagcttacgctgataactcgtctgatcgattcaacttttgcttgcagaggagtgacgacgaagatgatgattacacagttttccgttcagatttggaagagcagcacatgcaaaattctgataaatattatggacctatgtattttgatggacatcatgttagctgtagtgatgacgcaaaagaatctacatccccaaggaaaaaattgacaaccctagttgattctttgggagcagataagaatgaagatcataacgttgatgagtgctgtaatgctcggtcttcttccatgtatagcatggaagtgctagataatgagcccgtagactttgaaaacaatagcttactttgggtagctccagaacccgaggacggagaggatgatcacgatggtgaacatgatgatgatgagggggtggatgctacaggagagtggggatatctacgcacaaacagctttggcagtgggcactgtcgaagtagagataagtcagctgaggaacacaagaaagccatgaaagacatagttgatggccactttcgggcgttagtttctcaacttcttcaggctgaaaaggtaccattagttgatgggagtggcaaagaaagttggctagatatagttacttctctgtcttgggaagctgcatctcttttgaagccagataccaccagcaaaggcggtcagatggaccctggtggctatgttaaggtgaaatgcttagcttgtggtcacccaagtgaaagtttcgttgtaaaaggagttgtttgtaagaagaatgttgctcaccggcgtatgtcatcaaaaaaggaaaagcctccaatcttgattcttggtggtgcactcgaatatcagcgtgtatcaaatttgctttcaagttttgatactttactgcagcaggaaacagattatttgaaaatggctgttgcgaagatcaaagcacaccaaccaagtgttgtattggtagagaaatctgtgtctcgttatgctcaggatttatttctagagaaaaatatctcccttgttctgaatatcaaaaggccactgctggaaaggatatcacgttgcactggtgctcatatagttccctcaattgattgtttgtcatccgagaagcttggacgctgtgatttattccatgtagagaagtatgttgaagagcatggaaccgctggggaaggtgggaagaaaatgctgaagaacctcatgttttttgaaggctgtcccaaaccgttcggttgtacaatcttgcttaaaggtgctaatggtgatgagctaaaaaaggtgaagcatgttttgcaatatggagtatttgcagcctaccatttggcacttgaaacatcattccttgtggatgaaggtgcaactcttccagaactccctttgaagtcgccaattattgtagcttttccagacaaaccttccagtgctgatagatctatctcgacaatacctatcataccaatccctagtgcttcaccgccaaacagttgcctgcaagcatttggcttgcaaaatgatgatctgacatttgatggcactaaacgaatggaacaaacagcattgggagttccttatgaacaaacagcatctgttcagatcaatagccaaaatggacatattaccggttttctggatatggtccctcaatcatctgttggtcccttgtttcagcagtcggacattcactgtcctgatggtactggaggtgtgaacagaaaaatgaatttacaaggcagcctacctggaaccactagaaatgtgttggttaatgactttagccatagtgtatctactgctcatccgacaaatttggtgtcagctaagggtgacggttcacttgccaagaatcctgagattggtgacaagatagcagataagccggctgcccctctcaacgtacagatttctcatgacgatgagagcataaagaataattcagttgcaaaaacagatgaaattccagcatctccagcagaaaatcagagtatattagtttctttatcctctcgttgcgtttggaaagagagtctgtgtgagcggccacaccttcttcgcataaaatattatggtaactttgacagacctttaggcaggtttttgcgtgaccagctatttgatcagagcaagctttgccaatcttgtgagctaccaccagaggcccatgtttattgctatgtacatccccaaggcagtttaacaatatcagtaaggaaactttcaataaagttgcctggcaatggtgaaaatgatggtagaatttggatgtggcatagatgcttacgctgccctcgagtcaatgggctccctccagcaactaaaagagtagtgatgtctgatgctgcttggggtttgtcttttggaaaatttttggaacttagtttttcaaaccatgcggcagcaagtagggttgccagctgtggtcattcacttcacagggattgccttcgcttttacggcttcggtgaaatggttgcttgcttccgatatgcatcaattagagtccactctgtgtatttaccaccaccaaaacttgattttacttctgagcatcaggaatgggtagaagaagaagcaaaagaggtggatgactcagctgaacttctgttctctgaagttctgaacgcactccacaaaatttcaggaggaaggccaattacaggttcttttgatggcaacttgaagattcttgagttgagaagaaatattggagaactggaagagatcctggtggcagagaagactgactttatggagtcattaaagaatctactgaaaacggatatgagaaaggaacagccgttcattgatattcttgatgtcaacaaactaaggaggcacttattatttctgtgttacttgtgggatcaacggctgaaattcattgcaaattcaggtggcaagtactgtgatgcactagctggtttacggattgggagtgggaattctgattttaatggtaaaccagttggtgcagccccaaagctagagaagggctcaaaggctacagttctttcaattgctaaggaagggtcgttacaacagagctcttgtccatctcatggtgaagatgaggggttcaaccaagccaatgaatataatgaaaatatctcaaggaatgctgcagaattgagcggcactgaagattccattgcaaaaatcaatcatgctaccagtgcagatgttaaggatcgactggataaccaagaatccagaactggtgtacgcagggttgtttctgatggacaatttccagttgctactgacattccagacacattggatgcaaaatggagaggtcagaatgaacctgctcctgattcaaacttggcaaaaccaccactttcagtcgaagacacaacagttgatgttaaaagtcaagccaaggctgtgcatacttttactttcactgttcgttctggagatgcagcagaggaattacttagatggattaagatgccatacatgacatcaaacagttccttaaacacaacttctagttcaccactgagattcacttccttggcagagtacattcctaaatacgtcgagttgttttgtgatctatcacagaaaggtggagcaagacttttcttacctactggagctaatgacattgttattcctgtatttgatgatgagccaacaagtgttatttcgtacgcacttgtttcacccatgtactgcttccagttgtctgatgacagcagcaaaaatagagacaaggagtcttcacttccattgcctgtatatgattcaggaaattttaatccatttcatttgtttgaggaatttggatcccactacgatgttacttcatcagtgtctggagttagaggatcctttgctcctgatcaggtgcacttgagtgtttcttttgaagatggtgggccacttgggaaagtcaaatataatgtcacatgctactatgcaaaaaagtttgaagcactaagaaggtcttgctgtccatctgagcttgatttttttagatccattagtcgatgtaaaaaatggggagcacagggtggtaaaagcaatgtgttttttgcaaaatctttggatgatagatttataataaaacaagttacaaagacagagcttgaatcattccttaagtttggcactgaatattttaaatatctgtcagagtccataagcactggaagccctacatgcttagcaaaaattttggggatctatcaggttactagtaagcatgtaaagggtggcaaggagtcaaagatggatttgcttgtgatggaaaatcttttgtttggacggaatattaccaggctctatgatctaaagggatcttcaaggtcaaggtataatgcagattcaaatggtagcaacaaggttcttcttgaccagaacttaattgaagcaatgccaacttcaccgatttttgttgggaacaaggcaaagcggctactggaaagagctgtttggaacgatacatctttcctagctggaatcgatgtgatggactattccttgcttgtgggagtcgacgaggagaaacatgaactggtcttaggaattattgattttatgaggcagtatacatgggacaagcaccttgaaacatgggtaaaatcttctggcattctaggtgggccgaagaacgcttctccaactgtcatttcacctatgcaatataagaagcggttcaggaaagccatgtctgcttattttattgtcattcctgagcaatggatgcctgcaataatcaatccaagcaaatcatcatcaaatatttgccaagaagattctcaaaatgggtctcaagagtga

SEQ ID NO: 23201 - DNA, 61 bp, Zea mays
  Peptide Sequence Number=SeqID_66576
atggcgtcgtccgtcacgcccatccctgtaggagtgtggttgctcgggcaagctcttcctg

SEQ ID NO: 23202 - DNA, 2061 bp, Zea mays
  Peptide Sequence Number=SeqID_66577
atggacaaggatcgccaaggggcggcgcaaaaacgccaggcggtggtcaggctgcatgaagctaggccgaagcggcagcggggggctgcgaaggctgtggcccccggcggaggcaagccgccgctggcggcgaaggcgggcgccgctgcacctagcaaggcgccggaggcgacggcgggcgccggaggcgacaagtcaacgaaggtggtgccgccggccagcggagtggcggaggcttcgaaggcggcccgagcgttgccgttgtccggcaaacgtgttgccgacttcggcaccgatattactgtggacgactatcttggtgggccggacgagggccagcttgctatagctgcgcctggcgtggcgatcacgacggccgtcatagtgccgaaggcgaggggcgaggcgcttggcgccggaggcgaggtgtcggccctcgcgttggtcagggacgaggcgggcgcggcgacccgccggctgaagggagtgacggaggcgctgagtcaggcgacggacgcgctgagtcaggtggctgacttcgccagccgtactgcatcgggggccctcacggcagctgtgtcggccgaagtcgagagacttcggacacaacatgctgacgctgtccgtgagaaatcggcctccaacagcaagtgccgtaagctgacggacagggtggccgccctggagagggagaaggccgacctccggcgccaactggcggcggagaggagggaggcaaacgaggccatcgctaaagagcaggctgcgcaggcggaggccaaactggcgcgggcggagggcaatcttgccaaggagctcgccgaacatctgcaagagcggattaccgccctagagagccgcgcgaagggggccgaggccgcgatgcgtgcggaggctgaacggacgcgcgctcagcttatggatacatatcgcgagctgggcgcgcggaccggcgacttcgaggtgccggaccgagagtccggccttcgctgtctgcagtgggtgcaggaggagctgctggaacttccagccgtcgtgggggggttgatgtcgtacgcctccctggtcacctgcgagggggcgatgaacgcgctctcccgcgaagggtgccggcacttcgaggccttcgaccaggcggatgaagattttgagcgagatatctataaggtcgaagaccccgtagtgaaagaatccgccggggccctttatgaccggatgtggggtctgtacggtcgtgaggtggtcagggagcgggccgagactgcgagggctcaggcggagcgcggcgagcgggtggacgacttcggggctctgaacagcgcgctgccagacccggagccgaccctcgcggaggctgtgactggggtcgccctggagccaaccccggagaccgcagcgaccgcgacggctgcccccacatccgtcgtggccggcgaagacctgcccccgaaggtggccgaaggcgcccctgatgcccccgcagctgctgtgccgagtgctgaagatcccgcggcggtggcggcggaaacaacggcggaggcagcggcggagccaacggcggaggcacccgcaacgtcagggccttcgcaggttcaagattttgggcttgcgcacgcaaccgctgctactgagtttttggcggcttcgaccgcggaaggtgggaatgaatatggtgggtttgcatctgagtttttttattttaccgactccgggagctcggttgagtggactgaggagtcgtcggaggaggacttggattattttgcggccttggacgtggctgcggcggaggcttcgccacacgccgcggacgcgccagacgtgccaggccctagcaccgggcgccgccgacgaagggcggttgcaaaatgtagggttagcgcggaggagggggctcggcttcgtgtgagtagggctggtcggcaggaactgttgtctttgccggccgctgcgagtacaggggaaggggaactgcgaagtctttttgcgggtgaggagcttaggataatgttatttaattatagagagatgggaattattcctaaggttgagccgatgtaa

SEQ ID NO: 23203 - DNA, 162 bp, Zea mays
  Peptide Sequence Number=SeqID_66578
atgacctcgagcccctcatccctcggtctacctccctccaagctcatcctctgccccaagcccgtgcttgccattgctagaattttcgtcaacgctgtgttcgaattccgcgtgaccgaagccacaactccttgctctgtgacgaactgtgtggagcgataa

SEQ ID NO: 23204 - DNA, 615 bp, Zea mays
  Peptide Sequence Number=SeqID_66579
atggcggaaaaggaaaccgacttaaagatgaaaaaccagattagacctcgaagaattatcatagagttatttataaacgtaaagggcattaatgtaatttcgcatgggctgcgacccgtgcctataaatagaaatcgtgttaccttctgtattttgtttgaatattcttcattctttactataatcatgaagatggtttgtacaatccaaaccacccggaccaacaccaactacatccctctgccacggcaagttcccgtctaccctgtggtagtggaggaagtccctatggatctccctcgcatttgtgtggagaacggagttattctggaggacagctcggaggagtttttgcctacacccaccccgttggtagaatcactagccttcgcagctggatcgtcatcttcagcaccgccagcactagcagtccaagcccctgctcccggaggcgacaacccagacgactctagtgacgacgatgaagacaaagaagaagaagaggaggaggaggagaacatcaacgaggaagtcaatggtgaacagtacgaccacttcgtggggatatggcctgtcaccgaacattatacatcaatgttcgagacggggcactaa

SEQ ID NO: 23205 - DNA, 100 bp, Zea mays
  Peptide Sequence Number=SeqID_66580
atggggaccctctctggagggttctttgccgagtgtcccaggtggcactcggcaaaggtggattctttgccgagtgctgtcgggcagacactcggcaaag

SEQ ID NO: 23206 - DNA, 399 bp, Zea mays
  Peptide Sequence Number=SeqID_66581
atggcagcccacgttaacatggggtcgtattcttggctaaggtacttcacccagggggccaccaccatcgtctttagaaaccttagcgggttgcttcgtattaagatggttcgcaccctccaaactacccgcatcaacaccagctacgcccctcagccccggcaggtcccggtctacccagtggtagtcgaggaagctccagcggatctccctcccatccaagtggagaacgtgatcaacctggaggacagctcggaggagcagctgccgacccccaccccgttggccgagtccctggcctacgcagctgggtcatcgatgtcagcatcgtcggcaccagcctttcaagcacctgcacctggaggcgacgaccccgacgactcccggagacggcgatga

SEQ ID NO: 23207 - DNA, 1035 bp, Zea mays
  Peptide Sequence Number=SeqID_66582
atggggtcgtattcttggctaaggtacttcacccagggggccaccaccatcgtctttagaaaccttagcgggttgcttcgtattaagatggttcgcaccctccaaactacccgcatcaacaccagctacgcccctcagccccggcaggtcccggtctacccagtggtagtcgaggaagctccagcggatctccctcccatccaagtggagaacgtgatcaacctggaggacagctcggaggagcagctgccgacccccaccccgttggccgagtccctggcctacgcagctgggtcatcgatgtcagcatcgtcggcaccagcctttcaagcacctgcacctggaggcgacgaccccgacgactccggagacggcgatgacgaggatgacgacgaagacgatggagaagacggacacatcaacgaggaagctgactacgcccagcaggaccacttcatggggattggtccagttgtcgaacattacacatcaatgttcgagacaggacgcttccccaacctgctgcaggcagtgctgtacgagctaggagcctacgcccgccccctgtacgagacgaggcgagtgagcgagcctccccgggcttgctattacatcactcgcatccatgtcagggtgatggatgcaggtgacaggggattgaggactctgtctgctcacgagtccctgataccgctgtccacctacgctgcctctgtcagcgacgctgcccgtcggaccctgtggtcgcttagccacacctaccggcagcagctgcagaacacaaggttcaggcatctccctcagcgcctgcgagctggtgtagtggccggtctcaacaccgacctggacagtgccactctggacctctacagtgtgcacttggagctggagaatgcccacgccaggatttcagccctggaagcccaactgcaaggactggatccgccagaagctcaggtccccgccgtggcgctatctcctccccgcaagaggatgcgctatggagagcccggatcagtcactaggctgctttag

SEQ ID NO: 23208 - DNA, 426 bp, Zea mays
  Peptide Sequence Number=SeqID_66583
atgagcgaaaggaattgggcggagactcactggatagcttggtccacgcgcggcggcggaagaccgaagtccggtgaggtcgatctcgggcctccggtgaagtccggtcgggtccgagggcttggcaagcttcacgggctactggcggagctagctgaagcactggcttgcccggaagatggctggggtgggctggccacggtggccgaagctctggcggcaatggcgggcggaattaagctcgccggagctaaggggaagtggctggccggtgaggccgaggtcgaactcgtgttcccattgcctctgcccctgttcaagcgccgattgggagcaaatcttcgcgaatttgggcaagatcactgcaagggatttgttcaccagaccaagctttgtcttttgtgtatggacgacgtgcggttttag

SEQ ID NO: 23209 - DNA, 801 bp, Zea mays
  Peptide Sequence Number=SeqID_66584
atgggggacatccgccgtctttccgcctcgtcgttggaggacgcgactccgtgggagtgggtacctttcagccatcattcggcttcaaggattttcatcagccagcccggctgtaccccccgccggcggtcacccaagacggtgaccaccagcccctgggtggggagaagcaagtcgggctgcgatcttggtcccaccctcagcttcaaggatgttcatcatcctcgctggggtggaggccgggctgagccggagctctacctcccgcgcgggttcgtgggtcaccctctcctgcggcgttcgagggagagggcgctcgccggccctacgggcgggtcggacttcgacaacgcggggccggtcgacggcaggcgtcgtctgccccagcgcatcgggctcgtcggcttggcccccagtgccccctcctgctggaaggcggctgccgcgccgtgtgcacgggaggaccgcccaagatgtcgcgcgctgctagggcggcgttcgtgttctggggcggtcctgcctttgcaccggtacggtgcctccgcggggaggtcggtgccctgctcgtccgggaggatccgagtggggatctgccggcgggctgacggcccctgttgtcggtgccgaggcggaggtggctcgagaagtccccgtcgccgacgggatcaccgccaccatccgcgcttcgggcctccggctctttgtacttgtcctcgcccctcgagcgtcggcgtgggcaagggtaaggttgcagcagcgttcgccctgaggccatcgccgctgcagtttggccacccgtag

SEQ ID NO: 23210 - DNA, 207 bp, Zea mays
  Peptide Sequence Number=SeqID_66585
atgaaggttgaggcgtgccaatcgccgagtgtgcggtcctcagtgggcgtgagcacccagggcaatgttgtgccagttggttgttctggctttgacacttctcctctttctagtgaccttggtctactacttgagcttgatcttaagccttatgacttaccacataaccataggtattatctcattggttgtaagtcacatccttag

SEQ ID NO: 23211 - DNA, 96 bp, Zea mays
  Peptide Sequence Number=SeqID_66586
atggcgccctgcatactctgtgacgacggtggctctcagcccccttacggaatgggcgagcggcactacaggaaactggttaaagaacgtgggtga

SEQ ID NO: 23212 - DNA, 546 bp, Zea mays
  Peptide Sequence Number=SeqID_66587
atggccaatggttgtgtgggctgtgctgtgaggcggttagagatgaagcatgcaggaggaaggctcacccagcggctgggaacgtcttcacttgtggaggcgtccttcctcggtggcgcacagggcgtggtggcggcctccagcagcgcgcgagcgtgctccttcctcagcggcagcgcggcccgctcgtggtggcgcggcggcagcgcgggtagcgcgcagagcgtggtggcggcctccagcagcgcgcgagcgtgctcctccctcggcggcggcgcggcctaccggcggtggcttggcctggcgctgtgtgctctatgtaacgacttgaactggatcaccaactctccagtgatgaccaactcgccggtgatgaccaactcttggatgatgaccaattctcctatgaccaactccatcgaccaactctgcgacacggaccagatgactaactctccgttgatgaccaactctttggtgatgactaactctccagtgatgaacaactctcaaatgacgaccaactatacgagatggaccagatga

SEQ ID NO: 23213 - DNA, 174 bp, Zea mays
  Peptide Sequence Number=SeqID_66588
atggagagtcatgatctccgggcagaatgggaatcacgacttgtgggtggttatgagattgatggttttggttatgactatgatgctggttgtcagcattgcaaccactgctcaggcgaagatgaagccgtggaaggagacttccaggagttccaagattacgacgagttctag

SEQ ID NO: 23214 - DNA, 1957 bp, Zea mays
  Peptide Sequence Number=SeqID_66589
atggaggagttgggtttaagggatgtagatgctaggaacaacagtatagaggaactagaggtggtcgaggaagatgcaaggagcaagagcttgaatgaatgtgaggctgtggatgtggatctggatgctatggacatcaatataaatgacagagagacgatcaatggagatacaaggagcaagagtttgaacgaatctgaggctgtggatctggatccagatgccatggaaaacaatatagatgaaatggagacggtcaatgaagatgcaaggactaagagcttggatgaatttgaggctgtggatgtggctccagatgccatggacaacaatatagatgaaatgggtgtggtcaatgaagacgcaaggagcaagggcttgaatgaatctgaggctgtggatgccataaacaacaatatagttgaattggatgcggtcaatgaagatgcgaggtgcaaaagcttgaatgatgaatcagagctggttgaagaggaatttaagagcccaagctttgatgacatgaacaccgtggatgagcacgtcaatggcacagacacggatggattatgtttgggatttgtggaagttgaagcggtgcctgctgtacatgaggcaatgcctgataataatgaagaaacgacagaggaagcaccagcagggggtgctgatgtggcaggcagtgataatgtggcagtgcctacagatgtggattgtgaagaacactatgttgaggcagtagttgtaacacaagaggtagtggctgttgcagaggagttgggggatgaggaggccaagagggatgaagagaaggatgtgatgggattgagcttgggttttaattctaccaatggttatggtgctatggatgtggaaaaggaaaccaatgttgaaagtttggatgaggacgagagtgacagtggcaatgaagaggcagaagagtcagaggatggtgcatttgacgttaatgatggagaggacatgaattggagaattggggatgtcaacgggggtgagggaatgacacattccttacaacgctgtaacacatttgggggcatggagtttgagaacctgaataaaggagaggatgagatgagggatgagttaagatttgacgattttcctgcaagggcatctttggaaaggatgacatcatcaaacctcctccaagccatgaactcaattccctcatcatacaatgtatcagagaatgtgcatgatctgccctctggggatttcttggctatgggggctgatgcacataagagtggagtggacctgggaccagggagctcatatttatttgggaataatggtaagaggaatattgatgatattgatgggtacaatggcaatatgcaggtgcaagaggggtttcctcggtctaatcagcagaagaggatgcggcatagtaacagtagcaacatatcacctggatcaggctttttcaatgcaagcttttcggtgcctatacagaacttgatggttgaggcaagcaggctctatgagcagaatgagcaaaaacttcagagtttgcaatttgagaagcaacattggtctgacatgctgcagcagaaggaagccattatccaatccctaaactcagctcgttttgagcaacataataagtatcaagcggagcttagacgcttcgagcatgatctgaatgttatggctcagttggtcactacatacaaaaaagctttaaaacagacccgggcttcttttgatgagtacaggaagaagttcccttgcaatgttcctctttatggtgatgttgcttgtggcggtggtcttgttcttagtgtgagggagttggagaaaaggcggtgtgaggagcagcagcaaaatattgccatgaagagcaagatttgctaccccagctacagaggaatctaccctagctacagaaggatctactccagctacagaggaatgagctccctgacaatcagag

SEQ ID NO: 23215 - DNA, 873 bp, Zea mays
  Peptide Sequence Number=SeqID_66590
atgacctcaaggtccacgacctcatcctccgcggccccgtcgcctagaagatccatcgccacaatatccgactttctcttcctccccacctcaagctgcctccggtgtcatccacacccagtggtggagcggcagggacgagccaccggagaaatatggggatgtggtcgtcgaggagtcgcacacaatggtggtcgccgaggaggaggcgaagaggtgggcgaggccgtcgcggaggaagtacggatggaggttgatggtacggggtcaggtggtggcggccgccaggcacgatgctcactcgtctcccaagagacaggggtttccggcgtgcgtcatagcgacgtggcgatgggtagagaggggtcgtctggggatgcggtgagcgcaagcggaggaagaaccaaggcaccactctacaactggaggagatgtcgagacggaaggagagtgcgggtacagggggcggagccaacagaagtctgctgcaacgtacgttggcaggggcatggcgggctggttagcgggggtgggggagtgggcgtggagcgtggggatgacgacgaggcgaaggtcacgacaggcgtggagcggggggccgcgatggagggcgggggcagggacgggcaacgcgacgatggaggctcagatggaaggccgacgacgggcgggaggttgggcaagacgggcaatagagatatcgcgtgggcagacgtgggggcagggagacgtgggggcagggacgggcaacacgacgatggaggctcggatggaaggccgatgacaggcgggaggttgggcaagacaggcggcagagatatcgcgtgggcggacgcgggggcacgaggaagtgtggcaccgcggcaagattag

SEQ ID NO: 23216 - DNA, 801 bp, Zea mays
  Peptide Sequence Number=SeqID_66591
atggatgacagttcagtcaaagcagaagaccagacaatgttattggaggagggtggccaagcaatggctgcaaagccagcttatacttccctcacatcacaaatactcagacttatattcatggaccagttgcttctggagaatcgtttaacactgagggcaatatccgaatttggagggtatctactttatttttacatatgtgatcgtacaaacctgcttggagagtctgccaagaattacagtcgagatctgttccttttcctctactttcttcttatcattgtagcagctatgacttcctttaaggacatcaagcagagggatgagttcatctgtgttcagagggaaatccggcgtcaaccacaacactggacggaccacgcaaagaagcagctcagggtgatgcagcagctggacgaagaccacacgctgacgcagctcactaacgcatgggtcgaccttgtgctgggtggttccaagatccaagaagcgcgcctcatcttccaggacctgtccgacaagtacccgacgacctgcacgattcttaacgggaaagccctgtgctcgacgcacatgggaaacttcgaggacgcggaggggttgctgctcgagtcactgaacaaggacgccaaggatactaagactctcgccaacctcacggtgtgcagcctgaacctggggaaacccacaacgcgctacctcaaccagctgaagctcgcacacccggaccatgcgctggtgaagcgaatgtcctccgctgtagagagcttcgacagagcctgccaagcaatggcgtga

SEQ ID NO: 23217 - DNA, 108 bp, Zea mays
  Peptide Sequence Number=SeqID_66592
atggcggtagaagaggaggaagccttcgatggtgcgctcaccgacgagcagctgcgagagcctaggaacaaagcctatgagtttattacgtcatataatataatataa

SEQ ID NO: 23218 - DNA, 714 bp, Zea mays
  Peptide Sequence Number=SeqID_66593
atgtgcctcatcctgcagtacctgttcttgacctgtggggggtgtgagacagcaagagtgagctcacatacgttcatcgctcaacaagttgtggggaataatgtgcatgaactcgccaaaggtgggagctcacgtgaagtaggttgcacatctttacccacaagtcatgttacccatctgctaagggatcgcgacttcccatacacctctaccgaggaggcgaggcaggggttcttgcctgaccgccatcgcagcaaaatcaaccaaggacctccctacactgaccactcccctactgcccttgcccctttcggggtctcctacgcaaaagtcgctcggcgaaggggtatagagaaatttgggccattcgatcaaaaccgagggcccagattacatccgcttacgctgaatcgaggcggcgcttctatccccgcggtggaggacctgccggagtcggccaagccgccaccccagagccatgcccccccaatccgattggtcctacacggtctacagagggaaacgaatcaattgagaagatccctaccaggtttcgtgaagcagatacgggtgaccacgccgatgtacgaggccgcgatgatgtgtctgtcctccgagcaattcatggcgccccatggttcctccttcccacgcgatgctagaaaccctcctagagatcaggagaaacacccagagccaaagacgagcccatga

SEQ ID NO: 23219 - DNA, 345 bp, Zea mays
  Peptide Sequence Number=SeqID_66594
atgcagattattgaaagaaggtgcgaggctcaaaagggtgctggtataaggtcccagtcgaggctgcctcctagggcctgttgccaactctttttaggtatgctggtatccagcctcgacacgtcgagcctacatcccaggggggccaggtatgacctactcgacatcagtagggtcgcgctggaagcgcgcgaccgccatctccacgacatcttgtacgacctcctgggtggcgtcttcagcagcgggccagcggtcaccgttggaggcggcaccgaagccatcaaagccaaagagatggagccacagctcggctcgcttcccacccgacagagttggagctag

SEQ ID NO: 23220 - DNA, 1845 bp, Zea mays
  Peptide Sequence Number=SeqID_66595
atggtgcggagtcccgccttcgcgctaaatctacgaaaccgtgatccggccgcctttgtgcgtgaagctgaggatgaggcggtgcggcttgttgggcgttatgtgccgaggaccgagggccagcgcagctgggagatccgcgggtcgaatgaccgtttgaatagggtcttcgaattgaaccaactgccatatgacggctatcctggtcaagacgacgcggaccgccgggggaagaaaccggtggtggagactaaagacgactctgcgcgggcggccgccccatcctctaagaagaggaaactaggtactgccatgggaggacttggggtttctgatgggtttgctagagagttgatgaggacatgcgcggccccgggggaaaggatgtcttcgcccgagctccgggagtcttcggctcggatgctgaaggttaccgggggttgctggcctaggaatgttcctatcccccgcgcggccagcggggacgtttttacatctcgcatggttcgcaaatggagagtttttccttacgggcggaatattgctgctgttgtgtcggcagtgatggacaaggatcgccagggggctgcacaaaagcggcaggcggctctcaggattgttgaagccaggcccaagaggcaaaagcgtgggtcggcgaaggatgcggcccccagcggaggcaagccgccactggcggcgaagtcaggcgtccctgcatctagcaaggcgccagaggcagcggcgggcgccggaggctccaaaccgtcgaaggctgtgccgccgctcagcagggtggcggaggccgcgaaggcgtcccgagcgttgccgtcggcaggcaagcgtgtcgccgacttcaccaccgacatttgtgtggaggactatcttggtgggtcggacgagagccagcttgctatggttgcgcctgccgcggcgatcgcgacggctggcgtagtgccgaatacgaggggcgaggctcttggctccggaggcgaggtggctgaattcgccagccgtactgcgtcgggggccctcacggcatctgtgtctgcagaagtcgagagacttcggacgcaacatgctgacgctgtccgtgagaaatcagcctctgacagcaagtgccaaaaactgacggacaaggtggccatgctggagagggagaaggctgaccttcagcgccaactggcggcggagaggagggaggccaacgaggccatcgccaaggagcaggctgctcaggcggaggccaaaatggcgcgggcggagggcaatcttgccaaggagctcgccgaacatctgcaggagcggctcaccgccctggagagccgcgcgaaggggccgaggccgcagtgcgtgtggaggcagaacggacgcgcacacagcttatggctacatatctgggtgcaggaggagctgcaggaactccccgctgtcgtgggggggtttatgtcgtacgcctccctggtcacctgcgagggggcgatgaacgcgctctcccgcgaagggtgccggcatttcgaggtcttcgaccaggcggatgaagattttgatcgagatgtctataaggttgaagacctcgtggtgaaggattctgccggggccctctacgaccggatgtggggtccgcactgtcgcgaggtggtcagggagcgggcggagacgacaatggctcaggcgttgcgtggcgagcgggtggacgacctcggggcgctgaacagcgcgctgcctgacccggagccgacccctgcggaggccgtgtccggggtcgccctggagccaaccccggagaccgcggcgaccgcgacggctgccccatctgttgcggccggcgaagacctgcccccaaag

SEQ ID NO: 23221 - DNA, 522 bp, Zea mays
  Peptide Sequence Number=SeqID_66596
atgtcgattaggggtgtcttgggtggcctaccaatcccaagacaaagcctaagatctctcctccccgacggggccctcctaggagcgagatccaggcgctgtcggcgaactccgccgcccctgcgcacgcgtgaactgttcggccaccaggcgtggaccgtccggctcgtaaggcaggaccctcgtccctgcgccaggtcgcgacctctggcctctggccgtggaccatccgcgcctctgcagagagcaccaccgtcagttctcatcgcagtgattggcacccggatcggcgccaacacactttttgggactccgctggggactccgcatgtagacctatcagatcggccctcaatggtcggttcaaaggatagctctaatgtttccaccagcaatatcatcgagtcgacttgggaaaccttgctggctgaagaacagcttcagttcgaggagcacaaggagcagttgatccatgaagcaaaaagcaaaattcctggccaacttcaatgtggacaggaataa

SEQ ID NO: 23222 - DNA, 252 bp, Zea mays
  Peptide Sequence Number=SeqID_66597
atggcgcggcgcgcctcggcggcaggcgtgtgggcggcggcaggcgtgtgggaggccttcgcggcgcggcgcagggcgggcgtgtgggcggcgacgcgactaggggcggcgacgcggcgaggggcgcgcggggcgcctcggacggcgggcggcggcgcggtgaggggcggcgcgtgcgggcggcagcgcggaagcttcgactttgggatgaaagcatgcgtgatatggagatacaacccgagagcaggatga

SEQ ID NO: 23223 - DNA, 537 bp, Zea mays
  Peptide Sequence Number=SeqID_66598
atggagacggtgcccgagggcaagcccatcgtcaggcgaggtggagatggtgtccgagggcaagcccgacatcgggcgggacagagttttgcgcccgtggcccgggtaggtatgcgcattaaatgcgagtgttccccactggccttcaggtgcgctttgtcctcctcgtctaagacaagctcgggcgagacggacatggcggtttcaaggcgaggtgccctcgggcgaggcagagacttacccgaggcagagattttagagggccctcggggagtggtctcggttatgatggcgttcttatggggaagaccctcgtggtgggccttagatgaggagtgtgagtttgcaagggtagctctcgaggcttcacgaagggcaaaaggtcgatcaaggagtaccttgacttcttttatttatacgcctcttcgtgaggaggaagagggtgaatgcgtcaagccaccctcgatgggcaatgaacatgccatttctgttgagctgttaacgggtaatccgagcggaggcccaagctccatttga

SEQ ID NO: 23224 - DNA, 213 bp, Zea mays
  Peptide Sequence Number=SeqID_66599
atggccagaagtatggggtttccgaagcttgaggctggcctctatgccatgacgaaggacgatcttgcggatagccttgcatacaatagtctgaaggccaaagctgccttctctatcgacgatacgaaggacccctcggccgaagcaaggtcaatagacataattttttttactgatatctgggaaaatggtggccgagggatggccccatga

SEQ ID NO: 23225 - DNA, 411 bp, Zea mays
  Peptide Sequence Number=SeqID_66600
atggagcaccgtcccgggctggaaaggttgccggagaattcccatctggagcttgacgggaagctgttcgtcaacacgcagcaggcccctacctggcgcgccaactatcggcgtttcgaccccggggggtccctggaccgacgagtaaattgtcgccgcgtgccccagcccagatgggtcgccggagaggttttggcaccctgttcgtgtgatgtcgtggccgtcagaggagcgctggagcctggcgaaaggacagctgtcagggctatcgagtccttgctgacgtctccttgcttccgtaagagggctgagagcccaccgtcgtcatggagcatgtggggcgccatcattacttgtttaccggggcgagctagatgggacgccggtcttgttccccgtagcctgagctag

SEQ ID NO: 23226 - DNA, 444 bp, Zea mays
  Peptide Sequence Number=SeqID_66601
atgaacaagacaccggcactcaaggtgccattacaaatggaactccggttccacctccgcaggtacgaacaaccccacatgattggagggcctgcggagcaacagaaggctgacagatggctcaccgtcgctcgctccaacagcgacgacgacgacttctgctccaaggggccgaacagcagcagcgatgacctcagggcggatgctgctgccataaggccctcgcccacgtcctcacttgagaggcgaggacgagcagaaggccgtagaattggaggtcagttcgcgggcggcaccgactatctcgtcagcggagaaacctcttccggctgccacggcggaaggtggcaccggaagcggcgccgaagccacccggaccggagggccggacacgcggcagctgccagcaccgcgaacgacgaacacccttcccccgatcgctga

SEQ ID NO: 23227 - DNA, 798 bp, Zea mays
  Peptide Sequence Number=SeqID_66602
atggacagaggcagagttggctcggaaagaagactttgtcggccggagcctggccgggccgtccactggcgggaccagcgccggagtcgagttgtcgaggccacaaaccgggctgatatcctcgggggacagctggctgaggctttggggtggccggccgaaccgtctgctcgggccggattcctggagaagaccccggcggcgatggccccaggcgtggtgctgatgtcgtccttcggagttgagatcctccgaccacgttgccgtccgaggctaggtcggacttcgccgaagttgttgttgacgctgagggtgctgctgctcccttcaactgtcaagtgtctggacttatttgtcggtaacagaattgtctgtccgagcgagagttacttttcacggaaggtgatgagtgaggtatccgtatcccggaggcgtaggagtccctcggctcggtcggccttgccgcttacgcgtactcttactcgtccatgggattttgctatcgatatagtcaaaaagccccgaaaaatcgtttcggcagaagagttttcgagcgtgaagacttgttcggttcgcagagtcacctatccgagcgtgagttacttatcgcagaaggtgatgagtgaggatcccactttcgaagtagtcgaaaagcacgaaagacgttctggcagaaaagatctttttctgaggaaaattttgacgcagagggggttccccccttctagcccccgagggagggtcgggctttgccgaggcaaggctgacccttccttgatgactagactttgtgtgtga

SEQ ID NO: 23228 - DNA, 1143 bp, Zea mays
  Peptide Sequence Number=SeqID_66603
atggtgggatcgctcatgtctgctggctgcggtgcaaaagcgttggaggactgcggcgatggtggagggctagggtggtgggcggaggctgtggaagaatgggtgggagcggattttggaattggaattggtattggtaaagtcgaattccagcgtttggatgttcacggaattcggaactggaaatccatcccaattcccctggattgctggcaataccttcaacttcaagttgttgaatatgtgaatagtgatgccccttctcttcctgagtcacaacatcggggccttgttcaacgactcaaagggaagactggacgatttcgtggcaatttgtccggaaaacgtactgagtacacaggaagaaccgtcatatctcctgatccaaatttgaaaataacagaggtggctattcctgtgttgatggctcgagtcttgacttatcctgaaagggtttcaaactataacattgagaagctgagacaatgtatacgaaatggaccattcaaatatccaggggctaattttgttacacaacctgatggcatgaagcagagcttaaagtatggtgatagaaggattactgctcgggatttaaagtgtggatgtatagttgaaagacatttagaagatggagatgttgtcctctttaatagacagccgagcctgcatagaatgtcaattatgtgtcacagggcaaggataatgccatggagaacactcagatttaatgagtctgtttgcaacccttacaatgctgattttgacggagatgaaatgaatttgcatgtccctcagacagaggaagctcgcactgaagcgcttatgctcatgggggttcagaataatttatgtactcctaagaatggtgagatactggttgcttccacgcaagacttcttgacctcatctttcctagttacaagaaaagatactttctatgatagatcttcctttactcttttgtgctcataccttggtgatggaatggagaacattgatttgccaacaccagccttgattaaacctgttgagctttggactggtaatgggaacaaggatggcctttactctgttcttttaagagattataattctcatgctgcagcaagctgtatgaatcgtttggcaaaatttaggtga

SEQ ID NO: 23229 - DNA, 162 bp, Zea mays
  Peptide Sequence Number=SeqID_66604
atggttagagatggcaatgggtacccgcgacccgatacccgatgggtatttactccattaggatgtttaatttttgtgggtacgagtgacccgatgggtgacccatacccacgtgggtatgggtatgggggtaaatccatacccaccagtgtatatgggtga

SEQ ID NO: 23230 - DNA, 903 bp, Zea mays
  Peptide Sequence Number=SeqID_66605
atggatgatgtttttcctactgtccatgtgctttattacatgcttaaagaccttcacccgttttacttgtgtgaattccctgagcagggtgaaattctcggcattactagatacggcattgcaaagatgaaaagcagtgtgctgatgcttgcttcatttgagaaaaccgcagaacatctattcaatgcctcatacagtggtcgtcaggatcagatagagggagttagtgaatgcattatcatgggcattcccatgcagctcggtaccggtattctcaaagtcaggcaaaggctcgaccatgtgcctgaattcaagatgtttcgagaatttgaggagcatgattttgcaaggacaggatgtactgcggcagatacggttgagcttaaggaaggccctctagaacagttcacacatgagatggagccctttctacgcaagcaaggacttccagttcgcttgaacaaaggtgatcttgcactcatcgattggattaaagaacttgcactccggttgctgatggttgtcattgggagcagtatcagatctattccaattacaggcaaggatgttacccagtttattcatcaacttctaaaggtagcttcctctgccttcttgttgactgtagaaagacactactcaacctgtctagataacgaaaaagctccacctgaacatgttaacgaactcctttgggcttgcatgaactacagggaccttgagatgggtaaggaggtagccaagaagctttttgtgattgagccaggtaataccgggaactatgtcctgcttgctaatatctatgcgtcacatggaagattggaggaggcaaaggaggtgcggaggtggatgatgtttcaggagttaaggaaggaaaagggatgcagtttaatcaacaattga

SEQ ID NO: 23231 - DNA, 153 bp, Zea mays
  Peptide Sequence Number=SeqID_66606
atggccagcgtgggcgcgtgcgtgagcgcgcttctgcgcgggaacgtgatgaagtggaagtcaccgaagaaaggacaccaccaccctcggattctcaggcaggcaactgcttctactttgatatttgtggatctgagccagactcacctgtga

SEQ ID NO: 23232 - DNA, 363 bp, Zea mays
  Peptide Sequence Number=SeqID_66607
atgggcaagaacaacaaacgcaagcgcgagccgactcctccatcggaggatttcggtgactcggaatactcggaggaggagttctcctccgagtccgaggggtctccggctcccacgtacatccgggccgtcgagcactccgggctcgaaggctcggatgagtcggagtactcctcggatgaggaggactcggacggcggcgacgagggtgaagacgacgacgacgacgacgacgacgacggcgacggtgacggcagcggcagtggcaggggcggcggcgacggcagcagggacagcaccaagggcagcagcaggggcagcaccaagggcggcggcggcggcaggggcagggccagtggctag

SEQ ID NO: 23233 - DNA, 513 bp, Zea mays
  Peptide Sequence Number=SeqID_66608
atggcgctctcccccctcctccttgtggaaaggcgacacaggggcacctcggaggagtcaaaccactcctccgaggcctcgggggctacacccggcggggctcggactcgggctaagccccggaagacggcgaactccgctccgcccgacccagggctcggacttgggctcagccccagaagacgacgaattccgctccgcccgacccagggctcggacttgggctcagccccagaagacgacgaactccgggttcgcccgaccccaggactcgaactccgccctgggcctcagccaacggcctccgccttgcccgacctaggggctcggactcgacctcgacctcggaggagccttcgcatcgcccaacctagggcgcgggccgggccacgtcaacgggaggcgccatcattaccctactccaagctgactcaggctacggggaacaagaccggcgtcccatctagctcgctccgccagatgggcaatgatggtgccccgcacgctccctga

SEQ ID NO: 23234 - DNA, 870 bp, Zea mays
  Peptide Sequence Number=SeqID_66609
atgcgtgcaaccgcccagcggttacaagcggctccccacttttgcccagaccagcgggcgaaagggcgggcagtcatgcaggcggcatgcaaccgcgccaagtgggcgcacttctccgactcccaacacgcccagcatggaggcccaggcccacgtgtcatgcaaccggcgcgccgaatgcttcgtgcatgcaactgcaccgccacttgcgccaccgccgcgcctcctcgactgcggaaccaataccgcgactcgaggcgacccagaacacgacccagcggcgccagcctgacggtcaatgtgaccaaaaatgggccggcggtaatggcggtggcaggcgggcaggagcagcggtcacgtcgtcagccaagcctacgtcccatccaggagcgacgagagaaccctctctcacggcgtgaagacgacgcgcccgtgttccgttcctcgaacggcccacgcaagcgcaacggccgccccgcgaaccactcgccccgtcgcattaactccgtggcgggacaggcggcgcctctggtgtcaaagattcaacaaaaaaccaatagaaagaacaagacagggttcaaaacaaaggagcaaaaggaaaccgaagtgctccctggtctggcacaccggactgtccggtgcaccagggaggattgccttcgaactcttcaccttcgggtttctcaggcgcagcccactataattcaccggactgtccggtgcatcaccggacagtgtccggtgctccagagtgaagcagctctgaactggccagcttcgggaaaatggaaggccgctccgctaaaattcaccggactgtccggtgcgccagccgagcaacggctacctcgcgccaacagtcgactctga

SEQ ID NO: 23235 - DNA, 606 bp, Zea mays
  Peptide Sequence Number=SeqID_66610
atggaaggccgctccgctaaaattcaccggactgtccggtgtacaccggactgtccgatgcgccagcggagcaacggctacctcgcgccaatggtcgactctgacagcaaacagtgcgcaacagtacacgcggcagaaagtcagagcagatggacagaggggcaccggactgtccggtgtgcaccggactgtccggtgccacatgaggacaaagcctctaacggtcgaccagctccaaccccaacggataggatgacgtggctggcgcaccggacactgtccggtttcgcctatcctcccccctctaggcgactttcaccgggaaagggggataccccgaaaaggatccttccccgtgaaggaaccaggctccgagcctccctactgatcagaggtttgaaggctggcccctcggaagggttcaacagccgcctcagagcgtgtgggctccacacccactactggtcagaggttcgaaggctggcccctcggaagggttcaacggccgcctcaggctactcgggctccgcgcccactactgatcaggggttcgaaggctggcccccgaagggttcacaaccgcctcagacacggagcgagggatga

SEQ ID NO: 23236 - DNA, 450 bp, Zea mays
  Peptide Sequence Number=SeqID_66611
atggcgcctcctgttgacgtggctggtctgcaccctaggttgggcgatgtggaagctcctccgaagccgaggtcgagtttgtcttctgtggctgaggtcgagtccgagcccctgcccgagtccgagcccttggtcgggcggagcggagttcgccgtcttctggggctgagcccaagtccgagccctgggtcgggcggagcggagttcgtcgtcttctgggacttagcccgagtccgagccctaggtcgggcggagcggagtttgccgtcttctggggctgagcccaagtccgagccctgggtcgggcggagcggagttcgccgtcttccggggcttagcccgagtccgagccctgggtcgggcggagcggagttcgccgtcttccggggcttagcccgagtccgagccctgggtcaggcgaagcggagttcgccgtcttccggggcttag

SEQ ID NO: 23237 - DNA, 90 bp, Zea mays
  Peptide Sequence Number=SeqID_66612
atggggaatgctgacatcaaagcaacatttggaaatggcaacaagcatgaactgaacgtctcaacataccagatagggagcatatattga

SEQ ID NO: 23238 - DNA, 822 bp, Zea mays
  Peptide Sequence Number=SeqID_66613
atgaacgggtttatcagatttatcgaaaaatctgtcatttttatcgttttgctttcagatgaccacccccgcctccgttcgcccgacctccgaaaaccccgtcgcgattccaaccgcaatccgccgcgcctccgcaaaaccttcgcgagagccgtatccaccgcaaacccagcctccttcacgccctctcccgccgactccggctcgcggagccggtacggtggcctcgggagtggcgcgcccgcgtccgtcgaccgcgctgacgacgactggtcgcgcgggaagaagccgctgccatcaggcccgtcgcgctacccgagccttggctccacgggcggcggctttcgcgactcgcccgtctcgaccgactcctccgatcgctggtcccgtgccgcaccgagcaatgacgaccgtgagagacctcgcatcgtgcttgatccgcccaaacgtgacgccttggccacccctacccctcctgctgaggtgggacgcagccgtccgagcccatttggagccgcgaggccacgggaggatgtgctggccgataaggggctggactggaaaatggaaactgagattgatcagaagaggactagccgacccactagctcgcagtcgagtaggagtgtaggacagagagtgctcgaccatcacgtcctgggagccccgggtcacagatatcagccaccgggctgtctcaagatcctcgtctgcgtcggctctggctctgatccctccaccggctccgacatcaacactgacgaccacctcgacgagccaccgtccactaggataaagataaataatgaatggagtgcttga

SEQ ID NO: 23239 - DNA, 5286 bp, Zea mays
  Peptide Sequence Number=SeqID_66614
atggcctccgcggttgcggcgccgccgccaaccccgccggagtccgacccgcgcctcgtcgagatcttctcccccttcctcgagaagctcataaaaaatgcctcgtggcgcaacaaggcgcactccaagctctcgcacaccgccaagtccatcctcgaccgcctccagaagcccccgccgccgcccgcagccgaggcgcaggcgccgtccacgccgacctcctccccctcgacgccgacctcctcttccgcacagcctggtccgttgcgcagcctgtcgctcgcggactcggagctgctcctcgcccctgtgatctcggcactcggctcgggcagcgccaagctcgccgaggccgcgctggagctccttcacaggctgatcgcacactcctacatccatggcgaggccgacccatctgctgatccctcagcacagctcgtcgcctcactcctggacgccgcctgcaatgcgcttggccttgatgacgagcacattgagctcctcctcctcaagacactcctctcggcggtcacctctacgtctgtacgcctccacggcgattgccttctacgtgccgtgcgcgcatgttatgatatgtacctcgggagccgtagtgccgtcaatcaagccactgccaaggcttcgcttgtgcagatgctggtgattgtgttccgccgaatggaagctgactcctcgaccgtgcctgtacaacccatagtcgtggctgatgtgattgagctacctgatgcaatttcgggctcctcgcccactgctgaccccaacgttgtacagggattcatttcgaagatcattggtgacttcgatggtgcactcacacctctggctcggacaacttcatcagcaggggcaggacccaccgttgcccatgatggtgcatttgagacaacggcagcggcagaggaaggggcaaacccagcggatttgcttgattcaacagataaggacatgcttgatgccaagtactgggagatcagcatgtacaaaacagctattgagggtcgtaaagatgagcttggtgtcgagggggcagtggttggcaccttggacgatgatgctgatgtgagaattgggaacaagttacggagggatgctttcttagttttccgggctttgtgtaagctttccatgaagacaccacccaaggatgcaccagcagatcccatagtaatgcggggaaagatccttgctcttgagcttctcaagatcttgcttgaaaatgctggggctgtgttccggaccagtgagagcttagtggcaagattcagaccaggattgaaggcagagattggtgtattctttcccatgatcatcttgagagtgttggaaaatattgctcaaccaaattatcaggcaaagatgattgttcttcgttttttggaaaagctctgtggtgattctcaaatcctagttgatattttccttaattatgattgtgatgtccactcatcaaacatatttgagaggatggtaaatggtctactaaagacagctcaaggacctcctgctggtgtccctaccacattggtaccacctcaggacaccacaatgaaaagtgaagcaatgaaatgcttagttgctattctgaggtccatgggagattggatgaataagcagctacgaattccagatcctgcttctcctaatgtagaatcagagaagaacgacaatgatgatggcaatgagcttccgcaggcagataacaatggagatgagtctagtgaagcatctgattcacattctgagttatcgaatggaatttcagaggcagcatcattggaacaacgtcgagcttacaagatagagcttcaggagggtatctatttgtttaatcggaagccgaagaaggggattgagttccttgttaatgcaagcaaggtgggggagacaccagaggagatagctgcgttcctaaaaagtgcttctggcttgaacaagactatgattggtgattatttaggtgaaagggaagatttatcgctgaaagtcatgcatgcatatgtggactcatttgattttcaaagactggagtttgatgaagcaattagagctttcctccaaggcttcaggttgcctggagaagctcagaagattgatcggattatggaaaagtttgcagagcgttactgcaaatgtaatccaaaggccttttccagtgcagatacagcttatgttctggcttattcagtcataatgcttaacactgatgcacataacccaatggtcaaaaataagatgtcaccagaagatttcattagaaacaatcgtggtatcgatgatgggaaggacctacctgaagaatttatgagatcattgtatgaaaggatttggaaaaaggagattaagatgaaagaagatgaatttgttccacagcagcaacaatcaacaagttctaacaaaattcttgggttggataacattcttaacattgttgtacgcaagcgaggttcatctatggagacaagtgatgacctcattaagcatatgcaggagcaatttaaagaaaaggcccgcatgtctgagtctgtattttatccagccacagatgtagttgttttgaagttcatggttgaggtttgctgggctcctatgcttgcagcattcagtgttccacttgaccagagtgatgatgaaattgttgtatcccagtgccttgaaggatttcgctctgcaatccatgttactgcagccatgtcaatgaagactcaaagagatgcatttatcacttcacttgccaagtttacatcacttcactctgctgctgatattaagcagaaaaatgttgaagccattaaggcaattctattaattgcagatgaagatggaaattacttgcaagaagcatgggagcatatattgacatgtgtttctcgttttgaaaatctacatcttgttggagagggagcacctccagatgccactttctttgcgctgcagcagccggaccttgataaatcaaaacaggctaagtcatcgattcttcctgttctgaaaaagaaggctcctaatgctacttcagcttctaaaagaggctcttatgatagcgctggtgtcggtggcaaagcttctggtgtggatcaaatgaataatgaggtgacaagcctcttggagcaagttgggatggctgaaatgaaccgtgtatttgtaagaagtcaaaaactcaacagcgagggtataattgattttgtgaaggctctctgtaaggtttcaatggaggaattacgttcggcttctgatccacgagtttttagtctgacaaagatagtcgagatagcgcattacaatatgaaccgcatcagacttgtttggtcaagtatatggcatgtcttgtctgatttttttgtcaccattggctgctcagaaaatctttcaatcgcaatatttgctatggactccttgcggcagttatctatgaagttcctggagcgtgaggagctcacaaactacaatttccaaaatgaatttatgaagccttttgttgttgtaatgaggaagagccgagctgttgagatcagagaacttatcattaggtgtgtctctcaaatggtattggcccgtgttagtcatgtgaagtcagggtggaagagtatgtttatggtctttgcgacagcgtcatatgatgatcacaaaaatattgtactattggcctttgaaattatagaaaagattttgcgggaatactttccatacattactgagactgagacaacgactttcaacgattgtgtgaattgtcttatcgcgtttactaacagcaggtttaacaaggatataagtcttaatgcaattggatttcttcgattctgcgcagcaaagttggccgaaggtgatattggatcctcaaggttgaaggacaatccttcaaacagtaatccaccctcgcctcatttgactaatgatggaaagcaggaatgcacagttcttgttgacaaggaagaccatatacacttttggtttcctttactagcgggactgtctgaacttacctttgacttaagaccagaaatcaggaaaagtgctttgcaagtgttatttgatacattaagaaaccatggccatcttttctctctgcctttatgggagaaggtgtttgattcagtgcttttccccatatttgattatgtacgtcatgctattgatccatctggtaatcctccacaaggacaaagcgtggaaaatgatcctgcagaacttgatcaagatgcttggttatacgagacatgcactttggcacttcagttggttgtagatctctttgttaagttctatgatacagtcaatcctcttctaaagaaggttctgctgctcttgacaagtttcataaagcgtccccatcagagtcttgctggtataggtattgctgcatttgttcgtttgatgagcagtgctggatctatgttcgtggatgaaaaatggctagaggttgtattgtcattgaaagaagctgccactgagacacttcctgatttcacttatgtttcatctggagcctacctggaaaatgtgccaacagaaaatggagtctctgctgacaatagagaggacgaatctgaaccagtagcggatgacaatgaagaatcctctagatcaaggaatctatactttacaattggtgatgccaaatgtcgagctgctgtacaactcctgttgattcaggctgtgatggaggtatataacatgtacagaggacagttatcagcacagaacacagtaatcctcttcgaagccttgcatactgttgccgcacatgctcacaaaataaacagtgatagtgatttgcgttccaagttgcaagagttgggctcgatgacacagatgcaggacccgccattgttacgccttgagaatgagtcgtaccagctgtgcctcagtatccttcagaacatatttctggacagctctcctgatcatggaagcacagaggtggtggagagtcaccttattggcttgtgcaaggaggtccttgaggtatacttgagcacagcaagaccttctcagccttccagtggcacacagccgctaggccattggcttatccctgttggttcatcgaagcgaagggaacttgcggcaagagcacctcttgttgtctcaaccctgcaagctatcagcggactaggtgactcagctttcgagaagaaccttcgccagttctttcctcttctcgctgggctcataagctgcgagcatggttctagtgaagtacaggtggccctgagtgatatgttcagcacttgggttggcccactcgttctccagtcttgctga

SEQ ID NO: 23240 - DNA, 2613 bp, Zea mays
  Peptide Sequence Number=SeqID_66615
atggcgcgtggtggcggaggcggctgctgcccgccaatggatctgatgcgatcggaggcgatgcagctggtgcaggtcatcatacccgctgagtcagcgcacctcaccgtctcctacctcggagacctcggcctcctccagttcaaagacgtatggttgcttgcccctgctcgtcccttcgattacgggggtggggcgatccaacttgctccggagctgaatccctttcgatctaagatagtgcttaatatagataagagcccgtttcaacggacatatgctgcccagattaaaaggtgtagtgaaatggctcgtaaattaaggttttttaaggagcagatgtcaaaagctgacataacagcctctcctacacaactaaatggaactcatatggattttgatgaattggagataaagcttggagaactggaagctgagctaactgaagttaatgcaaacaatgaaaaattacagaggacctataatgagctattagagtaccatactgttctccaaaaggctggtgaatttttctattcagctcaaagaactgctgcagcgcaacaaatggaaatggaggcaaatcaatctggtcaaacttcactggagagccctctgttggaacaggagatgacaactgatccatcaaaacaagtgaagcttggctcattgagtggacttgttccaaaggaaaaggcaatggcttttgaacggatcttattccgtgccacaaggggtaacattttccttaggcaagagcctgttgatgagccagtcactgatccagtttctagggagaaggtaacgaaaaatgcatttgtcatattctactctggagagagagcaaaaaccaaaattctgaagatatgtgatgcctttaatgcgaaccgttacccgtttccagaagatgttggcaaacaacttcatgctgttcaggaggaattcaagttagaaaattccgcatgcgaagaacaatgcccttttggaaatgtatctgggaagatctcagagttgaagacaacaattgacatgggtttagctcatcgtgacagtatactaaaaaatattgcttctgattttgaacagtggaaccatctggtcaaaaaggaaaaggcaatttatcacaccttgaacatgctaagtgttgatgttacgaagaaatgtttagttgctgagggctggagtccaatttttgcaagcattcagattcaagacgctcttcagcgtgctactcttgatagcaaatcccaagttggctcaatatttcaagttctcaacacaaaagaatctcctccaacatatttccagacaaataaatttacttcagcgttccaggaaattgttgatgcgtatggtgtagccaagtatcaagaagcaaatcctggagtattcaccattgtgactttccctttcttatttgctgtcatgtttggtgattggggccatggaatttgcttgttacttgcaacactctatcttataatccgggagaagaaactagcttcacagaaacttggagacataatggagatgatgtttggtgggcgttatgtaattatgatgatggcagttttttcaatctacacaggattaatatacaatgaatttttctctgttccatttgggcttttcggtaaatctgcctatgcatgccgtgattcttcttgcagtgatgctactaccgaaggacttcttaaagtaagagatgcatacccttttggtgtggaccctgtctggcatggtagccgcagtgagctaccgtttctcaactcactgaagatgaagatgtcgattcttcttggagttgcacaaatgaaccttgggattgtgattagttacttcaatgcaaaatttttcaggaacagtattaatgtgtggtaccagttcattccccagctgatcttcttgaacagcttatttggctacctgtccttgctcattattattaagtggtgcacggggtcgaaagcagatctataccacgttatgatctacatgttccttagcccaacagatgatcttagtgagaaccagttgtttagtggccagaagacagtgcagcttgttctacttctgcttgctttagtgtctgtaccttggatgttgattccaaaacctcttcttttgaagaaacaacatcagcaaaggcatcaaggtcaccagtacgctatgcttcagggcattgatgaatcagtgggagcagaattgggggaacatcatgaggacgcacatgaccacgaggagtttgagttcggtgaagtttttgttcaccaactgattcacacgatagaatttgttctgggtgcagtctcaaacaccgcttcataccttcgtctttgggctctgagtcttgcacactctgagttgtccactgtattctacgagaaagtactaatgacggcatatgggtttaacaatgttttcatccttattattggtgtcgtcatcttcatctttgccacgattggtgtcttgcttgttatggagaccctgagtgcattccttcacgcgctgaggcttcactgggtggagttccagaacaagttctatgaaggtgatggctacaagtttgccccattctccttcgcgctgattcgtgaggaggaagattga

SEQ ID NO: 23241 - DNA, 207 bp, Zea mays
  Peptide Sequence Number=SeqID_66616
atggccatagagatgtacaacggctcaatttcaaatgttctgaactggtgctcggtccctggttacaagggcctcagtaaacattatactccgtgcgatttaatggcttttgtggtgtatgcaacgtcaatctcgtctctagcaataactttcaaaggaaaatttgtctttttgtgttgtgttccttgccatgtgaagtgcatgtaa

SEQ ID NO: 23242 - DNA, 63 bp, Zea mays
  Peptide Sequence Number=SeqID_66617
atggcggtgaggttgttatttttgttcttctacttaattgggttggtattcacttatacttag

SEQ ID NO: 23243 - DNA, 333 bp, Zea mays
  Peptide Sequence Number=SeqID_66618
atggggcgaggttgttgtgggaaactgggaacagaggtgtggtgtgctcttggtgacggagcacgggagaaaaatcgcggggtcaagagacggctgacgcggaaaacattgcggctgctgcttcctccaaaagtccaaatcctcctcgcctcgtcttcgcccaacccaatatcccccgtggccgatatgtcctttgcagtttcatttttaaaaatggactccaacctcgatgtcatcatcattggcgtcgagctaacgcaaagcggcgcaactaacattggcgccaagccgccaaacatgcctacgtggcaggcggatgtggcagaggtttag

SEQ ID NO: 23244 - DNA, 2799 bp, Zea mays
  Peptide Sequence Number=SeqID_66619
atgcataaccccaggccgggcggcggggacatcgtcgagatgtcgtcgtccgccaccgccgaggggcgggtgatcccgcacagcggcccgctgagcaagaagtcgggcgcccggaagagcgcgcggttcgcggagtccgtgtcggcgccgctgtccgcgccgccgccgcgcgcctccgccaacaacaacaacaacaacgacgacgacgactacgtggagatcaccctcgacgtgcgcgacgactcggtggcggtgcacagcgtcaagcccgcccacggcggcggcgccggcgccggcgccggcgcgggcggcgacgacccggacgtgacgctgctggcgcgcacgctcgagagccggcgctcctcgtcctacggccactccgtcatccggaacgcctcgtcgcggatcaagcaggtgtcgcaggagctccgccgcatcgcctccatcaaccgccgcggcgccgcggggccccggatcgaccgctccaagtccgccgccgcgcacgcgctcaaggggctcaagttcatcagcaaggccgagggcgccgccggatgggaggccgtcgagaggcgcttcgacaagctcgccgagaacggcctcctccaccggtccaagttcggccagtgcatcgggatgaaggagccggagttcgccggcgagctgttcgacgcgctgtcgcggcgccgcaacatctccggcgacagcatcagcaaggcggagctgctcgagttctgggaccaaatctccgacaccagcttcgacggccggctgcagacgttcttcgacatggtggacaaggacgccgacggaaggatcaccgaggaggaggtcaaagagatcatcacgctgagcgcgtcggcgaacaagctttcgaagatcacggatcaggcggaggagtacgcccggctgatcatggaggagctggacccgggcaacctgggctacatcgagctgtacaacctggagatgctgctcctgcaggcgccgagccagtcggtgcgcatcggcacgaccaacagccggaacctgagccagatgctgagccagagcctccgtccgacggcggagccgaaccctctccggcggtggtaccggcgcgcgcagtacttcctggaggacaactggcggcgcgtgtgggtgatgcttctgtggctgtgcatctgcgcggggctgttcgcctggaagttcatccagtaccggcagcgctacgtgttccaggtgatggggtactgcgtgtgcgtggccaagggcggcgcggagacgctcaagttcaacatggcgctgatcctgctcccggtgtgccggaacaccatcacctggatccgcaaccgcaccgccggcgtggggcgcgtggtgcccttcgacgacaacctcaacttccacaaggtggtggcggtgggcatcgcggtcggggccgggctgcacatcatctcccacctgacgtgcgacttcccgcggctgctccacgccacggacgccgagtacgcgccgctggggcagtacttcggggtgccccgcccgcccaactactggtggttcgtgcgcggcacggaggggtggacggggctggtgatgctggtgctcatggccgtggcgttcaccctggcgacgccgtggttccggcggggccgcatcgcgctgcctggcccgctgcggcggctgacggggttcaacgcgttctggtactcgcaccactgcttcgtggtggtgtacgcgctgctgatcgtgcacgggcactacctgtacctgacgcacaagtggtacaagaagtcgacgtggatgtacctggccgtgcccatggtgctgtacgcgtgcgagcgcctcaccagggcgctgcgctccagcgtcaggcccgtcaggatcctcaaggtggccgtgtacccgggcaacgtcctctcgctccacttctccaagccgcagggcttccgctacaagagcgggcagtacatcttcgtcaactgcgccgccgtgtcgccgttccagtggcacccgttctccatcacgtcggccccgcaggacgactacgtgagcgtccacatcaggacgctgggcgactggacccgcgagctcaagaacgtcttctcaagggtgtgccggccgccgacggagggcaagagcgggctgctccgcgccgagtacgaccgcgacggcagcgccgtggccaacccgagcttccccaaggtgctgatcgacgggccgtacggcgcgccggcgcaggactacaagcagtacgacatcgtgctgctggtggggctaggcatcggcgccacgcccatgatctccatcatcaaggacatcatcaacaacatgaggcagctggacggcggcggcgacctggaggcctcggacgcgtcggcgtcgtcgtcgtcgatggcctcgttccgcacccggcgtgcctacttctactgggtgacccgggagcaggggtccttcgagtggttccgcggcgtgatggacgaggtggcggagacggacaggaagggcgtcatcgagctgcacaactactgcaccagcgtgtacgaggaaggggacgcccggtccgcgctcatcgccatgctccagtcgctcaaccacgccaagcacggcgtcgacgtggtgtccggcacccgcgtcaagacccacttcgccaggcctaactggcgcaacgtctacaagcgcatcgcgctcaaccaccagaaccagcgcgtcggagtgttctactgcggcgccccggtgctgaccaaggagctgcgcgagctggcgcaggacttctcgcggaagaccaacaccaagttcgagttccacaaggagaacttctag

SEQ ID NO: 23245 - DNA, 381 bp, Zea mays
  Peptide Sequence Number=SeqID_66620
atggcggagctagacagggggtcacacgagatgcaggtgtcggcgtttcgagaccggagggtccctaagccgaccagtgagtgtgctgcgtgccccagcccagatgggtcgagcgcgtgggcgagcgcgaaggggggagaggcgaggtggccggagatgggcgtgagagaggtggaagtctcgcggccttcgtgttcgtcccgcgcccaggtcgggtgcgcttgcagtaggggggttacaagcgtccacgcgggtgagggaagcgagcggccccaagagagcgcctgtctgaaagggaaatgtgcccttgggccatttctaagtattttggtgattgagtgccaactcaagtgcttaaatgtgaatttatgcaatggatga

SEQ ID NO: 23246 - DNA, 174 bp, Zea mays
  Peptide Sequence Number=SeqID_66621
atggaaagccttcataaaagctacagctatgccgcgagaagccagcagggcacagaagtcaccatgcccacctataacttcgtcaagcgcctcaacttcactctcaatatggtcgaaggtgcttggcaggtcttcaaccgaaggttcaaatttttcagaactggctcccactga

SEQ ID NO: 23247 - DNA, 300 bp, Zea mays
  Peptide Sequence Number=SeqID_66622
atgggcgcgttcgtaaggagcgccttcaggttcccgagggcttcctcggcctcgggggtccaagtgaagcactcggcctttattaagaggcggtacagaggtagacctctttcgccgaggcgcgagatgaaacggctcagagccgcaaggcatcctatgaccctctccccaaccaccaaaagtggccattgggaggctgtctgttcgatggcgcaccggacagtccggtgcacaccggacatgtccggtgcccccgccacgtcatcactgccgttggattctgaccgttggagcttctga

SEQ ID NO: 23248 - DNA, 714 bp, Zea mays
  Peptide Sequence Number=SeqID_66623
atggtgtcctgctcggcttgtttctgctcgcgctcttgggcgtggcgacgatcacggcggcgggagttgtggcgctctcgaagcactcttccattgggggttcccctgcttcagaagcctcatcccgggagacgggttgacctagatcatgttccccggcttcatggtaacggcgcacattgtggcgcctattctggcgttggcgtgcatcgcgctagggggctcctccccagcacggtgggctcgtcgtcagaaatgggtgtgccttccactcttccttggatgaagaggacgtttgagaagaaggagctcggtgtggtggtgtgtactccctccatctcctttgagggcggagcggtcgggatgaccacttgtggtgcctctagggtcgtgctaggcccagaagcattcgcttctctctaccgagtgatccatgtccacacctgggtgggtgagaagaaaaccctccgaggttcccgcgctactggcgggatcctcgttggcgctactcgtggcttccttggagtcgcctttggcgtccctagtgaaggttttttcttggatgggtccgctatgcggtgcaaggctgcttcctggtctgcgatgcaggagatgggccttaagtggaagacttctctggggttgaaggacgacgtcgttgatcgtggctcgatggttcgtgctgtaacacgatggggtgacacacagacttag

SEQ ID NO: 23249 - DNA, 186 bp, Zea mays
  Peptide Sequence Number=SeqID_66624
atggcctaccgtgcatccccgatgcagaaggctatcgacaggaccatcgacgtgatcatcgccgggaggacaggggacgtgtggagtctctgcccttaccccccaactctgagtgatccaacgaccccaaactccaaggtctccaacatcgacaagtacgagcccaagaaagacccaagtggctag

SEQ ID NO: 23250 - DNA, 264 bp, Zea mays
  Peptide Sequence Number=SeqID_66625
atggggccggggcaatattggttgccactaggacctaccgataggtgcaggcttcgcactctcgaggaggtcttaggctcgctcgtcagcagtgatgtagatgtctgcctcccggaacggttgttccgaggtggcgggtgccttttggaggatagcccggacgaaggccaagtcattggaccctcggtagaagtcctcgattatgactgtctctgcgacatcggggatgcgatttctcatcgtctagaaatgtctgaggaatga

SEQ ID NO: 23251 - DNA, 891 bp, Zea mays
  Peptide Sequence Number=SeqID_66626
atggctatggcaaaggcaggcgcgccgagggtctcggcggcccagctggtgactctcgggctatcactcctctgcgctgtcgccggcccggccgccgcgcagaactgcggctgccagccaaacgtatgctgcagcaagtttggctactgcggcacgaccgacgagtactgcggcgacgggtgccagtcgggcccgtgccgctcgggcggcggcggcagcagtggcggcggtggtgcgaacgtggctagcgtcgtcaccggctccttcttcaacggcatcaagagccaggccgggagcgggtgcgagggcaagaacttctacacccggagcgcgttcctgagcgccgtcaaggcgtacccaggcttcgcccatggcgggtcgcaggtgcagggcaagcgcgagatcgccgccttcttcgcgcacgccacgcacgagaccgggcgtaagctggctctatctattaacctcgctcttcagcgcggcgcagatttctgctacatcagcgagatcaacaagagcaacgcctactgcgacccgaccaagaggcagtggccgtgcgccgcggggcagaagtactacgggcgcggcccgctgcagatctcgtggaactacaactacgggcccgcggggagggccatcggcttcgacgggctcggggaccccggcagggtggcgcgggacgccgtggtggcgttcaaggcggcgctctggttctggatgaacagcgtgcacggggtggtgccgcaggggttcggcgccaccaccagggccatcaacggcgccctcgagtgcggcgggaacaaccccgcccagatgaacgcgcgcgtcggctactacaggcagtactgccgccagctcggcgtcgaccccgggcccaacctcacctgctag

SEQ ID NO: 23252 - DNA, 228 bp, Zea mays
  Peptide Sequence Number=SeqID_66627
atggccgccccacgagtcgcccgtcccgtcgcattaactcctcggcagggcaagcgacacctttggcaggcgaagcgggtgtcgtttcacctctgtcatgatgaccgcgtcaaaaaagggaacgagaaaggggatatttccaaaaggatccttctcagcgaaggaaacgggcccccgagccctcctactaatcaggggttcgaaggctggcccctcggaagggtttga

SEQ ID NO: 23253 - DNA, 1122 bp, Zea mays
  Peptide Sequence Number=SeqID_66628
atgccgtgggagaaggctctcctgccgcttcaagaggggacgcgagcctgcaggcgatttgaccgctacctccgcccgtctgctgctgcaattactgccgggatgatcaccatccttgtggtggggagaagcaagtcgggctgcggcctctgccccaccctcagcttcaaggatgttcatcatccgggctggggaggggggcgcaccgagttggggcctgcctctgcgtgggctagcgacccacttcttcctccggcattcgggggagaagggcatcctccagctctacggagaaggcatcctccagccatgcgggggaaggcgaactgctgctgccaggacatggtgcagttgtccgtcttccacctgggcgacggtggccggctgcaccggggggtcgcacaacacgtcgtatgccgcgagggcggtactcgtgttctaggacggtcccgttctcgttcttgtggcgagagcgggagtgaggacctgcctgtgcgctttggggcgtccgccgctcgctggtgcggtgttggtgggcaggtggctgctgtcgtcgttgctgaggtggtggtcgccatagttgaggctgcctctgccgaagcggttgcttccgccgatgagaccgtcagtgccacctgcgctccggacctccagctctttggctttaatggctggttctcgtcccccaaccttcggccgctctgcgatgagctgaagccggaggaagcggtgtcggcgtggacaaaggcggagtcggctcgaaaagaggcttcgtcggcccgggagcatgtggcttcccaggccgaggaggtgcagcagcgacggttggagcttgaccaagtcgtccgcgggcgggaccaaccccggagtcacgctgccgaggccgtgagccgggctgaggtcctcgggggacagctggctgaggctacggagcggccagccgaggcgtccgctcgggccggaacccttgcagagagcctggccgacttgtttggtagcagaatccctcgtccgagcgtgagttactttttgcggaaggtgatgggtgaggacctcgctatcgaagcagtcgaaaagcgcgaaagacgttctggcaaaagacttttccgaggaaaattttga

SEQ ID NO: 23254 - DNA, 642 bp, Zea mays
  Peptide Sequence Number=SeqID_66629
atggcgtgtgcattgcctgcatatgagatgatgagacctcttgtcttctccagtctgatcactcccaaccaatttgttttgtgctggcaaagggaaccttcgggcaggaaaaacagggcaaggagctactttgagcccgagactgaactgaagaagatgatgatggccgaggtggccaaccacagcaagaggaaccacacggacagctacttcagtggcaaggccgtcgccgtccccgccgccgcggccaccagctcggaggagttcggcagcatgtcgtcgaagaagccgaggaatgccagccccagactcgcgcccgtatcaccaaaggagaagaaggacaagatcggcgagagggtcgcagcgctccagcagctcgtgtcaccgttcggaaagaccgacacggcttctgtcctgcaggaggcgtcggggtacatcaagttcctgcaccagcagctggaggtcctgagctccccttacatgcgcgctcctccggccgctggcgctgcgcctgaggacccccagcgctacagcctccggagccgcgggctgtgcctggtgccggtggacctgacgctgcagctgacccagagcaacggggccgacctgtgggcgccggcgcacacggccaggcgaaggtga

SEQ ID NO: 23255 - DNA, 1218 bp, Zea mays
  Peptide Sequence Number=SeqID_66630
atgaaggcaccatcgctactggttcggtgtttccctggcttgcttcccagcaaggacactagttgtgtgccaattgtgtccgagaaggatctgcagctaccatcactagccgttgaaataattccctcaaagagtgctcacccgtacaaatatgctggagagaaggttgatgtgcaaggttttgatattttcaagggtaaagttagtgtagcagatatgatatccttctcaccttctgaagtagcatcatcaaaatatgatggagctctgaaaagctgggagaattctattactcttgtcaacattattcgaaatgagatccgtgatggccagttgagcttcaggggcaagcgggttctagagcttggatgtggatctggcgtctccgggattttttcatgcttgaagggtgcatccaccgttcactttcaggacatgaacgcagaaaccatacggtgcagaacaatacccaatgttcttgcaaacctcgagcaggctcgggacaggcagaacagaccatcagaagagagccccgtgacgccatcccggcagctcttggatccaaacgtgcatttctatgccggagagtgggatgaactcccgacagttctctcggctgtgccgccacccgcggcgccagcagacctcagcttctccgaagacgatttcatggatggcggcagcagtagtcatgatggaagcagtgtagtcgtcggccaggactactgccccagaagatctaggaagctctccggtagccgccgcgcgtgggagagggctaataacgagaccgaccaggcagatggcggctacgatgtgattttggtctccgatgtcccctacgcagctaactctctgaagaagctccatgcgcttatttcaaagtgcctacgccctccgtacggagtcatgtactacgtggcatcgaagaagagctcggttgggtccaacggtggcgccaggcagctccgagctctgatggaagagggaggcgtccttggcggccacttgttgaccgagcatggcaagggatttctggagaaagaattggacactgttttactatcgtggaacaatattccaaacaagctccgatccaagtcccaagaaaactgtggtgctgtagatttggcctgctaccgtggtgctgtagacaaaaacaggctacggccacaaacaccgagcaaagcggccgtccggttctgcagacctagttga

SEQ ID NO: 23256 - DNA, 156 bp, Zea mays
  Peptide Sequence Number=SeqID_66631
atggagtggctctacgtgcaatggaccacgagcgcaggaacagcagaggcagggatgcgcgagatccggggcaccgacgcacgcaccgtgcccatcacggactcacggtgggggaggctgctagtgccactggctgtcctgagtcgagtcctgtga

SEQ ID NO: 23257 - DNA, 1230 bp, Zea mays
  Peptide Sequence Number=SeqID_66632
atggaatccgaggacgatatgcacgacgcaaacgactccgccgaagatgacttctacagcggcggggaggctggtctcgccgccagcgacgacggagacgcagactacgacttcgcggaccacgactccgacgactccgcggagctcctctcccacagacagcaggtgatctccgggtcccggtcgtgggtggtttgcctcgttctgcctaatatgtacatgctatttctacttgacttggtacatcaccaatttgattgggtgggtgggggcaaggtgaagcaaaattacagtatattgagtgaagttgatatcaagcggcgccaagaggatgacataaatagggtttcaactgttctttcaatttccaaaccagaggcatgtgttcttctccgcaactataactggctatcaaaattagagctgtgcaagagtgttagtaaggtgcatgacgaatggtttgctgatgaagagcgtgttcggaaggtggttggtttaccagagaagcatattgaaatgccaaatgacagagaatggacaatcattaaattagcaacaatctatgtcaggatacataactaccaactcctgttgttgggaaataaagtgtttgctatgcttgtgtggctggaggtaacatgtggaatatgtttcgaaagttgccctctcggatcgatgagtgctgctgcatgtggtcatcctttctgcggtacatgttggcgaggttacattagcactgctataagtgatggtccgggatgcttgatgctgaggtgtcctgatccgtcctgtgctgctgctgttggacaagatatgataaattcactggctgatgttgaggatacagaaaagtatgggcgatatcttcgcagatcttacattgaagataatagaaagacaaaatggtgtcctgcgcctggatgtgaatatgcagcggaattcgtcatgggcagtggcagctatgacgttaattgcaactgttcatatgggttttgttggaattgcaccgaggaagctcatcgtccagtagactgtgccactgtttcgaagtggatcctcaagaacagtgcggagtcggagaatatgaactggtatagaaggataaagcacaagttttttaatagtgccgactgtttggagtttctactttggattagtcttagaaacactaaggtagtgtttggttatggagccaattgggatggagcggcttcatccggtagattttag

SEQ ID NO: 23258 - DNA, 324 bp, Zea mays
  Peptide Sequence Number=SeqID_66633
atgaggattaggctcaagatgatgaaaatgaagatcaagaagatgagccacctcaagaagaggacaatgatcaagggggagatgccaataatcaagacaaggaagatgaacaagaccaaagaccgccacacccaagagtccaccaggcgattcaaagagatcatcccggtagaggatgcacttaaagattcagattgggtgctggcgatgcaagaggagctcaacaacttcacgaggaatgaggatgccaagcccatcaagacacccatgggaaccaatgggcatctcgacctcgatacgggaggtaaatcagtagatcaaaag

SEQ ID NO: 23259 - DNA, 54 bp, Zea mays
  Peptide Sequence Number=SeqID_66634
atggcgagcacatgcgcacatcgtagagaacctttcatcattgctcaaaagtaa

SEQ ID NO: 23260 - DNA, 253 bp, Zea mays
  Peptide Sequence Number=SeqID_66635
gacagtccggtgcaacagcagggcaacggctatttcggcgccaacggctacctgcgacgcattaaatgcgcgcgctgcgcgcgcagagggcaggcacgcccatgctggcgcaccggacaatctacagtgcatgtccggtgcgccaccggacatcaaggcgggcccagaagtcagaactccaacggtcggaacccaacggctttggtgacgtggctgtcgcaccggacatgtccggtgtgcaccggactgtccg

SEQ ID NO: 23261 - DNA, 408 bp, Zea mays
  Peptide Sequence Number=SeqID_66636
atgccgttcgcccgactgcgcctgacgctgggctggggaaagtggagcctgacccaggggacccaacgatcagcgactagaggcgcggtcggcaacgcgggccccgccaggcgtcctcgatttttaatactcagatttgcttacatgaatcaagggaaggctacaatgtcacttctagtccaaggaaataaagaatccttagaagttggattcagactacagaactttccaaacttgccacgatcaccgtggcttcatacagactttgattttggagttctagcacttcatggaaacctcatgaagtccacattccaaaaaaaaactggtcatgagtccatatcttctagagacaagtgccatcatggatggttgtacctgctccacaagattgcgagcaatcattag

SEQ ID NO: 23262 - DNA, 156 bp, Zea mays
  Peptide Sequence Number=SeqID_66637
atgggtgatagacgtgattggatgtatgaaggtttcaagaagggctataaggtctggtatctccacggtgaagatgctaaacgagcagcagaagtagaagttgatgacggtgaagatgctgaacgagcatccggaagaagcaggccccttgaataa

SEQ ID NO: 23263 - DNA, 204 bp, Zea mays
  Peptide Sequence Number=SeqID_66638
atgggagtcgactgggaacatacctactatcatgctgggggtctcctgaactgcttcagcctccaagtggaagacgaggtgcttgctgattctgcctctgaaactgacctcctgactgattgctctgacggttctggtactgatgctgaggatactgcctttggaactgctgatgctgctgaggtggacgctggttctgcctga

SEQ ID NO: 23264 - DNA, 1771 bp, Zea mays
  Peptide Sequence Number=SeqID_66639
atggcgcctccgtctccccagccgccgctagtgcgcgtgctcgaccgcatccgcgtctcgccgccgccggctgattctgagcaagagcctgcgctccccctcactttcttcgacgttgcctggctcttcaccggccccgtcgagcgcctcttcttcttccgccacccggagccggcctccactctcccgctcctccgctcctcgctctccctcgcgctccgccgcttctacccactcgccggcaccatcaggccccacgcgcccttcctctgctcctacacccatggtaccgatgccctcaccatggtcgtcgccgagtcgaacagccccgacgatttcgacagcctcgtagccaggtcacgcagggacctggacaggatccgccccctcgttccgcagttgccgccgccgggggaagacggagcgttcgcgctcgccgccgtgcaggccactgtcttccgaggccgtggcctctgcctcggcgtctccgtccaccacgctgcctgcgacgatgcctccaccatgcatttcgtccgcacctgggccgctacctgccgcctaggactcgagaacgacgacggatccgaggacgccgtgctaccgccacggccggtgctggaccgctccgtcgtcgccgaccccgacgacctgcgcgggaagacgctcgccgggatggcgcgcctcgcccctcctccttctccgccgccgccgcagcaggaggagaagacgccgatggtgatggcgtcgttcctgctggggcgcgagcagatcgaccggatcaaggagggcgcggcagcaaaggcatcgtctttcgtggcggcgtcggccttggcgtgggtgtgcctcctcaagtgcggttccgttggcgtcgcgggcgcccggcgcagccacatgctcttctccgccgagtgccggtccaggctgacgccaccgctgccggccgaatacttcggcaactgcctgcgcccctgcttcgtggaagccgccacggcggaccttctctctggggaaactgaggacggggtggctgcggcggcgtcggcgatcgggagcgcgatccaggagatggagcagggcgtgctggaaggcgcggaggggtggttgggcagggtgctgtcggtgcttcccgagcggcccatgtccgtgggcgggtcccccaggcacggcgtgtacgaaaccacggacttcgggtggggccggccggcgagggtggagatggtgtcggtggagaagacgcccgggacggtagcgctggcagacagcccggagggagacggaggcatcgagctcggggtggtgttgccgccggacgccatggatgcatttgcttcgtgctttgcgcatgccgtcggcgccaacccgacgggaattaatgcttttatgggccggcggtcatcccgcgcggctcatttcctctcccccctctcgctttccaagccacgtacaccgccgccgcccggagaaacgcccgcgcccgacgccgcccgccgcccacacccggcctcgcggccaaggagcgcgcccgtcgcccgccaccgcctcgggagcgccgctcgccaccgccaccgccccggagcgctgtccaccgcgccgccccccgcccccgtagcgccgcccgctgcccgccgcccgcccccagagcgtcgctcgctcctggagcaaagaacgccgcccgccgcgccgccggccctggagcgctgtccgccgcccgcccccggagcgtcgcccgccgccgccgccaccaacgccgccgccgccccggaccgttatg

SEQ ID NO: 23265 - DNA, 1596 bp, Zea mays
  Peptide Sequence Number=SeqID_66640
atggcgagacgccttctctcccgcggccgcctcattaagctcgaccggcccatcctacccgccgctctcacccgtctgctttcgcgcggcccgcccactccgacgactagcgaaccggaggacaagggcaaaaaagcggcggctgtcctagtggaggcggtcgccacgaaccacaaaaaggacgcggaggtcgggagagatggatccgaggaggacgacgaggatacgagcccgccctggaggagctggaggccggacgtcgcgtggctctccaaggcactcgagcccgcactggacctgtacaagcaatacagctggaagcctttcgcgtcttctggtcgtgtggaaaacatccctgcaagcactcgtacatttagtgagatcctaagcgacctccagagaagtaagataagcataaaggactggagcctcagtgatctcaccattggcctctacctcatttacctcagccaagcatcctcaaagaactcggaagctttcaagggcgttcagatatcctccaataagatggttcaagaactaatttatcaccttgaacttgcaagaggttgttataaaggtaatgcagctgggcttgcaaggtatagcatgcttcggaagagaaatgttgtaaagtttgtgaaagactctagtattttgagacctggatattacattggcattgacccacgagctaaattggtgattcttgggattcgtgggactcatacagtctatgatcttgttactgatttgattgctctaagcgataagaaagtatcacctaaaggtttctcaacacactttggaacatacgaggcagctcgttggtaccttcgccatgagctgggaataatcagaaaatgtttggaaaaacacaaggactatgagttacggttggtaggtcactctcttggaggagcatcagcggcgttgcttgctataatgctacggaagaagtcaaaggaagagcttggtttcagtccagacattatttctgctgttggatttggaacaccgccttgcatatcaaaggaagctgctgaaagttgtgcaagctatgtctctactgttgtgctccaggatgatattatacctaggctcagtgcagcttcgttggcaagactgcgaaatgaaatactcaaaacagattgggtaagtgttctggaaaaggaagacttgaagcatatagtggatatcgtgactaatgctaagcttgttgtttcgtcaattcaagatgtggcgcgtaaacttggtgattatgccaaaattgtatcaccatcgacaaattctggtgttaccaaagatccaactaactcgacagagatggcgacatcgattagtagaaatgatgtgtttgtgcctgaggatctcttccttcctgggaccctgtattacctgcagagggacattgaggatataaatgacgttgaagaagagtcatacacgctctggaaaggtgatccaggggaaaattttcagaggatattgttgtctggagctttaatctgtagtggctggatgcctgctttccgtagttttctgatggctgttcctttggtctttttgttggcctgtgaatgttgtacagtataa

SEQ ID NO: 23266 - DNA, 66 bp, Zea mays
  Peptide Sequence Number=SeqID_66641
atgtcgcaggtaatccttgtttgttactaccaaaaacgcctacgcagtttaaaaacttcagtgtga

SEQ ID NO: 23267 - DNA, 129 bp, Zea mays
  Peptide Sequence Number=SeqID_66642
atgacggacatgccactcgagctactccacatggacgtatttggcccgatcgcttacataagcatcgtcagaagaaaaatctcaaacccaagagaccttaaagagattcttaagacgggctcaaaatga

SEQ ID NO: 23268 - DNA, 489 bp, Zea mays
  Peptide Sequence Number=SeqID_66643
atggcggccccgcctcctcctccgtcggtggggaaggtgacgggacagacccggatgctgctcttccgccacgtggggaagacgtcgtcgattccgccgccggcgagcgggctgacggccgccattgtcgttgtcgcgcggcggaggaagaagtatcatgtcgtagctgccgtcgagggacatgaactcaaggctcccgaaatggagcaccgtttcgggttggagaggttgcggaagactacccatctggagcttgacgggaagctgttcgtcaacacgcagcaggcccctacctggtgcgccaactgtcggcgtttcgaccccggggggtccctggaccgacgagtaaattgtcgctgcgtgtcccagcctagatgggtcggcgcgagacgaaacacaagggggaaaacagtaagggaaaccgcggcctcgtgttgtcctgcgcccagggcggatgcgcttgcaatagggggttacaagcgttcgtga

SEQ ID NO: 23269 - DNA, 756 bp, Zea mays
  Peptide Sequence Number=SeqID_66644
atggcgattcctgttgacgtggcgggtctgtgccctaggcagggtgacgtgggggctcctccgaagccgaggttgagtctgtcctctgttgccgaggccgagcccgagccatggggtcgggcgaggcggaagtcgttcggccgaggccagggcggagtccgagccctggggtcgggcgaggcggagtttcgtcgtcttccgggtcttagcccgagtccgagccctggggtcgggcggagcggagttcgccgtcttccgggtcttagcccgagtccgagccctggggtcgggcggagcggagttcgccgtcttccgggtcttagcccgagtccgagccctggggtcgggcggagcggagttcaccgtcttccgggtcttagcccgagtccgagccctggggtcgggcggagcggagttcgccgtcttccgggtcttagcccgagtacgagccctggggtcgggcggagcggagttcgccgtggcgcctttgtcggagtggcgcaggcggcgctgtccttctgtcagactggtcagtggagcggtggagtgacggcggtcacttcggctctgccgggggcgcgtgtcaggataaaggtgtcaggccacctttgcgttaaatgctcctgcaatttgctttatgctgatgggggttaccagctgagaattaggcgtcttgagggtacccctaattatggtccccgacaacagcgaaacaaggacatccatccacaggaagatgaccgggggtatcactag

SEQ ID NO: 23270 - DNA, 423 bp, Zea mays
  Peptide Sequence Number=SeqID_66645
atgggcaagggtaacaaacgcaagcatgagccgactcctctatccgaggacttcggtgactcggaatactcggaggaggagttctcctctgagtccgaggggtctccggctcccgtctctcccccggcgtcgtccgacgactcggacgactctcaggggattgccgcggaggtctggacttacatccgggccgtcgagcgctccgggctcgagggctcggatgagtcggagtactcctcggacgaggaggactcgcccgaggtggacggcgatggtgacgacgacgacgacgacggaggcgacggcggcggtgacggcggcggcaggggcggcaacggcgacggcaagggtggcaacggtgccagcagtaggggcagcaacggcggcggcaacagcaagggcatcaacaaggccagtggctag

SEQ ID NO: 23271 - DNA, 1032 bp, Zea mays
  Peptide Sequence Number=SeqID_66646
atggatcctggcacacatatgatggttcgcactctccaaactacccgcatcaacacaagctacgcccctcagcctcggcaaatctcggtctacccagtggtagtcgaggaagttccagcggatctccctcccatccgagtggagaatgtaatcaacctagaggacaactcagaggagcagctgccgacccccaccccgttggcagagtccctggccttcgcagctgggtcatcgacgtcagcactgtctgcacctgccttccaagcacctgcacccggaggcgacgaccccgacgactccggaaacgatgatgacgaggatgacgacgacgaagacgatggagaaggcgaacatgtcaacgaggaagctgactacgcccagcaggacaacttcatggggattggtcctgttgtcgaacattacacatcaatgttcgagacggggcacttccccaacctgctgcaagaggtgctgcacgtgctaggcacctatgtccgccccctgtacgagacgaggcgagtgagcgagcctccccgggcttgctattacatcactcgcatccacgtcagggtgatggatgcaggtgacaggggattcaggactctgtctgctcacgagtccctgacgccactgtccacctacgctgcctcggtcagcgatgctgcccgtcggaccctgtggtcgctcagccacacctaccggcagcagctgcagaacacgaggttcaggcatcttcctcagcgtctgcgtggagaaagccagaccaacatcgtcccaggagaagccggtgaggatcgcctcaacaccctagctggtgtagtggccggtcttaacaccgacctggacagtgccaccctggatctctacagggtgcacttggagctggagaatgcccacgccaggattgcagccctggaagcccaactgcaaggactggatccgcccgaagcacaggaccccgccatggcgttgtctcctccccgcaagaggctgcgctatggagagcccgaatctgtcactaggctgctttag

SEQ ID NO: 23272 - DNA, 219 bp, Zea mays
  Peptide Sequence Number=SeqID_66647
atgccgtcgactctgatcttgactgatttggaggagttggaaattgccaaatggacaggtgtaagaggaaagaatagcgagaaaagacaagacttgcatggtgtcaaagaaggggaagcagtcaatgatgaaatagatgaggcattatcctcaaacaggtatggaaaagaggaggtttcaaagggtaggttcacggtgagtaggaaggcaagggcatag

SEQ ID NO: 23273 - DNA, 369 bp, Zea mays
  Peptide Sequence Number=SeqID_66648
atggccgctgcgcgccggggccgtggcgacggcgccaacggcgtcgtccgtccccgcccccgcgaccgcggcatcggcggcgggagcatggcggggcgcgtggccgtcctcgccttctgtgtcgcagggatctggtccgcctacatctaccagggcgtcctccaggagactctatcgacgaagcggttcgggccggatgcgcggcggttcgagcacctcgcgttcctcaacttcgcgcagaacgtcatctgcttcgtctgctccaatggcagcgcaccgatatggaagtactggggcgtcagcgtcaccaataccatcgggccgaccatggggatcgaggctctcaagtacatcagctacccggctcag

SEQ ID NO: 23274 - DNA, 747 bp, Zea mays
  Peptide Sequence Number=SeqID_66649
atgacaggagaccctgatggagacagagaagacgacgatgccggtggcagttcgagccacatcacggagctcttagaggaggaggagccggagggatggatcgctagacccatcacttgtgacgccgcatgcgggtgtcccttccacgacgctctcgacaccttgttgcgtcgggcattcgaccggcacacttggtctattgagtaccgttgtgtagtctaccagcatcatcgcgggttatacccggaccaatgggaggctacttgctttgtgcgccgtccggatgatgatctccggggtgcagaggccttcttagagcattattctatcactgagagggatactgccgaggcagccatgcaagatgttgcacggcgtgcgctttctcagtattgctcgtttttcagcggggtagctgacggcctcgacctgaagtactaccctcaccgttcgaccggtagtgctggaggtatgattgtctcgcccgttggtgagggcaatcccaggttgaacagcatggtcaacctggtcgccgtgctcaacaccgagatggaccacgcccttgacgagttgggcaaggttcgggcggaggttgtggaattgcgtgctgcgcgcgcagtgcgccactatcaggatggtggctctcccgctcctgtcgggattcaacacccttaccgctcgccgcaccatggtcgctttgattatggtacccctgactgcaggaccaagatagatttggagccatag

SEQ ID NO: 23275 - DNA, 660 bp, Zea mays
  Peptide Sequence Number=SeqID_66650
atgtcttcgcgctccctcatgtgtcgtgtctttccaccttccgagcccccggatggggaacacccgcaatccttccgccttgtcgttggaggaacgcaacttcgtggaagttggtacctttcagccatcgttcggcttcaaggattttcatcaggcagcccaactgcatcccctcgccggtggtcacccaagacggtgaccaccagcccctgggtggggagaagcaagccgggctgcgatcttggtcccgccctcagctccaaggatgttcatcatccttgctggagcggaggccgggctgagccggagctctacctcccgcgcgggttcgtgggtcagcctctccttcagtattcgagggagagggcgctcactggccctgcgagaggggcggacttcgacaacgcggggctggtcgacggcgggtgtcgtcagcttcagcgcgttgggctcgccggcttggctcccggtgccccctcctgccgcaagggcggttgtcgcgccgcgcgcacgggaggaccgcccaagacgtcgcgcgctgctagggcggcgttcgtgttctggggctatcctgcctttgcaccggtacggcgcctccgcgcggaggtcggtgccccgctcgttcgggaggatccgagtggggatctgccgatgggctga

SEQ ID NO: 23276 - DNA, 123 bp, Zea mays
  Peptide Sequence Number=SeqID_66651
atggtggtggccccctgggtgaggtaccttagccaagaatacgaccccatgttaacgtgggctgccagcacctaccgctccccctcttgcccatatttcaggttaaacaaggaatacaggtag

SEQ ID NO: 23277 - DNA, 334 bp, Zea mays
  Peptide Sequence Number=SeqID_66652
atggtcggacacaggggaattggtcgacctggcacaaagctttattctgctgggctctacacgaagagggagaacggcgaattcgatgccgatggaggagggggcattgcatgggttttatacccccagcgagccgagtccgcacatgagaggagcccgatcgatcccaacaaccccaacggcaacggcggcatcgcgcggtctccgtctcccgcttcccaggccgcaccgaacggagctgcccgcccgcgagagggggaagacccatctgaccagcggggccacggttcagaggaaggggacggcatatccgacactcagggcccacatgacg

SEQ ID NO: 23278 - DNA, 723 bp, Zea mays
  Peptide Sequence Number=SeqID_66653
atgaccctagagcctcatcccctgcagccaggctggcgttcgctggactctgagtcttttggatacagggctgaggatactatcgaggcgattgctcttcatggactgaccaccttctatggtttccaccccttggagctgtccactcaccccattggtttgttccctgcggagaaggaggacggcccaatgtggaaggaccgagtggagcatgccaaggatatatgggctatcaacccaggtcagactgttcacttgacggtgcggtgcatgaatgccctgtatcgtctgcaagtgatgcgaggagaggccatgtctcatctgatggcactgttggaggctaccaagatcaccttggataacaaggaggaacttgtggtagacttgtccactgagatggtggaaaaagacttgcaagtggaacaattgtcaaatgagatccaagagcttgaggagctagtgggaactagggagaacaccatcgaggttctcgaggatcagctaatcaacactcaacagcagcttgcggaggctaaccagcacctggatttgcaccaccaggagatccaggacatggaggccaacgaggatgtcgacatcgagggaggagaggagcctgcctccagcttggacactgctggctcagggagaccaccttcccccgagtcgagcgttgcctcgttttgctcactaggtcgcagagatagagttagaagtctgtga

SEQ ID NO: 23279 - DNA, 375 bp, Zea mays
  Peptide Sequence Number=SeqID_66654
atggaactagcagaatggcagtaccgtaaatattgtactagcgagaccaaaaaggcactagtaggaatcacagacgtaaccgaaggagaaaaacaaggaagcagtgttgactcgattattgaaagaaggtgcgaggctccaaagggtgctaggataaggagaaaaaaaacactcgataaactcaccaatcaacctggaaatctgataccacttgatatagctgaggtgcccgatctttcggcgagtagagataattctgatatggcgaaagatgacccttgcgatccgactacgacgagcaagcccgaggtgccaatgcaatcgctgaaccaactccctgtggttaccgaccttgctgatgcgagatcggcctga

SEQ ID NO: 23280 - DNA, 219 bp, Zea mays
  Peptide Sequence Number=SeqID_66655
atggcgccttttgaggccttgtatgggagaaggtgtagaacaccactaaattggtcacaagctggagaaaggctggagcacgcgtcgccgacgagcccggctgtccgcgcacgcgaccagccctatttcggccatcaccgccggcgatccgcccctcgacgtgaccgccaggagctcccggacctcaccgagccctccaccggacctctcctatcgctg

SEQ ID NO: 23281 - DNA, 213 bp, Zea mays
  Peptide Sequence Number=SeqID_66656
atgtcgaaaactggagggtcccgcttgtcaaagaccgttgctattctagcaaagggaaggtatcttcggaatcaggaatcaggttgcgggtatacagaagcatggtcaagacgaagcttgactaggatggtgatcacgacgaaggataagatgatcacgaagctatatgctgaagagcttcggcatcacggcgggaaggggaaaccgacttaa

SEQ ID NO: 23282 - DNA, 927 bp, Zea mays
  Peptide Sequence Number=SeqID_66657
atggcggaacccatggggggcgtgcccgatcccgtctcgccgcccgttctggaggagccagaggtcgttcttgggcggcggctccagaccggcgccgggccagacacagcgccgcctcccctccctcaggtggtcatcaccgagttccatgagaagttgaaagcctataatgcagtgctggagaagcagcgggataagcagaccgtgaccgaggcggcactacagaagctgcagcaggagcttgatgacaaggctggcaaaatctcttttgccgaagaaaaccttagggcgaaggatgcctccatggagaagcgggcgacggatctcatccaacaggagaaggacctggcctggagggaggagatgtgggaaaggcgggacaagttgttggccgagcacgagctcgaggcggagaagaaggagaagaacctggaggagcgggtccgctggttccaggcggcgcaggtagcccagatggcgcaggcggctctggtttctcaggcggcagagacgatgaagaagacgctagaggatctccaagcgaagcatcacatcggggtccagcgtatcgccgcatgggccgacgaggcgagttcggctctggtgccgctgggggtgagccccatccctgtgtcgaagcagttggtgtccatttccgacgcgctcccggtgctggattccgctgctaatcgcctccgatgcctggatcagatccttggcgcccgcttggaggctgagggcagcagactctgtcgggtggtgatagaatacatcctgacgtgcttccggagtcacgacccggccatttccttgggaccgatgattgccggtccggtggccgatgccgaagacgccgcccgggggagtgtgcaggacgttgtagacgtggtggccaagcgtttccagcgagatccttctgatgagtag

SEQ ID NO: 23283 - DNA, 1206 bp, Zea mays
  Peptide Sequence Number=SeqID_66658
atgccggggcggcgcggcgctagtgcgcggggtgcgcgcgagcaggggaagaagggggagagagagaagggaaggggaggggaaaaactcaccttcggggatccaaattccggtgatctcgactctaaacccctagggcaccatggggagagagaggttattcggttgacgaagtttgattatagattagcaaataggttgcaaactgacttgcaaaagttgagatgtagagtcaactatcatgcattgagatttactgctccaatacaagagatgggtgaaaagctaatacaaagaatgagggagaggagcatgtattttattgctcttcatttgagattcgaacctgatatgcttgccttttcggggtgctattacggtggtggagagaaagagaggagagaacttggtgctataaggaagaggtggaaaggcttgcatcctaacccagagaaaggaagaaggcaaggtagatgccctctaactcctgaagaggtgggtttgatgttgagagcgctgggctacagaaaggatgtccacatttatgtagcttctggagagatatatggaggtgcaaggactctggcacctcttaaagctctcttccctaatctccacacaaaagaaacaatatctagcaaagaggagctggctccattctctaaatattcttctcgcatggctgcacttgatttcattgtctgtgatgaaagtgatgcttttgtggctaacaacaacggcaacatggctaaaattttggctggacgaaggagatactttgggcacaagagaacgatccgaccaaatgccaaaaggctctatcccttatttttgaacagaggaaacatgtcgtgggatgcattctcctcaaaagtacacatggttcagaaaggatttatgggagagcccaaagagctgaggccagggaggggagagtttcatgagaacccttctacctgcatttgtgaaaggactgatggcaaagcagtagccagagccaaatctcaagatgatcaagtattgaatagtgttgctgaccaaggcaaaggcattggcgagccagctgttcccaatcatacggatgaagaggcgggcgaacctgatgatgacgaagatgtccctgctgacaaagaggttgttgacgctgaaatggttgacgatgtattggccggggatcctgagttagaacagattctttcagactag

SEQ ID NO: 23284 - DNA, 264 bp, Zea mays
  Peptide Sequence Number=SeqID_66659
atgagaaagtttcacggcatctcctctcaagtttatgttgacgaacttcttgatatcatcaagaaactataccagtactatgttgttgctgcaccttcaactatgaggcctacaaataagaatgttggttcaattgttggtgatcttgaagttattgaggctattgtttcaaacctggagattgaggacgatgaagtcatagacagtgatgaaggagatatagatgggctaaatgcagatggtcagaactactttgacatgtag

SEQ ID NO: 23285 - DNA, 1329 bp, Zea mays
  Peptide Sequence Number=SeqID_66660
atgcaggaaacatggaggactttgaggagttctaggactacaatgagttctagttgtgttagtgacaaacccccagtcagctgcctgacagttgagccacctggagagactgcaccgccgcctacacgaggagcaagagcgctgacgctaggagcaggagcagcaggactcttgcccctcgcctcagcaggaggtggagtctgggaggcagccctcgcctgcacctcagccagagatgccccctacaccaccacagggcatccgactgctggagaagacccagacggagacgacgacgatgatggtggcaatttgggccacaacacggagctttcggaggagcaggagctagaaggatggatcgcccgacccgtcactcgtgacgccgctcgcggttgtcattttcacgacgctctcgacaccttgctgcgtcaggccttcgaccgacacacttggtccattgagtaccgttgtgtagtctaccagcatcgtcgtgggttatacctggaccagttggaggctactttcttggtgcgccgttcgcacgatgatctccaaggtgcagaggccttctcagagcattattctatcactcagcgggacactgccgaggtagccatgcaggatgctgcaaggcgtaccagaggtgtgattatctcacccgttgctgagggcaatcctagattgaacagcatggtcaacttggtcacggtgctcaacaccgagctagaccacgcccttgatgagttgggcaaggctcgggtagagattgcgaaactgcatgctgagcgagcggagcgtcgccatcagaaggatggttccctcgctcctgtcgggattcaacacccttaccgctcaccgccccgtggtcattatgcttatggcacccctgactcgcccactgcgctgcacggtgacaagacagttgagccacctggagagactgcactgccgcctgcacgaggagcaggagcaggagcagcaggactcttccccctcgcctcagcaggaggtggagtctgggaggtagctctcccctgcacctcagccagagatgccacctacaccaccacagggcatccaacagctggaggagacccagacggagacgacgatgactgtggcagttcgggccacaacacgaagctttcggaggagcaggagctagaaggatggatcgcccgacccgtcactcgtgacgccgctcgcggttgtcattttcacgacgctctcgacaccttgctacgtcgggccttcgaccgacacacttggtccatcgagtactgttgtatagtctaccagcatcatcgcgggttatacccggcctag

SEQ ID NO: 23286 - DNA, 471 bp, Zea mays
  Peptide Sequence Number=SeqID_66661
atggcctcggcaagtgtcgagggtattggaggtggattcggggtcgcctccctcccacgagaggcggcagatgtcgcttctcaattcattgattctgtcgccatccgcgacccatatgtcagtcctgcgttggagttctgtttgaagccgattaacttttgcttcgagatccctgatcggatcattactcccactactgctatcctcgtgtcttggggcaagttgatgacatggcacaccaattgggccaagaagggcttcgctccgataccagctgtgacggaacctcccaagtcattaggcccacctacagttgtccttgtccaacggacctcatacaaccctgcaggtgttcctgaatcacttgacaagttcggtatctgcttttcttacttttcccaagagcgtttcacccatcacgcagacattacagatcatcagagatacgaaaatgcggaggcgattacataa

SEQ ID NO: 23287 - DNA, 111 bp, Zea mays
  Peptide Sequence Number=SeqID_66662
atgaccatgatgggttcaacatcggaaaagatgtacctctgccaggaccatgtcgatgtaggcctactgaccgaggaccctttaactggtcacatgcctcgtcatgggtaa

SEQ ID NO: 23288 - DNA, 648 bp, Zea mays
  Peptide Sequence Number=SeqID_66663
atggcgcccgaggctggacttggttgctgtcagcctcaccctggcgggtggcgcagcagtcggagcagcacaggcggcactgtcttcctatcaggtcagtcagtggaggggcgaagtgactgcggtcacttcggccttgtcgactggaaagcgcgcgtcaggataatgtgtcaggcgatccttgcattgaatgctcctgcgatccgttctattcttggttttcttcctttgggaccaccttggaatagaaacaacaaaactttgtcgcttcttcacctaaaaacaatagggaataaaaccctgagtatggaattactcagcaagacttacccgactaaggaaaagactttcaagggcatgctggttatcagggagtcaagagcaatattaagcatagtaaagactttttataaaacagggattcaaaggaagaaaaaaccctctggttctatttctttacacgatgaggtccccgacggcgcatcgagcaaggggcaaagctccggcgagctagactggccggagggagccaagactggtgaccccgaacggctgacactgaattggaccttccccgatcaattcccccaacttaatttcatggttggtaatctatcaagctttgtccatgcggaccacggacgatga

SEQ ID NO: 23289 - DNA, 933 bp, Zea mays
  Peptide Sequence Number=SeqID_66664
atgggcgcaattccggttaaggctccgtccactcaagggacacgatctcgcctcgcccgagcccagcctcgggcagggacggaagaccaaggcagattcacgcctcgcccgagggtctcctcaagcaacgggtgcaccttcgactcgcccgaggcccagctcgggcaggcttcacgaagaagcaaccttggccagatcgcctcgccaagccgaccggatcgtaggagcattcaatgcaaggatcgcctgacaccttatcctgacgcgtgctttccagtcgacaaggtcgaagaatctccgcctcgcccgaccccagggctcggactcgacctcgcctcggacgacgatctccgcctcgcccgacaccagggctcggactcgacctcgcctcggacgatgatctccgcctcgcctgaccctagggctcggactcgacctcgcctcggacgacgatctccgcctcgcccgaccccagggctcggactcgacctcgccttggacgacgatctccgcctcgcccgaccaccgggctcggactcagcctcaactctggacgatggtctccgcctcgcccgacccccgggctcggactcgacctcaactccggaagacggtctccgcctcgcccgacccccggggctcggactcagcctcgacctcggaggagtcaccacctcgctcgggccgaccacgccacaaggggaggccatcattaccctacccctagctagcccaggctacagggaacaagaccggtgtcccatctggctcgccccgctaaaacaagtaatgatggcaccccacgtgctccatgacaacggtggttctcacccccctacgaaagcaaggatacgtcagcaaggatccgacagccccgacagctgtgcttctacagggctcaagcgctcctccgacagccacgatgccacatga

SEQ ID NO: 23290 - DNA, 645 bp, Zea mays
  Peptide Sequence Number=SeqID_66665
atggtgctgtctgcgttttccaacgaacaccgaccaccagtcaatatggtacttgggctgaaagagattcagatccgtggagagatacgcacaaatgttgattacatagtggatctcttgaatgcaacagaataccacaaaaataagatccatactggttggcttgacaacataatagctatgcgtgttagagccgagaggcccccatggtacctctcagttgttggaggagctctatatgtatgcctgtttgactacaaccatgatttcttacctgcttctgagcttggaaatgtctcagactcagatgaagaagaagaagatgatgatcgaagtgatgcttctgctgatgataaaccgactacaaaaaatcccacaagtagtcctccagtatatggtggtatcacaacacaaccagatgtacaagaaagagggtggcttctagatggttatccaaggagctttagtcaagcgcaatgccttgaaaatttgaaaataagaccagatatattcattgtgctagaagaggagaaggagggagtgattctcctagaggtggaggaggatgaagtggtgatcgacttcaagccaactccaagtgccatgccgacctctgcctccgctccctgcacacatccctcctag

SEQ ID NO: 23291 - DNA, 281 bp, Zea mays
  Peptide Sequence Number=SeqID_66666
tcgcttgcgaggacgtcgacgggcaagtcttgctttctccacgtgcaaaggaaacattgaaaagagacaaggagacaaatgacctcgctcgcctcgagtgtgtgaaggagaaattgggtggccgagtggaggaagagagggtctgggcctctctaaaagctttgcatgagaagtttgatgctgccaaggagaacttcgtccaagtgcagctttgcttagaaaagttggagagggagaaaatttgcctatcagaggtggtggacgtcgcgcgcgcgatctag

SEQ ID NO: 23292 - DNA, 438 bp, Zea mays
  Peptide Sequence Number=SeqID_66667
atgcagccagtcttaaagagcacagatagaaaagcccagacaaccaagatacatgacgacaagcacgactctaacaaggagaagggatgccctgaaaaaacaaataatagagacattgatagtgttgaaagggtgccagaaaggttccactccttgacctcacaaagaagtgggtttcccttaactcctcccagagcgaacgctgttgagcagggcatctaccaatttcctagcgagcggttccgaagctttgataattttgacgagctcctcgtcactccgggcatcataataacctttgctcaaggcctccaggtcgaagtgcgacatggtgatggcgaaggtttggctgacccctcggcggaaggattccgcttcgagctctcgaatcccgtgaaacgctcaaagcttaagatcaaggacttaggcccagactaa

SEQ ID NO: 23293 - DNA, 201 bp, Zea mays
  Peptide Sequence Number=SeqID_66668
atgagcaagaacacaagagacataagatttatcccgaggttcggtcacaccaccaaggtgccctacttcctcgttgaggcgcccacaaagagtctggtctcttccaaccctaatcctccctttgccgaccacaaagctggagttgagaaagctcaactgcagctgaagaagctcaactcagctaaagttcatctcagctga

SEQ ID NO: 23294 - DNA, 318 bp, Zea mays
  Peptide Sequence Number=SeqID_66669
atgtcgtgtgtaaggaaagtcgtctctaagaagagaaagatggtgtatgcccttgatggagacaacaggacatctgcgctgctgagatccttccagccactaactttggtcaagttcacttgggtcgacactcctgctatatctagaagaaattcaagcaaggttcacaatattgaagaaatgattctctcaatggatgctcaatatgatgtgactcaagaatggcttgatagggtgaagatagcaaggaaagggcttcgggaactaagcgaaggtgaaggccaagcgatagcttgtggtttcccgtaccgtggctaa

SEQ ID NO: 23295 - DNA, 825 bp, Zea mays
  Peptide Sequence Number=SeqID_66670
atggaggcagaggagtggcacttgatcgaggagccttcgaccgagatgataaagcctagaggcggcagagcatttccttcgacacttcggggaggcagttttgatcgcctgtttgtcgaggatgcgagacatcatcccgcacgactacgtgcccctccctgtccactcttctttgtttgggtttttcttgtcgtggttaagcttgaccatcaggccattttttcaacgtctctactcttggtcgtcggcccggagggaggcgctacaagccacacaacgggaggtggagaggctgtgggaggaagtcgcccgtttggaggagagggacctgagctctccgcccttcgagccaaggctgagtgtatcgagaatcttcaaaagaagttccccgaggcccacgacgccatgaaggcggatgaggaggcaaagaaggtggttcaagtgcagacctcgctgaaggagcacgacgccaaactgcatgagcttcacttagccacgagtgaggtgtgggacaacctcgctcctccatcatcggcccatgtgcctctactcgaccggttgcgggcgctactcggtcacgtggagcatgcggtcttcgagggggcatttcacggtggtagcctggccttgggtcagatggtatcccactttgttgagatcgacataggcatgatcgtggaggggtttgccactggtcggagcgatgaggagttggataatatcaaagaacatgtccgccctcatgctcgctcgctcgccagccgggtcaatgtgaagatgcttctaaagggacccttgagcccgaagccgcctcccaatgcttag

SEQ ID NO: 23296 - DNA, 138 bp, Zea mays
  Peptide Sequence Number=SeqID_66671
atggcggctggcttaaggggcgatgttcgtgtggacgtcggcaagctgcggctcgtggtccggatttctcacaaatcgtgtggttctcccgcactccctgattcacttgtgcgcctgcgtggtgctatgttcgtctga

SEQ ID NO: 23297 - DNA, 240 bp, Zea mays
  Peptide Sequence Number=SeqID_66672
atggagacaaaagtattcctctccaagaactttgatatggacttgggtgaagctgatgtaatattgaacatcaagctgataaaggaggcaaggaaggagatggcggctggcttaaggggcaacgttcgtgtggacgctggcaagttgcggctcgtgctccagttcgaggagcccaaggagcagctgattcaagaggcaaaggcgaagttcctagctaacttcaaggttaagagcacctag

SEQ ID NO: 23298 - DNA, 252 bp, Zea mays
  Peptide Sequence Number=SeqID_66673
atgacgagaaacaaggaaaagaaattcttcaagagaaaagatgggaagcacaaaatattccataaaaatggaaaggcatacattgttggtgactggctcactgactttgagtcctcaagcgggtcttcttcagtgaagaagaaaatgacgaaaacgtcgctactatcgctggggacttctcttcaccaccaccatccgctcatagacttctcaatatgcctcatggctaaggtgaacggagggtacaattga

SEQ ID NO: 23299 - DNA, 1614 bp, Zea mays
  Peptide Sequence Number=SeqID_66674
atgacgaccctcgccgcgctgctccttctggttgccgcttccaatgtcgtcaaggccgtggagtaccacagctttgtagccaccccgctgtctccccacttgtacaccgctccgtccttggacgcggacgaggatgtcttcggcggcagccttgccgtcgcggaggaggcggccgcggcgtcagactcggccgtgcacttccgcgtggtccaccgggacaccttcgcggtgaacgccaccgcgggcgagctgctgaagcaccgtctgcagcgggacaagcgtagggcggcgcggatctcggaggcggccggcgccggcggtggcaacgggagaaagggcgtcgcggcgccggtggtctcggggctggcgcaggggagcggggagtacttcaccaagatcggggtgggcacgccggccacgcaggcgctgatggtgctggacaccggcagcgacgtggtgtgggtgcagtgcgcgccgtgccggcggtgctacgagcagtcgggcccggtgttcgacccgcggcgctcgagctcgtacggcgccgtgggctgcggcgcggcgctgtgccgcaggctggactcggggggctgcgacctgcggcgcggggcgtgcatgtaccaggtggcctacggcgacggctcggtgaccgcgggcgacttcgtgaccgagacgctcaccttcgcgggaggcgcccgcgtggcgcgcgtggcgctcgggtgcggccacgacaacgagggcctgttcgtggccgcggctgctggctcggcgcgcgctgtcgttccgaccgatctccgcgctacgcggagcttctctactgcctcgtcgaccgcactctccgcgcggcgccgcgccggctccaccggtcctccacacctggtgggcatcagcgtgggcggcgcgcgcgtcccgggcgtggccgagtcggacctccggctggacccgtccacgggccgcggcggcgtgatcgtggactcgggcacctccgtgacccgcctcgcccgcgcgtcctactccgcgctccgcgacgcgttccgcgccgccgcggcgggggggctccggctctccccccggcgggttctcgctgttcgacacgtgctacgacctgggcgggcgcagggtggtgaaggtgccgaccgtgtcgatgcacttcgcgggcggcgccgaggccgcactgcccccccgagaactacctcatccccgtggactccaggggcaccttctgcttcgcgttcgcgggcaccgacggcggcgtgtccatcatcggcaacatccagcagcaggggttccgcgtggtgttcgacggcgacggccagcgcgtggggttcgcgcccaaaggctgctgagagcccccaggccggagtggtgaggtgcagtgcagtgcaggggggcgacaatggcgtgctcgccggctgcgtgatccggcattcagggatggaacggctccgttctacttggctcttcaagtgctgggtcaagcgctgccgccccggagcaaccacctgcggctggggccaggcagccgggcacttgcatgcatcgtccgcgccgctgcatcctgctacttgcatacacagtgatacatcacaagtggagcgccgtgggccgtgtcggtga

SEQ ID NO: 23300 - DNA, 830 bp, Zea mays
  Peptide Sequence Number=SeqID_66675
tggccgatccaagagatagctctgatgtctcccccagcaacataatcgagccgacttgggaaaccctgtcggccgaagaacaactagagtttgaggagcaccaggaacagttgatcaaggaggcaaaagcaaagttactagccaacttcaaagtggataggaacaacaaggtcgttcgacaacgggcgactgatctagcttcgctccggcctactgtggttacctggccccaagtgagtgaagttgaagcactgcatgacctcttccggaaaataagtaattcagttatcagagataatctaattcacaaggaagaattccaacttgctctctttaggggcaagaagcagcaaaatctctttgttgatagggtatttgacttgtttgatcaaaaacgaaatggtgtaattgaatttggtgagtttgttcgatctcttggtgtgtttcatccagatgcaccagaagatcagaaagttgcatttgcatttaagttgtatgacttaaaacagacaggctttatagaacggcatgaggaatatttctcactgtcctcagttacgtcgcagttaaaggagatggtgctggctctgctggacgaatcagatttggatattgcgagcgacgctgtcgagatgattgttgacaggacatttgatcaggccgacacaaaaggtgatgggaagatagatcaggaagaatggactgaatatgctaaagacaatccatacgtgctgaggaatatgacccttccatacctcaaggacattactatggtattcccaagctttgtgatgcactcagaaatcagtgaaacagacatggctgtctaa

SEQ ID NO: 23301 - DNA, 156 bp, Zea mays
  Peptide Sequence Number=SeqID_66676
atgtccatagaagagaggaagagaagtatgataggcaagagtactgcgctcaatccaaatgcagaggaatttgttctttgtcccttagatctgttagtgattattcctatatgtgaacgccaaaagggtctaggacaatggattgtcattgactga

SEQ ID NO: 23302 - DNA, 156 bp, Zea mays
  Peptide Sequence Number=SeqID_66677
atggggaagcctgtcccgtcactcctcatgctcctcctcaaccgagtgaccgcacttgtacccagcataaccggaattggagaccacgtctcaggtcgcgtgaggggtaaagtctattgtcaggttcaatcagaatttagtaacaattatgcctag

SEQ ID NO: 23303 - DNA, 684 bp, Zea mays
  Peptide Sequence Number=SeqID_66678
atgagaaaggcacaagaaaataatgaacataggatgcaaatatttttcctagtccacttaagtaatgaagaacctaggaaaaataaaaggtaccctagtccagaacaaattcaagattgcaatctcgctgatggagagtacgtgctcatccctgagcaaggagctgtccacgaggaagaccaggagcaagctcccgagactgccatcgaggatctccccgcagccccagcaattgaaggcaagccccgttgcatgaaatcaggattcctttttgatatggatactggtatgctaggtcgagaagtgcttaattctgccagttaccctatgccccctttgtacacagtgcagatatacgaggagcatcgggtaccacgttaccgagtctggctgactctggaggctcatccccttcagcccggttggcgttcccttgactccgagacgaatggattcaggatggacgacaccactgaagtggcagctatgaagaccctgacgactttctgtggctaccatcccctggagatggtgatgcaccccttgggactcttccctgctgagaagaaggatgaccccaagtggtgcaaccgtgtgacccatgtaaaggacgtatgggtgatgtatcctgacttggttgggagggtcactgttcagtacatgagcgcactgtaccgcctttag

SEQ ID NO: 23304 - DNA, 480 bp, Zea mays
  Peptide Sequence Number=SeqID_66679
atgggcttgcacgagagggtttcccccgtatcttgtgggaggtacttcagggagctggttacacgacgcctccccagctggcgtttgctggactctgagtcttttggatacagggctgaggataccatcgagccgattgctcatcacagactgaccaccttctgtggtttccaccccttggagctgtccactcaccccattggacagactgctcactggacggtgcggtgcatgaattccctgtatcgtctacaagtaatgcgaggagaggcaatgtctcatctgatggcattgttggaggctaccaagatcaccttggataaccgagaggaacttgtggtggacttgtccactgagatggtggaaaaagacttacaagtggaacaattgtcaaatgagatccaagagcttgaggagctagtgggaactagggagaacaccattgaagttctcaaggatcagcttatcaacactcagtag

SEQ ID NO: 23305 - DNA, 165 bp, Zea mays
  Peptide Sequence Number=SeqID_66680
atggcggaggaattggtcagttcggtcatgaccagctggggcgacaagatgacaggcgggtcccacctatcttctaccgacgcggtcgcaggcggtttaccggcatcgccgagatcctcgcgggagctagataccgcgttacgtaaccgccttaactacaaatag

SEQ ID NO: 23306 - DNA, 171 bp, Zea mays
  Peptide Sequence Number=SeqID_66681
atggccgggagcgtggcgcgcacgcttgggctcgccgtcgggtgtgcacgcgccgccgtcctagctgcggtaaggaagaagatgggcgccggcgcgccgctgtccctggggaaacgcaccaactcggtacacgactgggccggctctgtgtctgggacacatttacgctag

SEQ ID NO: 23307 - DNA, 528 bp, Zea mays
  Peptide Sequence Number=SeqID_66682
atggctggagcacaccttggcactcaagactatgatcacatgtggaagaacttaaggagcaaaagccgtatctgccccggcgtctcacagttgagtgacagccctaggtgccaggaagaggtctgcgccggacttttgcaaagattcgcacgtttgcgacctctggcgacatttgaacactggaagaaacaaaccgccacgtgttcgacgccgtctgccgcgccagagcacgcccgcgcgcgcgcccgcgccgcgcccaagccaagccagtgccctgccattcccaaccccgtccagccctcggagaagactgtgcacgtctccgtgaagctccccgagcgaggaatcgggctctgcttcaccggagaggccggcccaaggtcaccggacttcaaccgaccgccggcaaccgtggaccgaggttctctggaggagatggttgctgggataacttggccgaccaccctgccaccgggttggactgtcgagtgggaccctgcctcggctgaggaggagcatgaggagtga

SEQ ID NO: 23308 - DNA, 468 bp, Zea mays
  Peptide Sequence Number=SeqID_66683
atgggcaagagcaagaatggtggcggctcttcgcatcactcgggcgacaagcgcaagcgtgagccgactcctccatcggaggacttcggcgactcggaatactcggaggaggagttctcctccgagtccgagggctctccggctcctgcctctcccccggcgtcgtctgatgattcagacgactcccaggggatcgccgcggaggtatggacctacatccgggccatcgagtgcgtcgggctcgagggctcagatgagtcggagtactcctcggacgaggagaatccctccgactcgtccgaggagggcagcggcgacgatggcggttacggcgacgacgacgaaggcgacggtgacggcggcggcgacagcgtcaagggcggtgatgacagcggcaagggtggcagcggcgacggcggcgacggcagcaagggcagcagcaagggcagcaacaaggccagtggctag

SEQ ID NO: 23309 - DNA, 138 bp, Zea mays
  Peptide Sequence Number=SeqID_66684
atggctagagggcagcaccagctggtggggggcgcgagcttggagatgcgccgtgttgggggccttcggcttccgaagaaaagcttcggcatgacggcagaaaaggggaaccgacttaaagatgaaaagccaaattag

SEQ ID NO: 23310 - DNA, 744 bp, Zea mays
  Peptide Sequence Number=SeqID_66685
atggctgttcggccttgcgtctgggctgaaaacgaggggttcgccatggcgcgcgggccgaaaacaacgaactccccgaagtcctgggagggggtctcctcggccgagccccgcaccccctcgcggcctagccgtggccggtcggcaccctaccgcgcccagctccggctggcgctgttggctgcctggccggccgtgcggctacgctggcgcatgagttgtcttggacccgtgactgcttggaggacccccgctgccgtgcggccgactcccggcgcccgtgtcccatcactcgtgcgggcatcctgtgcctgctgcgttgagaagtgcttgcgtgctgctacccgtcccacgggaagccgtgctcgatacacgttgccttcgtcgagctcaccccccggggtgcggctcgtcggctcgagagcgcccgcggcgtttgcctcgtgccgccgtcggcctatggccggcggcaccgaggacacctcgctggcgcttttggtctcggatgtggctcacgctgaaggccggagacgcgttggcgtcacgcgcccaagaatcggtccgcccgaacgaacgacgtccagcccggcacgacgcctccgcgcggaggccggcgctggcccgtctgcgaggacgtgctacctggttgatcctgccagtagtcatatgcttgtctcaaagattaagccatgcatgtgcaagtatgaactaattcgaactgtgaaactgcgaatggctcattaa

SEQ ID NO: 23311 - DNA, 180 bp, Zea mays
  Peptide Sequence Number=SeqID_66686
atggctagcgcacgcgcgacgaccgccccgccaaccactcgccccgtcgcattaactccgcggcgggacaggcggcgcttctggcaggagaagcgggcgacgctttgccttcgccgtaataaccgcgccaaaaaagggaccgggaaagggggataccccgaaaaagatccttccccgtga

SEQ ID NO: 23312 - DNA, 459 bp, Zea mays
  Peptide Sequence Number=SeqID_66687
atgtgcgcaccagccctcggccatgcgcgcagccgcccccgcacccgcctccatctcgcgcagccatgccccccaacacccgcctgcgtcccgccccaatcctcgctcgtcccttcccccgcgggcgtgttcagagcccccgcccttgttctctgcgctctgccgcactcccccacccccattatcattgaattcttcgtccccaggcgtgccctgccatccctgcccgttgcgcggtccccgccccgacctcccccctcaccgcgcgttcgcctaccccgcgcccatcgctgccacccatcaacgtcactcgtgcttccgaccgtcgtccctgcctgtggaaatctcactcacccgctcgtcccgcctgcggcaggctcgtgcctagggtccctcttcctgcaggccgaccaacagctaggcggcgctccgcccacgacccgagctgctccgccctga

SEQ ID NO: 23313 - DNA, 399 bp, Zea mays
  Peptide Sequence Number=SeqID_66688
atgcgcgcaaggtgggggaaggtggcactgcacggcggaccccacgcgcaagtgtcggagcaccatctccacgatcggaagtcgctgagtgctgggccccgccagtcggcgtgtttgcagaaacgagggcagaaaaggatccttctccgtgaaggaaacaggctccgagcctccctactgatcaggggttcaaaggctggcccctcggaggggttcaacagccgcctcagagcgcgtgggctccacacccactactggtcagaggttcgaaggtcggcccctcggaagggttcaacggctgcctcaggccactcgggctccgcgcccactactgatcaggggttcgtagcctggccctcgaagggttcacagccgcctcggacacagagcgagggatga

SEQ ID NO: 23314 - DNA, 456 bp, Zea mays
  Peptide Sequence Number=SeqID_66689
atggcgggggaaagcaaaccgggctgcggcctcttcccctccctcagcctcaaggattttcatcatcagtgctggggagggcactgccgcgtgcctggctctcggacccgagtggcttcggagccgctcccggcgccgccttccgccacggcagctggaagaggttcttccgccgacgagatagacggggccgcccacggaccgacctccaactctacggccttctgcccgtccttgcctcacgagttttggtacgggcgagggcctcatggcagcagcatccgccctgaggtcatcgctgctgctgttcggccccccggagcagaagtcgtcgtcgtcgccgctgctggagcgggcgacggtgagccgttcgtcggtcttccgttgctccgcaggccccccaatcgagtggggatgtttgtacctgcggaggtggaaccggagttccgtttgtaa

SEQ ID NO: 23315 - DNA, 417 bp, Zea mays
  Peptide Sequence Number=SeqID_66690
atgggtcggcgcgagacggagcgcgaaggggggaaaaagaaggcagccggagcgagagagagaggtggaaatcccgcggccttcgtgttcgtcccgcgcccaggtcggactgagtcagcttggggtagggtaatgatggcgcctcctgttgacgtggttggtccgcgccctaggttgggtgatgtggaggctcctccgaggtcaaggtcaactctatcttccatggtcgaggtcgagtccgagctcctgggtcgggcgaggcggagaccgtcggctgaagctagggctgagtccgagccctggggtcgggcgaagcggagttcgtcgtcttccggggctgagcccgagtccgtgccctggggtcgagcaaatcagagttcaccgtcttccgggactgagcccaagtccgagccctag

SEQ ID NO: 23316 - DNA, 375 bp, Zea mays
  Peptide Sequence Number=SeqID_66691
atgcggagaccaccttccgaggtcaaggttgaggccgagccctggggtcgggcgaggcggagatcgtcttctgaggccgaggtgggggccgagcccctgggtcgggcgaggcggagacctcctgttgcgcctgaggaatctccacaacttggagcctctcgcccttacacttttgatgttcacaaagaatcacggagtaagggaggaatgagcaactcacacaagactcacaaatcagagcaacaacacgcacacaagtcgcaacaagagctcgcaacacaacccaatgagttcacaactccacaagagctctatatgctatcacaaagaaacaaatgcgcggaatcgatgacttggtgcttaggaattttgtga

SEQ ID NO: 23317 - DNA, 843 bp, Zea mays
  Peptide Sequence Number=SeqID_66692
cgcaatgagactgaggtgcgacctctggctgcggatcccagactgtttgatcttcagcgtgctacagcagcacaggagtccttcttcagagctcagatgtctgcacagattgctctacgagtgcaccgacttctggaccttcctgcatttctgctggccgccgatgctgactctgaggtacacctctcctatctgcctggacttctcactctgttgactaccagcggcagatatgttgaggaatgggtccgagttttctatgcttcagtatggatagaccctgatcaccagtggatgaggttccgctttgagcgagaggatgttaccattcatgccagccagatttgccagttgtttggattcaacgagtcgtcaactcgtcttcacaacttgtgctatggcacctctgatcctcctcgtcgccctcacggcggagttgctcctggtacaacccacgtcgcggctttgttccgccacccttctcagatgggttgcgacgttctctggcagacttcaccacaggaggctgccactcatattcagctttggctacttggtgccctggtctctcactccgagtttgatgttgtggatttcctcatttgtgagatcgaagacaccgtactggatggtctacatgcttgtcgacagctaccgtatgctcactatctttgccacatctttgctcagttgattcggccaccacagttccagggtactcttgaggcctctcgcctcctctttgggtcctaccgtccagctctagaggatcctgtgccggcacctgctccagtgattgatactcaggccgaggataccacctttcaccagttcgagacttag

SEQ ID NO: 23318 - DNA, 444 bp, Zea mays
  Peptide Sequence Number=SeqID_66693
atggagtttaggtcgtcgaggatttactcgagccacgtgcacgagatgcaacgtttggggtattttggaatggagttgggcgggcaccgggggctgaagatgtccccgagatggaggaagaagattggtggattgattgcccaatttgggtcttgcacattcacgccgaggactgggaagacgtcggtcgaagttgttgaaattgttccgtgtgccaagaacaagtgggatcggatggtgcagagccctgccttcaccattgatctgcgagggtgggatgcagtcgcctttgttaaggaggtggagttggaggctgttaaaattgttggaattgacggggacatgcgctgggcctggggaggttatgactttgctcgaactccgggaaacatcttcacaaatgttaaagcagtgatggataaggaccgccaagaggccatgtag

SEQ ID NO: 23319 - DNA, 447 bp, Zea mays
  Peptide Sequence Number=SeqID_66694
atgatgagcgacaagactcgagaatcaaagagatatgagcgtgtttggatgttggcgctagcttgtccaacctatttgcgtctggtagcgtgttcttttggatcaacactaaataatagcatgcccacgcaagatgagaaaaacactggcacacagctacacttagccaaccaaatccttcaccaatgcttggctagccagtacattggctggttcagaaatgatgggaaggttttcctttttgatcttggaagcacacatggatcctttatcaataaaaatctgatcaagaagaagctgtacacagagattcatgttggagatgtaattcgatttgggcaagatcttgtttctatttttttcttttatcttccatttcatatccagaagttccttcgtaaattgcagcactgtggtgttcatttattcccaatgctatctctctag

SEQ ID NO: 23320 - DNA, 1158 bp, Zea mays
  Peptide Sequence Number=SeqID_66695
atgccgtcctcttcctcatctgctccaaatacaccgccggccggcgcatcgtccgaggacactttgagcaacatggcggcggaggagttacatcctggtgatacagtggagtttggcgtgtcgcggatttcctcggtccgcatccaggatatgcagcaacttggatattttggcagcggagtggggcgcgtcccgggggcggaggaggtcctgcggagattcgaggtccaggtccaccagctgacgccgaatgccgtggtggctctggcgaagtatgtttgggcgacgacttcgtatggtggtcagccctctgtggaggatgatgaagacgagggagcccttcggtgcgctgcctgcatgagtagcgggcgtgacttagtggaggaatttatcgggtatggggtgtggccattggcgcatggctgggcgctgggcgaagtatgccctcgcgagatgccgttccggggcgggcagcgggtgcgaagtccagccttcgcgttggatttgcatggtcgggatcccaccgcattcgtgcgcgaagcggaagacggtgcagcgaggatcgtggggtgctatgtgccgaagacagagggtctacggagctgggatatccgtggggccaacgatagattgaatcgggtcttcgaattgaaccgtttgccatacgctggttatcccggggaagacgccgccgaccaccatggggaaaaacccgacgggtgtgaccgaggaagagccttcgcagttgatggggacgtgcgcagccctcgggggaaggatgtcttcgcccgagctccgggagtcttcggcgcggatgctggaggttaccgggggtcgatggcccaagaacgttccgatcccccgcgcggctggcgaagactttttacgtctcgcatggctcgtgacttaaaggtgtttccttacgggcggaatattgctgctgttgtgtcggcagtgatgaacaaggaccgtcaggacactgcacagaagcgtcgggcggttgtcaggatcgcagatcctaggcatgaggcgaagagggcgcgggggagcacgaaggctgctgcttccggcagtagccagccgatgccggctgtgaaaccggccgcgcccggacccagcaaggcatcggcgggcgcgaagactgccgcctttggctga

SEQ ID NO: 23321 - DNA, 718 bp, Zea mays
  Peptide Sequence Number=SeqID_66696
agctcgggcggccgagatcctcacatgtcggcgaggagagcatgactggaggttggcaaggctcatggcgaggaaatcaagctggaggttggcgcggatctcggccggccgagatcgtcgcggcgaggagggtggaggttgctgagcgcatcggggacggggaagggcttgtgggcgagggggagagcgacgcggggatcgtgggtgggctgcacaagatgaaccagctctctcttctccaccgcgccttccacctgcatctcctctctcccgaacgcggtcatggcctcacagccgccgtcatccgagttcgactgccctcctctcaacacaccccacgacagcacgcaaagcgcctcctcgcagtagcacctcacgaaagcatcgcggcagccacggaggagagcagccgtccgcgtcaagagctcgcggcggcgggcaataagaacgacggcggcggcggcggcggcaggacctgcgcgctgccgacgtgggcgctcatcggcggcatcacggcgggggtggccgtggcgctggccctgtccgcgggggccggccccgccctggcgctggggccggagggccccctggtggaggagttctgggacaacatgcggcgttactcgctgtacgtggtgacggtgagcacaggggtggccggcttcctcgtctcgcaggtgctcaatgccatggtcggcaactccgacttcatctacat

SEQ ID NO: 23322 - DNA, 96 bp, Zea mays
  Peptide Sequence Number=SeqID_66697
atgcagcttcatatccttagaggggggaaagcagaagtcatccttgcatttgcagacatttgcactcatgaggtacttgatacatgttgggaatga

SEQ ID NO: 23323 - DNA, 294 bp, Zea mays
  Peptide Sequence Number=SeqID_66698
atggagacgcacatgaacgaggaaaaagacttgcagaagcttcgggatgctagaattcagcaagacatgcttgatcgtgaagcttccattttacgtgcaaaaactcaagcagctttggcagagggaatctcatggggtatgacagatgatgcaatagaagagtctgcagaggatgatgcagatgaaattacttggcaaacctacaaaggtcagcttactgatagacaagagaaaactcgtagcaagatagtaaaacgaatggagaagtcaccagaaacctgggtcgatgagtga

SEQ ID NO: 23324 - DNA, 579 bp, Zea mays
  Peptide Sequence Number=SeqID_66699
atggctgcctctattggcgtcgtccatggagacagagacgtcgtcaacgaagatgatgtgacaaaatttggcattgtccctggagatgggcacgccgacgtccaggatgtgttgacaaaattggcaggcgatgctgcccatggagatggggacgtcggttgccaagatggcgtgacgaaggtggcatgtggcgcagcccatgcagatggggacgtcgattgccaggacagcgtgacgaaggtggcatgtggcacattccatggagatggggacgccggttgccaggacgccgccgcgaaattggcagcagaagccatgagatcggatcgaaacccaagctatctgataccagatgttatggtcgctagatcgatgagggattggagagggaattcgatggatggagctgctggtggaggtggtgtgggcccatggttgctgctgccgcaacccctccgtgggcctcctcgggccctgacacctagagagggccagcgagcggacaccacctccacggcgatgactgcagccaccatagtcgtcgttgccaccgatgccactggactgcagcgcgcctaa

SEQ ID NO: 23325 - DNA, 492 bp, Zea mays
  Peptide Sequence Number=SeqID_66700
atgtcgactatgtcgaaggtgacctactcacttcgcgcatttggcgcagtgccaaatgacagtggtagcttgattttgccaattgggaagatcccatcctactactcggtagtttatcaccattgcattggcatggggtgcactgcggagatcgacgtctctggcatcgaagtggtggtaacggctgatttggatgctatggtggtagtggaggcagtagagctaggatctcttggtgttgctggtatatattgtggttttgctggtgagtatggaaatgttcattatggaattggtgctggttgtactgatggggatgcgagaagggccaccttcgctgtgtcatcgatggaggcggtggccttcaaagttgctttcttggagagcacgaaaggtgggcgtcaaatgttggaactcactgacacgtggtcgagcaagtccaaacagtgggagaacgggaatgctttgatgcttaacaacatggtggattag

SEQ ID NO: 23326 - DNA, 306 bp, Zea mays
  Peptide Sequence Number=SeqID_66701
atggatgttttgatgattaggaaccttggagaggaccagcaaggacttgggaaaggccaaggtgttgaggaggaggagcaagggcgcccacaacaggaaggagatcaatctggcttcgcgcatgttggcgaatgtctctgcgaggttggaaagatggtcttctttgttcttgctcgcaacgactatgtcgtcaacataagtgaaaacgttgcgacccatctgactttcgagaatgcttttgcgcacagtgggaccaatgcccaatctgtgttcaatgatggtgcggctgacgccgatgaggtctag

SEQ ID NO: 23327 - DNA, 552 bp, Zea mays
  Peptide Sequence Number=SeqID_66702
atgtccgaccaccagatctcgcagctgcgggattgcaagttcatgctggcggtggaggtcaatgcgctatgcgagcaggcaaaagagatcctcatggaggagtggaaggtacaacccgtgcgttgccccgtcactgtgtgtggcgacatccacggccagttctacgaccccatcgagctcttccacatcggcagcaacgcgtctaacaccaaccaccactttatgtgcgactacatcggtcagtctctcccgtcctcgcatgaggagccctacgcagacagaggccgtagtagcctatccccagtccagctctatgtcaaggcaacgtcggttccctgggaaacgtcatggaggcgtgctgcctgtagccgatcaaagtcttcaagacgcgactgcggctcgatcgcacgagggcctaccggggcatcacgcactgcggcaccaccgtggcccacgctgagggcgtgcacgtgctctggaaggggctcacaccctttgccacacaccacacacttcatgctcaagtacacatgggtggcttcaagcttctag

SEQ ID NO: 23328 - DNA, 315 bp, Zea mays
  Peptide Sequence Number=SeqID_66703
gtcgacacatacgacctctatgtcattgtgcacatgatgctacacgagttaggcatgagcgtcgagaaggtgcccaagattggtggaggctacaattatcagcctaagcaaccgtttataaggtactggaatgttgatctgtggcagaagctcttctcaaacgacagcgtcgtggccgcgctccagagcctccggggcgtctttttgggatacatgtgcagcaaccgggagctagtcggcaagttgatcgagctgttggcgaagcagaaggcctcctacaccgttgccatgagctgtgacagcccaaacgtctag

SEQ ID NO: 23329 - DNA, 648 bp, Zea mays
  Peptide Sequence Number=SeqID_66704
atggcacccaagagagctagctcgaaggcagccccatccattgacgaagcagcgaaggcagcgctgctggccgagaaaaagggcaaggcccttgtcgacaccacccaccaagaagcctgcgaagacgacgcactcagcaagagacagcgcaatgaacaacctacacctgaaggcaccctccgcacctgcagctccagaggacaaccgcaacctcccccaggcttcgctccactagagggcgaggacgccactgaggatggcgaagtcatcggcgtttcagcagaggaacagctacagctgcgggccttgcgcatcaagaaccgcaacctccagaagcagaaagagatcctcgaggccaagcgccaacgtgtctctgcgcaggccaaggtgcgccagatgatacgcgacgaggagcagagggctcaggagctagagcaagagattgcgctcatgcagcgcgaaggccaacctgatctgcaacacggcccacccctccaacagcgcgcgccaatcagagacctgttcattcctcagcgcggacccgtcatcccgcacgccacagcattccaaggtatatggattggaggccatgaccccgcaagaagggcaaatgggccgacctgctacctgaagcagtctgggcgctga

SEQ ID NO: 23330 - DNA, 309 bp, Zea mays
  Peptide Sequence Number=SeqID_66705
atgtcgcgcgtgttcgacgactactatatcgaggattgtggcgtcatcttggcgccggagaccgtcagacataaagttatgtccgacactgacataagggattttaacccgttctggtcaggcgtcccgtttcatttccattcactggcctccccagccgctcgtcgtcatcacccgcccaccctcaactccgcccgagcccgtcccttccccgccaatgtctccgacgtcgtcggcgtcgccccgtcgcagcccgcgcccgcccccaacgtcatcggcgctcgcttcaccggctctacgtccggctaa

SEQ ID NO: 23331 - DNA, 447 bp, Zea mays
  Peptide Sequence Number=SeqID_66706
atggatataatagctaaattcaggatattcagctgctgctgctggtggtggcggcggctgctggcgaaacttagaccggaggcggccgacgttgtatgcactgagagaatagagatggccgccggtcgtcggagccggatctgcaggctaccagatgaagctcatctcggcgttggcgcgcgcggcgtcgtcgtcttcgtcgcgggacggggagtggacgtggcggccctcgtaggtggtgatgaccatgcgggggtcctcggcgagccgctccacccgcttcttcacccggcagttgtcctgcgtgcaccggtagtagctcctgcatgcaatgcagcgagcacatcatatcatgcgggggtccccaaaatgaacttagaaagagaaggagagtgcagtgcagagctggctagctttcttgggggacttctccggctcctgtgctag

SEQ ID NO: 23332 - DNA, 810 bp, Zea mays
  Peptide Sequence Number=SeqID_66707
atggcgctgggccacggtggccagcacatgaccgcgtcgtccaccgccggcggcatggcggcatcctcgtcgtccacccccaccataacgttcgcgttccagcagccgtcccctccccctcctccgacggcgacgagctccctcgccctcgcccacccccaccaccatggcgtgctagcgtcgtcccggcccccaccctccaccaccacttccatggccatgcagcaggagcgccgcacgtttccctttcccctcccacgagggcgtcgcctcctcctcatcatccatgcgtgcgtgaccgtgaccgtgatcctatcctccgtgtcaattaggtcgacggcggcggcctgcgaagaagagccggagccgcatcacgatcatcgccaacaagcaggccaaggcggcagaccgccgagggggaagggagcggcggtgagcgaggggtcggcggcggcgctgggagtgggcgccgtgcggatgaagaaagcgggcggcggaggaggaggcaaggcgcggcggaaggtgcgcgagccgcggttctgcttcaagacgatgagcgacgtcgacgtgctcgacgacggctacaagtggcgcaagtacggccagaaggtcgtcaagaacacgcagcacccaaggagctactaccggtgcacgcaggacaactgccgggtgaagaagcgggtggagcggctcgccgaggacccccgcatggtcatcaccacctacgagggccgccacgtccactccccgtcccgcgacgaagacgacgacgccgcgcgcgccaacgccgagatgagcttcatctggtag

SEQ ID NO: 23333 - DNA, 240 bp, Zea mays
  Peptide Sequence Number=SeqID_66708
atgaagagggcgtctacaagtaaaggtgtcaaagattcaacaaaaaccaatagaaagaacaagacagggttcaaaacaaaggagcaaaaagaaaccgaagtgctccctggtttggcacaccggactgtccggtgtggcaccggacagtgtccggtgcaccaccggacaatgtccggtgcaccagggaggattgccttcaaactcttcaccttcgggtttctcaggcgcagcccactataa

SEQ ID NO: 23334 - DNA, 522 bp, Zea mays
  Peptide Sequence Number=SeqID_66709
atggaggataggaagggtagtccggaaagaaagtccacatcatgtcatcctcgaatgaggagtcccgagggggctcatcaccagcagaaaaaccagatgcagaagacataccctgatgatgatgaggaggaggatggtgatggtaaccggagccagaaggcctcgaatcaccaggaatgggtccctgacctaggtaggaaggaggaggaaagtgactggagccggatggcctggggtcaccaggaatgggtccctgacctgaatagggaggaggaggaggagccgaggagtaatgaatggtacaccaaactcctattggtgccactcattaaggttggcagggaaggtgggggtcagaggcggaggggacccaggaggcaggggatgacctgtggcggcagcataacgacgaaagtcctcatgcagcttgtcagtctggcgctggtgcacggactcctcgatcgcccggtcgcggcacatggtgaaggcgccaaaaatgcccttagccagacgaatgaatag

SEQ ID NO: 23335 - DNA, 2127 bp, Zea mays
  Peptide Sequence Number=SeqID_66710
atggagctctccgacgccacggcccgccggctgttcgacgaattgcagcagatggaaacgcgcctctccgagcggattgccggccgctgcgacggcttggaactccgcatcggcgagcgctgcgatgaaccgcatacccatttcacctctcgctgcgacgggattcaacagcaagtcgcctcgttgtttgactcgttcaatggcaccgcaacttcctccgccacagcgccacggtacgacgatgtgttcggctcttcgacgggcacggcgtacgacgacgcgttcgctacaagcgccagcgctgcggcgccttctccatcctacgacgacgacgaaccggtcttcgatgcatggcctatcttcgacgaggaatctatcgacagcacagcctctcaggctctcttctccgacggtgccgaccactgcttcggcgacgagctcgacaccggccggaccatggagttctgctacaacgacgacaaccacatcggggtcgacgtcgacatcgacatccttcccaccttcgagttcgacatcaagcagaccgtggttgtggccagcagcaccaaggactcgctggagctcaccggcgctgatcagaggagttccaatcctggacattctacctccaccatggatgcgatgatgcagctcctgctcgatgaaatggcgctgatggaggctcgaatcaccgatgtgattgagggccgctcctcgctctctgatacggaggccacggtcggcagccgcgcccgcaacatccccgacagcgtcgtcgcggacctcgccgccgaccacctcttcggcggggcgttcggcctggacaacctgacccccatggccgcccaagctccatctgccgaggagatcccgcagccgcaagcggaggtggtggcatcgtccgagtcagagcccgcgacctacgccgagctcgcggccgcgctcaccaagtgttcgatggtggccctcaatggcggcacctactccgtccccaacccgaccgcttcactgacgacctgtgtgttcctctctgcgcaccgtgtcgcctgcatgttccccatcatctgcgctgagatcaataccttccgctgcgaggcgtgcgccgcagacactgacgtgtcgcaggaggcgagcgagttgacacggatctccgaaaaggtcatgctctacctcggcacgaccaacctgtgggactacctgccgttcctgcggtggttcgacgtgttcctgtggctgctcatcgacggagagcgtcggaggatggacgatgacggcaacggcgagaagaagagcatgactgtcgtgctgctctctttgcagaggttgaagttggagcagtacacagatatcatggtcatggcgctctgctgggacttgtttggcgccggaacagagaccacatcggtcacaactgaatgggccccgtcgcttctgctgaaccacccggaggccctgaagaaggcacaggcagagctcgacgcggtggtgggcagctcgcatctgatcaccaccgatgacatgtgctgcctcggctacctgcactgcatcatcaacgagaccctgcacatgtactcggccgccatgctgctcctgccgcacgagtcaatagtggactgcaaggtcgacggctacgacagtaccctctccaaggacgatggcctggtcgatggactcagaaaatgtgagcaatggaagtggcaggacatatttgcatcgaaagaaacaaaaacaagttcatggttccacgaattcattgggcgagcaaagaaaccagaactgagatgtcctccatttggctgtggttgtggttgggatgtcgtgccgtacaagcaaccatggccaccacccatgcaatttatgctacttggtgatggtgttcaagttagacctatggcgtggccatctttttactgttatgcagccttggtgcgatggattaaatcactggtcgtggccaacattctgacaaagcatccttggttggcaattgatcgaggcagcctgttcaaagtggattgcagctacagtaccacaggtgttgctaggaactccgacgagcaattcccggagtcgcagaggctaatctcgcccgcgacgcagcggaggaccttcccccaggcctggtga

SEQ ID NO: 23336 - DNA, 501 bp, Zea mays
  Peptide Sequence Number=SeqID_66711
atgcagagcttacagcgaaaaataaacgctgataccgccgaagtagaaggcaaagaagctcctaagggaggcttacagcgaaaaataaacgctgattccgccgaagtagaaggcgaagaagctcctaagggaggcttacaacgaaaagtcagcgctgatacaccgaaaaataaacaagaaggcagatgcttcgactatgaggataaagcttcggagaaaaacagaaagaagaaattttcgtgcttcattgtgtacgaaaagaagggaagcttcatcatcctgtacatattaaaacggaatgagaaaagcgtagagttcaaggagaagccagtcttcaggaaagcagtagctgtgcctcgagaagctaacagggcgcagaaatcggcatgcccagcgataacttcgtcaagcgcatcaacttcgccctcaatatattcaaaggtgcctggcaggtcttcaactgaaggtgtaaacttctcagagctggctccaattgagtaa

SEQ ID NO: 23337 - DNA, 1170 bp, Zea mays
  Peptide Sequence Number=SeqID_66712
atggacatctgcgtggatgactaccgcgtgggtggtgtcatgatgttcgatgcccgcacggggcggggacttgtcgggtcggatgctgggaaactggctgctgtcccggctccggtggcggccgaggcgaagggtgcttcgcaggacccatggtccaagttttgtgccagcggcgagattactttggccgccgccgctaaagacgtggcgggttctgttgcgcagcagctgaagcatgcaacgcagcagctgaagcatgcgactgccttcgccgatcatgttgcgtcgggcgctctaacctcggagttcgctgctgagaggcaacgactcgagggcaggattgagcgcctctggacgcagcatatagaagctgtgcgggacaagtcagctgcggaaaacaagagtcgcaggctgatggagaagttggcggttgcggaggccgaaaaggaggacctcagccgtcagctggcggtggagaataaggatgcaaacagggcctgcactgaggcacaggctgcacgtgccgaggccaaacatgcgcgtgctgaggccaatctcgctcgccaacgcgctgaggaggcggaaacgagccacagcagcctgcgcgactgcctggacaaagcggaggcctctacccgcgtagaggtcgaccaggcgcatgcacagcttgcggacgcgtaccggcagcttggtgcgtggaccgctccctttgacgcatccggtaaggaggtgggcctccgcttccatggatggctacaggaggagttggaggtgctcccaacgattgtgacgggcctcatgtccttcgcctcgctcatcacctgcgaaggggctgtgaatgccttgtcccgcgagggatgcaggcacttcgaagtctttgaccgatcgaacgaagactttgaacgtggaatcttccaggttgaggacctggtgctgaagcgatcggccgaagcactttatgataggatgtgggaccctcacgaccgcgatactgtccgggagaggtccgaccgggcgatggagcagatggcgcataatgaggaggtcgaagacttcggggacctggagagcatgctgcccgaggcatcgggtgtgaaggaagggactgagggggagctagcgccgccgtccgatgttggcgaaggccccgtgatgacccccccacgctga

SEQ ID NO: 23338 - DNA, 129 bp, Zea mays
  Peptide Sequence Number=SeqID_66713
atggaggtgcagccaggccacatggtggagttcggcacctcgaggatttcctcggcattcttcatcgccggccttcgcctaccggcgcattgtttcgtggcggaggtcttgcagaggttcgacgtctag

SEQ ID NO: 23339 - DNA, 444 bp, Zea mays
  Peptide Sequence Number=SeqID_66714
atgcctgagcgtgccgagggcgccggtgccatcggcttcatcgccgcccctaattgccccacgctgatccacttgcccccacactcgacgcacaccgtccctccacctcgtgcatccctttctgcatacacgacaataggaggcgtgcgacatcacatcctcgcccagatccgtctgcgtccttgccccctccgagcttacccaggcgccgaccaccagctacccgttcgcaccctctccccctccggactcgcccagccgccagccaccgatgatccatccacgccctcaccccctccagaccacgcccatgccacttccacgccctacaaacttcccgtcacggccccgcacaccatttctgtgttcgtcgagaaggtcttcctctccatccccaggttcatcctcgccagcaacaatctcatctccaagtgcccctcctag

SEQ ID NO: 23340 - DNA, 168 bp, Zea mays
  Peptide Sequence Number=SeqID_66715
atggcgctgccgcccctggtctgtgtgccgccgtgcttactcgagcggagctgcggggtgtctgcgccgtcagatgcaaattggacgatcacgattagattacgtgtacccgttcgcgcggttgagcagacaccattgatcgatgatcctacggttcagttcctatga

SEQ ID NO: 23341 - DNA, 1921 bp, Zea mays
  Peptide Sequence Number=SeqID_66716
atgggcggttgccggcgtttacgcaacgcgtcgtttttggagctgaggagcgctggagccagggtcgtcatcgcgttccaccggaggagggttctgtcgttgactgagcgccagctccgccacgacgagatgacgcccaaggctttcgtggagacggttgcatggcttccgtaccgcttgacctctggttctggaggacgcgaccggcagagaggcacgtcggccgagcgcaggcgagggagggctaccgctagaggcctctcccaggctcccagcacggaagatggtggtggtgctggggcccgcaacgttcctgtccgagccgccggcgtcagccgagccggctcctgccccctagccgtggaagaggcgggtgttgtggaagtggggcgcctccctacctcgggggctatcgtggagcctgcagaggtggccggtggcggactcgaccatcatcctgcctcaggcaccctctccgaggccttcaaaggagagggttgctgccccaccgctgtcgcccatggcggggcgtcgggggctgaggagccagaaaccaaggtcggtcgtcgtgccccgttccggctcgagggcaggggttgccgaagagtacatcatcccgcctcctatctcaggggttggcggcgacctcgtccgcgctggccggacctctcgatattgggagggccgaccctaacgtggatgtccaccaatggcaacccctacttcgtcctcaacgtcacggaggagcgggagatgtgggcgaagaatcggcgctgcaccagcacggaggcaggtgaaggtgacgtacggggccagcgttcgtgtcggaggagaagagctcgggggcaggggttgccgaagagtacatcatcctgcctcctatctcaggggttggcggcgacctcgtccgcgctggccggacctctcgatattgggagggccgaccctaacgtggatggatgtccaccaagggcaacccctacttcgtcctcaacgtcacggaggagcgggagatgtgggcggagaatcggcgctgcactagcacggcgacaggcgaaggtgacgtcgggcctgagcgtcgagtccacgtccatcctcatcagcggcctgaccacgctgctgatgctgcccaccatcggcgtggcgatgcgtctcatggacttgccggggcggcggaggccggaggctgctgctgtggacgatcccggtgctgatcgcgtcgctggtggtggcaagcgtggtgacgatggcggcgcacggggagcgtcatggtgtacctgtgcagctgtgctgcttcgtgatggggttcaggcccatccccaacatcctgtgcaccgagatcttcccgacgctggctctgcatcgccatctgctccctgggtgaggctcgtctgctacctggcgctgcacgtgccggagaccaagggcctgccgctggaggaggtcgctcttcctctccttcaatccatcggacgtagctggccaatctacttacagtccaagtctccctcctcatttcgtgatcctgacggaaccccaagactatctccttcgtccgtaatacaagactcggtcttagagtgggtccatttggaaggctcttggaagagaaccctgctgaagtccgtgatttgtcgacgtggcggtggcggcctcatatcgatgcggatgtggggcatctccgcgtcaaagtgggaaatctcgccgacagtggaggaactggtagtgttccgggaaactttacgaccagccttgaaggtgttcgaccgcgggcctcaagagtttccggtacccaactcaactcctttactgcactcagggtattcaattccatctggttcttcagactcgagtgcagtacatttcaaccgaagtgatggttttgggtcggttatgaccctaaatccacctctggtcacag

SEQ ID NO: 23342 - DNA, 174 bp, Zea mays
  Peptide Sequence Number=SeqID_66717
atgggccagaatggacccgctaaggacatgattgcttttgttgaggttgtcttttcttgtaaggggtacatgaggagggagacttggactgtgccttatttccagctcagagagaacggttggacgctgaatgcttatatggatgggaaatgggatgttagatttgaaatgtga

SEQ ID NO: 23343 - DNA, 321 bp, Zea mays
  Peptide Sequence Number=SeqID_66718
atggttgcactgttatcccaggttgtcactccccaaacaggtccttacagagagttactcaggaaacaacctgagccccctaagggcgtcagcgagccagggcgggctgaccagccgggcctaggagcaggggagcgggtgagggggaagagagaagggcggttggatctggatcggagggctgcgatcagatctgctctgggcggtctggcagactcggacatgggcatcacgccgacacgggagcaccagagggcgctgcacacggcgaggcgggttaacggcggcgcggggcaactccagcgaacaatcgcgcgctaa

SEQ ID NO: 23344 - DNA, 507 bp, Zea mays
  Peptide Sequence Number=SeqID_66719
atgaagaattgtgctgccatcgaggagaatcgtgctgcccaaaacctcgccccaaatcgacgcagacctaccatcgacgcgcatttgggtgttcgcttaatcgtcctgtttaaatcagcaaggtgctgcgacaagccagcggatgagcgtggcgatcccgctggagcagtccatcacgcccgtgcttcaggactttatgaatctcaacatattctatctaccagtgtattgttatggagcatttcaaaagctaagctttctgagtattcaggaaagattgaagcactagcttctaggctcgttgcttcactgcctgaaaatgaaaagccaattactgaaagcgaagatgaaatctcttatgaaggagcaaaggcaaaaagtccaatatctatgaaggagatcaaccgtgatcttacatctttggaacaaaaggctgatgaactggcatcatcagaaatggcagttgcatatggctcctcgaattgggcattattagttgagggatga

SEQ ID NO: 23345 - DNA, 573 bp, Zea mays
  Peptide Sequence Number=SeqID_66720
atggcggcttgctatgagagcaagtaccaacatttggcgcccaccgttcatgctacgaaaaacaacccgcgatggcccccaagcgagctagttcgaaggcagccccatccatcgacgaagcagcgaaggcagcgctactggcggagaaaaaaaggcaaggctctcgcggacaacaccccccaagaggccttcgaagatgaagctgtcatcaaaagacagcgccaagaccaccccaccctcgaaggtaccctacgcacctgtagctccggaggcgtaccgcaagcaccaccaccaggtttcgctccaccagagggcgaagacgcaatagaaaacgacgaagtcatcggcatctcagccgaagaccagctacaactgcgggccctgcgcatcaagaaccacaacctccacaagcagaaagaaatcctcgaggccaagcgccaacgtgtcaccgcgcaggccaaggtgcgtcagatgatacaagacgaggagcagagagctcgggagctagagcaagaaatcgcgctcatgcagggcgagggccagtacaatctgcagcatggactgcccttctag

SEQ ID NO: 23346 - DNA, 828 bp, Zea mays
  Peptide Sequence Number=SeqID_66721
atggagacctcgctgcgcttgcgcagtggcggcggcctccgcatccacgccaaggagaagctgcccctcggccacagctcgctgctgcaggctcatgcggagctcgacctccacacaagccccgccggagttactaccccgagttatctcgctctctttgtcaggcacttctactcgcagttgcacaacggcgatgacctcgcctacagttttcgcgccaagaaggccgtcctgttcaaaccagataatgggttcctaggtctgaaccttaaagggcgcctacttaccgataaagagttgaagccgacgaagacaactggatccgttgaactggcatggaccatacttgacttgaaacagggccaagacgtaaggctcaaagttggttacgaattgtgtgacaaggccgccatcacgacctctactcgccaccgtcgcggcctctactcgccgctgtcgcggcgtcttctcccggccttgtccggcgatcgcccgccctcgtcctccaacgccggatccgcgtcgcctccagttcgtcgcgccggattccaccggatccgcgccaccaccagtccgctgcgtcggattcgcggcctgctgcgctggatccgcgcctccaatcagccgtgcctctgccagatcgacgtccggccctccagtcagccgtgcctctgccagatcgacgttcgttcggctagatccgccaagacttgcctacctggactgttgtctgcccttctgcattggatctatgactacctccagctagcccagtccaccgtcttcgcacgacctgctcgcttgggatccgcatgtcgtctgttctag

SEQ ID NO: 23347 - DNA, 534 bp, Zea mays
  Peptide Sequence Number=SeqID_66722
atgcaggcggcatgcaaccgcgccaagtggacgcgcttctccgacccccgacacgccagcgtggaggcccaggcccacgcgtcacgcaaccggcacgccggatgctgcatgcaagcaactgcaccgccacttgcgccaccaccgcgcctcctcgattgcggaaccagcgggcgggagcagcggtcacgtcgtcagccaggctcacatcccatccgggggcagcaagagaaccccctctcacgacgtgaagacgacgcgcccgagaagcgggcgacgcttcgccttcgccgaaataaccgcgccaaaaaagggaccgggaaaggggataccccaaaaaggatccttccccgtgaaggaaccaggctccgagcctccttactgatcagaggttcgaaggctggccccccgaagggttcaacagccgcctcagatcgcgtgggccctacacccactactggtcagaggttcgaaggccggccccccgaagggttccacggccgcctcaggctacccgggctccgcgcccattactga

SEQ ID NO: 23348 - DNA, 414 bp, Zea mays
  Peptide Sequence Number=SeqID_66723
atggcgccaataaccaggggcggcggcgccattgctagcaagcctcccccatgccccagagctccaaacaacaacccagcgcgtgcaacaagtagaggagatcaaggcagagttagggtgaggaattttaccagagaaaacggtgggcgcaaagctgtccgcggtggactcctgcaacggcgaggaagaacgcagagctccaccggcgctggagcagggcactcgctgcgtcgagccggaacagggtaccgacgcggtgaatctcagacggttgggtcggagacgatgatacccagggctcaggcggggcaactagtggggaaaaagggatggggtgagggaagagcggctgctgcaagacacatgtgggaacggaggcaagcgtcgtgcggcacggaagggaatccagggtag

SEQ ID NO: 23349 - DNA, 342 bp, Zea mays
  Peptide Sequence Number=SeqID_66724
atggctttgcgcagcgacggcggatcacggcacagagctggccgagaagagtttggccgtgggcatcaaaatgcgggagagcgctgggtctgcggggaggagggaccgcggggcacgctaactattcctaggagcccaggggatcgcggaatccgtggcgaggcggataggagcgctgaccacgcgagaatggcggattccgttgctcgccagcgatccatgcgcggattccccggcggcgcccatggcgttctggtgaaggagatggagctgtccccgaggtcccacgtgacagcgaaggaattctacacccagtcttcactgcgtcagaggagcggatga

SEQ ID NO: 23350 - DNA, 147 bp, Zea mays
  Peptide Sequence Number=SeqID_66725
atggcgccgccgcccctggttactggcaccactatggctcggctgggttgggggaaacaccctggtcgtccgatcctcattgaacgaccgttgatggtagatccaagcgcctataatgcgcaacggttcgtcgtagtcggcttttaa

SEQ ID NO: 23351 - DNA, 627 bp, Zea mays
  Peptide Sequence Number=SeqID_66726
atgccgccacgcacaagaaagaccgcgcgcaagtctaccaacggcataccccgtcatcaacttgccccacggcatgaagatagcagtagtggtagcaacgatccaatcgaggatctagaagcccaagtggatcagcttcaaacagaactccatcgcaggaatgacatatgggtcgcggatggcgaaagaataaacgaattaagagcagacatctgttacatgcaagatcagctcgcggaacgagatctagcgctcgactgggcggttaactctcgttcgcttgcttgggctaaggaggcaaaagctcgagcccgcgtggaggagcttagctcagccgtagataacttgcaggtttattgtaatactctacatgaagaagttcatgtattgtatttccaactgcatcccaatgtacctgcggatcctgtcgggatagaagagggaccttctggggtagcgggagaagcactcggtggtgaactggacttgttcaagccacctccctctatgaagttgctgtatgaatggtctcctactcctgacagcgaggctactaaaagtgacaagaaagcattaagatggcaccctttgaagctttatatgggtgacggtgtcgtactccgctaa

SEQ ID NO: 23352 - DNA, 855 bp, Zea mays
  Peptide Sequence Number=SeqID_66727
atgcttgcgtactgcaaatctttggatgagctctctcagaatggagcaacaattgtccactggataaaaaaggttgtaagaggggatttcatcatctacttcaacaaaatttttgatgctttatgcaagctttctgcagattccgatgctaatgttcaaagtgcagctcaccttcttgacaggcttgtcaaggatatcataaccgagagtgaccagttcagcatagaagaattcatgccgcttttgagagagcgcatgaatgtgctgaatccttatgtaagacaatttttggtggggtggataacagtgttagacattgttcctgatattgacatgcttggtttccttcctgattttctcgatggtttattcaatatgctgagtgattccagccatgagataaggcagcaagctgatgcggcactttctgagtttctgcaggagataaataactcaccaatcaacgagtttgtgaagcttggtggggaacaacttgttccttactatgcagatatattgtgtgctatcttaccatgcatatctgacgaggaggagaaaatccgagtggttgcacgtgaaacaaatgaggaactatgtgctataaaagctgatccaactgagggatttgatattggagcaatcctttcaatcgcaaaaaggttctctatcaagtcctttggaaatgaaattacatacaaaaagttcgaggcagaaatatatgtcctcacaaaggatgaaggtggccggcacactgcctttgtcacaaattacagcccccaattctacttcaggacagctgatgtcactggaagggttgagctgcttggggagatgaaaatggttttgcccgggtga

SEQ ID NO: 23353 - DNA, 378 bp, Zea mays
  Peptide Sequence Number=SeqID_66728
atggcgtcgtcaatagtcaacacgcctgaggtgcgcagatttacttgtgactcagagaccttggacgagattgtatcttttgtaagacaaatattaagtatttgcgtgacgccatgtgggagcaaagttgggaaaatggatattggcggtggtccagaggctatcccaacccttccaattaaccttgaagatgtggctcggagtgaggcagattttgagaaggctgaactgctcaagactgtgactaaatttcaatggattaaggtggatagcgtcagatttgaagatgagaagcttaaggatacctcgtattgggctaacattaccattcccatggcattgttaccattccatgtttctaatgcactgagggtctga

SEQ ID NO: 23354 - DNA, 345 bp, Zea mays
  Peptide Sequence Number=SeqID_66729
atggagggatctgcgtgtagttgggtcgaggaaatcagcggcttccatggagggatctacgcgcagttggaaggtgggacgcgcagatcagggcggctcccatggatggcacgaacgcggggcgcagttggaaggtggggcgcgcagatccggaacggcttccatggaggctggggcgctttgatccggggtggcttccttggattctccttccatgggagagtggacgcgactgggcagcaagagagacggggcgagggcgagagagacggtgaggtgatctctgaagaaaattctctagaatttggcactgataagatagaaatgcatgttggggctgtatag

SEQ ID NO: 23355 - DNA, 585 bp, Zea mays
  Peptide Sequence Number=SeqID_66730
atgacagggcctagaacggattggttgtcctgctctgtgtcgaaagttatcaatggagcctatgaagaagccctattttctgctgctgtttgccaactccaagcagatcgcccgctcaagaagcccaccctcctcgctatagaagatggcgacatcgtcgtcgtcgctttgctccaacttcgcctccctgtggaccgcctccatcgaccaccctcgcgtcatcacgtcatctacgcccaggcggtgcttgcaagcgcgttcgctaagaacgacaacaagaaggtcactgccgcgacatctcgtgtgttgcagctcagcattgtcctgggcatgggtctcacggtcgtgctgggacttgctatgaggttcggggctggcattttcacaagtgacgtgctcatgatccaatttgtcactggcacgcagaccatcaattccctggccttcatgtttgatggcatcaactttggagcgtcagactacagatactctgcttactccatgcgaggggaccatggacgtttctctggaactaatgatggatttggcttggaagatgatctgcggcacactgctgacagataa

SEQ ID NO: 23356 - DNA, 303 bp, Zea mays
  Peptide Sequence Number=SeqID_66731
atgtcgtcggtactgaggaaatgggcaaggcctagcccactactcctcatgctcctctcctgccggagcaacatcccactcgaccgtccaacccggtggcagggtggtaggccaagtcacaccatcaaccatttcctgcatggtacctgcaaaaatggtgccacaagcaaggctgagtatactaatactcagctagacttaaccggcataaacaggaatatcattgaattacaagtgtaccttcaactggaaggagatgatagtacaagcgtgacgcaaaaagcgaatgccaagtcagcgtga

SEQ ID NO: 23357 - DNA, 279 bp, Zea mays
  Peptide Sequence Number=SeqID_66732
atggctgatgaagtgattagaaaaaatggaaaagaatctcacgacactcaagaagaagctaagcgagctgaagaagctgttgagcgcgtaaggcttatatctgaactttcacctccatcggagccatataatcccgaagctgacccggccatgaaggaaacgttagacataataagaatcgctaatgaagctgttgacgaagccgtcgacagactactaaatgaaactgctgaaaaagtgctgaaggaagaccaaatttttgtttgcttgaaagtgtga

SEQ ID NO: 23358 - DNA, 1488 bp, Zea mays
  Peptide Sequence Number=SeqID_66733
atgaagaacaggaagggctacgggcaccagggccacctgctgagccccgtgggcagcccgctgtcggacaacgagtccggcgccgcggcagcggccggcggcggcgggtgcgggagcagcgtggggtactgcggcggcggcggcggtgagtcgccggccaaggagcaagaccggttcctgccgatcgccaacgtgtcgcgcatcatgaagcgctccctgccggcgaacgccaagatctccaaggaggccaaggagacggtgcaggagtgcgtgtccgagttcatcagcttcgtcacgggggaggcctccgacaagtgccagcgcgagaagcgcaagaccatcaacggcgacgacctgctctgggccatgaccacgctcggcttcgaggcctacgtcgccccgctcaagtcctacctcaaccgctaccgcgaggccgagggcgagaaggccgccgtgctcggcggcggcgcgcgccacggcgaaggcggcggcgcggcggacgacgccggcccactcgccgcgggcggcggggccgggggacgcgtcgggttcggctctggcggcggggcggcgccgtcgtactacgcggcggcatcacggaaggcgtacggcgcgggggaagggtccaaggtgaagggcggcgtagctataactaggtgcgacgagaaacgatatttgcatggtgctgaatcgcccaaattagctgaggaaatgcgagttgtacgcgtccatgtgccccgcgacacggacggacggctggaccgctggacgccgccgcgcgccggcactgcccttcccttgaacgagaaccacctgcccgtcgtggttcatggtgaccacggagggagaagttgtcggactggtgtttggagcacacgaaggacacctaccgccaccgccacgaagctgggcggcgcgacggcgtcctgcgcgcccgagagcttggcgaagcgctccttcaggcgccacaattgtgacgccgaaaccccatggcggcctgcaaatggcgcaccgcgcaccgatgtggtagacactctaaatgtggagggctccgggagtgcgctatccgcgctgctcctccaccagccgccgcgaggaaacttccgcgtcctcctaccccgcgctggcgactgcatcttccggggccgagccctcgatccggcgcgcttcgccgccggcatcgaggcaggaggccgagaagcggccgtgcggaggcggctctgtcggcgtagagctcgcaccccttcgaaccgaggtcgcgcgacccaccgcaacccaagatccaagccagcttccccctgctcgtcgccgcagagtcgccatcggcaaaaggcttcgtcgtccgccgacttcgtcgaaggcagccggcaaaaggaagagaagctcgtcgccgtcgtcgtcttcctcttcgattcggtccaccgaggcagatccgcgaagagcgaggttgacatagatgcaatgtacatttcaactgtgtactcatag

SEQ ID NO: 23359 - DNA, 321 bp, Zea mays
  Peptide Sequence Number=SeqID_66734
atgagcgcgagcctagccatacgacctcggcaagacaacttacaatatcgcatccagaaactccaggccaagctagaagaagagaggagggaacaggtggggatggaggtgaggatgagggtggagcggaaggcggagcaggcatctcttgcttggcggatgaaggtcatgaaggacataccttcatcatcgcagtatatgttaataaaaggagaaacatatgaaataaaaatggaaatgatattgaattacaaatgtaccttcggcttgacagaaggtaaaaatacaagcgtgacgcacgaaaaaatctatgaggactag

SEQ ID NO: 23360 - DNA, 357 bp, Zea mays
  Peptide Sequence Number=SeqID_66735
atggaggacgagtcgattgccccgtcggcaatccaatacatctctatcgatgtcctcgatcctcttgcctcctccgaccctcatgaggacatctctatcgatgtcctcgatcctcggaacgtaatctggcacatgaacctattgtgccatggaagtgtactcattgaggcggctatagacggcggggttgctatacgccacgggcccgactttcgagttgtaggtgacgtcggacgtcgccttgcccttatgggccatagcatacgccgagaagatcaggctagccaccatgtgacaccggctacgagaaaactaacgagatggttagaaatcatgcctaatcgaaagttagactaa

SEQ ID NO: 23361 - DNA, 1923 bp, Zea mays
  Peptide Sequence Number=SeqID_66736
atggccggttcaaaggatagctctgaagtttccgctagcaatatcatagagcggacttgggaaaccttgccagctgacgaacagctccagttcgaggagcacaaggagcagctgatccaagaagcaaaggcgaaattcctggccaacttgaaggtggacaggaacaacaaggtcgttcggcaacgagcgactgatctagcttcgctccgacctacaatagatacccctaatgtaccttcgctcctcacgctcctcgcgctcccctgcccctggtcttctcgtttcttcaagcatggacctcgctctcctggactttcggtcggatgcatcttcaagttgaacccggattctgttggtcacctcctccaggcggcccttggcgggttcgcgtctggctttgaggtgcttcagctcgctgaccgggtttttcggttttcggtttcttcgatggctgtgggtttccatatctacaattctagatgcattgatcgtaaggaattcagagccttcttcaacctttggaaccatggtggccgtaactggaaacatgaattcaagaatttttcggatgaagaagcggcatcttggcaaaaggttcgaggcaagaagagtttatcttttgcggatattgttaagctccctctcaccagtgctaatgctattccgattcgtagcaacattaagttctccgatggtcatgagtgtcaggattggcctagaatatctgtgttcaatcgtatgggatctcctcctagtaatctggctccggttcgcagcgataggaggttccccgctggtgggtttcatcagtctcacctcagaatctctgtgttcaatcgtctgggcttgccgtcttcatcctcttggcgaagagttgtgtccccttggttttcgagctctgatcctattggcgaagttcatggcggaggaattcacgactgttccaattttcaaaattcgaattttaaccggtctcggcttcgcaacatccattggcgtcccgttcgggctcgagggcctgttgggctgctaggcccgtcgggcttccgctgtctcttctgtaaggccattttggtgggaaatcaaaaatcttcggaccacagtacctggtttcgctcccccgtggtgtctctgaccggtggaccgcctagttatagttgcttcgaggagttcgcccgagaggactatgctaaggcaaacattgctgggggccaggcccaagatgaagacccggtaccagcggccctagaagatggtcaacagctccccctcgagttctttggtctgggtcaacctgtgcctgctgcggggtgggatctcaatttcccaccagaaggcaatgtcccgaatgggcagattcttgcggacctggatgttgttgggccggtgctcccctttaatgcccctgccctccctgctgttggtgatgttcctttgaatgggcttcaggagattgacggcccaccaatccagggagacctccaagattggcggccagaccctgttcttctgagccacttggaaaggaaaaggaatgcccaattctacaggatctgggccaactactttgctcctgctggtaatcctgagctctctgtgcagatccccaagaaatgggctccttttttcatgtctaacctgctgcataaagattctttcagttggtcgaaatctttcttgtcttcagatattccctctgctttgctggagcctgagtctgagacccacccttttgccatccctatgaaatgccctgatggcaagttccttgaatctgttctcccggaagaatctactggcaacgtctctgctacctcagactcggcctcactcacctccaagcctgcagttgtggagtctgacctgaggagaagcaagagacttcgtgatgctcgggctgggttcaggcagggctcctgctag

SEQ ID NO: 23362 - DNA, 234 bp, Zea mays
  Peptide Sequence Number=SeqID_66737
atgtcccttatctcctggtccaactcctcctcttggagtgttggactgctaccctttcttttctggctccgagcttctcgaagagaaagggtttcctggtttgggtctaatggctgcagtgcagcagcccctggcgctgaagctttctttggcagcatgacgaagaaaaatggaaatgatattgaattacaaatgtaccttcggcttgacagaagaaaaatctatgaggactag

SEQ ID NO: 23363 - DNA, 387 bp, Zea mays
  Peptide Sequence Number=SeqID_66738
atggcgcgggcgcgcgaggagcggacgccgtcactgtgggcccacacgtcagcgagagcggagggggggaacgacgtcacggttcgacggcacgggcgaacaggccgcccgtgggggaagaaacccagccgccggtgggctcggcggcgattcgccgctggtggcccggttcttggacaacggagaggtgccttagcacggggaggggctggcgaacctaggggtgggctcaatttggctatagggggccgggagggggctgtccgcggggaggtggcggagctccacggcagggatcgctgtcggtgggcttcgggcaagggattggggcgggggagtggtgttctgagtctgcggcaatgtgatgaagctggtaggccaacttaa

SEQ ID NO: 23364 - DNA, 675 bp, Zea mays
  Peptide Sequence Number=SeqID_66739
atgcatgcattggaagagcagcagctgcttgaggatgaccccacagtcgtgtacctcactgcatacctgctcaccctggatgcacagtataatttcttggctcggcaccaccgtcagatgattgcccgagtagaagatgcagagaagctcaaccgtaagctccatgtggatctcacctcagctcaagcccgtgtagctgccttggaaagtcgtgaagccattgctgttgaagccctgaaagccctgcggatccaagaacccgcttcatccaacccaattcaacccatgaaagctgaagatccccagattcttgaaggtcacccggtctctaccagaggagaaaagaaggcttgggaactcccggaaagagccatagtcttggaaggaattccagtcttccctcaggctatgaataagcaagagcaccccgagtcctcccaagatcccccgccagagttgtttgagcccctcaccatgaagaagattctagcaccatcccttgaggtcaaagaagaagccgcaagcaccccaccagcatcgccgccctctgaggagctacaagagccagtccaacttgaagaagagttcgaccccgtcttgccatctcagtcgctgccagaagaagtcatcaacatcagctccctcttgacccatccaggagatgtctcatattga

SEQ ID NO: 23365 - DNA, 456 bp, Zea mays
  Peptide Sequence Number=SeqID_66740
atgcaggtggcgtgcaaccgcaccgcggaggcgcacccttttgacctcaacgcatccagcatggaggcccaggcccacacgtcatgtaaccggcgcgccggttactacgtgcgagaaactgcaccgccacttgcgccaatgccgcgcctcctcgactgcggaaccgatgtcacgactcgaggcaaccctgcgcatggcccaacagtgccaatcgagcacatcgatcacggggacagggaaaggggatatttcgaaagggatccttctccgcgaaggaaacgggccccgagccctcctactgatcaggggttcgaaggctggcccctcggaagggtccgacagccgccccagagcatccgggcttcaagctcattactgatcaggggttcgaaggctggcccctcggaagggttcgacagccgccttagagcactcgggctctgcgcccactactga

SEQ ID NO: 23366 - DNA, 510 bp, Zea mays
  Peptide Sequence Number=SeqID_66741
atggccgttggtgaagcttctatcgtatggcgcaccggacagtccggtgcaccagccacatcacccggccgttgggttccgaccgttggagcttctgacaacggggccaccggacagtccggtgacgaccgttggcgctgtttagccgttactccgctggcacaccggacagtccggtgctacaccagacagtccggccaccacctcgccggaacccggcgcctcgacagagcacgggatcatcggccgccgtcggccgcggctgcggaggagcggtgtaagatgttgaacggcggcggcggcggccagaagaagcggaacacgaagatcgagccctaccggcaccgcgtcgagaccgaccccaagttcttcgacaagtcgtggcggaagctccatgacgccatccgcgagatctacaaccacaacgccagcggtctctccttcgaggagctctacagccttcaggccattgttagcgtcgttttctgggtctcggcattaaatgattaa

SEQ ID NO: 23367 - DNA, 2223 bp, Zea mays
  Peptide Sequence Number=SeqID_66742
atgaccaccctgggcctgctcaggcctctcccgagaaagtatattggggtgactgcttataacatggtattgaacaagtttgctcctcagctctatgagaaactcacagaaaacatgaaagggcatcttgaagagatgcgcacatgtatagaggctgctcaaggtggtttgttcctggaagagttgcagcgaaaatggaatgaccataacaaggcattgacaatgattagagatatcctgatgtatatggacaggacatatattcccactaataaaaagacacctgtcttcgaacatggattagagctttggagggatactatagttcggtctcctatgattcaggggaggttgtttgacacgcttctcgagctcatacatagagaaaggactggcgacgtgataaatagaggcttgatgaggactacaactaaaatgttgatggatctagggttgtctgtttaccaggatgattttgaaaggccatttcttgaggtctctgctagtttctatagtggtgagtcacaacaatttattgaatgctgtacttgtggtgagtatctgaagcaggctgagaggcgcctccatgaagaatcagagcgtgtgtcacagtacttggatgctaaaaccaatgagaaaattactgctgttgtggtgaaagagatgctagcaaatcacatgcagaggttgattcttatggagaactcagggcttgtgaatatgcttgtcgaggacaggtatgaagacctgaccaggatgtacactttgtttaatcatgttcctgatggtctcgcaacaattagatctgtgatggtgtctcatattaaggatactggcaaaagtttggtaacagatccagagagactaaaggacccagttgattttgttcagcggcttcttaacatgaaggacaagtatgacaatatcatcaatgtgtcatttagcaatgacaagagtttcctgaatgctctcaattcctcatttgagaactttataaaacttaaacaaacagatcacctgagttcatatcactgttttgttgatgacaaactgcggaagggggtgaaagaggccaatgaggaggatcttgaaactgtcctggacaaagctgcttctgatgattctgagagaagcatgcttgtgaagctgaagacagaatgtggctaccagtttacttcaaagttggagggcatgttcactgatttgaagacctctcaggatactacacaagggttttatgcatctacttcctcggagctgccggcagatgcccccacaatgtctgtccagatactcacaactgggtcatggccaacgcaaacctgcaatacctgcaatctcccccctgaaattgtttctgtctcagagaagtttcggtcttattaccttggcacacataatggcaggaggctaacatggcaaacaaacatggggacggctgacatcaaagtaacatttggaaatggaagcaagcatgaactgaacgtatcaacataccagatgtgtgttctcatgctgtttaactcagcagatgtcttgacttaccgtgaaattgagcagtctacagcaataccagccgctgacctgaagcgatgcctccagtcactagctcttgtgaagggtaagcaagtcctgcggaaagagccgatgagcagggacattgccgatgatgacagcttctgcgtgaacgacaagttcaccagcaagctcttcaaggtgaagatcggcaccgtggtggcgcagaaggagaccgaccccgagaagctagagacgcggcagcgggtggaggaggacaggaagccgcagatcgaggcggccattgtgcggatcatgaagtcgaggagggtcctcgaccacaacagcatcatgacggaggtgacaaagcagctgcagccgcgtttcatgccgaatcccgtggtgatcaagaagcggatcgagtcgctcatcgaacgcgacttcctggagcgggacaagacagacaggaagatgtggtaccagacggtgacgacgctggacgtggtgaaggcgtggctggccggcgctacccgcggccatgcgctgaagtctaacgcgctcacggagcagttctgcgtcatcttcgagagctacctggccgctgaaatcgcctaccatctggtcacaactgttgatcattgctggaatagagaagtagaaaacattgaaagtattcctggtaaggtctctcaggtactgatactttga

SEQ ID NO: 23368 - DNA, 477 bp, Zea mays
  Peptide Sequence Number=SeqID_66743
atggcgtttggctctctcctcctcctcttcctcctggctaccagagcttatggtcttgggaggcaggacatgcagttgcacacagcacacttgcccatgaacacgaaggtcaatagccagaaggagataccagctgacttcaagtggcaactacgaccgccggcgggcacactggacagccgccggaacggcttaggcggcagcaccacaccgccagagcatcgccgcctggcgacgaccacgggacgtgccgctgccgcgaaggaggaagacggcggaggagaggtcaagaagacgatgtggaggactcatcgtcgtgaggtggcggcgcccaggtttatccaccaagactacgccgggcccagcggcaaagcagcccaggccaccgcctgtggtgcctgggtgggcttattcccgtcgattgtcagcggccaggcgtcccttgtcggggataaggttatccccgtcggcggctga

SEQ ID NO: 23369 - DNA, 405 bp, Zea mays
  Peptide Sequence Number=SeqID_66744
atgaagcaccgggctctgataccaattgaaagtcgcctagagggggtgaatagggcgaatctgaaatttataaacttaagcacaactacaaactgggttagcgttagaaatataaacgagtccgagagagagggcgcaaaacaaatcccccaaccaccacaaagtggccgttggaagtgtgctgtcgcatggcacaccggacagtccggtgcgccaccggacactgtccggtgcgccagccacgtcagccagccgttggggttcgaccgttggagctctgacttgtggggcctctgggctgtctggtggtgcaccggacaggaagctacgagtggccaaaagcctagtgacattgaggtctaccaggagggccacaaaggaccagacccgaacaaccctgactag

SEQ ID NO: 23370 - DNA, 174 bp, Zea mays
  Peptide Sequence Number=SeqID_66745
atgccgagagtccctagagagttggtcgagcacaaactgaaagtgtatcctcaagcaaagacgatccaacagatgctatgtcgttttgaaagggaaatgtgcccttgggcaatttctattatgttttggagacttctcaaagcgagagaaatcaatttagagaaggatggctaa

SEQ ID NO: 23371 - DNA, 1506 bp, Zea mays
  Peptide Sequence Number=SeqID_66746
atgatcgagcatgagcacgagcatgcgagatcatatctattccgtgttagttcagcagccacagaacagaaccctggtctgatactgctagagatgaaaaacatgtaccgagaagcgttgtggcagaagagaggtcgtcctcgggagttatatccggacgtatctagtaaggatgctcctgttcctcctgaactccccgtgcctaactgtgactgtggcagactggcttggggacatcagaagtgtttctttttccagtggatcgatggtcctgataaatttgaccctcgatatcttcttttcgttaattggttgagtggaaagaccagtcatgagcgttttaagcgttgggtacctcctcccccgaatcctccaccaatgacggatgcggagaaggaggttgcaacagaaagacggatggactcaccgcctcgatgcgattgtggagaccgtgctgtcatcgacgaagactgtgacaagcagttctgttgtccgaacattgattatccatacgggtggcgtaagtgtcgtttcagagagtggttgtatggtcctttgtcccattggacagagccagaggtaaaggaaaagagatacatggggtgggcggcagaagaggtcaaatttgatccagtactttgcaaatgtggtattgaagctaagtatggattagttccttcagagcttggtgttggatatttttgtggacatatggtcgattacgatgaggagacgaggaaatgcagttgggagagttacgacgacaaaggagaggtgatgcgcacaatagagtccaagagaataatgggacagaagatgcgttgtggatctcggctcgttgattcgtacattaacgatcgcatacgcgacatgcgtagggaagcaaaatctgccttttatgatagcccgaagcgtgcagagtataggaggttgaaagctgcagatgagaagagagcacaggatgcaagggaatgggaagcggctcaagccgagaaaaagatgttggataatcttgctgatcgcctcaagggaaagattggaagcggcgtaaactatttggccgatgaggcgcatgcgagatatgttcaggataaaatggcaacggttgagctaatggaggaggacgacgacacatctagattgagtgagcttatcgccctcgcagaggcaggattacatgaagaagaggaggacgacatgtcaaggttgagtgagctcatagcactagctgaggcaggattacgtgctcaagaggaagaggatgagtttatgtcacaggccgccgcagaggtagaggcagcttattacaagaagaagtctgatgaggctgaggctgaggatgagctattctcccaagctgcagatgaagcagaagccaattattacaaaagaactggtgacaagtgtgatgcaggacaatgcagcaagtggaatgaggttgttgttgaggattgcgcgacggatgactccgaagatgagttactcatagattgtgattcagactga

SEQ ID NO: 23372 - DNA, 1644 bp, Zea mays
  Peptide Sequence Number=SeqID_66747
atggaggtggccgagacggggagggagctcggcggcgggcggcgggcggcgagctcggcgggcgagctcggcgggtggcgggcgggcgactccatggaggctgcagcagcgacgacggcggcggcgcttcttcctcccgctcggaaggtgttcatcctgcccctgcttctcctcctggctgcatcgtcgctggttccacgagcttcgtctgatggagcgcaatatgattatagagcttacactgagtgcaaacctcaccctgagccagctctgtacaacggtggcgtcctgcgctgggcgagcaaaataacggacttcagaacggaggacgaaggcaactactccccggcatttgtgctctacaacatgtcggcggcgactgcgtacagcttctcttgctgggtgaaaatcgacgggccagaaagcgcacacgtgaaggcgaagatactgaccgtggagaacgcagcgtcgcagtgcgtcggcaccgctatcgcgcgcaacgactgctggtcttttctcaaggactgcgagcccaaatgcttctacgatctcaatcagaagcccctccttgcagccattctcacccgatcagtggaatcagcacagggaggagccaagagcatcctcgggaacgggccgtaccaggactggttcaacgcgcggttcaacgcggcggtgttcgagaacgagctcaagtggtacgcgacggagccgtcgccggggaaggaggagtacggggcggcggaccagctgctgcggttcgtgcagtccaacgacgtgacggcgcgcgggcacaacatcttctgggaggaccccaggtacacgccggcgtgggtgaagaacctgacgggcccggagctgcgcgccgcggtggcaggccgcgtccagagcctgctgtcgcggtacaagggcgacttcgtgcactgggacgtgagcaacgagatgctgcacttcgacttctacgaggaccggctgggcggcaacgccacggccgacttcttcagcacggccaggcgcgccgacccgctggccacgctcttcctcaacgacttcaacgtggtggaggcgtgcgacgacctcagctccagcgccgactcctacgtgtccaggctgcgccagctcgccgacgacgccggggtcaccttcgagggcatcgggctggagggccacttcgccaagcccaacgtcccctacgtgcgcgccgtgctcgacaagctgggcacgctccgcctgcccgtctggctcaccgaggtcgacgtcagcgccgccttcgaccacgccacgcaggccgcgtacctagaggacgtcctccgcgaaggcttcgcgcacccggccgtcgacggcatcgtgctgtggacggccatgggcgccaacgccacctgctaccagatgtgcctcacggacgccgacttcaccaacctcccggccggagacgtcgtcgacaggctgctgggggagtggcagaccaaggaggtgctgggcgccaccgatgaccgcggctccttcaacttcagcgccttctacggcgagtacagactctccgtcacctatctcaaccgcactgccgacgccaccttctcgctgcctcgcagcgacgacactaagcacatcaacatccgcctaccgcctggacctgcagcctga

SEQ ID NO: 23373 - DNA, 282 bp, Zea mays
  Peptide Sequence Number=SeqID_66748
atgggaccagttgctccaaatgcatccacaactaggacatgctttaaatgtgggcagtctagacattatgccaactgctgtcctaacaaggctgcttacactactctagctccgatgaagcaaggtcaagtctcaggaggtaaatgtcaggccttatcagtcaatcagggacaagtcaaccatgtggaagcagaagctgaacctgaaggacccaaaaaccaggaggaggtgccaagggaagctgaggaagctaatgaagaaggcaatgagcaacaagattag

SEQ ID NO: 23374 - DNA, 1272 bp, Zea mays
  Peptide Sequence Number=SeqID_66749
atggcgtccgacgcggcccagcgtcccacgcagccccctcccactcgcggtcgatccccggcgcagtgcgcagccctgcccggcgcggcctacctgcgcgactcgcccgcggcgtgctcgctgctcacggcagcgcccgacgcggcgtgctggctcggtccagcgcgcggcttcctcgcgtccgtggcgcggctacatagtgagaccctgcctactcaccttgggagtgttcaagggtccgtacaacccgaggcaaaaagggaatcacggctcatgggtaaagtgacaatgagactgatggttcttggttttgactctggtaatgcgtccgcttgccgtcccgtggccggccagtccagtcacttggagaggctgcaccaccgcgtgcatgaggagcaggaacgtcgacgacaggagcagcaaggctcttctttctcgctccagcaggagatagagtctgtgaggagctgctcccccgtgcttcctctggaggcgccccctgcaccaccactgggcgccccagcccctagagtagttgctggaggagacccagacgatggaggtggcgacgacagctcgagccacgacaccgacttttctgctgaccaggagccggaaggatgggttgctcgacccatcactcacgacgctgctcgtgggtgtcacttccacgatgcgctcgacaccctgctacgtcgggcacttaaccggcgtacttggtccatcgagtatcgctgtgtggtctaccagcatagtcgcggggtctacccggaccgctgggaggcgacctgcttggtgcgccgtccggagaacagtctccagggtgcggaggcctgctcagagcactattccatctctgagcgggactcagctgaggcggccatgcaagatgccgcacggcatgcgctttcgcactactgctcagtgctcggtggggtagctgacagtctcaacctgaagtattacccctgccgtccatctggcagcacaggaggcatgattgtttcacctgttggtgaggacaatcctaggttgagcagcacagtcaacctagccgtcgtgctaaacacggagctagaccatgcattagatgagctgagtagggctcgtgctgagatcacccagctgcgggctgagcgcgcggagcgtcgtcacttggacgatggttcccccactcccgtagggactcagcacccgtaccactcaccttggcgtggacaccagccttatggcaaccccgactgcaagaccaagatagacttagaaccatag

SEQ ID NO: 23375 - DNA, 954 bp, Zea mays
  Peptide Sequence Number=SeqID_66750
atgggctccgacgcgatacacggcccaacggcccaacagacgactggtcctggaacccgagatggagtcgcagccgactcgaacttgatctccttcttgttgtggacacccttgctcctcctcctcaacaccttggcctttctcaagtccttgctggtcctctccaagaaaaaggagatcggaagtcaaatggaggttcgttgccaaaccagcttttgccagaatgaagatggttttcccaagttgctgagagcatgcacagtctgcctcggaatcaggagccagccagagtatgatggtcgtgaatttgtcgagcatggcacagagaagtgtgtcgtgactgtatacattggatccagtccgcaccatgtggaatggagtgtcactgctgttgggcatagattcaaagacacctgccaagtcatcgcccgcaaggcattgagagtcctgtgtcaaatttatgaagaagaagtggccgacaccccactcagattctttccaccctttcaaagagaccatccagtttggatgaccaggatgcgtgcattggaaggtcagcagctgcttgaggacgaccccacagtcgtgtacctcactgcatacctgctcaccctggatgcagagtatgatttcttggctcggcaccaccgtcagatgattgcccgagcagaagatggagagaagcgcaaccgtcagctccatgtggatctcaccacagctcaagcccgtgtagccgccttggaaagtcgtgaagtcattgctgttgaagccctgaagcaagccaaggatgagcacgtacagaagttgatggaggcctacttggtcacccataaccaacgtagatccgcaaccctgttcaacccatctgagctgaagacccccagattcttgaaggtcacccagtctctatcagaggagagaagaaggcttgagaactcccagaaggagccatag

SEQ ID NO: 23376 - DNA, 338 bp, Zea mays
  Peptide Sequence Number=SeqID_66751
atgggctccgtgccggcccagccggcttgcggcccagccacccccgctggcccccccgctcttccgcgcgtggagcgcgcagcagttggagaagccgctgctgcctccctctgcgggccccatccgtcagccgtgccctccccaaaactgcctccccctttctctctcctcctctctacccctagcgcacgattctttcttcctctccgcctcgtcgttggttggacccgccccgacggcacccgcccgcgccatcaccgcccttccgtggtgagccccggcttccctttcttccttcccacgccccttcctcacatctcccctgctcgcgcggttcg

SEQ ID NO: 23377 - DNA, 165 bp, Zea mays
  Peptide Sequence Number=SeqID_66752
atgacgctgaacttgcatgaaggcgagcagccgagcgagagtcccaacagctgggagaagcgccgggacatctgcgtcagcgtcatcaccagctactctcctaccatcctttgcacccaacaagctctagcctgcaccaacttgcttgggagcaagacatcctaa

SEQ ID NO: 23378 - DNA, 333 bp, Zea mays
  Peptide Sequence Number=SeqID_66753
atggataacataggatatatgaagcttgaggtcgacctatctgcactgacgaaggatcaacttgcagacaaccttgcttacaacagcttgaaggtggatttgcacagatctgaagtgcaagggttggagaagaagcttgatgaagtaactaaaaatttcaatgtagaacaaacaaagcctgagctctctccccctccggagccatatgaccctgaagccgatccatctctgaagggggcgcttgacataattagaatagctaacaaagccgttgacgaagctgtcaacagactactaaacaaagctgctgacaaagttttgaaagatgactag

SEQ ID NO: 23379 - DNA, 372 bp, Zea mays
  Peptide Sequence Number=SeqID_66754
atggacaaggcagtccaggctggccatattttgatgaagagacccgacgttgtggttcctgatgatatcgttgcggatgttcttactgtgtcaaggtctgtaaccaaggctccgtcctctgagtatgtctcctatcgggaaacctgtaaccattatgactttgtgatcgtcaaaatagtgacacaactttcacgctgtgaggagcactgcatacaacaacttctggacttgagggtatcagatcttggagggctcgaggacttcactgatgaagttaagtttccagcagtagcgcctcaagctgttgaaaacctgttggagatcgttgatgaagttttccaggttcatggttttgatcaccacatcgtcaac

SEQ ID NO: 23380 - DNA, 528 bp, Zea mays
  Peptide Sequence Number=SeqID_66755
atggctcccacctgttattctcaagcactttggcagtgcaacgccaggtggatcacctggagctcagcagttccaaacccagtctggccaacatggcaaaactctggctctactaaaaatcaggaaagtagctgggtgtggtggtacatgcctgtagtcccagctacttgggaggctgaggcaggaaaattgcccggagaagcacttgaagccaggaggttgagctggcagtgcggtgagcttgtgtgctccgtggtaccgtgcgcacctggcgagcgatccgtgagccgcttcggtgctggacgaacacccggggcggctgggcgctggcggagccggtggcgcgtggcgctggcgctgtcgctggcgagccgtggcgagcgccctgggcacggcgcgctgctgcaaccgatggtgggggcgacggatggggacgccgttcgagcgcggcggctggcctggggacggcggccgctggaggggaggagggagcgcgcggccacggagaggcaaggagctgggcgctag

SEQ ID NO: 23381 - DNA, 75 bp, Zea mays
  Peptide Sequence Number=SeqID_66756
atggggcagagcggcaccgccgtgcacaaggtggtcgagagattatatgaggaaataacccttgtgtcagtttga

SEQ ID NO: 23382 - DNA, 324 bp, Zea mays
  Peptide Sequence Number=SeqID_66757
atggacaaagtggcacctaattacctcagacacgcccgggtaaagtttgacaccgaatcaagaccatttgacacgccttggcacgagatatcaccgacgagctccgccgcctggatccgtggccagaccagctccgggctccagggacgccaacctgtacctcgacgtgaccgccagaggctccccatcctcgctagacccttcgtcggaaccctaccaatgccggtaaatgaagtattatttgaggttggtattgtatctgaagatgatgtggttttatactctcagaggtgcttgttgctcatcaaggggagtgggaagtag

SEQ ID NO: 23383 - DNA, 210 bp, Zea mays
  Peptide Sequence Number=SeqID_66758
atgaaggacgcaaagcctactaagacgccaatgggaactgacggacacttggacctcgacaaaggagacagtgtccggtgcgtcaggctggtctccggcgaactggccactctcgagaaaacttcggcggtgtacgactataattcaccggactgtccgggcgagaggctccaagttgtggagattcctcgtgaacgggagaaggcataa

SEQ ID NO: 23384 - DNA, 225 bp, Zea mays
  Peptide Sequence Number=SeqID_66759
atggctacaacgacgacgatggagcagcttgacgctcccaacagatgcgagccattctcctcctccctacgtcctttccccctccctgacgccacaaccgtgcctgctccggccgaatctaaaggaatcccatcctcacccccaatgccacagttctgctcgcgttggccggatctgggaatgaggaacccacggttccacgacctcctctccgtggaagcctaa

SEQ ID NO: 23385 - DNA, 354 bp, Zea mays
  Peptide Sequence Number=SeqID_66760
atggcggcggctgctggcggcgtgcggcgagccctcgcggcgctgcgctccggttccccgtctactatctctgcaacgctctcccgccaggcggcagctcgctctctggagctagcggccgcgtccctgccgcgcgcctctcgccggcgcctcgcgatctcgagggtgccggttgcggcgctcggcggcgtccaggcttcgctgatgccgatgcacaacgccaccgcgtcggcgctgctcacctccatgctcgggcttaaacctggctcttgggggctggctctccgaagaccctcgacactagatctgctcgtcttatgccttcttggggacaacttcactgttgaaaaatga

SEQ ID NO: 23386 - DNA, 2280 bp, Zea mays
  Peptide Sequence Number=SeqID_66761
atggctgcaatggttggagcgcgtagggcgctcttggccgctcggttctctcctcgcggcaccatcgcggcgtcggccgcgccagctcccctctaccggcccatggattcgccactcagggtcatcctaaaagcatggttcttttatcttgcaggcttccagctgaaagagtttgtctacagtcttgggttccacatcgaggggctggtacctttgcatctgaaaggactgatgaagattatcagcgtgagtggggacaaaacaaagcagagagatgtcacttcagctggttccacaacaggtactcacaaaaataagggtgtggatggtgttggtggcagttctgagcaacattacagaagtggtggatcatatggctttcaaaacaatcatcagccatatactggtacaagagcgaataatgagagatacaatgcatcacaaccttatagaggtagtggtccatacagccagcaaggccttgatggacatttttcaaatgatcgtcaacagtacaatggcacagaagctaatagtacatatagctctggatactacacccaaagtaagcagaagatttatgaaggagagggagctaataatgggcagtatggatatggtccttcaggacaaccatgtccgaacccagttggaaatagccagcgagttcagaaacagcaatatgttgatcatagatctgggggaagttatccagatagatctgggcatcatccctctcaatatgtaaatccaactcattcccgtaaggagcatgttgcagggtttcagcaaggcaacaatagtaattttggatataatgcttcgcaggcatatcaaagcccttatttcactaggcaggctgatacacatagtacttctcaaggatattccatgtacctaaatacagatgtgcaacgcctctctcatggagttcatcaagaaaaacattcacatgcacaatctgctggatcatttgggaaccatgtaaatagtgcacctcatgaatatggcaaatatcatcagtcactacaaggcaacccttcaaatgttggatcgccttacgaagtacctagtgaagctggcagcaaacacaaatgtactgttgaagaactggagaagttttgtgatgatggcaatgtaaaagaagctctggaagttttggctatgctaaaggaaaacagaattgtgctacatgctcctcagtacttcagattgatgcaagcatgtggtgatgcaactgccctttcagaagcaagattaatacatagtcaaatatctgaatcatcacttactgttgacacagattttcaaaacaaaattatggagatgtatgctaggtgtggttctatggaagatgcaaagaagattttcagttctatggatcatcataatttgacttcttggaacactatgatctcaggttttgtgcacaatgttcttggtgaagaagcaatagatttttttgaacggtttaagcagacaggggacaagccagatcatggcatgttcagacatgttttcttggcatgtggaattttgggatctgttaatgaaggaatgttgcattttgaatccatgcagaaagattttggcatacatcccactacagagcattatgcaagcattgttactatgcttggacagtctggctacattgtcgaggcttatgaattcgtggaacggatgcctgtggaaccaagcattgaggtatgggaaaatttgatgaacatgtgtcgacttaatggctttttagagcttggagatcgttgtgctcagatcatagagtgcttggattcttctaggctgaatgaacagtctaaaatgggtctgttccctgtcgatgtgtcagatcttgcaaaggaaaaggaaaggaaaaaggcaagtgtcgccgaagctcggagcaaggtccatgaatacagagctggcgaccgatctcaccctgacactcctaagatctatgaagagctgaggtatttgttggctcacatgaaggaagctgggtatattgctgacactcgatttgttcttcacgatgttgatcaagaaaccaaagaggatgctttactggctcacagtgagaggctggctatcagttacggtcttataacaagtgctccccgctcacctattcgggttataaagaatcttcgatcctgtggggattgtcacacggctttcaagataatctcaaaacttgttggacgtcagatcattgcaagggatgcaaagaggttccaccacttcgaaaatggtgtgtgttcttgcaaagactactggtaa

SEQ ID NO: 23387 - DNA, 553 bp, Zea mays
  Peptide Sequence Number=SeqID_66762
gttccgacgctcctccgacagccacgacatcaagcagcttgagtcccaagacctctccggctgccacattggcatggccttcttagagaaggttggccgcgcgggacctaggacgggacaggcgctctcttggggccgctcgcttccctcacccgcgtggacgcttgtaacccccctactgcaagcgcacccgacctgggcgcgggacgaacacgaaggccgcgggacttccacctctctcacgcccgactccggccacctcgcctctccccccttcgcgctcgcccacgcgctcgacccatctgggctggggcacgcagcacactcactcgtcggcttagggacccccctgtctcgaaacgccgacaagtttgctctagattataagttttataggtgccaaagattgttcggtgtgccaccagacagtgtccggtgcaccagggaacccaactccgaacttgccaccttcgggaattctgggagccgctccgctataattcatcggactgtccggtgtagcactggactgtccggtgtgccagtggagtaa

SEQ ID NO: 23388 - DNA, 531 bp, Zea mays
  Peptide Sequence Number=SeqID_66763
atgaggttgtcgccggcgaggatgaacccggggatggagaggaagcccttctcgaggaagacagaaacggtgtacgggcccgtgacgcgccggtgctacatctccagactgcccctgctccgtgcggacccactctccagcgcgactgcacggctgttgttcccgcgggtggagatggcggcggtcaacctcctcgctgagtctgccgcggtgcgcttgagggcgccggcgccgccgagcgcgggggaggagcttgcggccaggctcacggagtgcgggttccccgccacggcgcgccgagggggagcggtcgcgggggttggggagagcgcgcgcaagtggagggagatggcggccaggaaggaggaactcctgctgcggagccggggccgagtcgcgtggacgatcgtcgcgctttgctgcggctcgcatgcgtcccacatcctgcactcgctcggtatccatgttggccacgggattaacagacttgtcctgaagggcatcgagcaaactggctcatcagttatgtaa

SEQ ID NO: 23389 - DNA, 1081 bp, Zea mays
  Peptide Sequence Number=SeqID_66764
tttgcatgacatgcgggacccaacccccgagtcgcaggggagggccttggagcgtgttggagaagactcagcccgtggcgtctgggggcgcacgtatggagagttgcctttaaaaggagggagactcctttcagaaggcaaccatgtcttcttcctcccttatgcgtcgtgtctttccatcttccaagcccccggatgggggtatccgccgcctttccgcctcctcgttggaggaacgcaactccatgggagttggtacctctcagccatcgtttggcttcaaggattttcatcatgcagcccggccgggctgcggcctctgcccctccctcagcctcaaggattttcatcaccagggctggggaggggagtgcgccgagttgaggtcggcccccgcgtgggcggcggcccgctccttcactcagtgatggggggaggagcggttgttgtccgtggcgctggcagctgcagcgtgcccggtcttcagacgcgagtggcttcggagccgctcgcggcgccggcgtccgccacggcagctggaagaggttcttccgccggtgcgatagccgggaccggccacggactgacctccaactctacggccttctgcccgtccttgcctcacgagttttggcgtgggcgggggcctcctggcagcagcatccgccctgaggtcagtgctgccgctgttcgaccccccggagcagaagtcgtcgtcgtcgccgctgctggaacaggtgacggcgcgccgttcgccggccttccgttgctctgcaggccttccccctcggagtggggttgttcgtacccgcggaaggggaaccggagttccgtttgtaatggcatctcgaatgccgcctcgcttgttgattatctgaaccgcttcaccaagcgtgagtcgccccgtgtcaaggtgacgagtgagtatgaacagaggcggagttggctcgagaatgggaacctggttggccggagcctagccaggttgcccgtcagcgtggccgacgccggagtcgatcagccgaggcctcgggtcgggccggcgcccttggaagatgcttggccgaggcctcaggggtaa

SEQ ID NO: 23390 - DNA, 288 bp, Zea mays
  Peptide Sequence Number=SeqID_66765
atggtgctccagcagcagtaccgaaacaacaagtctcagcagcacttgtcccgtacatgcaccattgagaaatacctgattgacatatatcatgaatggaagaaaagccagaactcagaggctcactttatccaggcgcctgtagacgccacaactagagagcaccttgagttgcctcagcctgctgcacagtttgagcatgctgccataaatgttaatgccacaactaagagctatacttcgttaggcaaagtcgacttcgatttcgatattgatgatctcctgtag

SEQ ID NO: 23391 - DNA, 282 bp, Zea mays
  Peptide Sequence Number=SeqID_66766
atggattccagcatggaatctgtcgctgagctatgtgcccagaagttctccgcgaccgttgttgcagcccgtgacacatttactgcttctactgccgcctgtgtggttgctggtgatctctgcgccacagcatcagcgagtgcaaccgtcgtttgtgctcaggaggcattggccaaatactatgagaaaatatgccctaaaactgtggcactttcttcggcgggcttcagattattggcaccgcgatcgtcgcaattggatccgtggcatatgactgtttga

SEQ ID NO: 23392 - DNA, 1047 bp, Zea mays
  Peptide Sequence Number=SeqID_66767
atgagaacaactcattttcagaatcataaaagagacaatactgcagtcagccctccggaggaacaacgtccaaagaaagcaaggattcagatgttttcccctgcggagggggtgccagataatgtaacagtctctgttgagtatgcgaagtctggtcgctctacctgcaagggctgcagtgagaatattgccaaaggtgccctccgccttggtgcctcttttcctgatccccgtggctacgaaaatactaagtggtaccatgttgtgtgcttccctacatcatcatacccattatttccaatgtcaaatctgaaggggtttgattcaattgaggatcatgaccgtgacaagttgcacaaattggtggagaatcacaagagcgatggaaaagcggctgatgtattgaatgagtcaaatctgaagagagaaatggctcacagcatggatgactcgaatgaaggtgctgaaaaggatctggaaggaataaagattcactgcatgggggagtttgaagaaggtgctgaaaagaacctggaagaagcaaagttacctgcagggaacaaaatgattggtccatcgatatccttttcactttctgatataaaaaaagaatacaagaatgctacccttcctgctcattggaaggtttttgatacagttatcttccgtgagaaggaagatggccttcatgcttcatctaagattgctgcatttgattttgatgggtgccttgccaataccagtatgaagagggttggtgcagaccagtggtctttacagcataaatcaattccagaaaaattgcaaagactgtacgatgatggttacaagctggtcatattcaccaatgagtcaaacattgagcgctggaagaacaagcgacaacaagctgttgactccaaagttggccgccttgataactttattgaatgtgttaaagcccctattcaggccaagtacattttattagaatgccactacaagaggggtgggcataacagtgatacttcagtcgctgaggttggctcatgccgctttaggctttga

SEQ ID NO: 23393 - DNA, 302 bp, Zea mays
  Peptide Sequence Number=SeqID_66768
gccgtatctgccccggcgtctcacagttgagtgatagccctaggtgccaggaagagccctcggagaagactgtgcacgtctccgtgaagctccccgagcgaggaatcgggctctgcttcaccggagaggccggcccaaggtcaccggacttcaaccgaccgccggcaaccgtggaccgagagtacatcctcgtgccggagcaaggagctgctcaggaggtagccccagatccagcaccagagccagcaccaaaggacctgcctgccactgctttggaaggcaagccccggttttatgcataa

SEQ ID NO: 23394 - DNA, 572 bp, Zea mays
  Peptide Sequence Number=SeqID_66769
gccgtatctgccccggcgtctcacagttgagtgatagccctaggtgccaggaagaggagccttggccgtacccctccgcacgcgctcaagcctcaccggagctcagttcgccgccgtttgcccatacgcgacgtgcccgcggccacccgagcccctgccaccgtagaccggccagcccagccattcccaaccccgtccagccctcggagaagactgtgcacgtctccgtgaagctccccgagcgaggaatcgggctctgcttcaccggagaggccggcccaaggtcaccggacttcaaccgaccgccggcaaccgtggaccgaggtacaccgtgcgcctctcttcgattccttgcacggttagactccttagacctccacgaagctccctatgcccttggattgaactatgccgccgtggataggccggagcactcgccgccgacgagctcgcccgcctgctcacgtggaccgggcgattccggccatccccgacgacgcgccgtacctcgacgtgatcgccagaccctccccgagccaaccctacccttcgccggacctccctcgccgccg

SEQ ID NO: 23395 - DNA, 168 bp, Zea mays
  Peptide Sequence Number=SeqID_66770
atggcgaaggcgaggaagcagaagggtgacggtgccagtacgggaggaggcgccaccgtgctccaccagaagctctgcctctccatcgacatggagaaccagctgatctacggggtggggaacatatccggtgctcaaaggggcacgttgcttacatgcacattttaa

SEQ ID NO: 23396 - DNA, 573 bp, Zea mays
  Peptide Sequence Number=SeqID_66771
atggcgcccgagtacctcatgcacggcgacctctccaccaaggccgacgtcttcagcttcggcgtggttgttctcgagattgtctcgggccgcaagaactccgcctttgtcccgcccctcgacgccgaggccgacagcctcctggaatacgcctggagactgtacaagaaaggtcggagcctggagttgcttgaccccgcggtcaagtcgtcggcggtgccggagcaggtcgagctgtgcgtgcgcatcgggctgctgtgcgtgcaggccgacccgcggctgcggccggacatgaagcgcgtggtgatcatcctgtccaagaagcagagcacactcgaggagccgacgcgcccgggcgtgcccgggtcgcggtaccggcggaggccccacggcctgcggggctctcactactctgtcgggtcatcgtccggcaccagctcgccgtctacgtccgctacatcgcacgcgtcagcatcagcgtcagcgtcagcctcccacgccatgacgacgtcgagcacgcacaccatgaggagccggggcttgccctcgcaccgagaagaagagcaggagtag

SEQ ID NO: 23397 - DNA, 615 bp, Zea mays
  Peptide Sequence Number=SeqID_66772
atggagtcttcggcgaagacaaggcttccactccactctatcgatattatttacccttcgctatcactccgcaccgttctccactttggtataatcttcactcttattactagtaccaatggggagaaagtgcataagttcatctacaactattctaaatcgactgtctggaatatcgtagattattctggacaggagaagctttttggaaaaacagaccaagcgcggaccgtccgggcccttgcggcggaccatccgcgacaccaaagtgagcctcggacaggaacactgcataaacgcaagtcaacactgcggaccgtccaatggaaaagcaagcaccgtccgagaccaggcgcggaccgtctggtcggcacagaactgaaaaacccgaagctgttgatgtacagggcggaccgtccggaccaggagcgcggaccgtccgcggttggcagaaatgaagcaacgactaggaagtggttgagggctataaatacaaccccaaccacctccattcactacacccaagcattccaatcccctacattcaatacaagagctagcaattcattccaagacataatcaaagtctccaatctctccaagttccacaattga

SEQ ID NO: 23398 - DNA, 2685 bp, Zea mays
  Peptide Sequence Number=SeqID_66773
atggaagtggtggagttggtcccctatgcccggaacaagtggggcaactggtgggactactggttttatgtttcggaggctgaagtcgaagaccacctagggctccctgccgccattatgtgttcgcattattatgtggcgtacccgtcgtttgaagtggcggaggatgatgaaaatgaggtggcccttcggattgctgcctgctcgagtagtgggcgcgatctagttgaggaattcatagggtatggggtgtggcctttggcacatggatgggcgctgggcgaagtatgccctcgcgagatgccctccctaggtggacggaaggatcccgcctcggttgtgcgtgaagcagaggatggggtggtgagaattgttgggcgctatgtgccaaagacggaggcccagcgaagttgggatatacctggatccaacgaccgcctgaatagggtcttcgagttgaattctttgccgtatggcggttaccctggggaggacgtcatcgatcgccgtgagaaaaaactagcggccgtgactgaggatgaccccgcgccggaagccgccctagccactaaaaagaggaaactaggtactgcggtgggagaactgggggtctccgatagctttgctatggagttgatgggaacatgcgcggcccccgggggaaggatgtcttcgcccgagctccaggagtcttcggcgcggatgctggaggaagctgcgcagaagcgccgggtggtcatcaggcttcccgaagctaggccgaagagggcgcgggggactgcgaaggctaccgcccccggcggtagccagccggcgctggcggtgaagccggccgcccctgggtccagcaaggtgccggagagcgtgaaggcggccggcgccggcggaaccaagtctgccccggatggagccacgaaggcccgggaattgccttcaccggggaaacgcgttgccgacttcggcacaaatattagtgtggacgattatctcgttggatcaggcgaggggcaacttgtcgttgttttgcctgcggtggcgaccacggtgtctgccgtggtgcctggggtgaagggtagcgcgctcagcgctggcggcgagatttcggcggtcgctgctgtcaaggacgaagcgggcactgtgtcccgccggctaagggaggcgtcgcagcacctgagtcaagcggccgacttcgccgaccgtgtggcgtcggggggccttactgcagatgtgtctgccgaagtcgagagacttcgggcgcagcatgctgacaccgtccgagaaaagtcggctgcggatagcaagtgtcgcaagctggcggagaaggtggccgccctggtgggcgagaggacggacctccggcgccagctggtggaggagaggagggaggccaaccaggccatcgccaaggcgcaggcggaggccaaattggcgcgggtggaggggagtcttgccagccagcgcgccgaggaatgggaggtgcagttcaacgctttgcaggcccgcatggagagggtcgaggcctctacacgctcggaagttgagcggacgcgcaaacagctcgtggactcatatcgcgagctgggcgcgcggactgctgattttgaagtgcccgaccgagaggcgggccttcacttcctcgagtggctgcaagaggaattgttggcgctcccgaccatcgtggagggatttatgtcctttgcctccctcgtcacctgcgaaggggcgttgaacgcgctgtcccgcgaggggtgcagtcactatgaggtcttcgaccgatctgatgaagattttgggcacgagatttataaagtcgaagaccctatggtgaaggactccgcgggggccctcttcgaccggatgtggggccccttcggtcgggaggtggtcagggagcggtctgaccaggcgagggatcagatggcgcatgccgaggacgtggaggacttcggacccctgaacagcgtgcagcccgaagcggaggccaacccggttgtggccgaggctgaagtcgacccagcaccacccccggaaaccggtgaaggctcccttgctgcccctgcggctgctgtgtctggtggaggctcgtcgccagttactgcgccgatggtggagaatcccccgaaggcggcgacggagctagcagcggaggatcccccgaaggcggcgacggagccgacagcgaaggatcccatggcggcggctgggtcttcgcaggctcaggattttggtcctgcgcacgcaaccgctactgttaattttgtggcggcttcgaccgtggtcgctggaaatgaatcggatgagtatgcgtttaagttttctgattttgatgactctgggagttcggttgagtggatggaagagtcttcggatgaggacttggattactttgcggccttggatatggctgcggcggaggcttctccgcatgttacggatgctgaagttttgcctggtccgagtgctgggcgtaggcggcgaagggcggtggcgaagcgtagagtgagtgaagtggatggcggtcggcttcgtgtgggcagggctggtaagcgtgaattgttgtcctcgccggttggggcgagtgtaggtgagggggagttgcgaagtctttttgagggtgaggagcttaggataatgctatttaactatagggagatgggaatcattccgaaggttgaacctatgtaa

SEQ ID NO: 23399 - DNA, 531 bp, Zea mays
  Peptide Sequence Number=SeqID_66774
atgccaaatggcggaggtggtggtagtagcaagagcatggggggaggctacgctggtgtggaaaggctggagctgtcacagcgagtgaccgggacggtggaaccattccccaccacgatagagggagggtgtggggggtgtggaggatggtggtgggatagcaatggtagtggtaggagtggtgtgggaagaggctccagagttgaccaccaattggtggtagagggaagggatggcaaaggcatgggatgtgtggagacgggccagaggaggtgctctgacatggccactaagaggggagggggacaacgaaggctcgattaccaaggaagcgatcacggcacggacgaagacagtgggttcgggcacgtgacggccgacctaggggtggagctcgacgcagttatagagaacaaggtccatggcctgatcggaggacatgaaaatacctcgtacaaggtgcccgtcgtgaaggaggatgcgcacaacgaccacggtagaactgggcgaagccggaggcacccagggtga

SEQ ID NO: 23400 - DNA, 753 bp, Zea mays
  Peptide Sequence Number=SeqID_66775
atgccctccaacttcgttggctttggcaagaatggactaacagctcaaaactttgggaagggctccaggtcccttcaagctagatcgcttactgtttcgggcgtccaccactgtgagacaaccgatcaagccaaggatggaggcaagaagagcttcgaggtaccgagtacacgggagacggtcaaggagaccaggaccccaaagccaggggtgaagaagaataattgcaaagttaaggttgatcgagttaagaagagttatggtagtaatagtgatgttcttgtcgatgctcatgatccatggactagaattaaaataaaatattctgagtacaaatgtactacttctactccctatgttgcttatggtactaacctttcgaagggagaagaaaaacgatggcaaccaaacgatgaatccatctcaccgacaggtgtgtcttccactagttataaatgtcttattgctaacaatgatagtggaaacgaaagcgatgatgaggaggaacatgaggatgatagcgaggatgagtcttcatcaccacaaggtacattttcctgtattgcttccactaataatgatgacatggaaaatgagaccgacgatgtggaagaagaggagattcgtcggttctacacccatctcaacaaagaagacaaagtgctcttggttaagctgttgaggaggaacaaggaacaaggcgagatgcttctcaggctggaggagactctcatcaaaaccaacgacgcctag

SEQ ID NO: 23401 - DNA, 252 bp, Zea mays
  Peptide Sequence Number=SeqID_66776
atggtgcggccaagcctggtggcctggtgcggcattgtggccatcccgacaacagccccgtctctgtccagccctggtcgtggcttcccggctcctgcgtgcactcatggcgactctccagccgcggctgcgcgtccgacccgcaaccccgcccctgtgcaggaagcccagagccgttgttccgaggaagaaggaagctcgtttcgcgaaaatgtcctcgactgtataggtaataaacgtccagatttatga

SEQ ID NO: 23402 - DNA, 2628 bp, Zea mays
  Peptide Sequence Number=SeqID_66777
atgcaggtagtcgagttggttccttgcgcccgcaacaagtggggcaactggaatgagttttggttttacgtcgcggagggtaccgtcgaagaccatgaggggctccccgtgtccgagatgtgttcgcatttttactcagcatacccgccctttgaggtggcggaggaggatgcggacgaaggggcccttcggtgtgctgccggcctgagcagtgggcgcgatttggttgaagaatttgtggcgtacggggtatggcccttggcgcatggctgggcgttgggcgaagtgtgccctcgccagatgccttcccatggtgggaagatggtgcgaagtcctgccttcgcgctgaatctgcaaagccgcgatccggccgcctttgtgcgtgaggcggaggatggggcggtgcggctcgttggtcggtacgtgccgaggacagagggccagcgtagctgggatatccgcgggttgaatgaccgtttgaacagggtttttgaattgaatcaactgccgtatgacggctatcccggccaagacgatgtggaccgccgtgggaagaagccggtggtggagactggagacgaccctgcgccggcggccgccccatgctctaagaagaggaaattaggtactgctatgggaggacttggggtttccgatggttttgctagagaattgatgaggacatgcgcggccccggggggaaggatgtcttcttccgagctccgggagtcttcggcgcggatgctgagggttacctggggttggtggcctaggaatgttcctatcccccgcgcggccggcgaagacttttttacatctcgcatggcggttgtcaggcttcatgaagccaggccgaagaggcagcggggggctgtgaaggctacggcccccggcggaggcaagcccccgctggcggcgaagtcgggcgtccctgcatctagcaaggcgccggaggcagcggcaggcaccggtggttccaaatcgacgaaggctgtgccgccgtccagcagggtgccggaggtcgcgaaggcggcccgagtgttgccgtcgtcaggcaagcgcgtcgccgacttcgccaccgatattagtgtggacgactatcttggtgggtcggacgaaggccaacttgctattgttgcgcctgccgcggcgaccacggcggccgccgtagtgccgaaggcgaagggcggtgctcttagtgccggaggcgagatgtcggcactcgcggctgtcagggatgaggcgggcgctgtgtcccgccggctgaaggaggtgaaggaggcactaagtcaggcggctgacttcgccgaccgcacagcatcgggggccctcacggcagttgtgtctgccgaagtcgagagacttcggacgcaacatgctgacgccgtccgtgaaaaatcggccgccgacagtaagtgccgcaagctggcggacaaggtggccgcactggagggggagaagactgacctccggcgccaactggcgggggagaggagggagaccaatgaggccctcgccagggcgcaggctgcgcaggcggaggccaatctggcgcgggcggagggcaatcttgccagggagcgcgctgagcagctgcaggagcggctcagcgccttggagagctgtgtggagagggccgaggccgcgacgcgcgcggaggctgagcggacgcgcaaacagcttatggattcataccatgagctgggcgcgcggaccggtgacttcgaagtgccggaccgagagtccggacttcgctgcctggagtgggtacaggaggagttgcaggcactccccactatcgtggaggggtttatgtcgtatgcctccctggtcacctgcgagggggcgatgaacgcgctctcccgcgaagggtgccggcacttcgaggtcttcgaccaagctgatgaagattttgagcgagatatctacaaggttgaggaccccatagtgaaggaatccgccggagccatctacgaccggatgtgggatccgcacggtcgcgaggtggtcagggagcgggccgagacggcgagggctcaggcggtgcgtggcgaaagggtggatgacttcggggcgttgaacagcgcgctgcctgacccggagccgatcccggcggaggccgtgtccggggccgccctggagccgcccccggagactgcggaaggcgctctggatgcccccgtatctgctgcggctggcggagacctgcccccagagaccgccgaaggcgcgcctgatgcccccgcagccgctgcgccgagggctgaagatcctgcgacggtggcggcggaggcgacagcggaggcaacggcggaggctcccgcgacggctgggtcttcgcaggttcaagattttgggcctgcgcacgcaaccgccactactaattttttggcggcttcgaccgtggatggtggtaataaatgtgatgggtctgcatctgagttttctgattttgctgactctgggagctcggttgagtggactgaggagtcatcggaggaggacttggactactttgcggccttggatgtggcagcggcggaggcttcaccgcacgctgcggacacagaagatttgcctggtccgagtaccgggcgccggcggcgaagggcggttgcgaagcgtaga

SEQ ID NO: 23403 - DNA, 822 bp, Zea mays
  Peptide Sequence Number=SeqID_66778
atggggagggcgcgagcggcggtggagctgagaggcgatggtgaggggaagggagtggttgctgctgggcatgaaaggcatggggaagaagggacgacgcgcgaaaggcacaaagaaaaggcccacctagcagagtccttacgaccggggcgaacacgtccccctcgctcgaactccccacaccagcatgttgaagaccgaaggcccagaaggtcgagccgcacaagcaaagagcccaaggtcgacgcccacgtgaagactcaagcactatattcgccctggcaaaccggagcgaagaccattaaagacttcgaagctcggatgatcaagacctcgaagaccatacgttgtgaccttcctcattgtaaaagggggcccatgtataatctggcccatattgcagggtcgtgcccgtgggccgcgcgtgctggcagggctagtagagggttgacccacaaagttccaacatttggcacccaccatgggtctacgataaagcattcccgtgatggcccccaagagagcaaattcgaagggcatcgctttcatcgacgatgcagcgaagcggcactcctggtggagaagaaaggcaaggctcccattgcagacgacatccttcaggaggccttcgacgatgatgtcgtcaatagcaaaaggcaatgcaaggacaaccagcctacgctagagggcaccgtgcgcacctgcagttctgagggggcaccacaagcacccccaccaggcttcactcatccagaaggcgaagacaccatcgaagatggagagatcatatgcatctcggccgaagaccagttaaagttgtga

SEQ ID NO: 23404 - DNA, 402 bp, Zea mays
  Peptide Sequence Number=SeqID_66779
atgaccatctcgtcaaagtttgactcccttcccaactctagcgactactccgacgaggaatttctctacgctagttcatcttctggggcaacccagaacatccccatgaccggctcggcgagagctttgtcatcgtgcttctggttcatcgattggatctccggtggtgagcaccgcgtggtggcgttgaagaaggggcaagtggatggcattggagaagccgagagcgtgcgattcatggcacgtgagatcgccctgcttcgtcgcctcggtgacaacccctatgtcgcccgcctcaatgacctcatcacctcccgcctcaacttggagacgtccatctacctcatcttagagtacatggagcatgacctatttggcttcagcacctatgtgaaggactaa

SEQ ID NO: 23405 - DNA, 345 bp, Zea mays
  Peptide Sequence Number=SeqID_66780
atgccgacctcctcttcttctgctgccgctacaccgccggctgacgcctcgccgccggccgacgcctcgtctgaggagacgctgagtactttggtggtggaggagttgcgagccggcgattcggtggattttggcgtgtcgcggatgtcgtcggtccgtgtgcaagatatgcagcggctgggttactttggcggcagagttgctcgtgtcccggggacggaggaagtccccgagccggaaggcgagttggttgtgttcgaggcgttcttcgccgccggtctccgcctgcctgcacaccgatttgttggcgaagtcctgcgcaggtttaacgttcagatacattag

SEQ ID NO: 23406 - DNA, 696 bp, Zea mays
  Peptide Sequence Number=SeqID_66781
atgacttcacccacccccgtcaatggaggagacactcgcttcagttttgactacctttcccacgagggctttccctctatcttgtgggagctatatgaggagcatcgggtgccacgttgcagggtttggctgaccttggagtctcaccctctgcagcatgggtggtgttcccttgattccaagactgtcgggttcagagcagacgacaccaccgaggccatagcactaaaggccttgatgaccttctgtggatatcatcccctggagatgatgatgcacccacttggactcttccccgtcgagaagagggatgacccaatgtggtgcaacagagtgagtcacgtgaaggacgtgtgggccatgcatcccgaccaggttgggaggatcaccgtccagtgcatgagtgcactataccgcctacatgccttgcagagcgatgccatagcacacctcactgggctcgctcagtctacaaagatcacccttgacaatcgagaggacttcgtggtcgacttgtcttcggaattattggaaaaagactcacaggtggaacagattgtcacgaaaccttccaaagtattaggcccacctacaaatgtccttgtcctaaggacctcagacagtcatgcaggtgcacgtaatggctcggcaagttcggttatctgtatcttcatcatatcgcccaagagcgcttaa

SEQ ID NO: 23407 - DNA, 999 bp, Zea mays
  Peptide Sequence Number=SeqID_66782
atgacgggatccggtggggccaccacggagttgtccgtagacgactacctggtgggcgacgtcaccatgttcaacgtccagacggggttaccgccttctggtgaccgccttcgccgagcaggttgcctcgggggcgctaatctcgcagaggagctagagtcgctcccgtccatcgcaacgggccttgtgtcctacacatccctatttacctgcgagggagctgcgaatgccttgtcccaagagggatgtaggcatttcaaagtcttcgactgggcgaatgaggactttgatcatggagtgttccagattgaagatgatgtgctaaattgctccacaggggcgctttattataggatgtggggtccccacggctgtggcatcgtcccggagagggcagaccgagcgctagcgcaggttgaagggatgcatttggggttgggttctggtgtctggcctgcgcaagcaaaccctgatgatgttaaaattaatgatgttttgatggatgtgagtgcaatgtttattagtggtgatgtgtcggaggggtcagattttgggtcgtggtcttcggaagatggggaattgggtagccatttctcgtgggcggacgaatcttctaaagatgacatagattattttgcagcgttggatttggctgcatcgaagtctccgctgcgatttgcccctcgcgaggagctggtgacctcgactgatgcgggcgcaggagactcgcgaaggcggaggatgggcatgtcgaaacagagcattggtgattttggtgtggataggcgtgtacatgtcgtaggtgactctgcgcttggcgacttttgcttggacaatgtctttgtggaagactttgcaccctatgggtggtatcgcgcacttattgtgcttttccggctgcacccttatgcgatttttggtcggactatgtctttgtggaagacttcaccctatgggtggtatcactcacttgttgtgtttttctggctgcacccttag

SEQ ID NO: 23408 - DNA, 360 bp, Zea mays
  Peptide Sequence Number=SeqID_66783
atggctaagctaagctcctccacatgggctcgagctttggcttccttagcccagatccccgataggatcgttgctaccactgctactttcttcatgtcttggggtaagttaatagcaggactaccctacggtggtgtggaacctgttccggggaggaattgggcggataatttcgcgacgtgggaggaattcttcgtcggcctctacctcccgccgtgtagccaccccacgccgtggacaagctcgtcgtctaatcaatccatgggttcgctggtcatggcgcgccgccgtggactcagccctgggtcgccggcgttcaaccaggtgaaggaggactttgcctcgccgtcgatcgcgtga

SEQ ID NO: 23409 - DNA, 207 bp, Zea mays
  Peptide Sequence Number=SeqID_66784
atggccaacgcaggcgcgggcgcgcttctgcgcgagaaaataattgaaaacggagaagagagtgaagtgattgaagagaagacaccaccacctttggaatctcaggcagggacttggctctacttcaacatctgcgggtccgagcctgactcacctactaacaaaggcaagccccggtgcatgcaacccctttccttgtgtttttaa

SEQ ID NO: 23410 - DNA, 819 bp, Zea mays
  Peptide Sequence Number=SeqID_66785
atgacgcacttgggctgtccacggcacaccgatttttccacggaggagcactacgccggtgagaaattcacgacggacccgatccaatcttggttcgagaaggccacggacagagtaggtctcctattcctaaaggtcactttagtcacaggatttcgaagtgtgaaacccacatttgtctttagaaagaaaaggttttgtcctacagtcaacattcctctgataccacttctgtcacacccggatttcggggcaccaagacccgggcgcgaacataatcaccaggtgtctgagggcacatgcgtccttaacacaaggcgctggcgctcagatacctataaatacccccgcacagtgcccgtgagaggccagattaacagagctattgccaactgccgcgagaaccctgttaacgtcaatgtttcacccttgttggatccccttgcgactgagagtaagttccaacatttggcgcccaccgttcgtgctacgagaaaaccacccgcgatggcacccaagaaagctaactcgaaggctgacgaggctgcgaaggcagcactgctggccgcaagaaagggcaaggccctcgccctcacccaatccacccaccaagaggccactgaagtcgacgttctccgcacctgcgaagacgacactctccgcacctgcggccctgaaggacaatcgcagccacccccaggcttcgccccactggagggcacggacctcaccgaggacggtgaagttctcggcatctcagcggaagagcagctacagctgcgtgccctgcgcctcaagaaccgcaatctccagaggtag

SEQ ID NO: 23411 - DNA, 564 bp, Zea mays
  Peptide Sequence Number=SeqID_66786
atggctctaactccacaaatttctgctccactccacaactctaggtggaacaggctccacatggagttagagctgattggaaggaggaacatcatgtccttggaggagggcccctgctctgttgtgtacttcgggtacatgtcgcggtcagcctgcatgcaggagttgatccaaaagtacaggatcaatatttgtttgaggaagggcctcaagatttctgagctgatccaagagttgaggatcaagatttgtttaaggaagggcctcaagatttataaacagagaaaagaagagaagaaaagaaatgcaaaagacttggcttggtacagccaaagtccagctcggcttggcacaccggacagtgtccggtgcgccaggccagcctccggtgaacaggccactctcgggaaaaatcggcagcgtacggctataattcaccggactgtccggtggtgcactggactgtccaggcgagagactccaacttgtggagattcctcgcaaatgggaaaagagataaggaagaaaagtcgtggtattcaagttgatcattggatcacttga

SEQ ID NO: 23412 - DNA, 2166 bp, Zea mays
  Peptide Sequence Number=SeqID_66787
atggcggatatggagaggagggaggagaaggagaagaagccggtggttgggcgtcagcaagcaaggagacacgcgatagggagtggctccaccccctcctcgcctcctcctccaacggctgccgctgatagatatggacgcaaggcgagcctcgaagccttcgttttcagctccttgtccttttcacagatgctgctcgtggctccctcatggaacatggatccgtgctgcctgaaaaggcagtttgcaaaaactgtgccttgcctagctgttctagccactagattaccgcgccgccatgcatgttttgtaacgctgatcgccgctgcataccgctcgtcgtctccaggatatagcgggaaggagatgagaggtgaggagcacagggcagcgctgagacagaagagactcaagaaggccaagtgcttcaagtggagaccaagcaagggcgacatggatagcaaagtggaggcggggggagcggggtctggtcaggtctgcgatgacgcagtgctctgctcgctgtctacggccagcttcagtggcctggttagctggcagagagtgaggacccttgggaaggtggctgaggggtgtgatgctgccgatcctccggttccaagaaaattaagatcagccataaacaagcgagctggtcgatttgcttctgcgccatcacgccatgtcaaaaagaggcgtcatctttcggctatcagtgctcaaatttcttctgtaggccaggaaacaagatccaatgggagctcgttatttacagaacaagaggaagcaattgctgatgttctgctgtccctatcccaagtaccctctcacagcgaggtcacagccgacaaggctgtagcagatagttcaaacacgaatgacgcttcaacttctttttcaaaaggacctactaaggaggatgaccaaacagccgagctgccaagcgctgctaacgagctggctagccaatgcgcctgcataaataaagcggtggagcaaagcaacatcgttccaaatgcagatccagtggctgctgctgcaaatcaatccagcaacagtatcccacttctgtcagcgaatgagcaaatgcaggacctttctatggaaactgctgtgaatttgccaagcccatctaaagacacctccattaacagcgctcaaaagcaccatgaactgcagtttgatgatagcaaatgtcaccctgcacagaagccagaggctcctctttggctggtaaattctgatcaatctgagggtgtgctgctacatgagagggagaaggccaagaacaacagtgcacaagactctgttgccttgtaccccagctgggtacttagtaaacaccctgtgctcagaaacgtcggcgcgccgaaggcatggaagaggagcatcacccacgtgtacgtgagccacgtgatccagatgcacgtgaacaaggagaaggccgccgcgtcgtcgtcgttacaaagccaagcgaggcctgaggagaggctcctcgcccgctgccccaggcctccgaacggctcgtccaccacctcgcacaaggccgccgccgctcgggacgagaggttgtacacggtgcacttcgacgtgcgcgtcccggctcaccagccgcccgctggcatctgcgatgcgggcgccggccggcagaagattgtcagcggtagttcctggcaaaaccttccggccacatcggcggccgccgcggcagcggcgcagcatgtccggtacctacaccctcagatggctcggccaccggcgacgccgcgtgacgcgacgccgtactcgttcccgcacttcccttacagcagggggagtctgccacccgccgcggcgcttcagcagatgccacagtatgtgtgcggcccggcgtatggtctgcgccctgcgagctcgtcggcgatgatgatgaagcagctacaacaacccatgccgacgcagcagcagcaccagcagatgtggcagtaccatgtctcgcagtaccagccgaggccggacgctacgctttctccggcggcagcgtggcacggcatttcgtcgtcgctgcgaccgatgggcatgcttgctcccccggagatgccgtcgccgccacggccgccgcagatggagctcttctgcgcgccgtaccaaggtggcaggcagccgcagcagctgaggttgatgtag

SEQ ID NO: 23413 - DNA, 507 bp, Zea mays
  Peptide Sequence Number=SeqID_66788
atggaggatgcggcggagaccgagcagctggaggtggccgccattctgtgcgacataagcaggctcgtgcggtcgcggcaccggcggcgccagcgcgcgcgcgccgcggccccgcacctggagatcctctcgtggggccggcgccggccgcggtcgatgccggaggtcaagccctccccggtcccggctcccgccgccgccgagaggggcggggccgctagccccgacaccccgctcgcgtacccggagagcggcggggacgacgcgccgccggaggacaagggcgaggtcgccgtagctcccccgctggaccagtgggcggaggaggaacagcagctcggcgaggcggcggcgagcttgtcccagccccgggagaacgcgcgtccactccagcatgaattttatctaaaattggaggaatatgtagtgaaaactcaacaaggagcaagaaatatggttcttgaaccatcggaatttgtggcatacaccctctctgatttagtgtag

SEQ ID NO: 23414 - DNA, 306 bp, Zea mays
  Peptide Sequence Number=SeqID_66789
atgagccattattgctcccgcgacctggcgacgctgtcccctcccgactcccggcctctcatctgctctgttctgctctgctgccagtgccgtgtcgtcgtcttgcgctgcggtggccggtggccggcgtggcctgtccctgtccttggcggagacacagtgaccgatcacgatggagctgacgtgacgatgggcggggggaaaatggtgctcggcgccggcgggatgcaaagggggcaccctacggccgcagcggtgccccctacagcaccccctacgcgtcggcacccttctctctccccctag

SEQ ID NO: 23415 - DNA, 741 bp, Zea mays
  Peptide Sequence Number=SeqID_66790
atggacttcgcctcgcccgaccccagggctcggactcaacctcgacctcggacgacgaactccgcctcgcccgaccccagagctcggactcagccttggcctcggacgacggtctccgcctcgcccgacccggggctcggactcgacctcgacctcagaagacagactcgacctcgacctcggaggagcctccgcctcgcccgacctagggctcggaccgaccacgtcacagggggggccatcattaccctacccctaactagctcaagctacggggaacaagaccggcgtcccatctggctcgccccggaaggtccagggctctctacgagaaggttggccgtgcgggagaacgggctgacgcgcaagtctcccgctctctcccacgcggacgcttgtaaccccctactgcaagcgcacccgacctgggcgcaggacaacacggaggccgcgagttttccccttttgcctgtctccttccccccttcgtgctccgtctcgcgccgacccatctgggctgggacacgcggcggcaatttactcgtcggtccagggacccccggggtcgaaacaccgacacatataacaagttatctaagtgttagaaacagagaaaagaagaaaaataaaaggattgcaaaagactggctgtgtgcagccgaagttcagctcagtctgacacaccggactgtctggtggtgcaccggacaatgtccagtgcgccaggctggtctccggtga

SEQ ID NO: 23416 - DNA, 570 bp, Zea mays
  Peptide Sequence Number=SeqID_66791
atgtataagaaaaaggagagcctgcccttttatagctcaacaataggaccttacagaggcgacttgttctctacagagtcctctgctaacaccttcgtggtagtgtgtgacgggtcccgtgggtcagccccctatggtgcgacagtgcgtagcacagcctcacccttcgtcatggacatgcgtcacttacctgtatgcataggcatacactggtatggtgcatctatcgcgtcccttccggtatacggtcactgtagaggcttcgacgctgaggtccctacgtctgggttaactggccccatacatcagtgggggtttacctgggacagttgttcgacgaggacttggtcgtctgcttcgtctcgcgaggttgctcgacaaggacttgtcgcgcctcgcttgctcgatcagggacttggtcgtctactccgcctcgtgagggtgctcgtcaaggacttggccgatgatcgttttaaggggtttcttgggctttctcttggcattccattcctgggtgcccaacagttggtttctaactacatccacggatgcattatcttccaggcataa

SEQ ID NO: 23417 - DNA, 1500 bp, Zea mays
  Peptide Sequence Number=SeqID_66792
atgggcggcgggcggaagcggcggcggcgcgacggctcggagacgccgtcgatgcacccgcggaaccgctacgcagccgccgcgccggacttcgccgcgctggcggagctctacccgtcctttcgccccttcgtctccgtctccggcagcgggcgcgcgtccgttgatttcaccgacttctcctccaccagggagctcacgcgcgtgctcctcctccacgaccatggcgtcaactggttggtgtcactggctcccccacctccctttactctgccaccttcggctctttccatgaaccctagcatgcttaggcacggtcgcgaaaagaaaatgagccctaacataatcccctgtgccgaatttgctgctgtctgtgatttatttgggattaatccgttccaaactgttgatgtcacacacttactctaccaactgataacagagaacgggaacatcttacattttgatggacagctctgcccgactgttccaaacaggtccaactacattcactggatcgaggatcttctctcctcagatctgatcccaccaatatccagctcgagtgagagagtgaagggcttcgacattggaacaggtgccaattgcatctatcctctccttggagcatctttactgggatggacctttgttggatctgatgtcactaatgttgctcttgaatgggctaagaagaatgtggagagcaatccacacctggcagagttaattgagatcagaaatgcaaatgcagcaccatctgaatctgaaactgttgtcagggaagctgccagcgagaagattttagagcctgcggaggatgtagctatgccaaagccacatatccttgtgggtgttgtaaaggagagtgagagctttgacttctgtatgtgcaatcctccattctttgagagcacagaggaagctggccttaacccaaaaacatcgtgtggtgggacagctgaagagatggtttgccctggtggcgagctggcatttattacacaaatcattgaagatagtgtttcccttaagaactctttcaggtggtttacatcgatgattggcagaaaggcaaacttaaagttattgatctcaaaggtcacattgtcagatgagcagattgaggctgcaatattgcatggggatgattatgccggttctctagaagatagctctgcaaagttacaatgcgttgtcaagggaatatcatttcgtattacagtgtttgaacaaattcctgggaccctcctaatcaaaggttcattattgaataaagcattatcaggtaccttctcatcattgttttctcggttggaggatgcgttaagggcgaaatgtctcatgacggcaagtttgtgggaataccagcatcatgtctggtgtgctggctgcttatctggatttggagaacgacttgacatgacaacaatgggggtcttgctttcaaggccccctgcagtggcacgcaccgtaaaccattccagtgacactgagtag

SEQ ID NO: 23418 - DNA, 1413 bp, Zea mays
  Peptide Sequence Number=SeqID_66793
atgcaggcggcatgcgaccgcaccaagggggcgcaccctttcgacttcgacgcatccagcatggaggcccaggcccacacgtcatgcaaccagttcgccggttgctacgtgcaagaaactgcaccgccactcgcgccactaccgtgcctcctcgactacggaaccagtaccgcggctcgaggcaaccctgcgcatgacccaacagtaccaaccaggcacatcgggtcacgggtcagtcagccgcgggagaaggcgcgacagtcaattacggccagaaatgggccggaaagtaatggcggtggcaggagaaaaagaaagcagcggtcaagtcgtcagctaagctccgcgtcccctcctagaacagagaagcaggcgacgcttcgcctccgccataatgaccgcgtcaaaaaagggaccgggaaaggggataccccgaaagggatccttctccgcgaaggaaacgggccccgagcccccctactgatcagaggttcgaaggctggcccctcggaggggttcaacagccgcctcagagcgctcgggctccgcgcccactactggtcagaggttcgaaggccggcccctcggaagggttcaacggccgcctcaggccaatcgggctccgcgcccactactgatcaggggttcgtaggctggccttcgaagggttcgacagccgcctcagacgcagagcgagggatgaccctggggctcggactcggcctcggccccggaagacgacgaactccgcctcgcccgaccctagggctcggactcggcctcggccccggaagacgacgaactccgcctcgcccgaccccagggctcagactcggccctggcctcagccgacggtctccgcctcgcccgacccaggggctcggactcgacctcgacctcggaagacagactcgacctcgacctcggaggagcctccgcctcgcccgacccagggcttggaccgaccacgtcacaggagggaccatcattaccctacccctagctagctctgactacggggaacaagaccggcgtcccatctggctcgccccggtaaaacaaataatgatggcatcccgcgtgctccatgacgacggtggctctcagcccccttacggaagcaaggagacgtcagcaaggactcgacagccccgacagctgtccttccgccaggctccagcgctcctccgacggccacgacatctcatgaacaggggccctcttacggagggttggccgcgcggggaggacgggacggcgcgtgcaggcctctcgctcccacccacgcggacgcttgtaaccccctactgcaagcgcacccgacctaggcgcgggacaaacacgaaggccgcagggacccccggggtcgaaacgccgacagccgtggacgagcatgagcgcgacagtaggtga

SEQ ID NO: 23419 - DNA, 57 bp, Zea mays
  Peptide Sequence Number=SeqID_66794
atggcgcggtgcggcatcgtggtggcagagcaacttcgggtttcattccacttctag

SEQ ID NO: 23420 - DNA, 408 bp, Zea mays
  Peptide Sequence Number=SeqID_66795
atgaggacgaggctcaagttgatgaaggagaagatcaaagagatgagccccctcaagatgatgacaacgatcgagggggagatgcaaatgatcaagacaaggaggatgaagaaccaaggccaccacacccaagagtccaccaagcaatacaacgagatcaccccgtcgacaccatcctcggcgacattcataaggggggtagaggaagcacttcaagattcggattgggtgatggagatgcaagaggagctcaacaacttcactaggaatgaggaaccaagtgggtctttccgcaacaagcaaagacgagcatggtgtggtgacaaggaaacaaagctcgactcgtggccaaggggtattcacaaagtcgaaggtttggattttgggagaaaacctatgcacccgtag

SEQ ID NO: 23421 - DNA, 450 bp, Zea mays
  Peptide Sequence Number=SeqID_66796
atggagttgcgttcctccaacgatgaggcgaaaagacggcgggtatcccccatccgggggcttggaaggacaggcgacgtttctggcaggagaagcgggcgacgcttcaccttcgccgtaataaccacgccaaaaaagggaccaggaaagggggataccccgaaaaggatccttccccgtgaaggaaccaggctccgagcctccttactgatcagaggttcgaaggctggccccccgaagggttcaacagccgcctcagatcgcgtgggccctacacccactactggtcagaggttcgaaggccggccccccgaagggttccacggccgcctcaggctactcgggctccgcgcccattactgctcaggggttcgaaggctggcccccgaagggttcacagtcgcctcagacgccgagcgagggatgaccaggggtacgttcgatacatag

SEQ ID NO: 23422 - DNA, 192 bp, Zea mays
  Peptide Sequence Number=SeqID_66797
atggcgcggtgcggcatcgtggtggcagagcaacttcggcgagaaatcaccgcctcccagagagcacaagcatttagaatggcagcagtggctggcttcaaggccatgcatatagatggatacacggtcacgtgcagggccgggccaaggcacgtgcgagccgtgcgctcgcacggggcctccaaaaattga

SEQ ID NO: 23423 - DNA, 267 bp, Zea mays
  Peptide Sequence Number=SeqID_66798
atggcgatggtcaataccaggaggggtggtggaattgatttgcctcctaaccggcacactcgaaggatatatagacaacctcagccacagcctgcagagatgaatcctcctaatcctccaccaggcggagttgacccactggttgctgctcagatggcggtgatgcagcaaatggcggacactatggctgatatgtgtgcccagatgcagcaagaacgccaggagatgcgtcaggaaagagaagatatacgccaggagttgcgctag

SEQ ID NO: 23424 - DNA, 501 bp, Zea mays
  Peptide Sequence Number=SeqID_66799
atgtcctcgcttcccctgaagcggcgaacaccgaggaatcgtccttccttttctgttttgcatctacataggagtatagggcagaagagggaggctggagaagaggaagagcgcgagaaagatgatctgttcgagctggtgtcggagcaagaaggacaagaaggcggcaccccgggaccgggttcgatgtatccgacggtttcctgcgtctggtcgtcgaggttcagcaagccaccggatgtacggttcgacccaccgttggaggacgagactgcggcatggctctgcaccatcgtcaatggcgacgaatctgcctgcaatgacgacgacggcgatggccgactggcggctaacgatggtcaggaggatggagtgccggtgatgggaacgtcgaccacgacgacggacaagaaagaaaaggctccaataacaacgacagacaagaaggaaaaaaatttggtgcagccggctgcaaaccagaatgtttgctacccctcataa

SEQ ID NO: 23425 - DNA, 792 bp, Zea mays
  Peptide Sequence Number=SeqID_66800
atgacgatcgcgcgacgcctgctccgatccaatgcctccgcccaggcaatcagcttactgaagcatgtaactggcactgcaagtttgcaaggccatgcacatagtccgttggatgcgtcagtcagacattttagttcagctccatctgcccagtctgacacaactgaagaaaatggggttcctatgtttatgacattaatgggaacaagtacctggattcttatgcagggttcctatgtttatgacatcaatgggaataaatacctggattctcttgcagggttatggtgcacagctttaggtggtagcgagcctcgattagtcaaggcagcaactgagcaattaaacaatttgcccttctaccattccttttggaaccgcacaaccaaaccttcattggaccttgcacaggagatccttagcatgttcactgcaagggaaatgggaaaagttttcttcacaaacagtggttcagaagcaaatgactctcaggtcaaactagtatggtattataacaacgcattggggaggccagacaagaagaaatttattgcacgatcaaaagcataccatggatctacactgatatcagcgagcctaactggaagtttgatctaccagcaccttttgttctgcacactgactgccctcactactggcgatatcatcttcctgatcgctgctttcattgctgaacctgtgatgggtgccggtggtgtcatccctcctccaaagacctattttgacaaggttatacactatgggttccaaaaattattgactcttctatga

SEQ ID NO: 23426 - DNA, 2661 bp, Zea mays
  Peptide Sequence Number=SeqID_66801
atggcgccgagctccccgtcacccgccgcgcccacacgcgtctctgggcggaagcgcgccgccaaggccgaggagatccaccagaacaaggaggaggaggaggaggaggaggaggtcgtggcggcgtcctccgccaagcgcagccgcaaggcggcatcttctgggaagaagcccaagtcgccccccaagcaggccaagccggggaggaagaagaagggggatgccgagatgaaggagcccgtggaggacgacgtgtgcgccgaggagcccgacgaggaggagttggccatgggcgaggaggaggccgaggagcaggccatgcgggaggaggtggttgcggtcgcggcggggtcacccgggaagaagagggtggggagaaggaacgccgccgccgccgccggcgaccacgagccggagttcatcggcagccctgttgccgcggacgaggcgcgcagcaactggcccaagcgctacggccgcagcactgccgcaaagaaaccggatgaggaggaagagctcaaggccagatgtcactaccggagcgctaaggtggacaacgtcgtctactgccttggggatgacgtctatgtcaaggctggagaaaacgaggcagattacattggccgcattactgaattttttgaggggactgaccagtgtcactattttacttgccgttggttcttccgagcagaggacacggttatcaattctttggtgtccataagtgtggatggccacaagcatgaccctagacgtgtttttctttctgaggaaaagaacgacaatgtgcttgattgcattatctccaaggtcaagatagtccatgttgatccaaatatggatccaaaagccaaggctcagctgatagagagttgcgacctatactatgacatgtcttactctgttgcatattctacatttgctaatatctcgtctgaaaatgggcagtcagacagtgataccgcttcgggtatttcttctgatgatgtggatctggagacgtcatctagtatgccaacgaggacagcaacccttcttgatctgtattctggctgtgggggcatgtctactggtctttgcttgggtgcagctctttctggcttgaaacttgaaactcgatgggctgttgatttcaacagttttgcgtgccaaagtttaaaatataatcatccacagactgaggtgcgaaatgagaaagccgatgagtttcttgccctccttaaggaatgggcagttctatgcaaaaaatatgtccaagatgtggattcaaatttagcaagctcagaggatcaagcggatgaagacagccctcttgacaaggacgaatttgttgtagagaagcttgtcgggatatgttatggtggcagtgacagggaaaatggcatctattttaaggtccagtgggaaggatacggccctgaggaggatacatgggaaccgattgataacttgagtgactgcccgcagaaaattagagattttgtacaagaagggcacaaaagaaagattctcccactgcctggtgatgttgatgtcatttgtggaggcccaccatgccaaggtatcagtgggtttaatcggtacagaaaccgtgatgagccactcaaagatgagaaaaacaaacaaatggtgactttcatggatattgtggcgtacttgaagcccaagtatgttctcatggaaaatgtggtggacatactcaaatttgcggatggttacctaggaaaatatgctttgagctgccttgttgctatgaagtaccaagcgcggcttggaatgatggtggctggttgctatggtctgccacagttcaggatgcgtgtgttcctctggggtgctctttcttccatggtgctccctaagtatcctctgcccacctatgatgttgtagtacgtggaggagcccctaatgccttttcggttcaaaatcaccagcctaacgatgtgatggagtatggtggttcccccaagaccgaattccagcgctacattcgactcagtcgtaaagacatgttggattggtccttcggtgagggggctggtccagatgaaggcaagctcttggatcaccagcctttacggcttaacaacgatgattatgagcgggttcaacagattcctgtcaagaagggagccaacttccgcgacctaaagggcgtgagggttggagcaaacaatattgttgagtgggatccagaaatcgagcgtgtgaaactttcatctgggaaaccactggttcctgactatgcaatgtcattcatcaagggcaaatcactcaagccgtttgggcgcctgtggtgggacgagacagttcctacagttgtaaccagagcagagcctcacaaccaggttataattcatccgactcaagcaagggtcctcactatccgggagaacgcaaggttacagggcttccccgattactaccgattgtttggcccgatcaaggagaagtacattcaagtcgggaacgcagtggctgtccctgttgcccgggcactgggctactgtctggggcaagcctacctgggtgaatctgaggggagtgaccctctgtaccagctgcctccaagtttcacctctgttggaggacgcactgcggggcaggcgagggcctctcctgttggcacccctgcaggggaggtagttgagcagtaa

SEQ ID NO: 23427 - DNA, 1248 bp, Zea mays
  Peptide Sequence Number=SeqID_66802
atgcgcctagggctctcctccactgtgtcgccgccgccgcccgcctcgagcgcacacaccaatctccttactggcaacgaggaagggaacagtgaagtggagcgccagcacatggacttcgcgcaggagctggagtcgcagcgcatgcagttcttcctcaacgcgcggatggagctcacgcaggctaggaaccacgcgtctctagctacggtcacgcgccccaccgctggtgtctcgtccaggaggacatccgtggttaccgacgccggtggcagcagcaatcaccatagccgttaccggatcagccatggcgacatgcaccgacacgctccacgctcccattaccagtcgcagtaccatgacaacaatcacgcgggggcgggggtgggggatgctgaaagggaaataagtcagatggaggttcgttgccaaaccagcttttgccagaatgaagatggtttccccaagttgttgagagcatgcataattcgcctcggaatcaggagccagccagagtatgatggtcgtgaattcgtcgagcatggcacaaagaaaagaagtggccgacaccccactcagattctttccgcctttcagagaaaccgtccagtttggatggccaggatgcatgcattggaagaagatgcagagaagctcaaccgtaagctccatgtggatctcaccatagctcaagcccatgtagttgccttggaaagtcgtgaagtcattgctgttgaagtcctgaagcaagccaaggatgagcatgtccagaagctgatggaggcctacttggtaacccataaccaacgtagagccctgcggatccaagagcccgcttcatccaacccagttcaacccagaagagctgaagatccccagattcttgaaggtcacccggtctttatcagaggagagaagaaggcttgggaactaccggaaggagccatagtcttggaaggaattccagtcttccctaaggctatggataagcaagagcaccccgagttctctcaagatcccccgccagagttgtttgagcccctcaccataaagaagattacagcaccgtcccgtgagatcaaaggagaagctacaagcaccccgccagcaccaccaccctctaaggagctacaagagccagtcccgcttgaagaagagttcaaccccgtcttgccatctcagtcgccgccagaagaagtcatcaacatcaactccctcttgacccatccagaagatgtctcacattga

SEQ ID NO: 23428 - DNA, 81 bp, Zea mays
  Peptide Sequence Number=SeqID_66803
atgcggcttcatacccttagagatgatgtggttttataccctcagaggtgcttgttgctcatcaagggaagtggggagtag

SEQ ID NO: 23429 - DNA, 2232 bp, Zea mays
  Peptide Sequence Number=SeqID_66804
atggcatcgctgtcagaaagtgagctgacaaaccggggaaccatgtgggagctagatcagaaccttgatcaacccatggatgaggaggcgggcaggctgaagaatatgtacagagaaaagaagttctcatcagctttgttactacggctggcatttcagagccttggggtggtctttggtgacttgggcacgtcacctttgtatgtgttctataatatatttcctcgcggaataggtgagggcgaggatgaggatgttattggagctctttccttgattatttacaccctcactctcataccgcttctcaagtatgtttttgttgtcttgagggcaaatgacaatggtcaaggatgtgtgacctttggttttgtggtttctgtagttctttctgcatcaggtggcattaaggtccagaaccagaacatgagtactgatgtcgttgtgctcgtcgctgtggtcatcttaatcggattgtttagcatgcagcactacggaacagacaaagtgggatggctcttcgcgccaatagtcctcctctggttcatcctgattggaagcgtcggggctataaacatacacaagtatgatagctctgtgctaaaagcatacaacccgatgtatatataccgttttttccgacggagaaagaattctgacgtctggacgtctctgggaggaatcatgcttagcatcacgggaactgaagcattgtttgctgatctctgtcactttcctgtgctggcaattcagatcgctttcaccttgattgtgtttccatgccttctactggcgtacacagggcaggccgcctacataatttccaacaaaacacatgtggctgacgccttctaccgatcaattccagctgccatatactggccggcctttatcatagcaactgctgcagcgattgttgccagtcaagccaccatatccgcaacctactcgatcataaagcaggctcttgcgctgggttgcttcccccgcgtgaagatcgtccacacctcgaagaaattccttggacagatctacatccctgacatcaactggatccttctggttctctgcattgctgtgactgctggattcaagaaccaaagccagataggaaacgcatacggtactgcggtggttatagtcatgctagtcacgacattcctcatggtgccaataatgctgctggtatggaagagccactggatcctcgtggtgaccttcatcgtgctgtcgctgatggtggaggttccctacttcgtggcctgcatactgaagatcgaccagggcggctgggtgccgctggtggtggcgacggccttcttcctcatcatgtacgtgtggcatttctgcacggtgaagcggtacgagttcgagatgcacagcaaggtgtccatggcgtggatcctgggcctgggcccgagcctgggcctggtgagggtccccgggatcgggttcgtgtacacggagctggcgagcggcgtgccgcacatcttctcccacttcatcaccaacctgcccgcgatccactcggtggtggtgttcgtgtgcgtcaagtacctccccgtgtacacggtgccgacggaggagcggttcctggtgcggaggatcgggcccagggacttccacatgttccggtgcgtggcgaggtacgggtacaaggacctgcacaagagggacgaggacttcgagaggatgctgttcgactgcgtcctcttcttcgtccggctggagagcatgatggagggctactccgactcggacgagttcagcgtgccggagcaggcgccgcctggctctggctccggctccggccgcggcggcccggcggcggcgttcctgcagggcggcgagcggacgtgctcgaccatgtgctccaacggcgagctgagcttctcgtcgcaggactcgatcgtgcccgccgcgcagtcgccggcgccgagggggctacggctgctgcagtgctcggcgtcggcgtcggcgtcggcggggcaggcgggcagctgcggcacggtgggcgacgagctcgagttcctgaaccggtgcaaggacgccggcgtggtgcacatcctcgggaacaccatcgtacgcgcgcggcgggactcgggcgtcgtgaagaagctcgccgtcgactacatgtacgccttcatgaggaggatgtgcagggagaacagcgtcatcttcaacgtgcctcatgagagcctgctcaatgtcgggcagatatactacatctga

SEQ ID NO: 23430 - DNA, 279 bp, Zea mays
  Peptide Sequence Number=SeqID_66805
atggagtcgccgttccgcgcggacctgctgagggggaaggcggcgctggtcacgggcgggggctccggcatcggcttcgagatcgccgcgcagctcgcgcgccacggcgcgcacgtcgcactcatgggccgccgccgcgaggtcctcgacaaggccgtcgccgcgctccggtccgagggcctcaggatctcgtcccctaggggaaaagatcttaaggtgctccgggtcgacaggtcacccggggtgtccccagacgacgtggagtcgcctaggaattaa

SEQ ID NO: 23431 - DNA, 797 bp, Zea mays
  Peptide Sequence Number=SeqID_66806
atgggaccaaaaatttcagaaactataaaagggaaactaagcttcggtgcaaaggttcttcaagctggcggtattgataaagtcttcagagaatactttgcagttgagaaagatgagaaactacggaaggctttccagtgctatctttcaaccacagctggtccaatagctggaatgcttttcatctcaactaagaagattgctttccatagtgataggcctttgagtttcacgtctcctaaaggaggcagtacaagggtgccttacaaggtgttaatccccacagagaggatgaaaagtgcttcagtgcgggaaaatttatacaatccagatgagaagtatattgatgtagtcactgttgatggctttgatttttggttcatgggctttgtcagctatgagaaatctcaatggtggcctaaagccctgaagagctttgcaagtaggatacaacatttcctgaagatccttggaactagagaggaaaactggaagaagccttctaacatgagagccagggaaaaaataagtggcagaggccgttcttatgatgggaggttgcgctcaagatcacctgggttgaacgattctcctaggggtagatcacggtcccaaagccgaagctactcgccagcacttaagcaaaagcactattcaagctccaccgattttgagaacgacagcgacttccgtcccagccgtgccaggcgggattcatacagcggccagatatccgtcatccttatcaccacgtcaaagcatatcagcaggctcataagacgccccagcgagccata

SEQ ID NO: 23432 - DNA, 522 bp, Zea mays
  Peptide Sequence Number=SeqID_66807
atggccgcgattgaagctccattaacacaagaaacggacgacggtttcagcaacgacagcgcggctcgcggcatcgggcgcggcttccacgcgtgggcggctgtcggcgtcgcgctggctgggggctgctcgcggtcgtcgcgcctgggcgcggctgccgcggtggggccgggcggggcgtcgcgcgctgcttgcgcaggggctggcacggcagagagcggtgtcgtggctccttgcgcgcgcattattgttatcccttatgaaagcaagggaaaaagaggaaagctgctatctcggcgatgtcacggaacctcccaagaaacaacaaaactcggctgtttcatcacctacaacaacatgggttcgaaaaccctgagtacagaagtgtacaaaggaaaaagacttctcaaggatatgccggcttgtgagattcaaggcaaggctgatcaagaatcaaagactctatttgtagaaatgcttactaacagtggatccttaaaatccagttttatcaccgcttga

SEQ ID NO: 23433 - DNA, 969 bp, Zea mays
  Peptide Sequence Number=SeqID_66808
atgggaaagagggggagcgatggttcacactctccaaaccacccgcgtcaacaccagctatgcccctcagccccggtagatcccggtctacccagtggtagtcgaggaagttccggcgcatctccctcccgtccgagtggagaatgtaatcaacctggagacagctcggaggagcagctgccgacccccaccccgttggccgagtccctggccttcgtagctgggtcatcgacgtcagcatcgtctgcaccagccttccaagcacctgcacctggaggcgacgaccccgacgactccggagacggtgatgacgaggatgacgacgacgaagacgatggagaagacggacacgtcaacgaggaagctgactacgcccagcaggacaacttcatggggtttggtcctgttgtcgaacattacacatcaatgttcgagacggggcacttccccaacttgttgcaggaggtgttgcatgcgctaggcacctacgtccgccccctgtacgagacgaggcaagtgagcgagcctccccgggcttgctattacatcacacgcatccacgtcagggtgatggatgcaggtgacaggggattcaggactctgtctgctcatgagtccctgataccactatctacctacgctgcctcggtcagcgatgctgcccgtcggaccctgtgcgtctgcgtggagaaaatccagaccaacatcgtcccaggtgagcctggtgaggaccgcctcaacaccctagctggtgtagtggccggtctcaacaccgacctggacagtgccaccctggatctctacagggtgcacttggagctggagaatgcccacgccaggattgcagccctggaagcccaactgcaaggactggatccgccagaagctcaggtccccgccgtggcgttgtctcctccccgcaagaggctgcgctatggagagcccggatccgtcactaggctgctttag

SEQ ID NO: 23434 - DNA, 969 bp, Zea mays
  Peptide Sequence Number=SeqID_66809
atggatcctggcacacatatgatggttcacactctccaaaccacccgcgtcaacaccagctatgcccctcagccccggcagatcccggtctacccagtggtagtcgaggaagttccggcgcatctccctcccgtccgagtggagaatgtaatcaacctggaggacagctcggaggagcagctgccgacccccaccccgttggccgagtccctggccttcatagctgggtcatcgacgtcagcatcgtctgcaccagccttccaagcacctgcacctggaggcgacgaccccgacgactccggagacggtgatgacgaggatgacgacgacgaagacgatggagaagacggacacgtcaacgaggaagctgactacgcccagcaggacaacttcatggggtttggtcctgttgtcaaacattacacatcaatgttcgagacggggcacttccccaacttgttgcaggaggtgttgcatgcgctaggcacctacgtccgcccccctgtacgagacgaggcaagtgacaggggattcaggactctgtctgctcacgagtccctgataccactgtccacctacgctgcctcggtcagcgatgctgcccgtcggaccctgtggtcgctcagccacacctaccggcagcagctgcagaacacgaggttcaggcatcttcctcagcgtctgcatggagaaatccagaccaacatcgtcccaggtgagcctggtgaggaccgcctcaacaccctagctggtgtagtggccggtctcaacaccgacctggacagtgccaccctggatctctacagggtgcacttggagctggagaatgcccacgccaggattgcagccctggaagcccaactgcaaggactggatccgccagaagctcaggtccccgccgtggcgttgtctcctccccgcaagaggctgcgctatggagagcccggatccgtcactaggctgctttag

SEQ ID NO: 23435 - DNA, 948 bp, Zea mays
  Peptide Sequence Number=SeqID_66810
atgttctggaacaggtgcctgtgcatgccagaccccaccgcaccactgctgccgcccaagaggatcaattcaggtgacctgtccaggtgcccgtgggacgagctggtctttgaggacgagtctgagaggggcagcaacgcactgctcgcgcgggcgtggtcaccagggtggcagaacgccgacaaggcgctgacggccttcctcaacggttcgctgatggactactctgtgaaccgcaagaagatcgacagcgccagcacgtcgctgctgtccccgtacctgcacttcagcgagctcagcgtccggaaggtcttccaccaggtccggatgaagcgcctcatgtggagcaacgacggcaaccacgccggcgaggagagctgcaccctgttcctctgctccatcggcctgcgggagtactcgaggtacctcaccttcaaccacccctgcagccacgagaagcccctcctgtcctgtcgcacctcaggttcttcccctgggtcgtcaatgagactgtccggtgtgccaccggacatatccggtgcaccagaggactccagcgcaaactcttcgccttcgggaaaatccagaggcaactccactataattcaccggattgtccggtgtacactggacagtgtccggtgctccaaggaagtgcggcctcaggaactagccagcttcgggaaaatgcaacggctgctccgctataattcaccggacatgtccggtcgcgcgcagaggtcaggcacgcccatgctggcgcaccagacactctacagtacatgtccggtgcgccaccggacatccaggcgggcccagaagacagagctccaacggtcgaatcccaacggctttggtgacgtggctggcgcaccggacatgtccgggaagttttattcccgggttgatttgagaagagaagctcactcggttcgagggaccgtttga

SEQ ID NO: 23436 - DNA, 666 bp, Zea mays
  Peptide Sequence Number=SeqID_66811
atgggtggtggactggacgcaggtagccacaaggtgtacaaggaaccagagctatcacagcgggcgaggagactccgcgtaacgagatccttcacaaacaagccaaaaggatcaaactcaatagagcaagagttatcgatgcgtgagaagggcgaggtcgcgccatcaggagtaggaggaagtcggattaaggaggatgggaaccagatatcatatgttaacacccgtcgcctggtcgtggaggttggtgatgacggccttggggagatcgaggcttggagagccaatgagatggcgcttagcctcgacaagctgtggggcaagatcatccacccgcgtgcattcgtgctcccaggcaaggactacaacccactcccattcgcgggcagctaccacaggaattgggagggctatggcaagggtggagtgggtagccacaatgtcgaaggtgggacgaacagtcggcgaaggcacaaaagacaaaaggggctaggacgaggcacccaagatggtgggagacgcgcccaggatagaagcgacgtccaggctgcccacgtccaagcccgacgtgggtcgtggcacccaggccagcttcagtcaggcccacacctaggccagtggccctgctgggggcagccaggccaacaagggccgcctaaggcctag

SEQ ID NO: 23437 - DNA, 2508 bp, Zea mays
  Peptide Sequence Number=SeqID_66812
atgaagtccatggatcgtcctccggctaatcctaaacgtataaccatcgagtcaagccaagatttgtttattgttgagataccgcatttggcgtcaactggagaccctcccaacacaaatcatgacggtcatcgtcttgcacccgccgagagaccatctgttattcatgaatccactgaccaaactggaactggtgatgacgacgatgattttatgacacctatgaagaagcgtaatgctactggaattcctaacaaaatcttacagaagagatgcacaaagaggatgaaagtagtcgaaacttcacgacagaggctcaatgtgagatgcaacccccaggatgttattataaccatcaagatattgaatgagaggcaacgacaagccgttgcaagaaaagggttttccaatatcctcgacatgacccttgatgcactgggcagccgatctcatctttggtggttgatggataagttggaccacaaggacatgacaattcgccccggtcaaggaaatgaactaaagattacaaaagaaactgtccacctaatccttggcctaccgaatgccggcggtggtaagccactaggcatcgatgaagcagtggcgggcaataacctgagggctgaacttggtttgtctaaagatgagttcattgttgcaacactgcaggaccgtttaagaaaaggagacgacgatgacctctccattagatgcttctttttgttattattcaataggttgttgttccccacttccagctggggcatatctagccatgaggtgttactgacggaagaaattgatcgcttccatgagacagactggtgccacttaattttcaatgacctttgcgaagctgctcataagtggcatacaagaagcactactaacgtgtccacgacgatatatggatgttcaattgtcatactattatattatttggaccacttgcatgacgctgcaaccccccacaacaaacatggcacacctcgcataaaattcttcgataaaaacattatccaagcactgacaaaagctgataagaggaagccacgccaaagcggggaaccatttggccattgtgtgttccgaagcagctctgaaacttgctattctactgtccctactgtccatgtacaatccgagcaaaggggtaggaaaaacatttttgatgtccctcgtcccgacccttgtggtcatcataccattcatatccagcttccattgattaaggatatgatttcaagtaagatcaagcagctccaagcacgtgaccggccgaaattcgtagaaaagttggttgagcacgattccgaagttggcagagcgtgttccaccatcaaaaatactcttaccaagatggttgtgaagcagtatgaattagcggacacatttgctgagatgatcgatgatgtccttcgcgcggagtctgtcgacacacacaatgatgcggaagcgcctcaaccagcaaaaccatcagatacatctcatcatctatcgtcagaggcatacatacattccggtacccaaaatactccggacccgactatgccaacttcgcagccgactacggagttgacaggcacccagttcgaggaaatacatgaaatgcaacaacaaatgcgtcgtgcatttgagggctgccctgatgatttggacgttactgcgcccatggagacgaactcatactcaaactctaaaaagcaggattaccattttaatgttggcaacaaactgttgagggacataaacatcccacctcaacatataccagactgcaacattatgagctcatatacgtcttcacacttaccgatgtttgatgccacaccgcaaaaacatggaggtgacattgatgcatctcatgacactcaaacttacacgggcaccctttttgatcagacacctaatggtcattgtttcattcagtgttttcgcgatgatgatgcaaatcatcgcccgtccatgaacaacaacatacttgtactggacgtcaatgttggtgctctgctcaactttgaggagcaggaacgccacaacaagtcccctcagggttataatcaagttatccatgatgattacctggacaagacactgcctcagctggacaactgtgttgactgcaaatcgtttcggtgcattcacattttagattccaatccatatggtccagaactaggtggtactacgtggaagatgtatcattacgcccaaatggacataggttcaaggaaattaccatgggctagggttataatgaataggttgaacaaatctttgcaacaagtccggcccaattcacgcattcctaaatttggaaacttcccaatcgacatgccacctatgtgtcccaccatgaaagcgggatctaacaactgtggcttcttcatcatttggtacatccaatactatgactacatggatggttctatcaaggcatatatacaactagatgactcgcgtgacctacgatctctttctctatactacctcatattttcatag

SEQ ID NO: 23438 - DNA, 174 bp, Zea mays
  Peptide Sequence Number=SeqID_66813
atggatgaaattgtcgacaaggccattagcatcatgcaggttacctcaaagcatctcatgtatatccgcaaggagaagctgcactcagggaaggcattgagtgcaatagaggtgaaggaattgcacgaagcccttgaagcgattgatgaaggatgcaaagattcttgggagtaa

SEQ ID NO: 23439 - DNA, 243 bp, Zea mays
  Peptide Sequence Number=SeqID_66814
atgcctggcgcggcccgcccgcggctgctcgcgcgccctgccttcggcgtgccagagaacagtttggttgaggaatccgaagaactcgcaggagaagcccctgagcagcagctggtggcaatgagattgatggttcttggtattgactctggtaatggttgtccgcattgcaaccactgctcaggagaagatgaagccgtggaaggagacttccaggagttccaagactacgacgagttctag

SEQ ID NO: 23440 - DNA, 354 bp, Zea mays
  Peptide Sequence Number=SeqID_66815
atggcctctaatccaatatgtaaaataggaagtggaggcgcaagaacttgggcagatgaacacggccacgtgttcgacgcgccctggcaacgccatagcacgcccttggtgctcagcccgcgtcgtgccaacccagcgcccacgcccatgcccgcgcccgtggctataaaagccaccccggcctcgaccgtacacccccgcgcgtccctgacccagcccgagcacgagttcgaccgcgtttgcccagagaacggcgtgccagcggccgcgcaagccacgaccaccgtagaccggccaagccagccattctctgccccatcggaccctcgggttagcttcttcggacctcagtga

SEQ ID NO: 23441 - DNA, 822 bp, Zea mays
  Peptide Sequence Number=SeqID_66816
atgcagcgagaagtaggcgtgttagtattctatgtgtccaggagacaaaatggaaagggcaaaaagcgaaaggaggtggagaacactggtttcaaactatggtactcaggaatagtggcaaacaaaaatggagtaggtatcctgattgataagaccctcaaggatggagtggtggacgtcaaaaggcaaggagataggattatcctagtcaagctagttatgggggatgtagtcttgaacattataagtgcatatgcccctcaggttggtctcagtgagagcgagaagaggaagttcttggaagacttagatggcatggttagagcggtacccaccaatgacaagcttttcataggagcagatctcaattgtcatgtatgttcaacaaatgtaggttatgagctggctcgtggaggtttcaggtatggtagtaggcatcaagaaggagaggatattttggactttgctgtagcctacaacctagtgatagccaacactttcttcagaaagagatattctcatttcgtgacttttagcagtggccatcgttcgagccagatcgacttcgtgctcataaggagagaacataatcaagcttgtttggattgtaaggtgatacatggagagagtgttgtgccccaacataatcttgtggtggctgacttccgttttcggatcagtacacatagggttaaacaagccaaaattgtgaggatgaagtggtggaaactcaaaggggagacatccaaagtttttaggggaagagtttttgtggagggcgcttggtccgaagaagaagatgcaaacaacatgtgggtgtag

SEQ ID NO: 23442 - DNA, 456 bp, Zea mays
  Peptide Sequence Number=SeqID_66817
atgggcaagagcaagaaaggtggtagttcttcgcatcattctggtgataagcggaagcgtgagccgactcctcccttggaggaggagttctcctccgagtcagagggctcactggtccatgcctctcccctggcgtcgtctgatgactcagacgactcccaggggatcgccgcagaggtgtggacctacatccgggccgtcgagcacgccgggctcgagggctcggatgagtcggagtactccttggacgaggagaactcctcggactcatccgaggagagcggcggtgacagcgacggcggtgacgacgatgacgacggaggcgatggtgatgacggaggtgaaggcggcgaaggtgacggcaagggcggtgacggtagcggcaagggtggcagcggcgacggcggcgatggcagcaagggcagcagcaggggcagcaacaaggccagtggctag

SEQ ID NO: 23443 - DNA, 54 bp, Zea mays
  Peptide Sequence Number=SeqID_66818
atgccgccctccaccgtggtctacgctcttgctcgcacgattcgcgatttataa

SEQ ID NO: 23444 - DNA, 510 bp, Zea mays
  Peptide Sequence Number=SeqID_66819
atgggtgcaaggaatcggtcggagactcactggatagcttggtccacgcgcggcggcggaagaccgaagtccggtgaggtcgatctcgggcctccagtgaagtccggcctggtccgagggcttggcgagcttcacgggctactggcggagctagccgaagcactggctcgacttgagggtggctggagtgggctagccacggtggccgaagctctggcgacaatggcgggcggaattgagctcgccggagctaagggaatggggctggccggtgaagatgagtgcggggcgaagctagggacagggagttgtagcgtcaccaaggtgccagtgtcagaatgcctggtcccgaggtcaaactgcgccaaaaccgtgtcaaatgaatttggtttgagttcaaacttttccaggatgtgttcaagggaatttggcacaactttgatatttggatctcctggctttgagtttcgaaaaatagagaacacagatgatccttgggaagaggtctga

SEQ ID NO: 23445 - DNA, 150 bp, Zea mays
  Peptide Sequence Number=SeqID_66820
atggcggctaagtcgaagctgaggcgtgggtcccatgactcggtgaccgacaccctaggcacaagcgccacgcaggatggtgaggcaggcgcgtggaaccatattttcgacgcaaggatcctacggccagagcgcgcagctcgaatttga

SEQ ID NO: 23446 - DNA, 549 bp, Zea mays
  Peptide Sequence Number=SeqID_66821
atggccgtggtaggaggtgagcgattgccttcttcttctataaatagtgtgcttgcttctccggcatcttcacatatcttactgccacttgttgtttactctcttctcttctcttctactccaccatgggtaagagcaagaaaggtggaagttcctcacaccattccggcgataagaggaagcgcgagccgactcctccctcggaggacttcggcgattccgagtaatcagaggaggagttcgccggtccatgcctctcccccggcgtcatctgacgactcagacgactcccaggggatcgctgcagaggtgtggacctacatctgggccgtcaagcgcgccgggctcgagggctcggatgagtcggaggtctcctcggacaactcctcggactcgtccgaggagggcggcggtgacggcgatggcgagggcgacgacgatgacggaggcgacggtgatggcaacggcgacggcggcgaaggtggcgacaagggcggcgaaggtgacgacaaggacggcagcaagggcagcaacaaggccattggctag

SEQ ID NO: 23447 - DNA, 456 bp, Zea mays
  Peptide Sequence Number=SeqID_66822
atggaattaccactagacgcgcagagcagcggaagacgtctcgatgtagacgaacgcgttgagcagtgccgtgtagtcgtcggcgtccttcacgtcctcgcacggttcgtcctagtgctccagatgcagcacctccgaggggcgcacctcggcatgggcaggggtcgcgcgctgccgggggcagggggtcgcactgccgggggccggggagccgcgccgccaggggctatgtcgctggggctagggagccacgccgcgagggcgccagaggaggccgcgctgccgggggccagggaggtcgcgccgccggggcctgggacccacgtagggaagcgcgtggggggcagggacgtgcgcagggaaggggaaaaggggagggagagggggagagagagaggagaggggagctcaccttgggatccaaaaccggcgataaccatccagcggatcacctag

SEQ ID NO: 23448 - DNA, 381 bp, Zea mays
  Peptide Sequence Number=SeqID_66823
atggatgttttgataattaggaaccttggagaggaccagcaaggacttggtaaaggcctaggtgttgaggaggagcagcaagggtgccacaacaggaaggagatcaagtccgacttggctgcgactccatctcgggaattagccctcgtggcgaggtcaatcgcgcagtgcatggttgataaccagaggagaagtggcaacgacgaagaagcaaggatccctacagacttcgatgaatgtgttagccgccaagatcttgaggcaaacaacaagctcctgaaggagcaaatggaggagacggtccacaagtcagtgcatgatgccttcattgacatgaaccttggcaagacttatgagaggctggatcgacgattgtcctag

SEQ ID NO: 23449 - DNA, 585 bp, Zea mays
  Peptide Sequence Number=SeqID_66824
atgtccgccgaagatgacgttgacatctccgtcgacgcgtgggaaggctccacctccttccccttcctattgttggggttgtcgaggttctccaagtccccctcatggtgggggaggcgacagaggttggaagggtcggccgttccccatggaatgcttgaagtctctgcagttccgaagggtgtggcacatgtccttgtggtacgggcactgggcgtcgaggatgtcatccagcgtgcgttcgcctccgcgaggtcctcctcgggcgcgagaggcgggtggtccggcggcgtggacttcttcacgaggcctcttctcccaacgtttgtcgggttgttggttcatgtcgcgtcgtggtgccgccggtgcaggctttgctcctccgatgaggtcctaagctcattcgtcggcggtgatgtagaggtcggcttcccagaacagctgctcggaggtagtcggcgctttctgcagtatggcgcggacgaaggccgagtcattagatccccggtagaagtcctcgatcactactgcttctgcgacctcggggatacgatttctcatggtctgaaatcttttgaggtatga

SEQ ID NO: 23450 - DNA, 663 bp, Zea mays
  Peptide Sequence Number=SeqID_66825
atgggtccacaggtcccagtggggggcaatccccaaaaatccttcgcaaaccgccgcgaagatggctgcttgcgtgatggagttgggactgagattgtgcagctccaccccgtagacgtgcagaatcgcccgcataaaacgacttgccggcactccgaacccccgctcgtgaaaagagatgaagctcagcacataccccggcggcggggacggggcggcaccgctcggaggggccatccactccggctgcgagtcaccggagagaggacgaagcaaaccatcagcaacaagggcctccagatcatccaccgtgacggtggagaaaggccacgggtcgcgcggcgaaacaacggtcacccggtcggccatcaccaagcagaagaggtggcggcggagaggacaaggttcgaaggctggccctcggaagggttcgacagccgcctcagagcacccgggctccgagccctcctactgatgagaggttcgaaggctggcccctcggaagggttcgacagccgcctcagagcactcgggctccgtgcccactactggtcagaggttcaaaggctggcccctcggaggggttcgacaaccgcctcaagccactcgggctccgcgcccactactgatcaggggttcgtaggctggccctcgaagggttag

SEQ ID NO: 23451 - DNA, 294 bp, Zea mays
  Peptide Sequence Number=SeqID_66826
atgggaaactccgcctcgcccaaccccagggctcggactcagcctcggcctcggaagatggtctccgcctcgcccgacccagggctcggactcagcctcgaccccggaagacagactccgcctcacccgaccctagggctcggactcagcctcggcctcggaagatggtctgcgcctcgcccgacccagggctcggagttgacgtcgacctcagaggagcctccgccacgcccgaccttgggctcggacccgccatgtcacagggaaggccatcattaccctacccctagctag

SEQ ID NO: 23452 - DNA, 708 bp, Zea mays
  Peptide Sequence Number=SeqID_66827
atggcgtacctcagcatcagttggatccaagacatgaagggagcagcagcggcagtaacgaccccatcggagatctcgaagcccaagtggagcagctttggacggagctacgtcaccgaaacaggacatctgcaagacgagcttgctgaacgggatttgacaatcgattgggctatcaattcactttcgattgcttgggaccgggaagccaaagctcgtgctggtgtggcagagcttagtgcggccattgacaacttgcagatgccatccaggactcgtgcacatgatagtgcgggtatgtcccatggtcgggaagacacgcccaatccatcaccggtaccgccaacgttggctgagtctattgctgccttggtcaatgcgaccgccgacaacacccgctttttacgtgaaatagtgggaaatcagttccagcaacaaggcggaagggcttatccgcagggaccacgtgagacttcatacctggacttctctgaaactcgtcccccactcttcattaaatctgaagacccactggaagtcgacgaatggtatgaaattgatcaagtaaatactgacctgaaaaagaagaattgcttcatgagaggcctcaacgactggcttcaaagaaaaatggccacctgccttgatctcacttacagcggggctgtcagcacagcgctggcattagaagctaagaatacaggctaa

SEQ ID NO: 23453 - DNA, 969 bp, Zea mays
  Peptide Sequence Number=SeqID_66828
atggagagtcatgatctccgggcagaaagggaatcacggcttgtgggtgacaatgagattgatggttctgattatgactacggtgctggtaagtggtattctttccgtttggaaaggatggctcgtcttagacacactgcacgaaagtccgtcatccccttcttaccctcccgccttgctgagcgtccgcttcgtcgtcccgttgctggacagtccagccacttggagagactgcaccaccgcctgcatgaggagcaggagcgtcgacgacaggagcaacagggttcttctttctcgctccaccaggagatagagtccgtgaggagctgctcccctgtgcttcccctggaggcgccccctgcaccaccactgggcgccctagcttctggagtagctgctggaggagacccagacgacggaggtggcgacgacagctcgagccacgacaccgacttctctgctgaccaggaaccggaaggatgggttgctcgacccatcactcgcgacgctgctcgcgggtgtcacttccatgatgcgctcgacaccctgctacgtcgggcacttaaccggcgtacctggtccatcgagtatcgctgtgtggtctaccagcatagtcgcgggggtctacccggaccgctgggaggtgacctgcttggtgcgccgtccggagaacagtctccaagcacaggaggcgtgattgtttcacctgtcagtgaggacaatcctaggttgagcagcacagtcaacctagccgtcgtgctaaacacggagctggaccatgcgctagacgagctgagtagggctcgtgctgagatcgccctgctgcgggctgagcgcgcggagcgtcgtcacctggatgatggttcccccgctcccgtcgggactcagcacccgtaccgctcacctcggcgtggacgccagtcttatggcaatcccgactgcaagaccaagataaatctagaaccatag

SEQ ID NO: 23454 - DNA, 174 bp, Zea mays
  Peptide Sequence Number=SeqID_66829
atggagagtcatgatctccgggcagaaagggaatcacgacttgtgggtggcaatgagattgatggttctggttatgactatggtgctggttgtcagcattgcaaccactgctcaggcgaagatgaagctgtggaaggagacttccaggagttccaagactacgacgagttctag

SEQ ID NO: 23455 - DNA, 153 bp, Zea mays
  Peptide Sequence Number=SeqID_66830
atggacaccagcgtccttctactcctccttccccatggctgtgcacctctctgcagcaacccatccgcaacgccgtcgaccctcggtatggcacttagggtaattgtgatgaagtggaatgtttcagcacatcatccaccaggtgttcggtga

SEQ ID NO: 23456 - DNA, 204 bp, Zea mays
  Peptide Sequence Number=SeqID_66831
atgtggaaggatcgggtggagcatgccaaggatatctgggccatctacccaggacagactgcgcacttgaccgagatccaggatatggaggccaacgaggacgtcgacatcgagggaggagatgagcctgcctctagtttggacactgctggctcagggagaccaccttcctccgagtcgagtgttgcctcgttcgctcactag

SEQ ID NO: 23457 - DNA, 1479 bp, Zea mays
  Peptide Sequence Number=SeqID_66832
atgaagcagccgaggggccggcaggagccgcgccgggtgggcaacgccgccatggtcgtcaccatggtcgtctccctctgcgtcctcacgtacatcaaggcgcgatactgctccaaccctttccgtacgtctccgcctcttcgattcctcctcctgcttcttcgattcctcctcctgcctgccttctcctccgtccatccactaaccgtccccaccgcgggctacgacgttgcagccaaggcggtggcggaggtggaggtggacgaggactacgacagcacgcggtacaagctgacgggccccgtgggcgaggaggacttcgacccgtcccgccccacctgctacaacaccagcaagcggtcggagcggtgcgccgccgtgggcgacatccgcgtggacggcaaccactcgcggatctacatcagcccgctgtcccgcgagtggcggaccaagccgtacgcgcggcggcacgacgccgtggccatggacgacgtgcgcgagttcacgctggtccccttcggcggccccaacgacacggccgtgccgccgctctgcacgcgcacccactccgtcccgggcttcctcttctccagcggcgggttcgcgggcaacctgtaccacgactacgccgacgtgctggtgccgctcttcgccagcaccaaccacctgggcggggaggtccagttcctgctggccgacatcaaggactggtgggccgacaagttccgcccgctcttccgccagctctcccgctacgacgtcatcgacgtgaacaacgaccgcgaggtgcactgcttcccgcggatcatcatcggctccaccttccaccgcgccatgggcatcgacccctcgcgctcgcccggcggcgtcacggtggccgacttcaagcgcctgctccgccgcgcgttccggctggagcgcgccgtcgcgtcgcggtcgggggcgccccggcgccgggaccggccccgcctcctcatcatctcgcgcaagagctcgcgccgcttcgtcaacgagcgcgccatggcgcgcgccgcggcggccgcccggttcgacgtgcggatcgccgagcccgacaaccacacggacatgcccaacttcgcgaggctggtgaactcggcggacgtgatgatgggcgtgcacggcgccgggctcaccaacatggtgttcctgcccagccgcgccgtgctggtgcaggtggtgccgttcggcgggctggagtggctcacccgcgtcaccttcaaggaccccgcaagggacatggacgtcacgtacatggagtacaacgtgtcgctggaggagagctcgctcagggacctctacccggaggaccacttctacctgaagcacccctacgacgtgcacaagaaggggtgggacgccatcaagacggtgtacctggacaagcagaacgtcaggctcaacctcaccaggttcaccaggacgctggagcaggcgcgagatctcttgccgacgccatga

SEQ ID NO: 23458 - DNA, 438 bp, Zea mays
  Peptide Sequence Number=SeqID_66833
atggccacctcaatacgtgcgccattgcgaagaggtcctcgcccccgtcttcctacggggggcggcaacgaggccattaaagccaaagagttggaggctcggcggcaggtggcgctggtggtctcgccagcggaggcaatcacctctgcagcgggcagcctcaccagaggcggcgaccacctcagcaccaacgacagcagccacctcctcaccggtggcttaccggagatggcagccgtctcaccgcgcatgaagagggtgcatcagagcagtgcggcacggatgcggcagacctacgcacggcgcgactgtcgcccatgcggtagacgaacagccgtgccccgcttggcggcgctggaggcggcgccaaagccatccaagccaaggagccagacacgcggcagctgccggagcctgcggccggccggccccgcgtag

SEQ ID NO: 23459 - DNA, 162 bp, Zea mays
  Peptide Sequence Number=SeqID_66834
atggcaccggcgtcagcctcgagatcggttgttgaccccgtcgagtgcaacacgatgctcaagcagaagttggagaaggacctcaatgccatcgccatgtggagggttggaagagatccaagacttgagcatgtatatggatctgttgacaaagaaggatga

SEQ ID NO: 23460 - DNA, 92 bp, Zea mays
  Peptide Sequence Number=SeqID_66835
atgagctccacggcggagctcccgccggtgcgctatgaaccagtaatcccgagtcccaaatccatggccgactggtccaacgcgatgcggag

SEQ ID NO: 23461 - DNA, 102 bp, Zea mays
  Peptide Sequence Number=SeqID_66836
atgggcatgggaagggagaagctaggacggcagtcagctgcccatgaatttgagataggcttatatgataactttggaaagtggtggaatgtcacattctaa

SEQ ID NO: 23462 - DNA, 115 bp, Zea mays
  Peptide Sequence Number=SeqID_66837
acattacggtacaagtggctatgagatcgatggttctggttatgactatggtgctggagaagatgaagccgtggaaggagacttccaggagttccaagactacgatgagttctag

SEQ ID NO: 23463 - DNA, 363 bp, Zea mays
  Peptide Sequence Number=SeqID_66838
atggtctccgtggccagaggcctttgggcagccattggtgaaattgacttaggggaagtgatcgggaatggttcaattccatgcccgctgctcgggagcaccggtcttggcctcctccggccggtctacatgctcgccggagctcggctgcgctcggcgccgtcggggacctcatcgcgtgaaggaatagaacttcaaggacctctgtgcaaatcgtcagtgactcataagaatagtaaccgaacccaactccagttagtcaaaaccccgagggcccttctgcaagaaaacgaagaagaagtcgaagtaaccgaagagaagacaccaccacctttggaatctcaggtgataggagttcattga

SEQ ID NO: 23464 - DNA, 576 bp, Zea mays
  Peptide Sequence Number=SeqID_66839
atgggcgagagggacgaagctgacaagcgggccctggctgccagcgagaggaagcagcgcgagagggagggggacgaggcgctgacggacggggcccggatgtcagcgagagggagcgaaactcacctccacgtgttcgacgccttctgcccgcgccagagcacgctcgcgcgcgtccccgcatgccccgcgccgtgcccgagccaaacccgcgccgtggcccgcgcccgagcttataaagccctcccaggcttcgactacacccttccgtgcaccctccacacctcaccgaagttagctcgtcgccgtttgcccgtgcgcagcgagcccgcggccgcccaacccctctgccaccatagaccggccagcagagccatctccaaccccgtcctgccctcggagaagcttgtgcacacctctgtgaagctccccgagcaaggaatcggagtttccttcgccggagaagccagtccacgctcgccggagctctcgacccccgccggagtacatggactgggtaaaccactcaaccacccttcgattccttgtgcacacagtcgctgcgtgaccccgtga

SEQ ID NO: 23465 - DNA, 141 bp, Zea mays
  Peptide Sequence Number=SeqID_66840
atgggggcggagcaggggtacgaagatatgcaggggaccttcagggactccgaggtgttcgagtttgtcgggaaagtcctgcagtccgtgcggatgatgcaatatagtagctctgcttgtacctcaactaaggtctcctag

SEQ ID NO: 23466 - DNA, 471 bp, Zea mays
  Peptide Sequence Number=SeqID_66841
atgggcaaaagtaacaaacgcaagcgtgagccgactcctccatcggaggacttcggcgactcggaatactcggaggaggagttctcctccgagtccgaggggtctccggctcccgtctctcccccggcgtcgtctgatgattcagacgactcccaggagattgccgcggaagtctggacgtacatctgggccgtcgagcgctccgggctcgagggctcggatgagtcggagttctcctcggacgaggaggactcggacggcggcgaggacgaagatgacgacgacgacgacggcgacgacgacgacggtggcgacggcgacggtgacggcagcgacagcggcgggggcagaggcggcagcagcacaggcagcaccagaggcggcagcagcaagggcagcaccaggggcggtggcggcaacggcagcaccaggggcggcggcggtggcagcagcagcaaggccagtggctaa

SEQ ID NO: 23467 - DNA, 1179 bp, Zea mays
  Peptide Sequence Number=SeqID_66842
atggaacaatttagcaaatgggtcttggatatcagcgatggtgctctgccggccgtgacaagaggagacgagtccgaacctacatgggttacgattcctgaagatttgttgatacacacggatggtgatgccgttgcgtccctcatatccgagatgggggacatactcattcctacccttatggttggagactgctctcacagcttgtgtgtgcgtgtctctagactttgggagttccttgatcctcaggatgatagtaggctcctccatactaatcttgttttgcttgatgaagagggaaacaacatacatgcccagatctatcctccgttatgccagcagtttagtgctctacttgatgagggagggatcccccctgcttttccagtttgcacgtataacctcactcccatagaacagctccagccgcgcgtggactacaaggaatatttcactgatgtgctcggtgttgtcagtgtgatctcccatgtttcatcactacgcacaaggggacgacaggctgaagttatgaagagaacagtcactataagcaatgcaagggatactgggcctactgttgatgtcgtactttggggcgagcgggccacagctttcccagctgaacaggtgcacagggacagtggctcctcgccacagatcataatatttgttggcactctcgtgaggagttacgctgggcaaggatcaggtgtcccacaaaacaaggggactaccttcatccacgagccgtcgctaacaccggagagtcgcaaagtttcgtctagcgccaagacaagcccacatcagggagacaacctgctgctaggaacagaaattatccctgctccgcctaacgtgcagacgccatcaggagcccacaacacccctggtgccaacactctccgcctgtgcttctggacacgagcaccacaagctatggaagctcgcttttgggaaccgaggctcgcttttgggaactgtcctagttcgtctagcgactatatcaggggtgtggcagcctcccatcagagtcccaccagcgccgaacccttcgcatcgacagtggccacaccagagaagaagccatacccacctgccacggtcgcggaggaggtggtggacgacaagggcgtcaaatccctggccttgttccctgccaagttccagaagagtttttga

SEQ ID NO: 23468 - DNA, 1131 bp, Zea mays
  Peptide Sequence Number=SeqID_66843
atgaacgatgagccaatgcacatgaatccaatgcagagacggaaaggaatggaaacaaaagaaatagggatccgaagaaaaggaacggacgacggcgatggagtcgacgagaagaaaggagcgcctgccagtcagaggggaaaggaagacaacaacagaggtacttcatataatgggattgggagaaagcagcggcatgggcgctgcggtggaaggacaggaacacacggaccacaacaacgagaactgaggaggggcactgaccgggagaaacggcgaagcgccggccgccacggacgcaccggccgccaccgacgcgctgggcccgacccaagccgtagtatggaagatccaagccctccagctagcgacaaggatgcccaagcggaagcccccaggtccaccaacgggaacggctcggcggccacgccggacatcttcgagagccccgctgtggtgtccctcacccacaccgggatggagaacctgtttcgcctggagaaccgcgccgagccgtggctcgcggtggtgacgagcggacggagccatcgtggcagatctacagcggacgggaggccgcaacgcggatctcgagaagcacgccgcatatgcgagagaagcgcgccgcggagcttgggaagcgtgtcgaggatgagcggacggaggcggcagcggccgagccctgaccgagccgccctcccccgaccctcctgcaccgaccgcgcctcgcagctcggcgcccaggcggaccgacgccggccacccattccgcattccaccgaaacctccccgaccttgtcgggtgcgctgctcctgccaccgtgcctcgctgccgtcccaagcggcggcggccaggaaccggacaaggagatgacgtctgcggctatcgctggtggcgtcaaggagtgcgcttcctgcggctgccgggaagacgacgaaggctatgccgtggggtacgacgacgacgaggtgttcaaccacgcgtcgttctcgcggctcctgcggaaggcgtcactcggggaggctagagagtattccatgatgtcctatctctgcaacatcacctacatgattcccagaattcagctcgtcctcggtgaatttggaattgctttcagtaaatgcacgtga

SEQ ID NO: 23469 - DNA, 405 bp, Zea mays
  Peptide Sequence Number=SeqID_66844
atgggcaagaacaacaagcgcaagcgtgagctgactcctccatcagaggacttcggtgactcggagtactcagaggaggagttctcctctgagtccgaggggtctccggctcccatccctctacgtgagtcgtctgacgattcagacgactcccaagggcttgcggcggagggctcggatgagtcagagtactcctcggacgaggaggactcgtacgaggaggacggtggcggcgatggcgaggacgacgatgacgacgacgacgacgaaggcggtggcggcgatgacggtgacgacggcggcagtggcggcagcggcggcagcaaggatggcaacggcggtagcagcaggggcggcagcggcgacggcggcagcagaaagggcagcaacaaggccagtggctaa

SEQ ID NO: 23470 - DNA, 477 bp, Zea mays
  Peptide Sequence Number=SeqID_66845
atgggtcggcgcgagacggagcgcgaaggggggaggcagccggagacgggcatgagagaggtggaaatcccgcggccttcgtgtttgtcccgcgcccaggtcgggcgcaaggagaggatccaaagttcgccgtcttccggggctgagccccaagtccgagccctaggtcgggcggagcggagttcgtcgtcttccggggctaagcccgagtccgagccctgggtcgggcggagcagagttcgccgtcttttcggggctgagcccgagtccgagccctcggtcgggcggagcggagttcgccatcttccggggctgagcccgagtctgagccctgggttaggcgtagcggagttcgctatggtgcctgaggccgggcctggctgcctgtcagcctcactctgtcgagtggcacagcagtcggagcggcgcaagcggcgctgtccttctgtcaggccggtcagtggagcggcgaagtga

SEQ ID NO: 23471 - DNA, 129 bp, Zea mays
  Peptide Sequence Number=SeqID_66846
atggcagaggacaagaccgagcttggtgttggggcgagcgccggccatggagaagagcagaaatccggcagggagcgacggacagggatccatgggagagggtaccggctgtgggcgcgatatttttag

SEQ ID NO: 23472 - DNA, 153 bp, Zea mays
  Peptide Sequence Number=SeqID_66847
atggcgccgacatgtgggtccagtaggaatcgcggcaacggctcagctggccggtacaacgactccgagccctcccagtttagtggggggaaaagccatggaggaaccgagatggccatcaccggccatcccccgccgcgttcgggggagtag

SEQ ID NO: 23473 - DNA, 1797 bp, Zea mays
  Peptide Sequence Number=SeqID_66848
atggacaaggatcgccagggggctgcacaaaagcggcaggcggctatcaggattgttgaagccaggccaaagaggcaaaagcgggggtcggcgaaggctgcggcccccgacggaggcaagccgccgctggcggcgaagtcaggcgtccctgcatctagcaaggcgccagaggcagcggcgggcgccggaggctccaaaccggcgaaggctgtgccgccgctcagcagggtggcggaggccgcgaaggcggcccgagcgttgccgtcggcaggcaagcgtgtcgccgacttcgccaccgacatttgtgtggaggactatcttggtgggtcggacgagggccatcttgctacagttgcgcctgccgcggcgatcgcgacggctgccatagtgccgaaggcgaggggcgaggctcttggctccggaggcgaggtgtcggccctcgcggttgtcagggacgaggcggacgcagcgacccgccggctgaaggaggtgacggaggcgctgagtcaggtggctgacttcgccagccgtaatgcgtcgggggccctcacggcagctgtgtctgccgaagtcgagagacttcggacgcaacatgctgacgctgtccgtgagaaatcagcctccgacagcaagtgtcgtaaactgacggacaaggcggatgccaagctggcgcgggcggagggcaatcttgccaaggagctcgccgaacatctgcaagagcggctcaccatcctggagagccgcgcgaagggggccgaggtcgcgatgcgtgcggaggccgaacggacgcgcacgcagcttatggatacatatcgtgagctaggtgcacggaccggtgacttcgaggtgccggaccgagagcccgggcttcgttgtctgcaatgggtgcaggaggagctgctggaactccccgccgtcgtgggggggtttatgtcgtacgcctccctggtcacctgcgagggggcgatgaacgcgctctcccgcgaagggtgccggcacttcgaggtcttcgacgaggcggatgaagattttgatcgagatgtctataaggttgaagacctcgtggtgaaggattctgccggggccctctacgaccggatgtggggtccgcacggtcacgaggtggtcagggagcgggcggagacagcgatggctcaggcgttgtgtggcgagcgggtggacgacctcggggcgttgaacagcgtgctgcctgacctggagccgacccctgcggaggccgtgtccggggtcgccctggagccaaccccggagaccgcggaagacgcaccggatgcccccacatccgcagcggccggcgaagacctgcccccgaaggtggccgaaggcgcacctgatgcccccgcggctgctgcgccgagtactgaagatcccgcggcggtggcggcggaaacgacagcggaagcagcggcggagccaatggcggaggcttccgcagcgccagggccttcgcaggttcaagattttgggcctgcgcacgcaaccgctactgctaaatttttggcggcttcaaccgtggaaggtggtaatgaatgtggtggatctggatctgaattttctgagttttttgatgttgctgattctaggagctcggttgagtggactgaggagtcgtcggaggaggatttggactatttcgcggctttggatgtggctgcggcggagacctcgccgcacgctgcggacgcgcaagatgtgccaggtcctagcaccgggcgccgacggcgaagggcggttgcaaagcgtagagttagcacggaggaaaggtctcggcttcgt

SEQ ID NO: 23474 - DNA, 789 bp, Zea mays
  Peptide Sequence Number=SeqID_66849
gtggcaatgaggttgatggttctggttatgactatggtgctgcaggagatagagtctgtgaggagctgctcccctgtgcttcccctggaggtgccccctgcaccaccactggacgccctagcctctggagtagctgctggaggagacccagacgctggaggtggcgacgacagcttgagccacgacaccgacttttctgctgaccaggagccggaaggatgggttgctcgacccatcactcgtgacgctgctcgcgggtgtcacttccacgatgcgctcgacaccctgctacgtcgggcacttaaccggcgtacttggtccatcgagtatcgctgtgtgggtgcggaggcctgctcagagcactattctatctctgagcgggactcagctgaggcggccatgcaagatgccgcacggcgtgcgctttcacactactgctcagttctcggcggggtagctgatggtctcaacctgaagtattacccccaccgtccatctggcagcacaggaggcgtgattgtctcacctgttggtgaggacaatcctaggttgagcagcacagtcaatctagccgccgtgctaaacacggagctggaccatgcactagacgagctgagtagggctggtgctgagctcgccctgctgcgggctgagcgcgtggaacgtcgtcacctggatgatggttcccccgctcccgtcgggacccagcacccgtaccgctcacctcggcgtggacaacagtcttatggcaatcccgactgcaagaccaagataaatttagaaccatag

SEQ ID NO: 23475 - DNA, 138 bp, Zea mays
  Peptide Sequence Number=SeqID_66850
atggcgcccgccccggccccggccgccctcgccccggcccaggccatgccgtccgcccctgctagggccgcgtcgcgccggcttcgacatcgaggcccctgcccgtcgcgccgcgcagtccacgccccggctcgggcg

SEQ ID NO: 23476 - DNA, 573 bp, Zea mays
  Peptide Sequence Number=SeqID_66851
atggcgggaacacatacgcaaacaagcgagcagcaaagtggagcgtgtgagagcgagcttggggatggagaaggaggagggagaagaaaggagttcggctgctcttttatagaggatgggagagagatgcagggtcggccggggtgcttcatggccaataatggcgtcagcatcaatggagagaggagtaatggcgccaataactcggagaaacgctcggttgacgctccattacacagcgaggcacaggggcgcggggtcgggtgcacggcgtcgcactggttcctggcggcgcggtcagcatcggatcctgcaggactcgaccgcggtcggcgtcgggcttggcttgagcgcgcggctggaacttcgtggcgcggcggcttcggagtcggggcactcgcacggtcgctcaacggcgtcggccggtcgggctcggggcggctggcgtccatgcggctcggcgggctgggcgcatcggagagaggagcgagggggaggagagagaaggaggcaggtgggagagagaggaaacggctccttacggcgcgctggcgtgcgagaacagagggatag

SEQ ID NO: 23477 - DNA, 963 bp, Zea mays
  Peptide Sequence Number=SeqID_66852
atggcgcttcctgttgacgtggcgggcctgtgtcctaggcagggtgacgtgggggctcctccgaagccgaggttgagtctgtcttctgttaccgaggccgagtccgagccatggggtcgggcgaggcggaggttgttcggccgaggccagggcggagtccgagccctggggtcgggcgaggcggagtttcgtcgtcttccgggtcttagcctgagtccgagccgtggggtcgggcggagcggagttcgccgtcttccgggtcttagcccgagtccgagccctgggtcgggcggagcggagttcgccgtcttccgggtcttagcccgagttcgagccctggggtcgggcggagcggagttcgccgtcttccgggtcttagcccgagtccgagccctggggtcgggcggagcggagttcgccgtcttccgggtcttagcccgagtccgagccctggggtcgggcggagcggagttcgccgtcttccgggtcttagcccgagtccgagccctggggtcgggcggagcggagttcgccgtggcgcctttggcaaggcctgactgcctgtcagactcactctgtcgagtggcaccgcagtcggagtggcgcaggcggcgctgtcattctgtcagactgccttacacgagaaggcccaaccagttggcagctgcaagtgccgctcggccagtccgccagatgcgggatgcccataggccagaatccagatgcatcgttgtggatgctcccaatgcagtagatgaagaaatagatgaaggtgtcgaggctcctgcaacaggcctggatgaaactctagatgctaatattgtcgatgatattaatacttcttttcagtatgatatatttgatccaagaatatgggattcacttaatcctaaaatggttgatactttgctcaagaagggtcctaaaagggacttgtctgttgagcatggtgtgacactatga

SEQ ID NO: 23478 - DNA, 573 bp, Zea mays
  Peptide Sequence Number=SeqID_66853
atggcgggaacacatacgcaaacaagcgagcagcaaagtggagcgtgtgagagcgagcttggggatggagaaggaggagggagaagaaaggagttcggctgcccttttatagaggatgggagagagatgcagggtcggccggggtgcttcatggccaataatggcgtcggcatcaatggagagaggagtaatggcgccaataactcggagaaacgctcggttgacgctccattacacagcgaggcacaggggcgcggggtcgggtgcacggcgtcgcactggttcctggcggcgcggtcagcatcggatcctgcaggactcgaccgcggtcggcgtcgggcttggcttgagcgcgcggctggaacttcgtggcgcggcggcttcggagtcggggcacacgcgcggtcgctcaacggcgtcggccggtcgggctcggggcggctggcgtccatgcggctcggcgggctgggcgcatcggagagaggagcgagggggaggagagagaaggaggcaggtgggagagagaggaaacggctccttgcggcgcgctggcgtgcgagagcagagggatag

SEQ ID NO: 23479 - DNA, 747 bp, Zea mays
  Peptide Sequence Number=SeqID_66854
atggaggccgagaagacggatctctgtcgtcagctggcggaggagaggagggaggcgaacaaggccatctctgatgcgcaggctgcgcaggctgaagccaaagtggcacgggcggagggcagtctcgcccgccaaagcgccgaggagctggaggtgaggttcaacgccctgtgcagccgcatggacaaggccgagtccttgacacgcgcggaggtcaagcggacgcacgcgcagtttgtggacgcgtaccacgagctgggtgcgcggactgctgactttgaagtgcctggccaagaagcgggccttcgcttcctggagtggttgcaggaggagctactggtgctcccgaccattgtgacaggtttcatgtccttcgcctccctcgtcacctgtgagggggccatgaatgccttgtcccgtgaggggtgcaggcactacgaggtcttcgaccaagcggacgaaaactttgaacgtgaaatcttcaaggtcgaagaccctatggtgaagcagttggtgggggcactttttgataggatgtggggtctgcatggccgagaggtggtcagggatcggtccgaccgggcgatagagctgatggctcatgccgaagacgtcgaggaccttgttggtctggacggcacgctgcccgaggccgcggaggttcttgggtctgggcctgcgcacgcaaccgctactgacaatgatatttttgtggcggcttcgaccgtggctgctgatgacgattga

SEQ ID NO: 23480 - DNA, 981 bp, Zea mays
  Peptide Sequence Number=SeqID_66855
atgaacctaagcaggatccgggaggttggctggccatctacaccaccgctgcccgagctgctggggcaaccgaggacctgttccgggaagccgatctctacatcaccgccgacgaacgagctcaggacctcttcgggggagcgaagcctgcgccagcggcaccgcaacgtgacacgaaccagcaacctgacaagcgctgggagaagaggcctcgagaagaggtccacgccgccggaccgcccgcctctcgcgcccgaggaggacctcgaggaggcgaacgcacgctggacgacatcctcgacgcccagtgtccgtaccacaaggacatgcgccacaccctccggaactggagggacttcaagcattccgtcgggcacggtcgacccttccaacctctacctcctcccccgccgcgaggagggccaggagaaccgcgacagccccagcagcaggaggagggaggaggtggagccttcccgcacgttggcagagaagtcaacgtcattttcggcggacacggatcgcgctggagcagacacccggcggttactaggcatcggtgagtcccctccatctccttcctcccctactcctcgcccgtccgttcttggcgatcggcagcgaccgtccctgtgcgaccagcagcccgccccagcgcggcacggccagccgacgaggcctcggccagccatgcccgcgaccccagcccctgctccctcagcgcgtctgaccccctctgccttgcccccttccgcgagcccagcactcgaggctgtcacggccagccccggcggccagcgccccgacgagctccactcccggccagacctggcgctccctgcccagcccgcctctctcacgcatccctgcgcgcgagttcctggaggctcgactccttttccctctgtcgtcggctggcagcaatggcgctcggcgtggcggccaacaaccccggtgaacggccagcggctccgcgtctag

SEQ ID NO: 23481 - DNA, 1053 bp, Zea mays
  Peptide Sequence Number=SeqID_66856
atgaatcccaatgaagataaagtgaataatgtcaacgacaagattccaacctcgatagtggtgaaaaggaaggatgagtcacatagatatctgctgaatggaatgaagaacaacaagaggaccagaaaaatgtttgggtacaagattaaaccacctcaaccgcaagcagaagcactagagctaatgaatacccaaacaggagaatcaaatcaagctcagttgttcagcatgcaggcaaccggtcatccatcatctgctggcaatcaagcaaagctgactcacagagaggtcaaagtaagaggtgcttgtttctactgcaaggaagaaggacacttcatttgccaatgccccaagaagcgtctagaccggctcatgaagaaggccttcaagcagaactcaaccagtgatgatccagaagaaaatgtcttcactcgctcaaagtacaaacgaccgtccctgtgcaaccagcagcccgccccagcgcggcacggcccagccgacgaggcctcggccagccatgcccgcgcccccaacccctgctccctaagcgcgtctgaccccctctgccttgcccccttccgcgagcccagcacgcgaggctgtcgcggccagccccggcggccagcacaccgacgagctccactcccggccagacctggcgctccctgcccagcccgcctctctcacgcatccctgcgcgcgagttcctggaggttcgcccctgctcgcgcggtggcccggcggccagcctcggacagcccctgtgtggcgtccaaggcctggttgaagcccctccccatctctgctctttcttttcgcaggctcgactccttttccctctgtcctcggctggcagcaatggcgctcggcgtggcggccaacaaccccggtgaacggccagcggctccgcgtctagctgctcctgtcctccctcggtcgagccctatggccgatcccctctccttccttctccccatgctgttctctgttcttttccctgagattgaagaagacagagaaagagtggttgtgcggttcgtgctaaggagatga

SEQ ID NO: 23482 - DNA, 80 bp, Zea mays
  Peptide Sequence Number=SeqID_66857
ggcgttacagcagcggcaagggtggcagcggcgacggcagcaagggcagcagcaagggcaccaacaaggccagtggctag

SEQ ID NO: 23483 - DNA, 78 bp, Zea mays
  Peptide Sequence Number=SeqID_66858
atggcggccgccaagctgagggagcagctcaacgccctcctctcctccatgatcacctcgggtctggtgtatgaatag

SEQ ID NO: 23484 - DNA, 912 bp, Zea mays
  Peptide Sequence Number=SeqID_66859
atggggagggctatcaataagactgtcatggttgtggaattgatcaaggtactccttatggctctggtgcttgctaatattacttatcacttgattctaattgttactgttattactgtgaagaggaggattgttggcctccatcagaataccaccactggatctactgatattactgatatgtgggagccattggaagaaggcctacttccgcttgagacaacaagacatgtctccatgatcactataactctttcaaagaaggagctggacacatcatatatcgggaagcggatggatcgggcgctcaaagacttggaggaaaagcaaaacaagaagaaggaatcaatgtttacccttttcagaatcatagttggcagtaccatttctgttataatatcctttatgtggaaattaaatgtggcagcagatattcagactatgctagaagaaacccagctgaaatttgaggaggaaagacagaatttgttaaaagtactgtctaacacttccaaagagcagtgtgagggttcactgaacgaagagtacaacaagtttcaggaaacatatgatatgttctgtaaagaaaaggatgctcacatgcagactttcagaggacgtgcgcatcccgtaccagcagaagcgcatgttcggcttcgtcaccttcatgtatgtcgagacggtgaaggccatcctgagcaaggcaacccgcacttcgtgcgcgacgtgcgcatgctcgtcaagccctacaaggagaagggcaaggtccccggcaggttcaggaagctgcagcacgcgcaccatggcggagccgagttcgccggttgcgcgtcgcccactggattgctggattccagggacccctacgccctcctgcttctttcaggtgcccaggttttcttctgggcatga

SEQ ID NO: 23485 - DNA, 1221 bp, Zea mays
  Peptide Sequence Number=SeqID_66860
atgcagcagcttggatattttggcagcggagtggggcgtgtcccgggggcggaggaggttcccgagcccgagggcgagttggttgtgtttgaggcgtttttcaccgctggccttcgtctgcctgcacatcgctttgtggcggaggttctgcagagatttgaggtccaggtccaccagctgactccgaatgtcgtggtggcccttgcgaatgcccgcaataagtggggcaactggtgggatttctggttttatgtttccgaaggcgaagtcaaaggtcacccagggctccccgtggccgtgatgtgctctcattattatgtggcgtacccgcaatttgaggtggcagaggatgatgaagacgaaggagccctacggtgcgctgcccgcacgagtagcgggcgcgatttagttgaggaatttatcgggtatggggaggctgcctcggccactaagaagagaaaattaggtactgtagtggggggagtgggggtctctgatagttttgctgtggatttgatgggggacgtgcgcagccctcgggggaaggatgtcttcgcccgagctccgagagtcttcggcgtgaatgatggtgtgatggagagggaccgtcaagacactgcgcagaaacgccaggcggtcgttaggatcacggatccaatgcgcgaggcgaaaaaggcgcgggggagcgcgaaggctgctgccgctggcggtagcaagccagtgtcggctgcgaaaccggctgcccccgggcacggcaacgagtcggtgagtacgaaggttgccgcccctggcgggagcaagccacccccgggcggggtcgtgaaagggcgaaggccacttttgccggtgcgacgcattgccgacttcggcacagacatcagtgtcgacgattatcttgttggttcgggtgaggggcaactggctgttgtcccgcctccggtggtgaccacttcaccaacggtggtggtgggggcgaagggtgccgcgcggggcccgtgggccactttctgcgtgagtggcgagattgtgtctgccgctgccgctaaggacgtggcgggctccatgtctcagcgactaagggaggcgtcacagcagctatcacagcagctgaagcaagcggtcgacttcgccgatctcatcgcgtcgggtgccttgactacggacgttgctgccgaggtcgagcgttgtaacacccctggtgttactgtcagtaaaaattga

SEQ ID NO: 23486 - DNA, 243 bp, Zea mays
  Peptide Sequence Number=SeqID_66861
atgtcgcaaccctggtgccatactgatccgatgatcgccgggagggctgccacgaaaacgaggaagaagttgaagtataagaagagaagacttcgccaccaccacctgatgaacatcagccaggcagatgtttctatttttgacatctgcgggtccgagccttattcacctgtaaaccaagggcaagccccgggtgcatgcaaccccttccttgtgtttttaaataatttttgcacaatttaa

SEQ ID NO: 23487 - DNA, 588 bp, Zea mays
  Peptide Sequence Number=SeqID_66862
atgaacaaaaacactggcattcgaagtgccattacaaacggaactccggttccccctccgcaggtacgaacaaccccactccgagggggaaggcctgcggagcaacggaaggccgacgaacggcgcgccgtcacctgctccagcagcggcgacgacgacgacttctgctccggggggtcgaacagcggcagcactggcctcagggcgggtgccgctgccaggaggcccccgcccacgccaaaacttgtgaggcaagggcgggcagaagtctgccgagttgaaggagaacctcttcaagctgccgtggcggacgccggcgccgcgagcggcttcgaagccactcgcgtccaagaaccaggcacgggaccgggaaaggggaataccccgaaaaggatccttctctgcgaaggaaccgggctccgagcccccctactgatcagaggttcgaaggctggccctccgaagggttcaacagtcgcctcagatcgcgtgggcccgacacccactactggtcaggggttcgaaggccgaccccccgaagggctccatggccgcctcaggctactcgggctccgcgctcattactga

SEQ ID NO: 23488 - DNA, 1077 bp, Zea mays
  Peptide Sequence Number=SeqID_66863
atggcggccgcgtcgctcaagttcgcctcccccaaacccttggcctccgcaccgtccgcgctcctttgcgggcgtcgcgcccaggcgcggcccctcccagcaagtcgcctccctccgcctacccgcgtcgccgtgcagccccccgccgcgccggtcgcgacgcgcatcggctcctttgacaaggtgctggaggcgctgatcggcgggaccgacttctccgaggaggatgcggaggcgacgctgaagctgctcctggacgagaaggacgaggcgcgcatctccgccttcctcgtcctcctcagggccaagggcgagaccttcgaagagatcgtggggcttgcgaaggcgatgttgagctgctgcatccgagtcgatggtctggacgacgccgtcgacattgtcgggacaggcggcgacggcgcagacaccgtcaacatctccaccgggtccaccatcctcgccgccgcggccggcgccaaggtcgctaagcaaggaagcagggctagctcgtcggcgtgcggcagcgccgatgtgctggaggcgctcggggtcaacatcgagcttggacccgagggtattaaacgatgtgtcaatgaggtgggtgttggattcatgatgtctgcaaattatcatcctgcaatgaaaattgtcagacctgtgaggaagaagcttaaaataaagacagttttcaatatccttggtcctctactgaatccagcaagggtgcctcatgctgttattggtgtttaccatgagaatatagttaccaagatggctaaggctgctcagaaatttggaatgaagagagcattggtcgtccattcaaaggtttcactctgtcggtgccactgttttggctgtgcttgctcaagaagtaccttgtatattcttggtccgctatgtatttgtggtagaacgacggatcctaccgggcagattgcgcaggttgtagggtggggaactggggattgggcgcaagaagggcggcggcgctggggcgccgtcgtgaccctggctaggtcgcgttcagggagaagatcccaggagactctggcttcctctaggaagccagaataa

SEQ ID NO: 23489 - DNA, 288 bp, Zea mays
  Peptide Sequence Number=SeqID_66864
atggcgaatggctgcggctacgtgtgggccctcgcggcgggtttcaacgccgcactcgccgccatctccgccaagttcttctccactctggcaacagtgacaaacttcgccgccaacttcatttcatctgggcttgcggggtgtttcctgtttgatgagcccttgccttctaagagttctactcaggccttctacgccagaaattcctttgcttccgaccactacctcaagaacttgcctgaaaccgatagttccaagtcaaattttctaggggcaacattcatgtga

SEQ ID NO: 23490 - DNA, 1464 bp, Zea mays
  Peptide Sequence Number=SeqID_66865
atgcaacgtttagctggtcatgctccgggaggcgctctaggactaatatcaaggcttaatatcggcgcacttgaactgggagactatcttgcacttggggcaatattctcggccacagactcaatttgcaccttgcaggtgttaagccaagatgagacaccattcttgtacaaccacgtgtttggtgaaggtgttgtcaatgacgcaacttctgttgtgttgttcaatgcaatccagaactttgatcctagaaatatcagcggtgccaaattactgaacttcattggcagtttcctttatctgttcggctccagcaccattcttggagtagcttctggacttcttagtgcttataccattaagaagttgtactttggcagacattttgcattttttaaaagcaaacatagctgtaaattgttattaacgggttgcctttttattgcatgcctttgcaacattgtcgtttatctccgagatttttctgtttctttatgttgttgttatgttccttacatgatattggtcattcaggttattgtttggtgggcgggtctcatgagaggtgctgtgtctattgtgttggcttacaataagtgcgaggcattttgggaggtggtgagcgcctcgcttggcaccttcattttcgtgatgatgctgtccttcaggctgcagtgccacacagttatgcagctgtctgatttgtataccttttcttgtccggagattaagtcggtgaggccaggaatgaggattcatgaacactgctattcaattatgggaaaaacactagcaatcttacatgagttccaagttttgcaggtcgttgctattggtgaatgtggtttggattatgacagacttcagttctgtccggcagatatgcaaaagaagtactttgagaaacaatttgagttgtctgaagcagtaaaactgcccatgtttcttcacatgcgtgctgctggtgaagacttctgtgaaatcatgacacagaatttgcacagattccctgttggggttacacattccttcactgacttagcagaagattgggataggctactttcttttgagaatatgtttatcggtgttaatggttgctctctgaaaactaacgaaaatcttgaggttctacgaggcattcctgtcgagaggttgatgatagaaacagattctccatattgtgatataataaatactcatgctagaagtccgtatgtaaaatctgtctggccattcaagaagaaagaaaagtatgagccagattcaacagtaaaaggtcgcaatgagccttgtttagtcaggcaagttcttgaggtagtggtcggaagcaaaggaatttctggcgtagaaggcctgagtagaactctgtaccacaacacatgcaggctcttctttcctcaggatcttgacgcgtctgctaatgcacaacttgagagtggtactgccgtccaggattgctga

SEQ ID NO: 23491 - DNA, 846 bp, Zea mays
  Peptide Sequence Number=SeqID_66866
atggagggccgtccgatacgcacgctctcacccccacgcatcgccccgcccccaccacggatcccgcatcccccacggatcccgcagccgcgccgcagccgctccctcccgtgctcccttcgcgcccgcccatggatctccaacagcgagcgccgccgccgccgcctcgcctcggcaaacccggctccagggcgacagctcccgccggtgggacctcgtgttcagcgtcgtgaagccgtccgtgatccagctgcggggcccaccaaggtcagcgtcttcatcgccagcaacgacgccgagcaggcctgcgacttcaggatcaccggcatctaccacgacggtacaaaccttgcaccttcttcgactcttcccgtccgatttgactatctaaaactgttgtttctgattcggtgcgctggcgatctggtcgcccgcagggagttcgtgaagaagaactatggtgacatcaaggcccgcaacccctccctccccttccttgtccgcgagtgctccggtgtccggccccagctctgggcgcgctacgggtatgagtttgggtcaatttctgtacccacgggtttgttaatgggttcaaatggaaacccaacggcgagtggtgtgatggcaactcttcttgtattcctgtctgttggtttagttggtgctactgatggtataggcttccatttaactgggaaggcgctcgacctctccatcatcgtccgcgacggcctcgacctcgcttgggcgcctcgccaccatcgcacctcaaccaacaccacctctcgaggccacatggagagcaactactttgatctctccgtgtccttcctctctactctctag

SEQ ID NO: 23492 - DNA, 1104 bp, Zea mays
  Peptide Sequence Number=SeqID_66867
atgacggtgacgaccatggattctcgggtgccaaagaactcagatggcgtgcacacggagcgttctgccatcacgttctgccatcgcgccccgccccgcaatccccgccgccgagcacagccgcccgcagtcctgcaattccgccgcccgcattcaccgcgccacattcaccgtgccatcgcgcccgcattcccctccctgcgcccgcagttcccgccccgccccgcagtccacgccgccgagcacagccgcccatcgcgcccgcagtcccctccccgcgcccgcagcccatcgcgccttcagtccgccctcccctcgccgcctccccagaccgcagtctctcctcaacctccctccccaaggagctggcggcagcgcggctgcgtcgggaggaggaggacgccgcgcgggggctgcggcaggagctcgactccgagcgggcctccccggagatggcagccagatccggccattgagccccctaaccgagcggatccaaaggaggtgttcctcgccacgcggcgcggcaggcgcatgctcgacctgtcccggttccgcgaccgcgaccgcgcgcggtgccacgactggtgcttcgccgcgttcgtgcacgcctacgccacgtacctcgacgaccggctcaaagaacggatgcaggcccgcagagcaggcggggccagcccgggcaaatggcacgtcgacggcgaccctgtcgggatggcgtgccaggtggccgaggcctgggagctcgtgccgcagggaaggtcggcgtcggcgacggagacgacggcggcagaggatgtcatcgggaaggcgcagcagctgaagcacctcctaggccggttcatccagtgccggccgacggggaaggcgatgacgaacccggtggtgacagcggcgctgtacagactggtgaaggagagcgcggcgatgtactgcgagctcacggaggtgatggtcgtgctcttggaccgcttcgccgacctgggcactcctgcctgcgtgcgcgtccactccatcttcaccagtactgcttggaatttgggtatgctgagttcacgcttcacagacagaactgcttggaatttgggtatgctgatattttag

SEQ ID NO: 23493 - DNA, 996 bp, Zea mays
  Peptide Sequence Number=SeqID_66868
atggcgcttcctgttgacgtggcggtctgtgccctaggccagggcgacgtgggggttcctccgaagccgaggttgagtctgccttccgttgccgtggccgagcccgagccaaggggtcgggcaaggcggaagtcgttcggccgaggccagggcggagtccgagccctggggtcgggcgaagcggagtttcgtcgtcttccgggtgttagcctgagtccgagccctggggtcgggcgaggcggagttcgccgtcttccgggtcttagcctgagtccgagccctggggtcgggcgaggcggagttcgccgtcttccgggtcttagcccgagtccgagccctggggtcgggcggagcggagttcgccgtcttccgggtcttagcccgagtccgagccctggggtcgggcggggcggagttcgccgtcttccgggtcttagcccgagtccgagccctggggtcgggcggagcggagttcgccgtcttccgggttttagcccgagtccgagccctggggtcgggcggagcggagttcgccgtcttctgggtcttagcccgagtccgagccctggggtcgggcggagcggagttcgccgtcttccgggtcttagcccgagtccgagccctggggtcggggcgaggcggagttcgccgtcttccggcccgagtcccagccctggggtcgggccgggggcggagttcgccgtcttcccgggtcttagccccgagtccgagcccctggggtcgggcggagcggagttcgccgtcttccgggttttagcccgagtccgagccctggggtcgggcggagcggagttcgccgtcttccgggtcttagcccgagtccgagccctggggtcgggcagagcggagttcgccgtggcgcctttggcaaggcctgactgcctgtcagactcactctgtcgagtggcactgcagtcggagtggcgcaggcggcgctgtccttctgtcagactggccagtggagcggtggagtga

SEQ ID NO: 23494 - DNA, 2652 bp, Zea mays
  Peptide Sequence Number=SeqID_66869
atggcgccggacccgtgcggcgacctcgtggtgacgccgaagacggcggccaaggacgaggcgtcctgctccgtgcccacgccgcccaaggtcactcccgacgaggtgcgcgcggtggcgcgcaagttcgcggaccagcctatccaggagacggagcccgacgtttgggccgtcctcaccgccatctccaagaaggcccgcctccggccccaggggatgaacatacttttgagtgctgacgagcactgcctaggacgatctgttgaggagcggtttcggatttttgcccagcagatcagcgggatgcattgcaaaatatacagggacactgtcttaggggagctgaaccgccacgagcctgtgcctgttttcctcaaggacacaagctcaaatggcacattcatcaactggaaaaggctcaagaaaaattcatccccggtcaagcttaatcatggcgacattatatcattatcatcacctcctcatgacgacaattcctttgtatttgtctaccgcgaagttaatgcaatcagtcgtgtagagaatggggctcccattcttaaaaggaagtcagtggagggtggttctggaagcaagaggctaaagggtcttggtattggttctcctgatggtcctgtttcactagatgatgtccgaagactagaaaaatctaatgctgatctcagggaacaacttgaggcacatgttgtgacaattgagactttgagggctgaaataaaaacagcccaagtgcagcatggaaaggaacttgaggagctaagagaaactatatcgagttcttatctggatcaaactaaatctcttcggtcagcacttgaggagaaacagaagcaaatagattcactcagtacatcaaatacagagttacagaactctataaaagatctggatgaaaggcttaatgcatctaaacaatcacgtgcagatgctgacgagataatttcaagccagaaaggaatgatatgtgagcttgagggacagctaaatgaggagagaaatttaagaagagaagagcgtgataaggctgcacatgacatgaaatctgcattgcataaagtgcaagccgaggctcaagaagaaattaagaaacaggcggagtcttaccttaggcaacaaagggagcagaaagaagttattagcaagcttcaggaatcagaaaaagaaacccgtttgtttgtggaaactttgaggtccaagctggaagatgctcgagataatcttgtaacatccgagaaaagagtaagagagctggaagctcagcttcaggacgagcagatggtatcagccaataatcgaaagaagacagaaaatctggaagctgaattgagaaaactgaagaaggaactcgacaatgagaaggctgctcgagaagaagcatgggcaaaggtttcagctcttgagcttgaaatagctgcaacgattagagatctatcaattgagaaacagaggtatcagggagctagagaacggattattctacgggagactcagctgcgtgctttctattcaaccacagaagaaatctcttctctgtttgcgaaacagcaggaacagctgaaagctatgcagagaactttggaggatgaagagaactatgagagcaccttaatgggtgtggatcttaataaagtacctctaaccactgataatgctggtatgaagccagtagactgctcaaaaaatacagtgggagcttcaagtgcttcaccagaaaatactcaggtaagtgaacatgattccagtgacgaagatgccaacatgactgagcagcaggatgatgatggtactgccattggtggcagcactcaaggtctagaatgcaccagtccagaaaggtcagaggggagattgaagtcaggttttcatggcaatccggtttctacagctcctgagagagaggttacagataccgagcaagttcccgagacagatagccaagctggtaatgctggttgcgatgaccaaagatgtgacaacacgggaggagagactatgccactagaagatgatatgctgctcccagataacgaggaacctactgcattgctgaaagatgtagggcagccacaagcaaatgtggttcctattccaatccccggtgatggcgttgggcactgtttcgaagaaaaacatgagggtgcctgctctgagagcaaacgggaggacacacatgctggagccatcagaacggctgatctgttggcctcagaagtcgctgggagctgggcagtggaaacagctccgtctgtcaatggggagaacgaatctccaaggagcttgggcgatgctacagagcacgatgaagctggaggcagcgtggcaggcgatgctttggtaactctggtgaactcagagggccaggcggctgggagccagaacaatgttgagcgtggcagctccaaaataacccatcatcatcatcatcatcgtcatcaccatcgtgttcttagtgccatgattggaattgttgatcctgagttcaggaagcaaatgtccggcagaagcggagttggaaacgaggaacccatgtctgacgccgagacgggtgagggcatcgaggaaggcgattcagattcaggttcagacggcagtgacagcgaggaggctatggttgaggattctgtcgtttag

SEQ ID NO: 23495 - DNA, 723 bp, Zea mays
  Peptide Sequence Number=SeqID_66870
atggaaaaagagccacttgacatggttgagagctcagttcgagtcatcgagacacatgttgacatcattcgcagtctagtgactgatggggttgtggatactagtgaaccggaatcagtgtacacacttaagaccactttgtttcaaattggagatgtatgcgacatgcttgagaagtgtgctctgtccatcaaaaagtatgctgactccaagagggctaaaattattcaagatgaagccctgcaatatgctgaagatgatgaagctgcagatgatttggaggaactcccaagcccagatctccttactcaagccgacatattggaaaaatattttggaattgatgatatcgatgaccccaagaagagattaagtcctgtagtctaccacctcccgttatttgtgggcttcaccgatggctggaaacatttggtgatagcaaacgaccttcgggttgaagacgtctgcgagcttgttaaggggccagacgatgccgacataagagaagagaagcgcacagatgaagccggggcagctttaaattttgtgaccacacatccggacatagtacaccggctcactatcgtctggccccttaacaagctcgcagacgtctcaacccggaggtcgtttgctatcaccaaatgtttccagcctcggtcacgcccgcaattacgggagttgcacacttcgggattatctcttcttggctctacaccctaa

SEQ ID NO: 23496 - DNA, 1152 bp, Zea mays
  Peptide Sequence Number=SeqID_66871
atgtacagcagagcacggcggtttcgacgacatcactcgggtgtccgtgtcccccggtgcgccttgtgtggtccgtcgccgtcgctacggcttggctctgagatgatgcttgacgtcgcgtcgtacctggtcggcttgccttctgtcaactggatgtcccgtgtctggtgtccggacgcactgctagctgctgccaaggcccaaggatcagggcccgcgcccgcgcacggcgcaccggcgctcccgcagcgacgtcccgtccggggtactacttcggcggcgaggggcaccagctgccgccgccccaaggtggaggccggatggggcgggcacctccacggcggcgggggcgacgacgacctcttcaacgcgtatctcaacctggaagggctggacgggctgaactcctccgacgaccgccggcagtactacgacggcgacagccgcgggagcagcgtgaggaccaacggcgccgacagcagcgagaacgattcggaggagtgcgccgccgcaggcccgcccgtggcccaccacgtcaggagcctgtccatggacagcagcctcatcggcaagctcaacttctccgccggcgcggctgcggccaacggcggcgtcattccggggcccaacaggttcagcctcgagttcggcagcggcgagttcacccccgtcgagatgaacaagatcatggccgacgagaagctggccgagatggcgctcgccgaccctaagcgcgccaagagggtgctggccaacaggcagtcggcggcgcggtccaaggagcggaagatgcgatacatcgcggagctggagcagaaggtgcagatcctgcagacggaggccaccgctctctccgcccacctcacgcttcttcagcgggactccgcggggatcgcgacgcagaacaacgagctccagttccggctgcaggccatggcgcagcaggcgcagctgcgtgacgcattgaatgaggcactgacagccgaggtccagcgcctgaaactcgcgactgcagagctcggcgactcttgctcgtccaacagtctagcccagcagatgcagatccaactcagcgcgcatgaccagacgttcgaactgcatcagcagcaggcgatgccgatagcgttctaccagctgcggcaggcgcagtga

SEQ ID NO: 23497 - DNA, 273 bp, Zea mays
  Peptide Sequence Number=SeqID_66872
atggctcactggatagctcggtctacgtgcagtggcgagtggccgaagtccagcgacgatgatcttgctgttccggtgaggcagggcttcgatccttgcttggagaaacttcacggctcctcggggaagctatccaaaggctcggttgaggctgagggtctctggaaatggctggtcgtggtggccggcgctcgggtggctcgggcgggtggcgcagagctcgccggaactaagggtggtgcgtggctagcgaaggcttatgggttttgctga

SEQ ID NO: 23498 - DNA, 333 bp, Zea mays
  Peptide Sequence Number=SeqID_66873
atgtgggtaacaataagacaaaaactaagccctctaattcgctctgtgaggcgctctgaagaaaggtttcaatggtacagtactgcaaaagatcagcagatgcaccacacctcgccgctggtgaccttcgcgctcggattcacgccggcgctgcgattcgtgctctctggggtgcggattatgaccaacagtggaaaagatcttaccacggataaggtcgtgtgctggccgccgtacccacatgctcttcagccagccgaaatgatcctcgccggagttggctgcttgccgctcgtgcgccacgtaatcaatggtgttaccacgtcgcagtag

SEQ ID NO: 23499 - DNA, 453 bp, Zea mays
  Peptide Sequence Number=SeqID_66874
atggcaccgaagagagctagctcgaaggcagccccatccatcgacgaagcagtgaaggcagcactgctagccgagaaaaaggtcaaggccctcgcagacaacacccaccaagaagcctgcgaagacgacgcactcaacaagagacaacgcaacgatcaacccactccagaaggcaccctccgcacctgtagctccagaggacaaccacaagaaccacccccaggcttcactccactagagggcaaggacgccacagaggacggcgaagtcattggcatctcagcagaagaacagctacgggccctgcgcatcaagaaccgtaaccttcaaaagcagaaagaaatcctcgaggccaagcgcctacgtgtctccgtgcaagccaaggtgcgccagatgatacgagacgaggagcagagggctccggaactcgagcaagagattgcgctcatgtag

SEQ ID NO: 23500 - DNA, 696 bp, Zea mays
  Peptide Sequence Number=SeqID_66875
atggagaagcactatttccctgaagtcctggctgtcaaactgtttgccattgtcgactatgagctcgaacgggactccgaatcggcaaacaatgttttgccagaagaatttctggcagtcttcgacgttattatggatactacccttgcctcgatccacttggtaaaatactcgacggcgacgaagatgaacttgaggaaatctctaattgtcataccacaccagactcgtccataccagtggacacagactattcgaataggtttcaactctgcgcagagggggaaggatggacttgccttcgtcgaagctttcctggcacaaaagatctacttcctggagatcgggctccggcccttcttccgggactacgggttccggatcaacggtccccgcttcttctacgtgcgcacgcgcaagggcgccggcctagctgcggcccaaggcgtggcgaaccggccgttcgcgggggagaaacccggccgctggtgggctcggcagcgattcgccgccggtggcccggttcttgggcaatgggtggtcgccttagcacggggagggtctggcgaacctaggggcgagattaatttggctagaggggtccgggagggggctgtccgcgtggaggtggcggagctcccgcagcgggagtcgtcgacggtgagctccgggcgagggattggggtgggggagtag

SEQ ID NO: 23501 - DNA, 462 bp, Zea mays
  Peptide Sequence Number=SeqID_66876
atggacaagaaccaaaatttggcctatgctccatacatcatggctctcatcaaggctaagaccagatttgaggggcgttgtgagatagctcacactccctttaggcctttcaagattgagattggattcttcaccaggcctcttatactttcccagatgatgaggaagaagctggcgatgatgaaggagttgctcctgaagctgatgcagctcagcagatgcctcctcctccacctcctcctcagcctcagcagttctggcagcctgtctcgctttgatgataatcttgatgcgctgaactctgagctttctgaatttcgctctcacatccaagaaactattcatgatcctcttacgactagaatgaacaacatgcagcaaagttttcaggataatatgagagccttgtctagtcaatttgacaacctgtccaccaatgaaagcattcaggatatctgttag

SEQ ID NO: 23502 - DNA, 60 bp, Zea mays
  Peptide Sequence Number=SeqID_66877
atggggacagtctgctctgtctcagcggaatcaatctttgtcaaggcaaagactgcttga

SEQ ID NO: 23503 - DNA, 1080 bp, Zea mays
  Peptide Sequence Number=SeqID_66878
atgtctccttcctccctcatgcgtcgcgtcttttcacctcccaagcccccggatggggggtacccgccgtcttctcgcctcatcgtcggaggaacgcaactccgcgggagttgggagagggcgctcactggccctgcgggcggcccggacttcgacaacgcggggctgggtcgacggcgggcgtcgtcacctttagcgtgtcgggcccgtcggcttggctcccggcggcccctcctgtcggagggcggctgctgcgccgtgtgcacgggaggaccacccaagatgccgcgcgctgctagggcggcgttcgtgttctggggtggtcctgcctttgcaccgggatggcgccctcacgaggaggtcgatgccccactcacccgggagggtttgagtggggatctgccggggagccggtgggccctgccgtcggtgccgaggcggaggcggctcgagaagtccccatcaccgacggggtcaccgccaccatccgcgcctctggcccccagctcttcgcacctgtcctcgcccctcgagcgtcggtgtgggcgagggcaagattgcagcagcgcccaccctgaggcctgcgctgctgcagctcgaccatccgaggcgggggtcgttgtcgtcgtagtcagaacgggcggcggcgagccgctcgagtccctcggctcgatcggccttgttgtctggggctcctctagcttagttaaggagaccccttggccgctcttcgacgagccgaggccaggggtagcgatatcagtacgagcagaggcggagttggctcgaaaatgggaacctggttggccggagcctagccgggttgtccgtcagcggggccgacgccggagtcgatcagccgaggcctcgggtcgggctggcgcccttggaagatggtcggccgaagtcccaggggtaaccggccgagccgcctgctcgggccggattcccggagaagtccctagactgcgtcgccgtccgaggctgggtcggatctcgctgaaggtgtcgtcgatgccgagggtgctagcccccttccagcgtgaagacccgagcctgcaggatcagatcgccttgtag

SEQ ID NO: 23504 - DNA, 1957 bp, Zea mays
  Peptide Sequence Number=SeqID_66879
atgcaggcggcatgcaaccgtgccaagtggacacgctcctccgactcccagcgcgccagcacggaggcccaggcccacgcgtcacgcaagcagcgcaccggatgctgcatgcaggcaactgcaccgccacttgcgccaccgccgcgcctcttcggttgcggaaccaatgccgcgactcgaggcgacccagcggcgccagcctggcgcgacggtcaatacggccgaaacaagagagcctcctcccacgacgtgaagacggtgcgcctgggacccgttcctcgaacggctcgcgcacgcgcaacggccgccccgccaaccactcgccccgtcgcattaactccgcggcgggacaggcggcgcctctggcaggagaagcgggcgacgcttcaccttcgccgtaataaccgcgccaaaaaaggggttcgaaggctggcccccgaagggttcacagtcgcctcagacgccgagcgagggatgaccaggggggaccgggtccggcagatcacccgcaggtacttttgggcgtgcctctgggcccctagccgacccccaacgaacggggcacggacgtccactcggattacccgcttgcagctcaccggagacaccatgttcggtgcccatcgaggggctcggactcgggctaagacccggaagacggcgaactccgctccgcccgacccagggctcggactcgggctaagacccggaagacggcgaactccgctccgctcggcccagggctcggactcgggcacagccccagaagacgacgaactccgcttcgcccgaccacagggctcggactccgccctggcctctgccgaacgatctctgcctcgcccgacccaggggctcgggctcggcctcggccacggaagacagactcgacctcggcttcggaggatcctccacgtcgtccgacctagggcacaggcccgccacgtcaacgggaagcgccatcatcatcctaccccgagccgactcgggtcacagagaacaagaccgatgtcccatctggctagctccaccagatgggcaatgatggcgccccacaagctctgtgacgacggcggctctcagctctcttacggaagcagggggacccacgacatcacgccagcagggtgccaagatctctccggctgccacattggcatggccttcttagagaaggttggccgcgcgggaccgaggacgggacaggcgctctcttggggctgctcgcttccctcacccgcgtggacgcttgtaacccccctactgcaagcgcacccgacctgggcgcgggacgaacacgaaggccgcgggatttccacctctctcacgcccgtctccggccacctcgcctttccccccttcgtgctcgcccacgcgctcgacccatctgggctggggcacgcggcacactcagtcgtcggcttagggaccccccggtctcgaaacgccgacaaatcggacgaaaacttcgaacgcaaaatcttccaggtcgaggacccggtgctgaagcagtcagtgggggcgctcttcgacaggatgtggagcctgcacggccgaaagacggtctgggagaggtctgaccgggcaattgatcagatggcgcatgccgaagaggtcaaggaccttggtaaactagatagcacgctgcccgtggccacggaggtggaggtggtgccgccatccgatgctggcgaaggcccctcgacggcccccgcaacaaccgcgccgactggagcaggcgaagacttcgcgccagcccctgggcagatgggtggggatgcttcgaaggtgatggtggaaacagctgccaaagaccacgcggcggctgccgggccttcgcagacagaggactcctcggatgaaggcttggattattttgttgcgttggatgtggctgcggcggagacttcgtcgcgtatggagtgtgccgaggatcttcctagtgcggatggagggc

SEQ ID NO: 23505 - DNA, 189 bp, Zea mays
  Peptide Sequence Number=SeqID_66880
atggcttcacttgataattttggtgaagatgagcagattgatgcaagaaagctgcaagagagaatgcaggcggatttggtggcgaggtttccgacgtgcgcaggcgagcggaggtgggtggtggtgggcggatttggtggcgaggtttccggcgtgcgcaggtgggcggaggtgggcgtggggttttag

SEQ ID NO: 23506 - DNA, 603 bp, Zea mays
  Peptide Sequence Number=SeqID_66881
atgtggaacaggctaaaggaagtggaaaagcactttgagtaccaatacccatctcagaccgatgatgtcgtgcagatgatatggaaggccattgctcggaaggttttggacttgcttgaggttctacagtttagatgttttgatacttcaacgaagtatccacagctgctttccagcttgggaatcgaatcgaagattgaagagatcctaaggaactctgccaattttgaaaatggtggtgtatattattattcagagagaggtgaccgactgattgatcttgatgctttccatgaaaaacttctccagatttcacaagaattgaactcacaattaaccgagcctgagaaagctggactaaaagaatcagttcattgtttcctcaaatgggcgtggcgatataacaaaaatcttgaagagcaggctgcccaacttcacatgttgactggtgttgggaccatgcttcgtcgccgaaggtcctgcaggaggaaacagcttcggctaaagttgcttatacatgatgaccgaagctaccactcaagaagcttcggtgttataacgtatccgaagatgaagggtcgaaccgacttaaagatagaatga

SEQ ID NO: 23507 - DNA, 873 bp, Zea mays
  Peptide Sequence Number=SeqID_66882
atgtcgtcttcttcttcatccgttgcgaatacgccgctgggcgaatcatcgtctgaggataccataagtgatttggcggcggtggagctgcacccgggccacacggtggagttcgccttcgttacctgcgcatcgttttgtggcggaggtgttgtagagaagagaaaagttggaagcaagattgcacaatttagatcatgcacctttacgcccaggactggtaagacttcagcggaagttgtggagctagttccttgcgcccgcaacaagtggggcaattggtatgattattggttttatgtggcgggaggcgaagtcgaagacctcccagtactcccggcggccgtgatgtgctctcactgctatgtggtgttcccgccgtttgaggtggcggaggatgacagtgatgaaggggcccttcgttgtgttgcccgcatgagtagcgggcacaatttagttgaggaattcatcggctatggagtgtggcccttggcgcatggctgggcgttgggcgtagtatgccctcgccagatgccctccctgggcgagcagctagtgcgaagtcctgccttcgcgttggatctgcgtggccgggatcccgccgcattcgtgcgtgaagtggaagacggagctgtgcggattgtggggcgttatgtgccaaggacggaggctctgcagagttgggatatccgtggatccaacattcgcctgaatagggtcttcgagctgaatcgcttgccatacgacggctatcccagggatgacgttgtcgtggccgtcgaccgccacgggaagagaccagtggccgtgactgaggaaggcccttcgcaggaggctgcctgtggcagaaccgcccgaattattccagcttaa

SEQ ID NO: 23508 - DNA, 249 bp, Zea mays
  Peptide Sequence Number=SeqID_66883
atgccacatcgcgccgtgggcaagactgttgccccccgaggaccggtaagatcatctcgataccctctgccttgtccttctgatggtgtatcacctgttggctcatggatttgggcaccgggggcatctaggagtgtggctgtcggtgtgctccaccgtgtggcatgcggtgccgccgcgcttggcagccaagggaagaagagagacaggagccgtccattcagtgttggacggacgagattagattga

SEQ ID NO: 23509 - DNA, 504 bp, Zea mays
  Peptide Sequence Number=SeqID_66884
atggctggcggaggcgcggcgagcgcggtggaggagtgcacgcggtggcggaggggcggcgcgggttcggtggtccggcgttccggcggcgcggcttgcgagcatgtgagagaggggcggcgcggcttgcgagcatgttcaaggctgttcttggcacagcaagagcagcaacaacaggagctgtcggatagcacaacgtcgacctccaccccaaattgtagttatcaggggacggtgtactatcgctcatggcgccacaccatcttggttatggtagtcgggcaaccaacgtcgttctccaacaagttttccacctccatcatcaatcatcgaaagatcgggccaatcttctacccgttgggtttatcagttgacaacagtgataaaaatttggcagggcaatgtatgcagtggcacgacattcaagtgactggttcatcgaaatcagggtccaacctttttcatgcaattatgcctacgacttcgttttacaatttgttttaa

SEQ ID NO: 23510 - DNA, 1080 bp, Zea mays
  Peptide Sequence Number=SeqID_66885
atgatggtcacccggtcagccatcaccgagcggaaggggtggcggcgcaaggggcagggagggcggtttcctcttctctggctaagtctctcgggttgtgaaaacctaagagggaggcaggaagcggagcaaagaaccgtcaccagaccgtctcccgagtatataaagaccaaggcgagaccggttcaaacgttccgcccggaccggacgcggaattcaaaaacgcaaagcgaaacggccgttccccgaacggttcgcgcacgcgcaacggccgccccgcgaaccactcgccccgtcgcattaactccgcggcgggacaggcggcgcctctggcaggagaagcaggcgacgcttcgccttcgccataataaccgcgccaaaaaagggaccgggaaagggggataccccgaaaaggatccttcccctggaaggaaccaggctccgtgcctccctactgatcagaggccgacccctcggaagggttccacggccgcctcaggctactcgggcttcgcgcccattactgatcaggggttcgaaggctggcccccgaaggagaccagcgggagcgatcttgtaacagaatcccatcagagggaggcatcgagccctcggaccccgtcgccaggggaccggctcaccggagacaccatgttcggcgcccatcgagggcaacatggcgctttccccctctcctccttgcggaaaggcgacgcaggggcgcagtcaggccctgccggaggcatcataggaagctccgcttcgcccgacctagggctcggactcgggctcagccccggaagacggcgaactccgctccgctcgacccagggctcggactcgggctcagccccagatgacggcgaactccgcttcgcccaacccagggctcggactcgggctcagccccgaaagacggcgaactccgctccgcccgacccagggctcggacacgggctcagccccggaagacggcgaactccgctccgcccgacccggggctcagacacgggctcagccccagaagacgacgaactccgctccgcccgacccagggctcggactcgggctcagccctag

SEQ ID NO: 23511 - DNA, 510 bp, Zea mays
  Peptide Sequence Number=SeqID_66886
atgcaccagtcactttgctgtggaagagtgtccatgtttaattccgtcatggttcgtacaatccaaaccacctggatcaacaccaactacatccctctgccaaagcaagttcctgtctacccagaggtagtcgaggaaatccctctggaactcccttgcattcgtgtggagaacggagtcattctagaagacaactcggaggagtctctgcctacacccaccccattggcagaatcactagccttcgcaactggatcatcagctttagcaccgccagcaccagcagtccaagcccctgctcccggaggcgacgacccggatgactttggtgacgatgatgaagacgaagaagaagaagaagagaacgtcaacgaagaacccaacgatgaacagcaggaccactacgcggggttatggcctgtcactgaacattatagctcaatgttcgagaaagggcacttccctaacctgctgcaggatgttctgcatgcattgggaacctacgtctga

SEQ ID NO: 23512 - DNA, 456 bp, Zea mays
  Peptide Sequence Number=SeqID_66887
atgggagacccagtctcaggtcgcatgagggataaagtccgcgcccggcttcactcagatactaggtttaccggttaccatatttccctacatgtgcttagtacgttcaaaagcttgactcaggcgggggagctcgtcggcggcgaggagtccggcctatccagggcacaattgaccgatcaaacgggtcagagagcttcaccagggatcaaggaaggcgggcggccaatgtccggtgagggcgatcttgatcttccggtgaagttctgccgggttcgagggctgggaaagcttcacaagctactggcgaagctaaccgagcggctggcgcggcttggaagtgactggagtgggctggccatggtggccgaggctctagcggcaatggcgggcggaaaaaagagctcgccggagcttatgaggggcgtctggccggcgaacgtgagaacggggtga

SEQ ID NO: 23513 - DNA, 198 bp, Zea mays
  Peptide Sequence Number=SeqID_66888
atggtgctaagtagaagtacatcagaggatataagtacagctggcatcaatattaacagaaacgtcgggcagggagaagacgccgaccagcagagcactgagggggagagggcggcgtcggggaatgagatgagggcagaggacgccggctccaagggtgctggggaggggctcggccggcggcaagacatgagctag

SEQ ID NO: 23514 - DNA, 342 bp, Zea mays
  Peptide Sequence Number=SeqID_66889
atgaagcaagcaccaggcaaggacgatggagctcgccctgtgaatccactggagcatgacgacgcagcgctggatgatgtagagcctggccctctgctccttgagggccttgccgaatcccctctgcctcctctggcctccgacgagcagcttcatcttgcagtcagtcacgatcaggattctcccaagttggcaacggcgaggacgagctatgccgttatagcggaggaggagaaaggcgagcgggggcccacacggggcgtgcagggcggggttggcgatggccagcggggcgagattcctcttgtcgccctcctgcccgggaaagcgcacgccgggtag

SEQ ID NO: 23515 - DNA, 516 bp, Zea mays
  Peptide Sequence Number=SeqID_66890
atggccgtgatgggttcaacatctgaaaagatgtacctctgtcaggaaatgtcgaaggagactgctgctggctctagccaaggtggtttagtttacttgaagtataccttaaggtacaggagccaatttgatgagctgaacgatgactggctgcatgccattgaagcaactagcgaggtgccaaagctaattgaagggtccatatcaatgcctgagccaagtcgctctgtgcccgtcaaatctaggacagaatcggctgaggagccagaactggagaaggcagtagagcagctgaagaccctaagtccaacacgcaagacggaacttccgaaggcatcaaggatccctgcaacaactccgaggaaaagaagaatggctagtgtactagacgctgttatggaatctgtaaaggcatcgactcctgcttctgctgaggtgcctagtacaaaagacgaaactttaaagaaatctgacgaagctggcacggagcaagctgtttctgagtctggaccctaa

SEQ ID NO: 23516 - DNA, 474 bp, Zea mays
  Peptide Sequence Number=SeqID_66891
atggggagtagctctctccgggcagaaagggaatcacggcttgtgggtgtcaatgagactgatggttctggttatgactatggtgctggtaagtggtattctttccgtttggaaaggatggctcgtcttagacacactgcacgaaagtctgtcatccccttcttaccctcccgtcttgctaagcgtccgcttcgccgtcccgtggccggacagtccagccacttggagagactgcaccaccgcctgcatgaggaccaggaacgtcgacgacaggagcaggagcagcagggctcttctttctcgctccaacaggagatagagtccgtgaggagctgctcccctgtgcttcccctggaggcgccccctgcaccaccactgggcgccccagcccctggagtagctgctggaggagacccagatgacgaaggtggcgacgacatctcgagccacgacaccgacttctctactgactag

SEQ ID NO: 23517 - DNA, 321 bp, Zea mays
  Peptide Sequence Number=SeqID_66892
atgaggaatacagaagctactagaaggatcggaaaatgggctgccgagctcaatgaattcactattgattatgtggaggccagggagaacactatcgaggttctgaaatatcagctccagaccacccaacaacagctcgatgaagcaaatcagcatttgggcctgcaccaccaagagattgaggacatggaggcagaaggggccgatgaggatgtagacatcgagggaggagaggagccggagcctgcatctagtttagacactgctggctcaggaagaccaccttcccctgagtctagcgttgcctcgtttgctcattag

SEQ ID NO: 23518 - DNA, 861 bp, Zea mays
  Peptide Sequence Number=SeqID_66893
atgttcgcgctgccggccgacgacaagatgcgcgccgtgcgcgggcccggcgacgcctgcggctacggctccccgcccatctcctccttcttctccaagtgcatgtggtccgagggctacaccttctcgccggcctccctccgcgccgacctccgcaagctctggcccaaggccggcgacgactacaccagcttctgtgatgtgatggaggagttccacaagcacatgcgcgccctcgcggacaagctgctggagctgttcctcatggcgctggggctcaccgacgagcaggccagcgccgtcgaggccgagcggaggatcgccgagacgatgaccgccaccatgcatctcaactggtacccgaggtgcccggacccgcggcgcgcgctggggctgatcgcgcacaccgactcgggcttcttcaccttcgtgatgcagagcctcgtgcccgggctgcagctcttccgccacgccccggaccggtgggtggcggtgccggccgtgccgggcgccttcgtcgtcaacgtgggcgacctcttccacatcctcaccaacggccggttccacagcgtgtaccaccgcgccgtcgtgaaccgggacctcgacaggatctcgctcggctacttcctcggcccgccgccgcacgccaaggtggcgccgctgcgcgaggccgtgccgcccggccgggcccccgcgtaccgcgccgtcacgtggcccgagtacatgggcgtccgcaagaaggccttcaccaccggcgcctccgcgctcaagatggtcgccctcgccgccgccgccgacctcgacgacgacggcgacgccgccgtcgtccatcagcagcagcagctagtcgtctcgtcgtag

SEQ ID NO: 23519 - DNA, 543 bp, Zea mays
  Peptide Sequence Number=SeqID_66894
agggcactatcaggcaacccggcgacctgtcacaggccgccaccactgttcacctcgcggagccgaacccaaggtattgctcatcacgagaagatctacaaaatcaggcttacatggccgattctaaagatctcaacagtgcttctccaaacagcgacacaaggctgactaatttatcggccgcagagcatgaaaacttagaagatgacatgaagcagatggatgaggagatccaacgacaacaagatcagatgctcaaggtggcaaaaaagtggtacctctcgcactttaaggtagatcgccaccagaaggtcgtaaaggagagggaaatagacgccgattacatgtcatccgtgctgcaacagctccccacgataggtgatgccagcgcacccacccaagctacactcacccacgaccgagcacaccagagtcctcccgccgccaagacgtttgtgcatttgatacaccacggcgaggccgctccgtcgtccctgaccgtggtccgccaccgcctccgcatccgatcgagcctcacccgag

SEQ ID NO: 23520 - DNA, 516 bp, Zea mays
  Peptide Sequence Number=SeqID_66895
atggagcggcaggccggggcagggagagaggagggcgtggcggcggcgccgcggaagggctgcatccgctcgacgcaggggccgtggacggtgcggcgccgcggccggggcggcgggctgacgacgtcgctgcggcacccgacgccccgcgagcgggagaacaaccggcagcgcgagcgccggcggcgccaggttgccgccaggatctacgccggcctgcgcgcccgcgccgggtacgcgctgcccaagcacgccgaccagaacgacgtgctccgcgcgctctgcgccgaggcccggctaccacgtcgacgacgagggcaacgtcacgcgtcacagggtgtcggcgacggcgcggcgggcccaagctgcagctccgatcaccagaagccttcctccataagcggaacggtggaggcggcgaccctgcagcaggagcaggagcagcagcatcaggggcagcgggaggagggagtcaacatgtcacttgagctcaccctttccttcgcctacatgtag

SEQ ID NO: 23521 - DNA, 3210 bp, Zea mays
  Peptide Sequence Number=SeqID_66896
atggtgtcggcaaacctgcggctcgtggccgcgttcttgctgccgttccttgccatcgcctccgcgtttgatctcttccaccagactgggccacggatggatccaaagatggtgccgatgggaggcggccagcctctcttcatcccgcacgagtacgtccgctccgccgacgtcaagcggcaatgccggtcggtgctgtccgccgccaccgagctcacgttcgacgccaaccgcgccaacgccctcatgccggagctcagcttcgtcaagggggactggaagcaggacgacgacggcgtgccgctgatgccgttcgacggcaccgacgtgtcgggcgatcaggcgccggacccgctgcggctggcctcgttcatgctcacgcacgtcgacgtggggttccgggggaaaacggccctcaacgtcagcggcgtgctcggcgtcgccgtctcccgcaacggcacgggccccgtgatggggacgtacgtgtcgcccgagctcaaggtgtggcccgggagcaccgagcttaagatcctcttcgagggcgtgtacaccgagaacggcgacggcgagagcgtgctctgcatggtcggcgacgccctgctgccgaggcgcggcagcgacggcggcaacccctgggactgggccaaggacaccggccgcgacagcttccagccgccggtcaccaaggacggaaacctactgctcgtgctccggtacccgacgacgctcacgctgacgacgcgcgccgtgcgcggcgagctgacgagcacgagcgccaagtcggacgtcgcgtacttcgacgccgtgcacctgctgtcgcagctgggcgcctactccaactacaagttcggctccgagaagctcgtggacagagcgtgcagcgctcacccttaccgcgacgacatcctcggcggcggccggggcctgtacaggggcaactccttctgcggcatcctcgaccggttcacgtcggaggacgtgctcgccgtcgtcccgaactggcggtgcaactccacggacgcgttctgccgaaggctcgggccgttcgagacggacaagaccgtcgacgcgacggacggtgccttcacggacgtgagagtcgtgatgcaggacgtccggtgcgagccgaggaacgccccgggcggcgagagcacggcgcgggtgtcggccgtgttccgcgccgtgccgccgtgggagcacaagtactcggcggggaagcggagcgggctcggcggcacgaccctctcggccgagggggtgtggcgcgcgtccacggggcagctctgcatggtgggctgcctcggcgtcggcgccgaggcgtgccactcccgcgtgtgcctgtacgtgcagaccaccttcacggccacccgccgcagcctcacggtggggcagatcacccgcgtcgacggcggcggcggcggcgttgcccacttcccgctcacgatcaaacacacggtgcacccgatggagctctggagccgcgagccgttcgaattcggggccgccctcgccaagtcgctcctcagctacccgaagaaagccgaaggcctcaacgacgacgcgatgagcttgtccagcctcgcggccgacctcaccctccacgtcgcggccgtgccagacccgttccctcgtgaacggttcgagcggtcgttctttcagctggaggtgctctcgctcggatcactcgtcggccgtacctcgatagagcagttggctacggagtttcccggaatgcccggcgagctcggagggggcaaagcgtcctcctggacgtcgtcgcagtcagagtcctcatcgacgacgtcgtcgtcgtcgcagccagcagagtcatctcttctcaacgtgtccgccgaggtctcgctgtccgggaatccttacgggaacgtgtcgagcttgttcatggaaggcgtgtacaatccggtgaatggacggatgtacctgatcggctgccgaagcattcaagcgactcggcaaaccttctcggcgctgaaagaggtcgaggatggcatggactgctcgatcgagatgagggtggattacccgccgacgacggcgcggtggctgataaaccccacggtgaaggtgcacgtagccagcacgcgcgaccccggcgacccgctgcacttcaacgcgaccaagctccagacgctgccgatcatgtaccgggagcagcggcaggacatcctgtcccggcgcagcgtcgaggggatcctccgcatcgcgacgctggcggcggccatcgccgtggagctgagccagctgatgtacatcaaggcgaacaccgacgtgatgccgtacgtgtcgctggtgatgctgggcgtgcaggcggtcgggtacagcgtgccgctgatcaccggcgccgaggccctgttcgcccgcatcgccgcgggctctgacgacggcgccgtgccgccgtcgtacgaggtggacaagagcagcctgtactggaccatcgactgcatcgtgaagatcctcatcctcgccgcgttcctcctgacgctccggctggcgcagaaggtctggcggtcgcgcatccggctgctgacgcggtcgccgctggagcccggccgcgtgccgagcgaccggaaggtgctggtctacagcctcggcgcgcacctggtgggcttcgcggtggtcctggcggcgcactacgtgaacgtgtacagccggccggtgcgggacgacgggtcgtacatggacgcgcgcgggaggacgcacgcgctgcgggagtgggcggtgacgctggaggagtacatcgggatggcgcaggatttcttcctcctcccgcaggtggtcggcaacgtggtgtggcggatcaactgcaagccgctgaagaagagctactacgtcggcgtgacggcggtgcggctgctgccgcacctgtacgactacatcaaggcgccggccatcaatccctacttcgccgaggagtacgagttcgtgaacacgagcctggacttctactcccggttcggcgatgtggcgatcccgctcgtggccgtggcgctggccgccgccgtgtacgtgcagcagaggtggaactacaagatcatcagcaagaccgtgaagacgcagcagaagaagctgcagcacctcgggtccagggtgtacgagcggctgccgtccatgtcgtcggggaacttcgaggccgagctcgtctccggcgtcaacgagggcgtcggcctgcggcgggacaccagcttgagctga

SEQ ID NO: 23522 - DNA, 501 bp, Zea mays
  Peptide Sequence Number=SeqID_66897
atgccggcgccgcccgcaccggcgaccgccgcgccgcagctggtggtcctcggcggcatctgggtcccgccggagtacgcgtcgcaggcggcggggcaggccatctacggcgcgcacccggcgacgcagccgcactacacggcggcggcggcgcaggagtactacccgtcccccgccgcggtgcaccacctccagcaccacccggcggccgccgccatggtgcaccgtgcggccgcggcaccgccgccgccgcagcaggccgcgtacagcaaggcggcggcgatggcgggctcgcctcccggatcggaagggcggggcagcgccggaggaggcagcatcggcggcggaggcgggagggagaggtcggagagcatcgaggaggaaggcgaggtggaggagcgggaagaggatgacgaagacgacgacgacgacatgacggccaacaaggccgacggcgagggggccgccgccggtgccggagtcggcgccgccatgtactaa

SEQ ID NO: 23523 - DNA, 777 bp, Zea mays
  Peptide Sequence Number=SeqID_66898
atgaccgtaacgccctgccccgtaagagaagcagattatctgcctagtactatgtgccctttgtgcgaagattctcacactagggatcgaacggcgcttagcacttgcgcgaagggcacgctcgccaacgcagatagagcggagcgcagggggcattgggcggcggcggagctcaactgcaactctgcgtggcctggtgcttgggctccctgctgcgcggtgttcctcttctcgggctggtgccgaggacgtctccctcggctccggcagcggctccagtatctccgtcaacctcccgccgtgcaggattctcgcgcggggctggcgctccccgttccacacgtcctgctcctgccgccgatcgagcgccgaaccgggaggcacgagcacgacgacggatccggtccattcttggtcgcgcttgtgccgcgcctgtcgatcgcgtcgtccgtcgcaacgggggcagcgggcaccgggggaagtggcgggcgcctggcggccccaccgtgccggcgcgctgctgctgctgctgcggtgcggtgggtcgccaccgcccggcaggcgccagacaggggaggggccgccgccagcgcccatccttatcagctcctacagcgtccgacgctcgcctcgatcgctcctatagcaactccagttgcttactgcctgtcctctgccgtctggccctgcaaaggcctttacgccaccacctgtgctgtgttgaatggctactcgtctgcagctgacgctgacagcgaggaggaattgagagaatga

SEQ ID NO: 23524 - DNA, 320 bp, Zea mays
  Peptide Sequence Number=SeqID_66899
caactagcccaacaagcgggcgtcccgatgccgacatatgggatgccgcctccggagtttgcactgccaatgccaatgttggcgcctccacctccgcctccgcctccgtcacaattccctatgggatttcagacaccacccgcttcagttgccgcacctggagatgggtctggacgatgaaggacaagaagcaagttgagacaagctcaaactcaagctctttaagtaaagatgaagacgaaaatgaggatgatgatcaagccttcagctcctcctctaatgtcgatgaagaaacaatcaaattaatcaagaaggtttga

SEQ ID NO: 23525 - DNA, 1005 bp, Zea mays
  Peptide Sequence Number=SeqID_66900
atgacgttgacctccctgtcaacgcgcgggaatgctccgcccctccccattcttgctgctgaggctgcctgggctcgccaggccctcctcgcggtgggggaggtgtgtctgttcgcctccgcggggcgcaccacgggctcgagcgacgggtggtctagcggcgtgtacctcctcacgagtcctcttctcccagtgcctatcaagttgttggttcgtgtcacgccgtggcgcgggcggtgtaggtttcgtacctccgatgaggtcttgggcccgctcgtcagtggtgatgtagaggtctgcctctcaaaacagttgttcggaggtggtgggcgctttctgtcgtatggctcagacgaaggccgagtcattggatcctcggtagaaattttcaatcaccgctgcctcgccgacttcggggatgcggttcctcatggtctgaaacctcttgaggaggccatcagctatctgggccagcacccctccaacttcgctcggtgtgttcattgcacgagcgaagtcggggttcgggtttcgagcgaagagatggttctctcggtgcaaccttccgccttgctcggcttgctcccgctctcggtcctgagcctgccagcgatcatggcggcgagaattccgtatttctcagtgtactcgctcgtcgggagtttctcccacttccgaaacttcgtcctgagatacgggttgtgccgggtcccgctccccagcctcttgatgtcgccgaacattctggcgtctgttccttcgtcgtcgcgcctcacgctggggagggcgaaggcgccggaaagaagacttggcgaggtcctgtccccttactcgggacgaggctgcgccacccgttgttctgctccggttttcccggggatcaccgaggaaagattcttctccggcgggtctgctatgcggtgcagagttcctttctcatctactatggacgagatagttccgaagcagaactcggatccagggcgaagagcgatcttgcactag

SEQ ID NO: 23526 - DNA, 516 bp, Zea mays
  Peptide Sequence Number=SeqID_66901
atgggtagaggcaggaggggtcgtggttggcctcgccgcgctgacggcaagcgcaggcatgctccgagtccccctcggaggactttggggactcggagtacttggaggaggcctcctccgagtctgaccgctcgcctgctccggcttctcccccggcatcatctgaggactcagatgactacatggggctctccaccgcggcccgggcgtactagcgctccatcgagcgtgccaggctcggtgggtcgaatcagtcggggggtctcctcggttgaggaagactccgacacttctgaggagtggagctgcggcgacgatgacgacgagggcgacggcagcagcgacgacagcagcgagggtgacggcggcgatggctacaacgacagcagcggcgagggtgacggcggcggcgacggttgcagcggcggcagcaagggtgacggtggtgacggcggcggcgacggcggcgatggcaaggccagtggcataatgccaccggttaaattattagtatag

SEQ ID NO: 23527 - DNA, 321 bp, Zea mays
  Peptide Sequence Number=SeqID_66902
atgaggtgcttcaagatcctcctgctggtatccctcatccctctcgtgctcaggggggtctcgcttctgggcaacgtcatccctgcaccatcgccgcgcgggcagccgtcgtcgtccagcccccggacgaacggcgccgccaccgttccttctccgctttcttcggcctcctcgcgcgtgggcgtgggccgtggccgtgcccagctccccgccgccgccgtcgcccagcggcggttcggcggcgacggcggcggcggcggcttcttcagggacgacaagaggttctccccgaccggctccaacccgttgcacaacttgtga

SEQ ID NO: 23528 - DNA, 1010 bp, Zea mays
  Peptide Sequence Number=SeqID_66903
atggcactcggcaaacaaggaaacctgggaaccggcaaagacatctttgccgagtgccattgccaaggcactcggcaaagggactggcaaaggggcccactggagggttctttgccgagtacctgtccaacagacactcggcaaagaagcctcctttgccgagtgcctactagagctctcggcacagggactggcagtggggtccactgggtcagtctttgccgagggcctctcgatcaaacactcggcaacattgacctctttgccgagtgccacagacggcactcggcaaaggatccgtcaccgttacttggcgccgtgacggtgacttttctttgccgagtgccatttggcactcggcaaagtctttgccgagtgcccgacaaaaagtactcggcaaagaggctgttgccgataagggcgggcatcggcttggaaagccttggacttgctccaaactgcattttgctgctggttcctgaacaatgcgggtggggtgtggatgattcacaagttgtgcaacgggttggagccggtcggggagaacctcttgtcgtccctgaagaagccgccgccgccgccgtcgccgccgaaccgccgctgggcgacggcggcggcggggagctgggcacggccacggcccacgcccacgcgcgaggaggccgaagaaagcggagaaggaacggtggcggcgccgttcgtccgggggctggacgacgacggctgcccgcgcggcgatggtgcagggatgacgttgcccagaagcgagacccccctgagcacgagagggatgagggataccagcaggaggatcttgaagcacctcatcttgtctgtctctgcaccgtaccgtataccgtaccctgtgagagcttggctgccgctccaagtcctaggcgtggtggtagcaagcccgagagagctgagcctgagggagggagggagggtgtgcaggtggtgagggaactggttattggacttgccaatgggagtgcagcagagatggcaat

SEQ ID NO: 23529 - DNA, 129 bp, Zea mays
  Peptide Sequence Number=SeqID_66904
atgggatttttattaccagttatttttaagattaaggatgatgagtatccgttggtgtcttcaacaaatactaaaaacttgactttagtcctcgtgctcgacaaagaaggctctagtggacccctttag

SEQ ID NO: 23530 - DNA, 234 bp, Zea mays
  Peptide Sequence Number=SeqID_66905
atggaagtgaaagaacctgggcgtggaggatctgccccagttctttaccggcgtgattcgcaagcatcgtctcaactgacggaggaaggaaacaacgatagttgcagcgaagattgtcgaatcaggatttcgaggggctgtgatatacttagctcctcacaaggcgctaatgattgcggccttgaacgtttccctcaaacacaagaagagtctagctcccaagtcaataactga

SEQ ID NO: 23531 - DNA, 276 bp, Zea mays
  Peptide Sequence Number=SeqID_66906
atggagtcatgtcgcctgactgctggtcaggaaacgaacaaacgaaaaactacagaaggatgcacgtccgtccagcgagctcagtcagctcaccccttttctaccgcagccgtgaacgagctgtcagccagccagggacggaggcggcagaaaggggtgaagtcgggtggcgtcgcatcgggaatgggtcggcggcggaaacaggacagcgagcagactgatttaggtggtgtcgaaaagattagagttagacagctaactgttaactggttttag

SEQ ID NO: 23532 - DNA, 300 bp, Zea mays
  Peptide Sequence Number=SeqID_66907
atgggactgtcggtgggggagagggcctacctccacagcatcaagtgcgccagcttcgatgactcaaaggagtctgaggaggaggaaaaggacgatgaggacgggtacgatggtggcaaggcagtgcagccagaaaggtcggcagcggcgacgacaacaatggtggctgcgacgataaaggtggcggcaacggtaacagcaacaggggaagcaacaatggcggtggcaagtgattctattaagcatttgggtgttggagctattggaaatgtgtataacattgcttggcaagatgaatga

SEQ ID NO: 23533 - DNA, 465 bp, Zea mays
  Peptide Sequence Number=SeqID_66908
atggcccacgacattttggttggaagctcgatagtgaagatggtggagagcgtcctagaggaggccgatagcagagaacctcttgcgcgtgaaaatgagcttaattatattggaattaataagttaggttatgcggacattgtgaggaaaatcaactcccttctaccacaacgaaaatatgagagcatcatcaccatccttcacaacttagagttcttgagccaaatgaccctgacattcgtgattggaaagattgtggaatttgagatatcacgaaatatgggccaagaggaagccacttcatcaaagccatatgcctttgcatgtgatgaaaagaagaaaggcaagaagactcttatctcaagctcctcaagtgaagaagaggaatatgaagaagaagaagatgatgatgatgaagatgatcaagcatcgacatcatcctctgaggacaaagaaatgatctaa

SEQ ID NO: 23534 - DNA, 105 bp, Zea mays
  Peptide Sequence Number=SeqID_66909
atggcgccgagtgttataggtgagatgccggatctaacgtgggagtatggagaggaaattagggatggttttaggtgcaagtattaccgtaaagtgaagagctaa

SEQ ID NO: 23535 - DNA, 621 bp, Zea mays
  Peptide Sequence Number=SeqID_66910
atggctgcctgggggtgggaggagtcggtctctctctgcttgctccgatggcttcagctgcctgcgagaagcaaggtggaagactggaatggaagggagcggaacaaggacaagccgccatcttccgaagaaaaagaggaccataagacctcaatgagccaggtttgccaaaccagccagcttggcgaatccaaagccaacattggtggagtgatgagctttggtggagtgccagccggcggcttccacaacgatgccaaccccgatgacagcttcatgagcctgatgctgaaggcccagagaccgcgtgaaaccgatggcagcggtctcctccatgatgtcatcactcatcactccgatgagagcgcgcggttcatggcgtaccacctgacagagtttgggaggtatgggaacaacaacgtctcattgactctggggttgcagcatgccgagaacacccagccgggcttcccaggcgtcagagaccaagacatctacaactccacagctcctctcaacgtcacctccacatcttcagagtatgattcggcgagccaaatagatcaacaacaacggcagcggtttgaggtgtcacctctgatgcatgattttgtggcctga

SEQ ID NO: 23536 - DNA, 237 bp, Zea mays
  Peptide Sequence Number=SeqID_66911
atggagatggaggcgaggatgatggtgaagcgggaggcggagagggtggctcgattggcagataagcagaggatggcgaagatgttacagtacatgcagagccttgacgccgcacaggggacaatctgcaacatcaaacaaccctcatggatcgcccagcccatcgtcgaaccagtccagtcgctcacctcgctgataacatttgtgttggtgacatgtttgagaaacttgttgtga

SEQ ID NO: 23537 - DNA, 678 bp, Zea mays
  Peptide Sequence Number=SeqID_66912
atgaaaacgatcaacgttcgatactctgaaaattgtaactttgaacagccaacagttaaacagcagtacaatacaagcaggcatgcagcagcacatggtcatcgactcaccgttggtgtaaaatcaatagtaaattgggggctagagacaaccgtgtctactgaaacggcacccctgctccatggagcacctctgtctacacatatatgccgggcgcgtcatcctaggacgcttgctgccattgcacagtcaaaagaggatcagattagcttgctgatcggtacacaacaggcactacctcctctgcaagatggtcagttggtcgttctcgctgtcggcaacctccaaccaggggcgaacccaggcccatggccacctcggccacggcccggggcgcggtttaacgggtcccgcgggaaacggggatggagaatgcttcctcatccccatttacccgtcggggaagaattcccccatttacatccctgtggaggagaaactccctcatccccatcctctaatgacccagatgagcaggggaagaagatggtttgcctcctgggtgaggatctgtcgatagccctccgtatccagagtgcagggcaggctgttggcgatctgggccagaacttcgccgacttcactcggcatgtgcacggctcgaacgaagtcgggtag

SEQ ID NO: 23538 - DNA, 60 bp, Zea mays
  Peptide Sequence Number=SeqID_66913
atggcatactgcctggctctatcttcctgctttgcaaaaagactctatatctatgtttag

SEQ ID NO: 23539 - DNA, 522 bp, Zea mays
  Peptide Sequence Number=SeqID_66914
atggagtcaaaccactcctccgaggcctcgagggctacacccggcggagtgaggctaacagcagccaagtccggcctcgggcgccataggaagctccgcctcgcccgaccccagggctcggactcgggctcggccccggaagacgacgaactccgcctcgcccgaccccagggctcggactcgggctcggccccggaagacgacgaactccgcctcgcccgaccccagggctcggactcgggctcggccccggaagacgacgaactccgccctcgcccgacctcagggctcggactcgggctcggcccccggaagaggacgaactccgcctcgtccgaccccagggctcggactcggcctcggctccagacgacggtctccgcctcgcccgacccggggctcggactcgacctcgacctcggaagacagactcgaccccgacctcggaggagcctccgcctcgcccgacccagggctcggaccgaccacgtcacagggggggcatcattaccctacccctag

SEQ ID NO: 23540 - DNA, 471 bp, Zea mays
  Peptide Sequence Number=SeqID_66915
atgcaggcggcatgcaaccgcaccaagggggcgcaccctttcgacttcgacgcgtttagcatgagggcccaggcccgcacgtcatgtgaccggcgcgccggttactgcgtacaagaaactgcaccgccactcgcgccactaccgtgcctcctcgactgtggagccagtaccgcgactcgaggcaaccctgcgcatgaccctacggtgccaaccaggcacatcggtcacggggaccgggaaaggggataccccgaaagggatccttctccgcgaaggaagcgggccccgagcccccctactaataagaggttcaaaggctggcccctcggaagggttcaacaaccgcctcagagcactcggggctccgcgcccactactggtcagaggttcgaaggccggcccctcgaaagggttcaacggacgcctcaggccacttgggctccgcacccactactgatcaggggttcgtag

SEQ ID NO: 23541 - DNA, 1824 bp, Zea mays
  Peptide Sequence Number=SeqID_66916
atggccgcagacgcactatccatcatcccgggcgccgtgcttcggaacctttctgacaagctctacgagaagaggaaaaacgccgcgctcgagattgaggggattgtgaagcagcttgcaatggctggggagcatgagaggatatcagcagttatctcgctgctcaccaacgatttcacatactcgccacaaacgaaccatcggaagggtgggttgattggtcttgcagcagttactgttggactcaccagtgaggcagctcagcatcttgagcaaatcgtgcctcctgtgcttaattctttcctggaccaagatagcagagtgcgttactatgcttgtgaagcgctatacaacatagcaaaggttgtaagaggggatttcatcatctacttcaacaaaatttttgatgctttatgcaagctttctgcagattccgatgctaatgttcaaagtgcagctcaccttcttgacaggcttgtcaaggatatcgtaaccgagagtgaccagttcagccatgagataaggcagcaagctgatgcagcactttctgagtttctgcaggagataaagaactcaccaatcaacgagtttgtgaagcttggtggggaacaacttgttccttactatgcagatatactgggtgctatcttaccatgcatatctgacgaggaggagaaaatccgagtggttgcacgtgaaacaaatgaggaactacgtgctataaaagctgatccaactgagggatttgatattggagcaatcctttcaatcgcaaaaagagaattaaacagtgagcatgaggccacacgaactgaagcattgcattggttcttcactttgctggatcaatatcgtgctgagttcttggcgtacctgaacgatatttttgatccactccttaatgcactttctgatccttcagacgtggttgtcctattagtattggaagttcatgcacgtatagctgaagagtctcaccacttccatcatcttgtatcctacctaatctgcaccttccacaacaaccattttctactggagaagcgtggtgctttgatagtccgtcgcctctgcgttcttctgggtgctgaaaaagtatatcgtgagttctccactattcttgagagtgaagttgaccttgattttgcatccgtcatggttcaggctttgaatttgattttgctcacatcaactgaacttggtgagctccgctctcttcttaagaagtcgttagtggattcctgtggcaaggacttgtttcagtcattatatgcttcgtggcgccactctccgatggctacaataagtttgtgtttacttgctcaggcatacagtcatgcgagctgtgttattcagtcgctgggagaagaagacataaatgtgaaatttttggttcagttagataaattgatccgtctcttagagactccagtatttgcttacttgcgtttgcagcttcttgagcctggaaagcacacctggcttctgaaaactctttatggtctcctgatgctgttgcctcagcaaagtgcggccttcaagatcttgaggactcgactgaaaactgtgccattcagtgaaaatattaagcgcacatcttcagcaaatccatactcccagattctgcaagtgacagaagatggcaatagaaaccaagatacacagaactatagtgcaatcaatttcccgtcccttctccagcaatttgagcacatgcagctgcagcaccgtaaccatttgaaggatcaactgcaatcccgcaaatctgcttcagctctaacgttatctcaggttcctttttttggcttttgctcacatatttga

SEQ ID NO: 23542 - DNA, 408 bp, Zea mays
  Peptide Sequence Number=SeqID_66917
atggggaaaaatccccaccaacaacccacatcaggaaatggaatccgagcagctggggacagggccggccgaaccgccgaagagcaggcgagcagcaggagtccaacgggcgacggaacggatggagctggagggctgctggatgcctggacggtggacgccgacctggtgccctggtcgcctggacggctggactcctggagcagtggagcgtgcgtccgctactcagctggagctgggaggctgggagcagagcaccggagcaaacacaggatgctacaacttgccagcttggactctcatcgcggtgagggctgcccgaacagcggtttccctgtgaccgcaagcctcatctcggctgtcaattttgatttgagacccgtgctgaggggagggaaggggaattaa

SEQ ID NO: 23543 - DNA, 384 bp, Zea mays
  Peptide Sequence Number=SeqID_66918
atgccgctgtcattgccatgggtcaccgcacccggacctagccatgaccggacctctgctctcgtgaggcgggccgtggaggttcctcgtggcacggggaaagcggttcaagggagtcagtgtggagaaagttcatcccgggctacggcgatttctcaccggagatcgtgttcctccgtggagtcgcacgttgccgcgagcgtgtgtctgtgcgcgaagaatctcgtgcgaggttacgagtcatccgaagagcaagttggtacctggaagctcaagtcccagacaagttgtgcccttgatcacttctttttacccaatcatgttctaattaatcataatgatctgcataggttaattttgatggcacccaataggttaccctag

SEQ ID NO: 23544 - DNA, 174 bp, Zea mays
  Peptide Sequence Number=SeqID_66919
atggagagtcatgatctccgggcagaatgggaatcacggcttgtgggtggttatgagattgatggttctggttatggttatggtgctggttgtcagcattgcaaccactgctcaggcgaagatgaagctgtggaaggagacttccaggagttccaagattacgacgagttctag

SEQ ID NO: 23545 - DNA, 327 bp, Zea mays
  Peptide Sequence Number=SeqID_66920
atggtgatgcttgcgccgccgcgatgccgctgtcattgccatgggtcgccgcacccggacctcgccatgaccggacctctgctctcgtggggcggccgtggaggttcctcgtggcacggggaagcggttcatggagtcagtgtggagaaagttcatcccgggctacggcgatttctcaccggagatggtgttcctccgtggagtcgcacgttgccgcgagcgtgtgtctgtgcgcgaagaatctcggactggggcgccgtcacggccgtcgccggcttgcccaccaccgcgggggcacagggcgccaccgtccctggccgtcggtag

SEQ ID NO: 23546 - DNA, 78 bp, Zea mays
  Peptide Sequence Number=SeqID_66921
atgggaacaaatgggcatctcaacatcgacacgggaggttccaggcaaatcctaaggaagttcaccttagggccttga

SEQ ID NO: 23547 - DNA, 465 bp, Zea mays
  Peptide Sequence Number=SeqID_66922
atggcgcccctctccccttctccctcaagcaagcagcgcccttccctgtgctccagccgacctcctctgcccacgctcctccttctagcgagcggctgcagcagggggccttctcccccagcgcgcagggagcttcctcccttcctctccatggcatcgtccccaaccttccagccgtggtacatgtctcatcctcggctccctcaccttccacatgcagcagcggacctcctcctttggctcgtcctccccctgctctccgaccagcaagaagccagcgacctctccagcttacccgtggtgctcggctggccagcgcccctccctgggccgaccttggcctcagccaggtctctgtccatgtcacccatggagcacctgggcgttttggctcagattcctgctggcattgagctcaccaacccagcggagcacctccaacagccatggcatcctccttcctaa

SEQ ID NO: 23548 - DNA, 141 bp, Zea mays
  Peptide Sequence Number=SeqID_66923
atgggtcgggagattggctctttccaggcagaatgggaatcacggcttgtgggtaaagtgtgcgacctctgcagagtgttagaaactggtatatctatcgtgctcacggttaagagcagccttgagatcctctttgattag

SEQ ID NO: 23549 - DNA, 411 bp, Zea mays
  Peptide Sequence Number=SeqID_66924
atgggcaaggacaagaagggtcagggctcaccgcgtcgctccggtgacaaatggaagcgtgaaccgagtccttcatcggaggactttggtgactccgagtactcggaggaggagatctcctccgagtccgaggggtctccggggatagccgccgaggtgtggatgtacatccggtccatcgagcgcgccgggctcgagggttcggatgagtcggaggtctcctcatacgaggagaactcttccgactcatctgaggaagggagcagcggtgacagcgacgacgagggcgacgacggtgacgacggcggcaagggtggcggaggcgacgacagcggcaagggcggcgacgacgacaagggcggcagcagcagcagcaacagcaaggccagtggcaaagcgccactggcttaa

SEQ ID NO: 23550 - DNA, 1356 bp, Zea mays
  Peptide Sequence Number=SeqID_66925
atgcccaagccggcgacggcgaaccggcgccggaagcgcggcggcggcggcggcgaggggggcgccgccgatgaacaggccagcagcaagaggaggcccgccaccagcgtgctcacctccctggacgtcaacgacgccccgcgcccggagctccccctcttccagctgagccgacctcgccagcaggcggaacaggacgacgaagaggaggaggtgaccggtgggggcggaggaggaggagcggggtcgtcgttgtcatccgtggtcaacggccacgggcagagcccgcaccagcagcggcggctgtgggtcaaggaccggtcgcgcgcgtggtgggagcagtgcagcagcgccgactacccggaggcggacttccggtccgccttccggatggggcgcgccaccttcgcgatgctgtgcgacgcgctgggcgcggccgtggccaaggaggacaccgcgctccgcgccgccatccccgtccggcagcgcgtggcggtgtgcgtgtggcggctcgccacgggggagccgctccgcctcgtgtccaagcgcttcggcctcggcatctccacctgccacaagctggtcctggaggtctgcgccgccatccggggcctcctgatgccgcgcttcctccgctggcccgatgacgccgccgccgaggcgttcaagtcccggttccaggcggagtccgggatccccagcgtggtgggcgccatctacaccacccacatccccatcatcgcgcccaaggtgtcggtgaccgcctacttcaaccgccggcacacggagcgcaaccacaagacgtcctactccatcacgctgcagggggtggtggaccccgacggcgccttcaccgacgtctgcatcggctggcccgggtccatgcccgacgaccaggtgctggagcggtcggcgctgcagcagcgcgcggcggccgggatgatggcggggtcctgggtggtgggcggcgtcagcttcccgctcacggagtgggtgctggccccctacgcgcaggccaacctgacgtgggcgcagcacgccttcaacgagaaggtggcggaggtccggcgcgtcgccgtggacgccttcgcgcgcctcaagggccggtgggcgtgcctgcagaagcgcacggaggtgaagctgcaggacctcccggtggtgctgggcgcctgctgcgtgctgcacaacatctgcgagtcgcgcggggagggcatggaccccgcgctccgatgcgacatcgacgacgacgagacggtgccggagaaccccgtgcggtcggacggcgccaccaaggctagggacgacatcgcgcacaacctgctccacagcggacgagccggcaccaaattcttctga

SEQ ID NO: 23551 - DNA, 159 bp, Zea mays
  Peptide Sequence Number=SeqID_66926
atgacgaccgacaggccgcttgagctactccgcatggatctattcggcctgattgcttacataagcatcggcgggagaaaaatctcaaacccaagaaaccttaaagggattcttgagatgagctcaaaacgagttcgacttaaggatcaagaaaattag

SEQ ID NO: 23552 - DNA, 522 bp, Zea mays
  Peptide Sequence Number=SeqID_66927
atggctaggatcatccacagacgcgtcggtgtgctggctgaatcaccatcgttgatgaatggatctacggtcaggggcttacttctttttctttcaatccagagcgctcatcattacacggacggtccccgctcatcttcaatctcgcgacaccaggtcgcgctggtgcccatcccggcgacggcggtgcacaccgacgcacggcatcccggcaaccaacgccctaaatccccgcctgacctgagctataccatgctacacgccccaccagcccgttgggaaatcaattcctacagtgagcctacgcagaggcacgccatggaccgcagtggatcagccgcgagtccgccatgccctcgagagattccgggcgattctgacccccacacgccaaatccaaccccaataatcacaggggagatgcacacggtcaagatgcaagagatcataccaggaataaggatgcaggggtacccagccacgacgtacggcggatttgagggtgaggttttgcgccggtga

SEQ ID NO: 23553 - DNA, 66 bp, Zea mays
  Peptide Sequence Number=SeqID_66928
atggctgggaaaagactcggcctcaataacagggaaaactggggtttagagcgcaaaaatgcctaa

SEQ ID NO: 23554 - DNA, 411 bp, Zea mays
  Peptide Sequence Number=SeqID_66929
atggtgacctccagttcgatggcgggggaaagcaagccgggctgcggcctctgcccctccttcagcctcaaggattttcattaccagggctggggaggggactgccgcgtgcctggctctcggacccgagtggcttcggagccgctctcggcgccggctcccgccacgacagctggaagaggttcttccgccgacgagatagctgtaacacccggatttagcggacaaagccggaggttgcgcatctttacccacaagtcatgttacccatctgccaagagatggccaatcccatacacctctactgaggaggcgaggcaggggttcttgcctgaccgccatcgcagcaaaatcaaccaaggacctccctacactgaccactcccctactgcccttgcccctttcgggtaa

SEQ ID NO: 23555 - DNA, 780 bp, Zea mays
  Peptide Sequence Number=SeqID_66930
atggctgaaaggtaccaactcccacggagttgcgttcccccaacgacaaggcggaaggactacgggcatcccccatccgggggctcagaaggtggaaagacacgatgcataagggagcacgaagacatggtcgcctttcaagggggtcaccctccttttaaagagcagaagaagccaaactgccgcgcgcggtgcattcaaccgcccagcggttacaagcggccctccactttcgccctgaccagcgggcgaaagggcgggcagccatgcaggcggcatgcaaccgcgccaagtgggcacacttctccgacttccaacacgcccagcatggaggcccaggcccacgcgtcatgcaaccggcgcaccagtcgctacgtgcaagcaactgcaccaccactcacaccactaccatgcctcctcgactgcggaatcagcaccgcgactcgaggcaaccctgcgtacgacccagcagtgccagccaggcgcgacggtcaatgcggccaaaaatgggccgacagtgatggcggtggcaggcgggcgggagcagcggtcacgtcgggaagcgagcaacgcttcgccttcgccataatgactgcgtcaaaaaaggctccgagcctccctactgatcagaggttcgaaggctggccccacggaggggttcagcagccgcctcagagcgcgtgggctccacacccactactggtcagaggttcgaaggccggcccctcggaagggttcaacaaccgcctcaggctactcgggctccgcgcccactactaa

SEQ ID NO: 23556 - DNA, 312 bp, Zea mays
  Peptide Sequence Number=SeqID_66931
atgaagatcaacgccggccgccgcgacgacgggattgcagcggcgacgctcctggccgccgttcttttcggatgtctcgcgacctccgtgcagtgtgctcgagtagtgccagcagatgccactaccggagacggagagcgcgggcaggaggcggagttggcgttgccgccgccgttctgctacaaggcgtgcggcaacgggcgctgcgacttctgctgcgccagccagtacacgccgacgttctgctgggacacccaggccatgtgcaagcgcgagtgccatccgcccatcagccctcccagttccgtatga

SEQ ID NO: 23557 - DNA, 147 bp, Zea mays
  Peptide Sequence Number=SeqID_66932
atggggattagctctccccaggcaaaatgggaattacggctcatgggtggtgacaaggatgatggttatgactatggtaatggtaaagaagaaggcgtcgaggcgaatctccaggagttccaggacttcgacgagttcgaggattag

SEQ ID NO: 23558 - DNA, 450 bp, Zea mays
  Peptide Sequence Number=SeqID_66933
atgggcaagagcaagaagggtggtagttcttcgcatcactctggcgacaagcgtgagccgactcctccctcggaggacttcggcgactcggagtactcggaggaggagttctcctccgagtccgagggctctccgatccatgcctctcccccggcgtcatctgatgactcagacgactcccaggggatcgccgcagaggtgtggacatacatccgggccgtcgagcacgacgggctcgagggctcggatgagtcggagtactcctcggacgaggagaactcctcggagtccgaggagggcggaggcagtgatggcagtgacggcaacgacgacggaggcgatggtggtggcggcgacgacagcagtaatggcagcaagggcaacaacaggggcagcaacaagggcagcaacaagggcagcaacaagggcagcaacaaggctagtggctag

SEQ ID NO: 23559 - DNA, 771 bp, Zea mays
  Peptide Sequence Number=SeqID_66934
atgtgggggacagatatcccctgggtccaccagaaggacaagatgcctcccgaggggcccgtgggcccaataatccgcaaggtcatcccttcgtgggctgatgccagggctgagtccgagccctggggtcgggcgaagcggagttcgtcgtccttcggggctgagcccgagtccgagccctcgggtcgggcgaggcagagttcgtcgtcttccggggctgagcccaagtccgagccctggggtcgggcggagcggagttcgtcgtcttccggggccgagcccgagtccgagccctggggtcgggcggagcggagtttgccgtctttcggggctgagcccgagtccgagccctggggtcgggcggagcggagttcgccgtcttccggggctgagcccgagtccgagccctggggtcgggcggagcggagttcgccgtcttctggggctgagcccgagtccgagccctggggtcgggcggagcggagttcgccgtctttcggggctgagcccaagtccgagccctggggtcgggcggagcggagttcgccgtcttccggggctgagcccgagtccgagccctggggtcgagcgaagcggagtttcctatggcgcctgaggtcggacttggctgctatcagcctcactctgtcgagtggcactgcagtcggagcggcgcaggcggcgctgtcctcttgtcagaccggtcagtggagcggcgaagtgactacggtcacttcggctctgtcgactggggggcgtgcgtcaggataa

SEQ ID NO: 23560 - DNA, 105 bp, Zea mays
  Peptide Sequence Number=SeqID_66935
atggctcgacggtgcactgacttcgaggagaggaagaaaaacgtatcctcgctgcttctcgcgacaatctggatagattgtaccgagattctagcaattcgctga

SEQ ID NO: 23561 - DNA, 483 bp, Zea mays
  Peptide Sequence Number=SeqID_66936
atgggcaagagcaacaagcgcaagcgcgaaccgactcctccatcagaggatttcggtgactcggaatactcggaggaggagttctcctccgagtccgagaggtctccggctcccgtctctcccccggcgtcgtccgatgactcggacgactcccaggggatagccgcggaagtctggacgtacatccgggccgtcgagcgctccgggctcgagggctcggatgagtcggagtactcctcggatgaggaggactcggatggcggcggcgaggacgaggacgaggacgacgacgacgacggtggcgacagcgacggcagcggcgacggcaggggcagcggcgacggcggcaggggcagcaccaaaggcggcagcggcgacggcaggggcagcggcgacggcggcaggggcagcaccaaaggcggcagcagcaagggcaacaccaagggcggcggcggcagcaggggcagggccagtggcgtctag

SEQ ID NO: 23562 - DNA, 342 bp, Zea mays
  Peptide Sequence Number=SeqID_66937
atggagcagtggcgcgaggccgaggccatgccggcggaggcggagcggtcgcgcgaggttgcggacgtgcggggtcaggtcacgtcgtggctacagaacgcgatgggcctcccgacgctattcgatgtggcgtcggacgcgacgctgggcgccttggccgccgacgccaacgagttcctagacagcgctggagtgagggcggcgctgggcgtccggggcgacgcgccgccgtttgtgctcgacggcccgactgtcgacactagtacaaaaaggctcaaagcctacggggacgatatatttttacaggcggtttcggttatccaccgactgtgttatttctag

SEQ ID NO: 23563 - DNA, 327 bp, Zea mays
  Peptide Sequence Number=SeqID_66938
atgaagtgcgtcaagccgcacgtggaggagctgctcgaggcgtccacgcacgtgctcctctacgagggcaaccacgacgccaaggacgggatgccgaccgcagaggcttggatccgagagctcaactgggacgggctcgccgcgttccaggacactgcacaggctgtgtggcggcagggaaatggcggcgctgggcaaggacagaagctcgccgggtacgtgaggaagcatggcgtgcccgtgcacgtcgccgtctatgaggccgggcacttggtgctcgggtcgcagccacaagtagggctggacaaaatactcgtggctcgataa

SEQ ID NO: 23564 - DNA, 63 bp, Zea mays
  Peptide Sequence Number=SeqID_66939
atggccaggaggttgatgatgattcaagcaagagtgctgggaaaggtggttcgatatatctaa

SEQ ID NO: 23565 - DNA, 444 bp, Zea mays
  Peptide Sequence Number=SeqID_66940
aggactccaactcaaactcgtcaccttcgggaaattccagaggcgactccgctataattcaccggactgtccggtgtacaccggacagtgtccggtgctccaaggaagagcgttctcaggaactcgccagcttcgggaattcacttcagctgctccgctataatttcaccgggactgtccggtgtacaccggactgtccggtgtacaccggactgtccggtgtatctgcggggcaacggctatttcggcgccaacggctacctgcaggcgcatttaatgcgcgccagcacgcgcagaagtcaggcacgcccatgctggcgcaccggacactctacagtatatgtctggtgcgccaccggacatccaggcgggcccagaagacagagctccaacggtcggaacccaacggttttggtgacgtggctggcgcaccagacatgtccg

SEQ ID NO: 23566 - DNA, 294 bp, Zea mays
  Peptide Sequence Number=SeqID_66941
atgaagaatccgtccgaggtctactggagcgcgtggatcaagcgggtcaccgagaatttctcgtcggggctgcttctccgccgcggcgctgcctgtgtcgtgggcagcatctacggtggcccgattcctcggtatgagaccctcatcgagctcgttatgttcccaatcatgcgtagcacctactctatttggggatcacattctagggcgccttggctttgttcgccggcgagctcagtggggcggtgcggcaccgccgtctctggttgttggcagggaagaggccgggattag

SEQ ID NO: 23567 - DNA, 927 bp, Zea mays
  Peptide Sequence Number=SeqID_66942
atggtccaaaatgttaaaaataaaagaaacaatccatgcatatcttataagtatttatattggctcaattccaagtgccaaaggttcatctacaactatactaaatcgactgtccggaataccgtagattattccggacaggagaagctttttggaaaaacaggccaagcgtggaccgtccgggcccttgcggcggaccgtccgcaacaccaggatgaccctcggacagaaccaatgcaaaaatacaagtctacactacggaccgttcggaggaaaagcaaggaccgtccgagaccttgcgcggaccgtccggcctcaggcgcggaccgtccggtttcgcctattcaccccccttggcgactttcagatcctcaggtcaaaacatcgagagttggcgtgccaggtaggggctcgctgcgtgtagacaccacgtttccatcaaggctctggaaggccaacccccagcaccctttgcggcttgacatgataatttggttcaggagccttgagttcatgtcgcttggcatcgagtacgacatggtgctcctcccacctaaacacccagctcatgctgaggaacaaccagacttctgcccccgtcctccttgtcacaggagacggagatggaataaacgcaaccgcatcgtgggcagcgccccacgcccagtcgacgctcccaggctggccaacaatgcaaattcccttgtgagggacctgacgagcgttagcctcacacctagagcatcggcgtcaacatgggtcgccctagcaccgactctactggctcctccccctatagcatggggcgccggctccactggctccccatgccatgggtcgagtcacactagctttgttgactcccccacctgtgggttgggaggtgccagcttcgccaaacctgaatgtgtcggctccatcatttga

SEQ ID NO: 23568 - DNA, 390 bp, Zea mays
  Peptide Sequence Number=SeqID_66943
atggcgcccaagaagagaaaacagagtgctactattccagtcatcccgccaatcgacctcaacagtcaactccccttcgctgagatatgtgcattgaacgacagaggcttgactattgaagttgttgttgttgttgattttgtcttcaagaatattcaacctctgaaggatagagtctaccctgcctacctgtatactaggacgaccactgatgatgctgaggtgaacgttgttctcagtatgctggcggtcgcgcctgtcgaggggaagaaaagaaagaaaatacttcggcggtcatcaggcttagaactgggtgctgaacctactggctcagtcctcagcggtggcttggcaagcgccaacctcaaggatgacattgaaaaattgtga

SEQ ID NO: 23569 - DNA, 495 bp, Zea mays
  Peptide Sequence Number=SeqID_66944
atggcgctccaaagcgggctgagaggtgcgagaaggggggctcgcttatataagcccaaggacgatggtttcgcgagggttgttgggatcaagccccgggattccgcggctggccagttgcagcggcgacggggtcgacaatgtcaagtgggggaagatacatctgacaatgggacccaccatgacagtgtcggccacgggctgtacgtaggctcaatcatggaggaacggtccaccgggacccacctgtcggctaagggaaggttgacagcccggtcccagataggggctgactctttcctgccgaagcctgaccttgcttcattggagctggagcaaaaggtcttgctggggtgcttgcttgcggaggagcagttggtgcctgttgagtttgctgcctggaactgccacgagctggggtccaatcaaaccgtccagaaagagctcctgcttcttctcatcgtcttcaacatccctaggagcatatcgagatag

SEQ ID NO: 23570 - DNA, 570 bp, Zea mays
  Peptide Sequence Number=SeqID_66945
atgtctgccatcgaccatgcactagaggagattatccctgaagaccttttattggagccacctgaaactgaaagtgttgtcgtctgtacagaggttctggatgacatccccttagctagtaatccagtcaggcaaggaataacccgggcagtttctcacgcttcttcgaccttggagggtggcctagctcgcgggaacacactagctcttgacgttgcaggacagggttattcagctcttgtgtgcatgatcgagggtgcttcagcttccgaagaagtcagcgacccggatactgggaatccgctgcttgctgtcgaaactgaggtctccttgagtgatgctctcaatattgcttccactgatactccatcatcagatagtgtaccggtgcctccacctatgggattttccttattcctttctatccttcaggttcccttgctaacttttgtgcttgcagaatgtcctcaactctatgtcggcccagttgaagtcctgtggtgcccctgttcccgatccagttttgtccttgatgcggtggaatcccctcctctagaggcaaatagatga

SEQ ID NO: 23571 - DNA, 426 bp, Zea mays
  Peptide Sequence Number=SeqID_66946
atgtgtgtgaagcgttgtgctcaaggatttttgtcatcaacagtggaggcgctcgtgttggcatcgctcatcgacgacaagaacaagtttggtgactgccagttcgacctccggaagcaatcctacgtggtcgcatgcgctgttgtggacgacaagctccggcgcagccgccgcttggacgtggtccagagtggctgcaccgcgctgtccatcatcaagcaggggacctcaaggtcgtcaccaacatcggcaaatcccaggttgttctgggcaccacatccaacgatgatgccatcacgctgtctagctcatcgtccacctgaagcccaacctaccacaggagtagctgaaagatctcttgtgggttttggtggtttggatgacaacccaattataggactaataggtgtgctaagtgttgaatag

SEQ ID NO: 23572 - DNA, 87 bp, Zea mays
  Peptide Sequence Number=SeqID_66947
gcgcgaccaaagcatatagcgtccgacgaggctcgctgcttgccgtggggaagggagctcgccatggaagcttctgccctgggcaag

SEQ ID NO: 23573 - DNA, 93 bp, Zea mays
  Peptide Sequence Number=SeqID_66948
atggcggacgtctgccctggccgcaccaatccgcctgcacaccctgcaatgtcttctctggagtccattccagttcctataactttgtattaa

SEQ ID NO: 23574 - DNA, 618 bp, Zea mays
  Peptide Sequence Number=SeqID_66949
atgggggacgcccgcaatccttttgccttgtcgttggaggaacgcaactccgtgggagttggtacctttcagccatcgttcggcttcaagggattttcatcatgcagcccggctgcacccctccgctggcggtcacccaagacggtgacctccagttcgatggcgggggaaagcaagccgggctgcggcctctgcccctccctcaacctcaaggattttcatcatcaatgctggggaggggagtgtgccgagttggggtcggcccctgcgtgggcggcggcccgctccttccctcagcgatcggggggaagggcgttcgccgttcgtggcgctggcagctgccgcgtgcctggctctctgacccgagtggcttcggagccgctcccggcgctgccttccgccacggcagctggaagaggttcttccgccgacgagatagccggggccgcccacggaccgacctccaactctacggccttctgcccgtccttgcctcacgagtttgggcacgggcgaggatctcatggcagcagcatccgccgtgaggtcatcgctgctgttgttcggctgttggaacttgctctctgctgcaaggggttccaacagggggagtggtga

SEQ ID NO: 23575 - DNA, 1266 bp, Zea mays
  Peptide Sequence Number=SeqID_66950
atggtcgcctttcaagggggtcaccctccttttaaaggcgactctccctacttgcgtccccagccgtcgtgggctgagtcttctccaacacgctccaagatcctccccctacggcgcaggggctgggtcccacgcgtcatgcaagctggcccagagcagaagaagccaaactgccgcgcgcggtgcatgcaaccgcccagggattacaagcattcctccgctttcgcccagaccagcaggcgaaagggcgggcagccatacaggcggcatgcaaccgcgccaattgggcacgcccctccgacttccaacgcacccagcacgggggcccacgcccacgcgtcacgcaaccggcgcgccggtcgctacgtgcaagcaactgcaccgccactcgcaccactgccacgcctcctcgactgcggaaccagtaccgcgactcgaggcgaccctgcgtacgacccagcagtgccagcctggcgcgacggcggcgcctctggcaggggaagcgagcgatgcttcgccttcgccataatgaccgcgtcaaaagagggaccaggaaagggggataccccgaaaaggatccttctccgtgaaggaaacaggctccgagcctccctactgatcagaggttcgaaggctggcccctcggaggggttcaacagccgcctcagagcgcgtgggttctgcgcccgctactggtcagaggttcgaaggccggcccctcgaaagggttcaacggccgcctcaggctactcgggctccgtgcccactactgatcaggggttcgtaggctggccctcgaaggacctcggtggagtcaaaccactcctccgaggcctcgggggctacacccggcgggggctactgtcggggaccataattaggggtaccctcaagactcctgattctcagctgagccgaagtgaccgcagtcacttcgccgctccactgaccggcctgacaaaaggacagcgccgcctgcgccgcttcgactgctgtgtcactcgacagagtgaggctgacaagcagccaggtccggcctcaggcaccataggaaactccgcttcgctcgacccagggctcggactcgggctcagccccggaagacggcgaactccactccgcccgacccagggctcggactcgggctcagccccggaagacggcgaactccgctccgcccgacccagggctcggactcgggctcagccccggaagacgacaaactctgctccacccgacccagggctcggactcgggctcagctga

SEQ ID NO: 23576 - DNA, 534 bp, Zea mays
  Peptide Sequence Number=SeqID_66951
atgacgaagtgctcgtctagtttaggtccagtgctagatgtctgggggaggagacggagacgacaacggcgggatcttgcgggcgcgggcaccagggaggaggcggagacggcgacggctttggaagcggacgtggcggttcgggggaggaaggaggctatctcggccgggtgcccgggtggcatcgacgcgttgatgtgcggcagcggcgaacgcggtggtggcgagcggagcggggtggacgtggtggggggaccgtccgtgggcgcaggggaggcgggtggggcgtcgacaggtccgtggtggagagtgggtgacaagaactcggacatggcggcggccgtggcgagcacccggtgggaggcgctcaggccctgcgcgcggggcatgaacgcgtggctcttcgtgcgctccgacgagatctcgtcggcgatcaagccctaccgcgacttccaggagtggaagctgcagctcaacgacttcagcggtgccgtctacgagggccgcctctacgggcccgacgacttcccgtag

SEQ ID NO: 23577 - DNA, 606 bp, Zea mays
  Peptide Sequence Number=SeqID_66952
atggacctagacatcacagtggaattctggtcccttcaggcgctgcgcagtttcttctcctcctaccagacatctagcactggacctaaactagacgagcacttcgtcatgagcaacaaccacgccgcgcgcgcacaatattttttccagcaaatggaaatctgtttgtttaaagttcatctattccagctttataacctagtttgtataaactcatctggtcaacaaaaagaccaagttataatccagtcgcaagcacctacgcccgcccacccgcaacgctcaatattcctatgcctgcaggctgcaaatgaagaacgattacgtgaagagtttgtgagggaaagcagaaagcttcctccaaagcagcaatcacaaacatgtgattcaaatgttattactccaaggactgaatttatggctgttttatcagttgctttggagtgttacatccatcttagattgaattatgatcatgaatggaaacaaaacaaagacgtatatctgatcatgctagctttgcagacacatgaagtacgcttctcaatactgagagaggtattttatacacctggacaacaggataaatgtttcttatgtatttag

SEQ ID NO: 23578 - DNA, 102 bp, Zea mays
  Peptide Sequence Number=SeqID_66953
atgacaggaccggttgaaccgccccctgacaaccctggtgacctgactgccagtctgactggcagactgcagctgcgggggcagggtgctgggaaggcatag

SEQ ID NO: 23579 - DNA, 2742 bp, Zea mays
  Peptide Sequence Number=SeqID_66954
atgaagagcggcaccgcctccgcgcccagcggcggcggcggcggcctggcgatcaccgagcggcagaagccggcgccgtcgcgcgtggcggcgctgttccagatgttcgccaagaggaagctcttctcctcgtcctccaagaagagcaagctgctgcccccagtgcgcgcgcacaagttctctcctgggagaccgctggccggcggcgacaagacgaggccccttctgattgattctgcagattactcaagaagcagaactgaatgcaacggcaccagtcactacccacagccacaacctggccaagacagaaactgcagcgagaatggaatgcgtgctcccggggtggttgcccggctgatgggtctgagctcgatgccggctgctgcgagccatcaacggcagaccagagccaccacaaactcccctgaacccggtgaccactggaattcaggccgtcaagatcggtctggttcgtctcgtggcatatacacatcacctcagcagcagcagcagcagaagacaaggcagcagcccgtagacgatcggcaccatggcaatgcaggtcagttcagtgctccagatacacggccattgtggccacgaaggcatgcacacagagcagcctcgcctgtcaagagcccaaggtcattgtcaagcaggaacagggctcggctgatcgaagcagcggtcagggttctggagcctggtttgcagtccaggaaccgccgtctctctaagaggcatgcgtatctggaatacccatgcagcaacggtgatggtgcgcccagttctgctgctgctgctgctgtccgacataatgtctccgatcagttcttgagaaatatttgtgatgctgacataccggcatcaggtgctcacaatctaggagctgcctctctgcacaactctatttctaatcggaggactgaagaagatacttgtaagaagagcattccaccgagtaggaggtcagaccagagcacatcatgtcagttgcaacctgagtacttgctcatcggctcaactgagaaggccgctggattcgctgatacaaaccaagacgcaccgagagaacagctgaagagcaacatatcccgggacagtgctcctcgtggccctctcaagcaaaacaacctgaagcagaatgcactgcccgcggcagatccagggtgtgtgatacaaagcaagaagcatggaagcggggagcgaaacgtgagaaacagaacccaggacttcgtttctctgaacaaaaggatggatggcagtgcgtctttgaggtcgaaaagaaaggcgcttgatagattcggcgagccacgttgtagtgcagaggacaggaacatgatgagcacgaaaggttgccgagccagcagccttcatggtggaacctctaacaagctggagctgaggactggaacaccaaaagctatggtaactgcaaaaggagcagggttaatcagcgagaagccgaagcctgccagtccaaaccgtgcaagaagtggtttacagagacagacagtgccacacaacgtttcaagggctaacaaagaaccaggcaccatctctctcacttccggttcaccggtgaaagctgcgcgtggtgacagtgctagtggaactggagctggtaccgctgttcaagttgatagttgccctgagagacgctctcgtagagactgtcagaagacgtgtcctcaaggagagatagttttctgggaagatttgaagcgcacatcaaatccgtcgcacactgaacccgggttctccagccaagatgaagtgaagaatagagtgattcttggtggtacagcagcctcttctttgtctgggaagaagagtggtggccaagttacagaggaatccttaagtgagggactgctcaggcagcgcaactcgctggactgtgcggtttacgacaacaaagacccttatgaagtggctagcttgcgtggaactcgtaagaagaaacatgcggctggtgcaaaaggtagcaagccatctccatctccatgtatatccagtcctacatctactcctcactctggacatgctggtgatgcctgcgttcctggtattccacgccgtactgcagcagaagctacctccaccaccagccatccatggcaagatacagctgccgagagaaaccccagaggcggcgatcctaacaactctggccaacatggcgtccaatttcagacatctgaaccccacgctggggaggctacgatcacaacatctgtcgaactgctgctagcaaacgtccgcgcgtccactactccacgtaaaccagaggaatcacccaaggcgttccttctccggacgaccgagcgcgctctcgccgccttgacggccggctccaagcagggcttcggcagcaccgccatcgagggcaagggagcgagcccgctgaggaacctcgcgctcgactgcgtctgggactgcctggactcgacgtgctctcggctctgcgactccggctacaggtcgttctcggagctgctcgctctggtctgcaccgagaagaggcttgcggacagggtcgggaaggaggtcgcgaggtgctgtggcgcggctgggaagggcttagacgagctggccgtgggcgaggtggagcgcgccgtggaggccggcatgggttcttccatgctcgaagcggttcagatcggggcccagattgagcaggatctggtccaggacctaatagatgaaattggagcagatgtgttcaggcgttggtga

SEQ ID NO: 23580 - DNA, 951 bp, Zea mays
  Peptide Sequence Number=SeqID_66955
atggcgcttcctgttgacgtggcggtctgtgccctaggcagggcgacgtgggggttcctccgaagccgaggtcgagtccgtcttctgttgccgtggccgagcccgagccatggggtcgggcgaggcggaagtcgttcggccgaggcgaagcccgagccctggggtcgggcgaggcggagtttcgtcgtcttccgggtcttagcccgagtccgagccctggggtcgggcggagcggagttcgccgtcttccgggtcttagcccgagtccgagccctggggtcgggcggagcggagttcgtcgtcttccgggtcttagcccgagtccgagccctggggtcgggcggagcggagttcgccgtcttccgggtcttagcccgagtccgagccctggggtcgggcggagcggagttcgtcgtcttccgggtctcagcccgagtccgagccctggggtcgggcggagcggtagttcgccgtcttccgggtcttagcccgagtccgagccctggggtcgggcggagcggagttcgccgtcttccgggtctcagcccgagtccgagccctggggtcgggcggagcggagagctgcagtaccgctccttctgcttcgacccggaccgactggagcacgttcgtgggctggcgcttaccgacgacgccttgggccactacaccaccttcgaggcgctgtcgagcggcaagagctgcttgcaagcggggattgaaccatatgtgggtgcgtcagtgggggatggtaggcgcgtgagaagcgggcggaggaagaagcgggtggaggttgcatgcatctctatccaagtgcatgagaaaggggcgatcgagatgaggacgacggaggttgctggcgacttggcgccgttgcgatgtttgcggtcggagcagcctgtgcgcggagtggaggcgggggcacagtatcggtctacactgttaacttaa

SEQ ID NO: 23581 - DNA, 237 bp, Zea mays
  Peptide Sequence Number=SeqID_66956
atggcgaacaagggcatcacaagggttgagcctcgcagtggccatgatgttgtgatgcttcttctacatgcttggcgcatggcaacgcagtggctacggcaagggcaacgacatctcaaccgcggtgagccgacagacggccacaggcccgatggcaatggcgtcgcatggctcagcttcgaggcacaccacgatggcgccatgaatataaatcatgaagaaactccagactcttga

SEQ ID NO: 23582 - DNA, 480 bp, Zea mays
  Peptide Sequence Number=SeqID_66957
atgggcaagaacaagaaaaacaggagctcctcgcaccattccggcgataagcggaaacgcgagccgactcctccctcggaggacttcggcgattccgagtactcgaaggaggagttctcctccgagtccgagggatcgccagtccctgcctctcccccggcgtcgtctgatgactcagacgactcccaggggatcgccgtagaggtgtggtcctacatcctggccgtcgagcgcgccgggctcgagggctcggatgagtcggaggtcacctcggacgaggagaactcctcggactcatccgaggagcgaggcggtggcggtgatggcgagggcgatgacgatggcggaggcgacggcgatggcgacggcgacggcggcgaaggtgacgacaagggcgacgacggcaagggcgacggtggcgacgacaacggcaagggcagcgacaagggtggcagcagcagcggcagggccagtggctag

SEQ ID NO: 23583 - DNA, 177 bp, Zea mays
  Peptide Sequence Number=SeqID_66958
atgacggagaatacgtcctcgtgccgaagcaaggagctgctcaagaggaatcctattgagctgaatactagttctctggaggacatggttgctggagtgacttggtcgtccaccttgccaccgggttggactgtcgagtgggaccccacctcggccgaggaggagcatgaggagtga

SEQ ID NO: 23584 - DNA, 276 bp, Zea mays
  Peptide Sequence Number=SeqID_66959
atgcccgagggcgcctataagtaccccgagtgcgcaacggtctgcccttcacttcgcttcacggcccgagccccgcgaggtctcctccacccgccaccattgcccgagccttggccaccgtggctagctccctccagccacttcaaagtcgcgccagtcgctcggttagcttcgccagtggcccgtgaagcttttcaagtcctcggacccggcagagcctcaccggagacccaggatcgccctcgccggacttcgatcgcccgcagccgcgcgtag

SEQ ID NO: 23585 - DNA, 342 bp, Zea mays
  Peptide Sequence Number=SeqID_66960
atggcccgcgccggcacctataaagcccctagggaccttgaccgtacccctccgcacgcgctcgacctcaccggagcccaaacccaccggcgtttgcccgtgcacggcgtgtccgcggctgcccgatccccctaccaccatagaccggccagcagaccccttcccagccctgtccagccctcggagaagattgtgcacacctcggtgaagcaccccgagcgaggaatcgaagtttgcttcgccggagaggccagtccacggtcgccggactccacccgaccgccggcgagcgtagaccagcctctatgtcaccccgtgaagctcaccgtgccattggattga

SEQ ID NO: 23586 - DNA, 624 bp, Zea mays
  Peptide Sequence Number=SeqID_66961
atgcgcggtggtgccagtgtctgggccgtcaacaactcggggtgccacagtcctcgctgtactggcgtggcgttgcttgtcgtgtgccttgatgaggtcgcggccaattggctcatgtctgtactagtatgcaaagctgcagtggcgagatcgcaacgtcatactgctaccaagtaccaagaggggcgcgaacggttcacagtctggagggaagcggggccccaccacccgcatttcgacataaaacgctgcctccatcgctaccgccgtcccgcgctccgttcgacggcccggcccccaaaagcgaaacccgagatcgccgcacccacacaccaccaccacccggcaggagcagcagagcgcacagcaccagcgcgcggtcgagacccgcgagcgcgcgccgccatcatggcgccggcaccctcctcctccaggaccagggccctcccccccgccatcctgtacatcctcctgtccctgcagatcgccgcggcggccgcggccatggaccccgtcgagcgggagacgctgctccgcgtcatggagtccgtctcctccgaccgcgactggcgcgaggccgccggcgccgacccctgcggctcgccgtggccggggttggagtga

SEQ ID NO: 23587 - DNA, 678 bp, Zea mays
  Peptide Sequence Number=SeqID_66962
atggcgcctcctgttgacgtggtcggtccgtgccctgggttgggcgacgtggaggctcctccgaggtcgaggtcgagtctgtctttcgaggccgaggtcgagtccgagccccagggtcgggcgaggcggagaccgtcggctgaggccagggctgagtccgagccctggggtcgggcgaagctgagttcgtcgtcttccggggctgagcccaagtccgagccctggggtcgggcgaagcggagttcgtcgtcttctggggctgagcccgagtccgagccctggggtcgggcggagcggagttcgtcgtcttcaggggctgagcccgagtccgagccctggggtcgggcgaagcggagttcgtcgtcttcaggggctgagcccgagtccgagccctgggtcgggcggagcggagttcgtcgtcttccagggttgagcccgagtctgagccctggggtcgggcggagcggagttcgtcgtcttcaggggttgagcctgagtccgagccctgggtcgggcggagcggagcttcccatggcgcctagggccggacttggctgctgtcagcctcactctgtcgagtggcacagcagtcggagcggcgcaggcggcgctgtcctcttgtcagaccggtcagccgtcacttcgcccctgtcgaccggaggacgcgcgtcaggataa

SEQ ID NO: 23588 - DNA, 1092 bp, Zea mays
  Peptide Sequence Number=SeqID_66963
atgggtcggcgcgagacggagtgtgaaggggggaaaggcagccggagggagacgggcgtgagaggtggaaatcccgcggccttcgtgtttgtcccgcgcccaggtcggtccgtgccctgggttgggcgacgtggaggtcctccgaggtcgaggtcgaggtcgagtctgtcttccgaggccgaggtcgagtccgagcccccgggtcgggcgaggcggagaccgtcggctgaggccagggctgagtccgagccctggggtcgggcgaagcggagttcgtcgtctttcggggctgagcccgagtccgagccctggggtcgggcgaagcggagttcgtcgtcttccggggctgagcccgagtccgagccctggggtcgggcggagcggagttcgtcgtcttcaggggctgagcccgagtccgagccctggggtcgggcgaagcggagttcgtcgtcttcaggggctgagcccgagtccgagccctgggtcgggcggagcggagttcgtcgtcttctggggttgagcccgagtccgagccctggggtcgggcggagcggagttcgtcgtcttcaggggttgagcccgagtccgagccctgggttgggcggagcggagtttcccatggcgcctagggccggacttggctgctgtcagcctcactctgtcgagtggcacaacagtcggagcggcgcaggcggcgctgtcctcttgtcagaccggtcagtggagcggcgaagtgactgcggtcacttcggccctgtcgaccggagggcgcgcgtcaggataaagctttgtgctgatgggggttaccagctgagatttaggagtgttgagggctggtatgttgacgctgtcaacggttttgccggagccgggtttgcgagagcagcccccgagcctctgcacagggcgagaggacgggcgccgaacatggtgtctccggtgagctgctggcgggtaatccgagtggacgcccgtgccccatttgttaggggtcagctagaggctcggaggcgcgctcaaaagtacctgtgggtgatctgccggacccggtcccctttcgacggggtccgagggctcgatgcctccctctga

SEQ ID NO: 23589 - DNA, 306 bp, Zea mays
  Peptide Sequence Number=SeqID_66964
atggccgccccaccaactacacgccccgtcgcattaactccgcggcgggacacgtggcgcctctggcgggagaagcgcgcgacgcttcgctttcgccgtaataaccgcgtcaaaaagagggttcaacagtcgcctcagatcgcgtgggcccgacacccactactggtcaggggttcgaaggccagccccccgaagggttccatggctgcctcaggctactcgggctccgcgcccattactgatcaggggttcgaaggctggcccccgaagggttcacagtcgcctcagacactgagcgagggatga

SEQ ID NO: 23590 - DNA, 102 bp, Zea mays
  Peptide Sequence Number=SeqID_66965
atggctctggatatgcaccatttgaaacctgatgagatggttgaccatctgaaacaaggacttggaaaggagggacatattttcacttatataacgttctga

SEQ ID NO: 23591 - DNA, 348 bp, Zea mays
  Peptide Sequence Number=SeqID_66966
atgtcgccaccagcagtccaacaagttatttctgctattaaagttatccttggggaggatggctccaacagaggtgcccaaaaacttgctcgcatctgcgagaatagtaatttcttcaggtcagagctcaagaagatgggttttgagtttgctgttgttactgttgcatttcctgtgacacctcttcttcttgctagggcacgcatatgcatttctgcttcacatactagggaggacctgattaaagcccttgatgttatcagcagagttggcgaccttatgggcatcaaatacttccctgcagaaccaccaaagattgctggagctgatcatgataagctggagtag

SEQ ID NO: 23592 - DNA, 792 bp, Zea mays
  Peptide Sequence Number=SeqID_66967
atgatgaatgaagtgcaaatcaacaagaagacaaacacaggtgttgtgtgctcacttggatcatattttcccacaaatttcagtaatcttgctggacatgttgacagtgaaagaatgtacaacgaactggtgtcaaacactatttatgaaggagggccttttgattcaaaggcatcatctataaaacttctaaggcgtacctcgaataccaccagatgcctcaacctgggctcctacaactaccttggctttgctgcagcagatgagtactgcacaccacgtgttattgagtctctcaagaaatactcagcaactacgaccaagcttcacaatgagctagaggagttggctgcacgttttgttggaaagcctcctgctatcctatttggcatgggttatgttacaaaatctgccatcattccatgcctaattggaaagggtgtactgataattagtgactctctaaatcataactcaattgtcaatggcgcaagaggatccagtgcaattgttagggttttccagtataactcccctgctcatttggcagaggtcctgagagagcagatagctggtggtcaaccacggacacacagaccatggaagaagatcattgtcattgttgagggtatctatagcatggaaggggagctgtgtaaactccctgagattatagctgtctccaagaaatacaaggcctacacatatctggatgaggcccatagcattggtgttgttgggcagtctggccgtggtgtttgtgagctccttgggtgtcacacccggttttag

SEQ ID NO: 23593 - DNA, 159 bp, Zea mays
  Peptide Sequence Number=SeqID_66968
atggggctcggtgtatgcggctcgctctgccaagtttgggttcgccccttggggaggagtggttatgagattgatggttttgattatgactatggtgctggcgaagatgaagctgtggaaggagacttccaggagttccaagactacgacaagttctag

SEQ ID NO: 23594 - DNA, 837 bp, Zea mays
  Peptide Sequence Number=SeqID_66969
atggctgaaaggtaccaactcctacggagttgcgttcctccaacgatgaggcgaaaagacggcgggacaggcggcgctaccggcaggagcagtgggcgacgcttcgccttcgccgtaataaccgcgccaaaaaagggaccgggaaagggggataccccgaaaaggatccttccccgtgaaggaaccaggctccgagcctccttactgatcagaggttcgaaggctggccccccgaagggtttcgacagccgcctcagatcgcgtgggccctacacccactactggtcagaggttcgaaggccggccccccgaagggttccacggccgcctcaggctactcgggctccgcgcccattactgatcaggggttcgaaggctggcccccgaagggttcacagccgcctcagacgccgagcgagggatgaccaggggtacgttcgatacataaccaaggctcgggctacgctcccggaatcccatcagagggaggcatcgagccctcggaccccgtcgccaggggaccgggtccggcagatcacccgcagctcaccggagacaccatgttcggcgcccatcgagggcaacatggcgctttcccccctcctccttgcggaaaggcgacgcaggggcgtatgtaaaaaagccgagtctgtccctgatcgccctctcgccctgtgcagaggctcgggggctgctctcgcaaacccggctccggccgaaccgttgacagcgtcaacataccagcccgagaacttgggccccgaccgtacacccgggctacgaccagttcgcatgagggaacaaccagaccagccgaagcattacgcaaggcattaa

SEQ ID NO: 23595 - DNA, 1437 bp, Zea mays
  Peptide Sequence Number=SeqID_66970
atgtaccacaatatcaagtcatttggtagggagggtggggcagagcataaacaccttgagctttacttttatgatgatgatcccactctcgagcatcggtaccgtaagtgtcgcgaagagcatcaacagaaagacaaaaaggttattccacagatagtctacatactacgtggaaactcgtactccgagcaccttaggaccatgggccacgttgagaaccttgatgactatcgtatcgcgttgaacctagaccagacgttgaatcagaagacatataacacacctctcattttagaggtggccgctgtttggatcgaagagaccgaagggcgaggccagttcagcaagagtgttatgctccatgggaaggacagttcaagccactacatccgctcataccatggatgctacgatgcactatcatatccattgttcttccctagaggcgaacttggctgtcatgcaaatatcccaaaggttggagtatccatggacgaagtggatgcatactgtgcgatacatagggcaagtaatgcaaatgatgaagatgcggacctgtaccagggcttggtggatagcatgctagatggagatattagagcagagaaggttggcaagcgaactgtgttgtcggcgtcgtttattggcggtcctcgtgacatgagacgtcgatatatggatgctatgactctgaagcggggtttgccgcatgcccatgttctactcataatgcagaggaagtacaagctcgcatgtcctgagcagtacgaccttttgatctcagccgagatcccaagcaacaaacgtcgtgacgatgaccgtaaagaaaaggtccgagggtgcgaactggacaatagatgggttgtcccttataacacatacctccttcgtctcttcaactgtcacatcaatgtcgaggcatgtgggagcatcaaggctgttaaatacctgttcaagatcatatataaaggccatgatcgtgcgtctgttgttatgaaagatgcgagcaaggcagacgatgatgttgatgagatcaagcagtatagagatgcaaggtgggtgactcctctagaagccttgtggaggatatatgactttgagcttagtcagatatctccacctgtgatgcagctgcaactccatcttccaaacatgcacatggtggcgtttcacgagcgacaaatggtcgagcgagtcgtcaaccgtccaggtgttgataggtcgatgctcacatcatattttgaggcgaataggctacacgaggaggctcgtggcatcctatatcgtgacttccctgagtggtacacttggcagagtgccgagggggagcgctactatcttcgtgttctcctaaaccatgtgactggcaccgcctcctatgtggatctaaggacagttgatggtgtcactctaccgacttttcgtgaggcagcatag

SEQ ID NO: 23596 - DNA, 111 bp, Zea mays
  Peptide Sequence Number=SeqID_66971
atgaggagaaagatgaaccatggtgaaaaagttgatgaagataacaagaggaggaaatgggtgaaaccgcactatggtattggcatcccaaaacgaaggttagttctataa

SEQ ID NO: 23597 - DNA, 579 bp, Zea mays
  Peptide Sequence Number=SeqID_66972
atgaattgtcgcgacttctcctcctataggagcgggacttccgatatacagactgacagtccgacagcctgcaatgttgtatatcatctcagcgcggacgtcgctgccccccaggccggacctgtcccgacacagagacagataatcgcagtgccgcagactgacaatttgtgcccatcgctcttcactctgctctcactccgcccaatactctctgtgtcgagtgtgcgtggacgtggttttggtggtctccgcaagaaacttgcaggtcgctttaaatccaagcgccctcgtggaaatgatgatgactatacaccaaccactgattcagaggcccaatcctcagctgggggcactgaatccatggatgctgaagattttcctcatgttcatcccgattatcccattgatacccaaggatggacttatccaaagcggagattttctatggctgagtactgctctagacggactgtgaaccagtatactctgccatctgatacaaatatccagtttttccacactcagctgcagtttgatgtcttttggggcaccctggtggataccaatttttcataa

SEQ ID NO: 23598 - DNA, 417 bp, Zea mays
  Peptide Sequence Number=SeqID_66973
atgaacgaagaacactggcatacgagatgccgctaccaacggaactacggttcccccctccgcagagcgccgccgccactaaccatcgccgcccgagccgtttcctcgtcgccggtggagctccgccgcgcccttagccccgccgccaccgtcgacccgagtctccgtcgcgtccccgtcgccgccgaggagtccccggagcccgccttgagtagagaaaccccgccgccgagccgccccgccgtgaatcgcccccctccggtgtctctgccccgacccaaaccctaccggagaactccccgcgccctccccgacctccccgaccactcggatggccccagagccccgccaatcgcccgcgcccctcgtctccggcgagccctccgccgcggggacgagcgccgccgccccagctag

SEQ ID NO: 23599 - DNA, 70 bp, Zea mays
  Peptide Sequence Number=SeqID_66974
atggcgcctcctgtcgacgtggcggtctgtgccctagatttcttcgactgggggttcctccgaagccgaa

SEQ ID NO: 23600 - DNA, 1152 bp, Zea mays
  Peptide Sequence Number=SeqID_66975
atggcgcttcctgttgacgtggcgggcctgtgccctaggcagggcgacgtgggggctcctccgaagccgaggtcgagtttgtcttccgttgccgaggccgagcccgagcccccggcccgagtccgagccctggggtcgggcggagcggagttcgccgtcttccgggtcttagcccgagtccgagccctggggtcgggcggagcggagtttgtcgtctttcgggtcttagcccgagtccgagccctggggtcgggcggagcggagttcgtcgtcttccgggtcttagcccgagtccgagccctggggtcgggcggagcggagttcaccgtcttccgggtcttagcccgagtccgagccctggggtcgggcggagcggagttcgccgtcttccgggtcttagcccgagtccgagccctggggtcgggcggagcggagttcgttatggcgcctttggcaaggcctgactgcctgtcagacacactctgtcgagtggcactgcagtcggagtggcgcaggcgacgctgtccttctgtcagactgctttatgctgatgggggttaccagctgagaattaggcgtcttgagggtacccctaattatggtccccgacagaagggtagcgtcttcgccttcgccccaacatttgctctccgagggaccagttcgactaagtcatctggtgccaaagacatcgctagatggtggagatgctgcctcgattcactccaggatattttctaccgcgagcttatcttctcgctccccagctcctatatctttcgcgcgctccggctcccttccgctcgtcgcccagctccgttcctggcagagctcgctagttcccttttcttctccccctcagttcccaacgccggcgtccagttcttgtccgcgctcagcctctgtttccaattcctcatggcgcccggccaggtttctctgcgcgccgtgctctctgtcgcgctgctatggtgcccaagtcctggcgcgctcgtcgtcggctcggcatctcctcgagctcgcccctgccttcctgctcggtttctagtgctcgcgtcgacctcaatcaccggagccgactgcccagcgcctgctccatccatggtcgactgcagctcgctactccatccatggtcggctgcagctcgctag

SEQ ID NO: 23601 - DNA, 270 bp, Zea mays
  Peptide Sequence Number=SeqID_66976
atgggtgtaggcaagggacgacttgacgattccaagggcctcgccgctgaggtgtggacatacatccgggtcgtcgagcgcgccgggctcgagggctcggatgagtcggtggtctcctcgaactcgtccgaggaggggggtggcggtgatggcgatgacgaaggcaatgacgatggcggtggcgacggcgacggcggcagaggcaacgacaagggcgaaggcaagggcgacggcaagggcggtagcggcagcagcaaggccagtggctag

SEQ ID NO: 23602 - DNA, 942 bp, Zea mays
  Peptide Sequence Number=SeqID_66977
atggaggagatcatgactcacccccatctccacgcattagcgtcgacgacgcttgcaatcgtcgccgtcatggtgatggtgctgccatcgacgacagccggcggcgggctctgccgtgagagctgcggcgacatcccggtgcgctacccgctgggcatcgacgacgggtgcggcagcccgtactaccgcaacatgctggcctgcgcggacaacgcgacgctccgcctgcgcacgccgtcgggcacgtacccggtgggcggcgcggactactcggacccgcacctggtggtgacggacccgtccatgtggacgtgcgcgcggcccttcacctcggtgcacgcggcgcccttcagcctggacacgagcacgcgcttctcgctgtccccgaggaacgagtacctcttcttcgactgcgacgaggcgcgcgtgatcgtggcgccccggccggccagctgcgaccggtacccggggcgctgcgactcggcgtgcgacagcgcggggtacctgtgccggaacctgccgggctgcgcgctggaggagggcagtaaccagagctgctgcgcgtaccggccgcgcgccgccgagtcgctgcgcgccatgctgcggcactgcggggcgtacaccagcgtgtactggcgcgccgccggggacaggtcgttcccgccctacgaccaggtgccggcgtacggggtgcgcgtggacttcgaggtccccgtcaccacgcggtgcctgcagtgccaggacaagcgccgcggcgacggcgggacgtgcggcttcgacccggccaccagggacttcgtctgcatctgcggcgacgggcgcaactccaccacggactgcgcagatggccacagctcaggacatcatggatcagcaggagtcgtcgctgtactgttctttaatttgttgttgactgttcttgctgttggatggattctttga

SEQ ID NO: 23603 - DNA, 312 bp, Zea mays
  Peptide Sequence Number=SeqID_66978
atggtccttaaggccatccataagaaagaccgttctgaacaagacctcaaggaccttgctcaaaagctagaaaaggttttgcctttctcacccccactgatcgacctgccttttgaattggattcagcactcaccgtcctatttgcttccgatatacgtacagtgtttgtgatgagattgagttttaacagagacgcccaatttggtctgtttgatggagatggtaaactggctaaagctctggatgcaagacctcttactaatgttgtgaaggacctcgaagccaagatgaaaggtggacagtcaagttaa

SEQ ID NO: 23604 - DNA, 675 bp, Zea mays
  Peptide Sequence Number=SeqID_66979
atgcggctgaaggaactcgacgcagtgcctctcgaggtcacggtcagggaaggaggaatcgcaaccgaagataggtttgctgctgatgttccagttgttggttccgtgcttttgcttcacagccggcttgcccgaggtggcctgcaccatctggtcaaccgtattcacgacaagggatggggtctcacctggatctggatgatgatggcgaaggtgcggtttgccgcggcgagcatatcgtcgacgtcattgctgcggcatcacctcaacctcctcttcgctggcgcgggggaggacgacgtggaggccaaggaggacgagcaaggagcacgagcaggcgggccagacgacgtagggtcagcgggtgcgaggagagcgtggcggcggcgggcttgcgcatcgcgagtcggggtgggcgcggcgcggaggacgtcgggggcggccatggcgcggtggaggaggatgtcgcggggatccaggatctcatcgcggcgggcgtgttggggatgcgcgacgagagatccaggggagcatagggagagacggggcgggggcgagaggccgcgattcttggcacagagacgcggcgcgacagacggggcagggtatgggcgcgtccggggatgggcagaaccgtgcgccatcctgttgtggatgcctacactacgtttttaa

SEQ ID NO: 23605 - DNA, 1206 bp, Zea mays
  Peptide Sequence Number=SeqID_66980
atggggagcgcccgtgttgctttcgttttgtcaccgttggaggaacgcaacttcgcggaagttggtacctttcagccatcgctcggcttcaaggattttcatcaggcggcccggctgcatcccctcgctggtgcttcaaagatcttcatcatccttgctagggcggagggcgaggcgagccggagctctacctcccgcacgggtcagtgggccacctcttcttccagcttctggggtggaaaccatcctccagctctgcggaggaggcgccctccagccatgccggggaaggcgaactgttgctgcccagccagggtgcaacattccgtcctctgtcctcactttcgtggcgaggacgggggtgaggacctgccagtgtgctttggggcggccggcgcttgctggtgcggtgttggcgaacgggtggacgccgccgttggtgctgacgtggtggcagctggagaaagcttctccgccgacgagcccgtcagcgctacccgcggaccgacctccggctctttggctttaatatctggttctcgtcccttgagtggggacgcaaacgagagccttccgacggcagcatccgtcctgggaccgtcgctgctgctgcagaggtcgctggcgagtcaccggggttttgtcgccccgcaggccctccaatctaaagaaaccctcgaccgctctgcgatgagccggagccggaggcagcggtgccagcacggacagaggcagagttggctcgaaaagaagcttcgtcggccggagcctggccgggccgtccactggcgggaccgacgccggagtcgggttgccgaggccacgagccgggctgatgtcctcgggggacagctggctgaggctacggagtggccggtcgagccgtctgctcgggccgagttcctggaggagaccccggcgacgatggcccaggcgtggtgccgacaggttccttcgaggtggagatcctccgactgtgtcaccctccgaggctgggtcggattccgtcgaaggagtccctcggctcggtcagccttgccgcttatgtgtactcttactcgtccattggattctgttatcgatatagtcgagaagaaggtgatgagtgaggtatccgtatcccagaggcataggagtccctcggctcggtcggccttgcctgcttacgtgtactccgtagttttcaggatcccactttcggagtag

SEQ ID NO: 23606 - DNA, 954 bp, Zea mays
  Peptide Sequence Number=SeqID_66981
atggacttggtgccgaaacaccagcagcagcagcagcagcgagggatcaaggaggaagaggagatgacggtctttgcggagcacggggaccagcaggcgacttccggggccggccacggcggcggcggcgggcgcaggagcgagatcaaggaggtggacttcttctcggccgccgccggcggtgccgtgtctcgccgcatcaccgacgaggacgacggcggggaagatggcggtcgagagcccgcaggagcagtagctcgtggctgccgtaacaccacggtcaacactgcactggacctgctgaccaggccggcagcgggcgacggcggcgaggggacggcggccagtggtcgtgacgacgatacagagatggacgtggcggcggtggagggggagctgcggcaggccggcgaggagaaccggcagctgcggcggatgctggaggagctgacccggagctacggcgcgctctaccaccagctcatccaagcccaggcggcccagcaccaccaccaccaggccagcggcgcagcgaagccgatgctaccgacgtcgggagtgcagttcatggaccccgccggccgcgtccctccgcctccggctccggcgatggcagcaggagcggcgttcagcggtgaacgggggggcgactcagaaggtggaagcggaagcggcggcgaagcgggcccgaacgatgggacggggacgcctgagcgcggcgagaacgccgataaccgggcgccggcgccggcggaggcgcctctgcggagggcaagggtgtccgtgcgcgcacggtccgaggccccaatgatcagcgatggatgccagtggaggaagtatgggcagaagatggccaagggtaacccatgccccagagcttactatcgctgcacaatggccacaggatgcccagtcagaaaacagctagaacatgatgtgcatgccaagtgctaa

SEQ ID NO: 23607 - DNA, 1621 bp, Zea mays
  Peptide Sequence Number=SeqID_66982
gatcatggggcgcgggcgcggccacctcctgctgccggcagcagccgcctgcctgtgggcgctgtcgtgcgcgctgctgctgcacgcgtcccctcacggcgctggcgccggcgccggcggcctgctgagggtcgggctcagcaggcgcggcggcgggctcgaccagcgcgcgctggcggcggccaaggccgcgaggcagcaggaggcaagccgtctcggggcctccggcggcggcgacgtccctctcgtcgactacctcaacacccagtactacggggtcgtcggcatcggcacgccgccgcagaacttcaccgtcatcttcgacaccggcagctccaacctctgggtcccctcctccagatgctacttctcggtccgatacaagtcggccaagtctagcacgtacaaggcggacggcgagacctgcaagatcacctacggctccggctcgatcgccgggttcttcagcgacgacgacgtgctggtcggggacctgaccgtcaaaaaccagaagttcatcgagacaacgcgcgaaagcagcataacgttcataatcggcaagttcgacggcatcctcggtctcggataccccgagatctccgtcggcaaggctcctccgatctggcagagcatgcaggagcaggagctgctggcggaggacgtcttctccttctggctgaaccggagcccggacgcggcggcggccggcggcgagctcgtcttcggcggcgtcgaccctgcgcacttcagcgggaaccacacctacgtccccgtctcccgcaagggatactggcagttcgacatgggggaccttctcatcgacggccactccaccggtttctgcgccaaggggtgcgctgccatcgtcgactccgggacttccttgctcgctggcccaacggccataattgcccaggtgaacgaagcgatcggggcagacgggatcatcagcacggagtgcaaggaagttgtgagccagtacggagagatgatcctcgacatgctcatcgcacagacggatccacagagggtgtgcagccaggttggtctgtgcgtgttcgatggcgctcgatctgtcagcgaggggattgaatctgtcgtcgggaaagaaaacctgggctcagatgtcatgtgctcggcctgtcagatggctgtcgtgtggatagagaaccagctccgcgaaaacaagaccaaggagctcatactgcagtacgctaaccagctgtgtgagcgtctgccgagccccaacggagagtcaacagtcagctgccaggagatctccaagatgcccagccttgcgttcaccatcgcaaacaagaccttcaccctaacaccccagcagtacattgtgaagctggagcaaggaggccaaaccgtctgcatcagtgggttcatggcgtatgacgtgccaccgccgcgtggtcctctctggtatgtatgggacatggcattgctttgctttgccacccctgatatttgtcttcttccccatctagctcagtctgagagcctgcgtatgaaacaattgaaggattcttggggacgtcttcatgggagcttaccacacgaagagcaaatggatgcttcaagacatgcatgtccgatgtgtattgagaaatag

SEQ ID NO: 23608 - DNA, 630 bp, Zea mays
  Peptide Sequence Number=SeqID_66983
atggagtcgccgcggtacaccgtgcaccgggtcctacactcgaggtcaaccaaaatttgttgggaaattgggttccgggtagcatcaattgttggtgaagagcccgttgctgaggatcctggtgagcagcaggttgaagtagctgagcaggagctcattgaaggcaagttgggcgactcggctaaaattcaccggactgtccggtgtacaccggacagtgtccggtgcgccaaaggaggtcggcctcaggaactcgccagcttcgggaaaagccaacggctcgtccgctataattcaccggactgtccggtgtgcaccggactgtccggtgcaactccgggacaacggtcgtctccgcgccaacggctctctgccacgcattcaatgcgccgtctgcgcgcgcagaagtcagaatcgcccatgctggcacaccggacatcaaacagtacctgtccggtgtgcaccggacacccaggcgggcccacatgtcaggagctccaacggctagaatccaacggcagtgatgacgtggcagggggcaccggactgtccggtgtgcaccggactgtccggtgcgccatcgcgcagacgcctccagccaacggtcaagtttggtggttggggctataa

SEQ ID NO: 23609 - DNA, 252 bp, Zea mays
  Peptide Sequence Number=SeqID_66984
atgacaaccgggagatcagctatgcagagacgcggaccaatccgtagagtccaagcaagtaggcgcgttcctgggatcacggccgagccggtcagcgcgatccgatccttgcgaggaagaagggctgtccgcgtcgagcgaggggaaggagatactgacggggatggcccacatgcagtgaccgctcccttcccacacggatggaccaaggctggcaagcggggcctggctggcagccagtggagagcttaa

SEQ ID NO: 23610 - DNA, 1639 bp, Zea mays
  Peptide Sequence Number=SeqID_66985
atgtcctcgctgccgctgccggaatcacctatggccgccgagaacgaagcctgcgactggggtgagatgccgtctgacgcgctcgtgtccgtgtttgggaagttggacgtgatcgagatcctgaccggggccgggctggtctgccgcgcctggcaccgtctcgcggcctcggaccccatgctgtggcgccgcgtcgacatgaggcacatgagctatggctacgagggggagcggctgcagaccgaaaaggtcgaggacatggcgcgcgccgcaatcgacccctccgcgggcaccatggagccgttctttgccgataccattgtcaacgacgacctcctgcgctgcctttctcagaggtcggggaagcgactgcagaccgagaaggtcgaggccatggcgcgcgccgcaatcgaccgctccgcgggcaccatggaggcgttctttgccgatatcttcgtcaacgacgacctcctgcgctacctttctcagagggccccctcattgaagtgcctccatctctccgcctgcaatttcaccgatcaatgttttgcagaggcgattaattgcttccctcagctggaggagctagatgttacattatgcttattgtatggcagcgcgtgtgaggctgttgggagagcctgcccacagcttaaacgcttcaggctgaatgaactctggtctatttctcgaaaggaggatattggcatggaagcattagggatcgctagcaccatgccaagactccaagaacttgagttgattggtaacaatctgacaaatgatgggctcatgtcaatccttgaccgttgccctcgcctcgaatcccttgacattcgcgagtgcttcaacatacaaatggacgatgcgcttaaactgaagtgttccaggatacgagatctaaggcttcctcatgaccccatcttcttcgacgacaccaggtattggccttattacatcaacagtggcgtatttgactcagacattgattccgaggtcggcacatatgatgatccgctggatgatatggggctacgacaccggtatcagcaagggcagatgcaacgtgtcgccattgttagggaccccaagatccttctgctggacgaagccactaccggaattagctcctttgccgtgtgttctaaacacacggcaaaggctattttacactcggcaaaggctttgccgagtgtaacactcggcaaagaacgctcggcgaactgtacatcggcaacagcttctttgccgagtactttttgtcgggcactcggcaaagactttgccgagtgctatttggcactcggcaaagaaaagtcaccgtcacggcgccaagtgacggtgacggatcctttgccgagtgcctacggcgacactcggcaaagactagtccagtggaccccacagccagtccctgtgccgagagccctagtaggcactcggcaaaggaggtttctttgccgagtgtctggtggcctgacactcggcaaagaaccctccagtgggcccctttgccagtatctttgccgagtgccttggcaaaagcactcggcaaagatgtctttgccggttcccaggtttccttctttgtcgagtgccactgtcagcactcggcaaagatgtctttaccggttcccag

SEQ ID NO: 23611 - DNA, 657 bp, Zea mays
  Peptide Sequence Number=SeqID_66986
atgcggcgtgatccactcgggctgcaggccggtggttcgatgccgaagcaggccggcgtcaaccagcgcttccagatctgcatcggtaatggaagacacaggccacgggtcgcggggagggaggacggtgatcttttccaccatcgaaacaagcaagaaggagaggaagtctctaggcgaaaagcgaaagcgacgtttgaaggcaaaaagattgcaaccgcaaaggaccaggcgaatcacccgcgagtacttttagggtgtgtctctggaccacaagctgactccgatcgaaaggagcttggacccccgctcggatcacccattaacaactcaatggaaacgccatgctcattgcccaccgagggcagcatgacgcattcccccccttcctcctcacggagaggtgacgaaggggcgtacaaaccacaagtcaaggcatcccttgatagacctcttgccctgtgcaaaggctcgggggctgtccttgcaagccgtggcaaaagttccaacagatcgaccaaagatcaaacggaacctatccaaaaaaacaaaaaatccctcgaagaagtcacctactgcttcggggcctcaggagctacacccgatgggtgcgcttgtgcgcacccaccgaaaaacaagcacgtcccatctttttaa

SEQ ID NO: 23612 - DNA, 435 bp, Zea mays
  Peptide Sequence Number=SeqID_66987
atggcctcgagcgaactacggcctcaggcgtgccactacctcgggcgagccgtggcctcgggcaaattgtggcctccggcgaactacaacctcaggcgagccatggcctcgggcgaacggcgacctcgggcgagccgtggccttgggcgaactggtgcttcgggcctcaagcgcgtcctgctatcggtgtttggaccgccggtcctcgaccaactacccttgaacctcaagttgattaagataatcgggttgaggatcaagcaacttgttcctctgagtgatcttggtgaggtgggcagcaacacccgagctgacgaagtggtcggcgaggtgtgtggtaatccaacccttgagctgacgaggcggtggcgtagcctcccagagtcgacaaagcagagagttggcgaggcgagcgatgacccagcccccgagtaa

SEQ ID NO: 23613 - DNA, 621 bp, Zea mays
  Peptide Sequence Number=SeqID_66988
atggcactgttcaagtgcatgtgcatcttcttagtctcgcttctactcgccctcaccttcaccaatgcccaggaagaatcttcacatcggactctcccaccgttcccctgcatcccaggccagccacggcccccgcggttgccaccttgcccgccggcaccaaccgagtgctacacgtcgctgtcgggaatgatgccgtgcgcggacttcctcacccacaacgaggtgccaccgatgccacccacggtcgcctgttgtgatggtctcaggtcactcgtcaccaacgcgtccatctgtctatgccatatcgtcaacggtaacatcaacaagctcctaccggcgcccatgatacccgtgcgcatggtggcgctcccccgcttttgtgttgtccgcttcccacgagccatacttcgccggagggcatttgccaccgatgaaccctccgcctccaccagaggcatcaccgtcggaaccaccatctacttcgccagcagcatcaccgccggaatcaccaccaactccaccaacatcatcaccaccaactgcatcgccaccagagtcaccgccaactccaccaccaactgcatcgccaccagaatcgccgtcgacaccaccaccaga

SEQ ID NO: 23614 - DNA, 603 bp, Zea mays
  Peptide Sequence Number=SeqID_66989
atggcgctccacaagctctatgacgatggcggcccccagctctgttacggaagcagaacgacgctccgccgcacctccgacagccacgacatcacaccagcagggtgcccagatctctccggctgccacattggcatggccttctcagagaaggttggccgcgcgggaccgagaacgggacaggcgctctcttggggccgctcgcttccctcacccgcgtggacgcttgtaacccccctactgcaagcgcacccgacctgggcgcgggacgaacacgaaggccgcgggacttccacctctctcacgctcgactccggccgcctcgcctctccccccttcgcgctcgcccacgcgctcgacccatctgggctggggcacgcagcacactcactcgtcggcttagggacccccctgtctcgaaacgccgacagtatcccaaaggagctacttttgattgagttggctatttcgattcggattatgccgaatgcaaagttgataggaaaaggctctgcctcacccgaggtcaccaccgctcactccgccttgctcgaggtcatcgccactcagcccatctcgcttgagccagcctcaggcagatag

SEQ ID NO: 23615 - DNA, 741 bp, Zea mays
  Peptide Sequence Number=SeqID_66990
atgggggatatccgccgtctttccgcctcgtcgttggaggaacgcaactctgcgggagttggtacctttcagccatcgttcggcttcaaggattttcatcagccagcccggctgctccccctcgccggcggtcacccaagacgcttcaaggatgttcatcatcctcgctggggtggaggccgggctgagccggagctctacctcccgcgcgggctcgtgggtcaccctctcctgcggcgtttgagggagagggcgctcgccggccctgcgggcgggtcggacttcgacaacacggggccggtcgacggcaggcgtcgtctgccccagcgtgtcgggctcgccggcttggcgcctagtgccctctcctgccggaaggcggctgccgcgtcgtgtgcacgggaggacaacccaagatgtcgcgcgctgctagggcggcgttcgtgttctggggcggtcctgcctttgcaccgggacggtgcctccacgaggaggtcggagccctgctcgtccgggaggatccgagtggggatctgccagtgggctgacggcccctgtcatcggtgccgaggtggaggcggctcgagaagtccccgtcgccgacgggatcaccgccaccatccgcgcttcgggcctccggctctttgtacttgtcctcgcccctcgagcgtcggcgtgggcgagggcaaggttgcagcagcgttcgccctgaggccatcgccgctgcagtttggccacccgtag

SEQ ID NO: 23616 - DNA, 699 bp, Zea mays
  Peptide Sequence Number=SeqID_66991
atggtcgccttccaagggggttaccctccttttaaaggcggctctccctacttgcgtccccagccatcgcgggctgagtcttctccaacacactccaaggtcctcccctacggcgtgggggctgggtcccataggtcatgcaagccgactcagagcagaagaagccaaaccgccgcgcgcggtgcgtacaaccgcccagcggttacaagcgaccctccactttttgcccagaccagcggaccaaagggtgggcagccatgcaggcggcatacaatcgcgccaagtgggcgcacttctccgactcccaacacgcccggcatggaggcccaggaccacgcgtcatgcaaccggcgcgccgaatgcttcgtgcatgcaactgcaccgccacttgcgccaccaccgcgcctcctcgactgcggaaccaatgctgcgactcgaggcggcccagtgcacgacccagtggcgccagcctgggaccgggaaagggggatacctcgaaaaggatccttccccgagaaggaaccaggctccgagccccctactgatcagaggttcgaaggctggccccccggaagggttcgacagccgcctcagatcacgtgggccctacacccactactggtcagaggtttgaaggccggcccctcgaaagggttccacggccgcctcaggctactcgggctccgcgcccactactga

SEQ ID NO: 23617 - DNA, 1188 bp, Zea mays
  Peptide Sequence Number=SeqID_66992
atgcaggcggcatgcaaccagaccgaaggggcgcaccctttcgacttcaacgcgtccagcattgaggcccaggcccacgcgtcatgcaaccggcgcgccggtcgcaacaagcaagaaaccgcaccgccactcgcgccactatcgcacctcctcgactgcggaaccagtaccgcgactcgaggcaaccctgcgcatgacccaacagtgccaaccaggcacatcggtcacgggccagcgagcgaaagcagcggtcaagtcgtcagccaagctcacgtcccctcctgggacagtgggagagccctctcccacggcgtgaagacggcgcacccgagaagcgggcgacgcttcaccttcgccataatgaccgcgtccaaaaaagggaccgggaaagggaataccccgaaagggatccttccccgcgaaggaaacgggccccgagcccccctactgatcagaggttcgaaggctggcccctcggaggggttcaacagtcgcctcagagcgctcgggctccgcgcccactactggtcagaggttcaaaggccggcccctcggaagggttcaatgaccgcctcaggccactcgggctccgcacccactactgatcaggggttcgtaggctggccctcgaaggccgaccctggaggatttacgtctcgcccgaggaccccctccagcaacggacacaccttcggctcgcccgaggcccagacttcaccaagaagcaaccttggccaagccgccacgccgaccgaccgtatcgcaggagcctttaatgcaaagggctcggactcgggctcagccccggaagatgatgaactccgcttcgcccgaccccagggctcggactcgggcttagccccggaagacgacgaactccgattcgcccgaccccagggctcggactcgggctcagcctcggaagacgacgaactccgcttcgcccgaccccagggctcggactcagccctggcctcagccgacagtctctgcctcgcccgacccaggggctcggactcgacctcggcctcggaagacagactcgacctcgacctcggaggagcctccgcctcgcccaacccagggctcggaccgaccacgtcacaggagacgccatcattaccctaccccaagctaactcaggctacggggaacaagaccggcgtcccatctggctcgccccgataa

SEQ ID NO: 23618 - DNA, 168 bp, Zea mays
  Peptide Sequence Number=SeqID_66993
gtgctacatctggagcacttgggtgaaccgtgcgaggacgtgaaggacgccggcgactgcacggcactgctcgacgcgtgccgccaggttctggccgaccccactggatgcggaggggggcctgaccctgacgtcgtcggtgatgcggtgctggaagccctggggtag

SEQ ID NO: 23619 - DNA, 372 bp, Zea mays
  Peptide Sequence Number=SeqID_66994
atggagcggaccaccgattcggcaacgggaggcaaggacgctggctacggcattggatttcctagtgatggcttcaggaaggcgcggcgtgggaggttgggttctaaggaaaggagaagaggagcaccaggcacgcagatttgtagttcgatcaggtcggacgtttctggccgcctggcattgcgcgggccacgaagtcttccccgttgttcggccgggaattcgcttggttgttacggggaagaagatgattacggctggtgggggacccacgcgaccgtgacacagagcacccataggcgacgcggtcaggcgggtcagccaacagggtccacaggccagaaggagttgggtggcggcacgacggactga

SEQ ID NO: 23620 - DNA, 282 bp, Zea mays
  Peptide Sequence Number=SeqID_66995
atgcctgggaaaagcgcgcgggatttcggaaacgagaacggatacgatggaggtacctcaacggtgaaggaagccgcgacgttgatagccttggaatcgattgaactggccacagttcttaactccgagtgtgattctgcaaccacaccatccaatctcccctggcgaggctccgatgatccccacgccgagcacgagattcagacggggatcgccctgggcggtggccacgggcggacggagaccgacacgaagggcgccgcgagcgcgttcaagaattag

SEQ ID NO: 23621 - DNA, 165 bp, Zea mays
  Peptide Sequence Number=SeqID_66996
atgaaggattttttaagatgcgaggctgaatatgaggctagggcagatgtggtggccaccacgagctgtaagaagctcgtcgtggacaactggacattccctcctagcacgaatccaggccatcgtcagctaccacggctacgaatcaagcttgattcttcagaa

SEQ ID NO: 23622 - DNA, 198 bp, Zea mays
  Peptide Sequence Number=SeqID_66997
atgggaaatatgtgctttggagcaggtgtgacagtcaggtggctatgggctgtggtgcgagctactctaggggcgacgtgtggttgggcgcagggacaggattatggggtgtctacactagcgcaaaacaaaattttcgaccccataatccaagaactcctagtgttatatgtcatggaattaccactagacgcgtag

SEQ ID NO: 23623 - DNA, 216 bp, Zea mays
  Peptide Sequence Number=SeqID_66998
atgtacggggatcgtgtacatgaagaatcatacccggggatcaaaccaagcacccagaatttgtcgccgaacttcgccgccgccgcagctccgccgcgcgccgtggccatgtcaacctgggccacaattcatgacgagcaagccactgtggaatctgaggttcagcaagttgaggtagctgagcaggagctcattgaaggcaagttgtgcccttga

SEQ ID NO: 23624 - DNA, 555 bp, Zea mays
  Peptide Sequence Number=SeqID_66999
atgaccgatagattagcaaaagatgagatgactacctggaaagctcacacgagaggtgacgatccaggcaggacgggagacggcacacggtcaatcaaggtcactgaaatgacagaagaggtgagcaccctggaatctcggattggcgtgaaatttggcaaggatgttgctggaagtgttgtgaaggttcctgaaaaatttgggttaaattggagcatttttggctggtttgggcatttcaccgagcacgtggcgtgcgggaaattagggtttcggagaaatggccatatgaggagtgaaaaccctcccgaaggagccaagaacctgcagggatacacaatggggacaattgaacacattccaccaactagattcattggatttgtcaagaatttgaagaatttgcaagaggtggaaaaaggtgcttactgtaacacagcagggaaagagacagagggaaagagacagatgaatgggctgctcaccaagaggaagaaggcgagcccaggcacacgatcgccggagcacggtggtcgccggttagacaagtcctag

SEQ ID NO: 23625 - DNA, 754 bp, Zea mays
  Peptide Sequence Number=SeqID_67000
gccggccccaccggtcagccgcgtcgtcgtcttcctcgcgtacgacgcaccgccgtcccctccatcgccgtcccctcgcccatcccctcaccgcacaggagagttcggcaccgccccgtcctcgccgcttgaccgcgtccttgcccggtaccgcccccgccgtgaggtcccgtcatcgccgctgtgcgacattaatgccggcgctgtgcacctcaccggagcccgccgagctccgccgctcccctcccctcgggcgcctataaaagggtcgcctcgggcacctccttccccgcaccggcctcagccaccaccctcctcccctcgcctgagctcaattcgcgaagcgccgccgtcttctccccctccgaacaccactcccccgccccaatccctcgcccaaagctcaccgacggtgatccccgccgcggagctccgccacctccccgcggacagccccctcccggcctcctctagccaaatcaagcctacccctagcggggaagctgaagcttttgacaaaattctaagtgagggaggagatttctacgcctttgctggcgagaaattttactctgaggtatggatgaagggcggccatgagatagctgatgaagctattagaaagaatgaaaaagaatctcacgacgctcaagaagaagccaaaagagctgaagaagctgctgaacctgaactttctctcccgtcggagccatacaacccagaagctgacccggattctgaagaaagcgcttga

SEQ ID NO: 23626 - DNA, 183 bp, Zea mays
  Peptide Sequence Number=SeqID_67001
atggttttgaagctcaagtgcaggaaaagggcatccaagacaaaatatcaaaagaatgttgatgcttcacataataagggtttgaagactgttccaaatagcattcgctcagagaacaataccattacctttgaagtcgaggaagagaagtatgagctgaaattgtatactaaatacacctag

SEQ ID NO: 23627 - DNA, 337 bp, Zea mays
  Peptide Sequence Number=SeqID_67002
atgtcgacggaagttcaaaaaccgtacgaagtgtatgattttggtgtagtgtatgtggtgaacttcatgaggtcttctgatgaatgtataaaattaatcgttgaacagttagttatggctgtaaaaacttctcagaacagtaatgaaggtagcacaaaggagctgaaggctattgttcttgagttgcagcatgagcttcaagctaaagatgtccaaattagcacaatcagttttgatctatcatgtcagttaagggcggttgaatcttctgcaaagcagttcttagttgatcttgaagatgcaagaatggagctccaaaatttggagaaacaagttg

SEQ ID NO: 23628 - DNA, 2589 bp, Zea mays
  Peptide Sequence Number=SeqID_67003
atgtgcttgcattattactcagcatacccgcggtttgaagtggaggaggaggatgcagacgaaggggccctgcggtgcgcggccggactgagtagcgggcgcgatttggttgaggagtttgtcgcgtatggggtgtggcccttggcgcatggctgggcgctgggcaaagtatgccctcgccagatgccttcctgtggtgggatgctggtgcgaagtcccgccttcgcactggatttgcatagccgcgatcccgctgcattcgtgtgtgaggcggaggatggggcggtgcggatcgtttgtcggtacgtgccgaagacggagggccagcgtagctgggatatacgcgggtccaacgatcgcttgaacagggtcttcgagttgaaccgtctgccgtatggcggttatcccgggcaagacgatgtggatcgtcgcgggaagaagccggcggcagagactagagacgacccggcgccgacggccgccccatcctctaagaagaggaagctaggtattgctacgggaggactgggggtttccgatggttttgctatggaattgatggggacatgcgcggccctcgggggaaggatgtcttcgcccgagctccgagagtcttcggcgcggatgctgaaggctaccgggggttggtggcctaagaacgttcctatcccccacgcggccggcgaaaacttttttacatctcgcatggtttgcgacttgagagtgtttccttatggacggaatattgttgctgttgtgtcggcagtgatggacaaggatcgtcagggagctgcgcagaagcgccaggcggtcatcaggctgcctgaggctagtccgaagaggtcgcgggggactgcgaaggctgctgcccccggcggcatccagccgacgctggtggcgaagtcggccgcccctgggtccagcagggtgccggaggctgtgaaggcggctggcaccggcggaaccaagtctgccccggccggagtcgcgaaggcccgagaattgcctccgccaggcaagcgcgtagccgacttcgtcaccgatattagcgtggacgattatctcgttgggtcgggcgaggggcaacttgttgttgttccgcccacggtggcggccgcggcggcttccgtggtgcctatggcgaagggtagcgctctcagcgtcggtggtgagattccggtgctcactgccgtcaaggacgaggcgggcgttgcggctgacttcgctgaccgcgtggcgtcgggggcccttacggcggttgtgtctaccgaagtcgagagacttcgggcgcaacatgctgacgccgtccgggaaaagtcggccgccgacagcaagtgccgcaagctggcggagaaggcggaggccaatttggcgcgggtggagggtagccttgccagacagcgcgccgaggaatgggaggagcggttcaacgctctgcagacccgtgtggagagggccgaggcttcgacgcgctcggaggctgagcggacgcgcaaacagcttatggactcataccacgagctgggcgcgcgaaccgctgacttcgaagtgccagaccaagagcccggacttcgctgtctcgagtggctgcaggaggagttgctggcgctccccgccattatggaggggtttatgtcttatgcctccctggtcacctgcgaaggggcgatgaacgcgctgtcccgcgaagggtgccgtcactatgaggtcttcgaccgatctgatgaggatttcgagcgcgagatttacaaggttgaggaccctgtggtgaaggaatctgcgggagccctcttcgaccggatgtggggcccccacggtcgggaggtggtcagggagcggtccgacacgacgaggggtcaggcggcgcgtaacgagaaagtggaggacttcggggctttgaacagcgtgcagcctgaggcggagtcgaacccggtggcggctgtgtctgaggtcgccccggcggcgcccccagaaaccgtcgaaggctccctcgctgcccccgcggccaccgcgaccggtggtggtatatcgccaaccgctctgccgagggctgaggatcccccgaagacggcgacggagctggcagcggaggatcccacggcggctgggtcttcacagtttcaagattttgggcctgtgcacgcaaccgctactgctaatgttttgccggcttcgaccgtggatgctgggaatgaatcagatgagtctgcgtctaagtttactgattttggtgactctgggagttcggttgagtggacggaagagtcgttggatgaggacttggattattttgcggccttggatgtggcagcggcggaggcttcgccgcgtgctgcggatgctgaagttgtgcctggtccgagtgctgggcgtaggcggcgaagggcggttgcgaagcgtagagtgagtgaggcggacggtggtcggcttcgcgtgggcagggctggaaggcgagaactgttgtcctcgccggccgttgcgagtgtaggtgagggggagctgcgaagtctttttgagggtgaggagctgaggataatgctatttaactataggaagatgggaattattccgaaggttgaaccgatgtaa

SEQ ID NO: 23629 - DNA, 900 bp, Zea mays
  Peptide Sequence Number=SeqID_67004
atggccgttgaacaaaaaaacgagaaaagtagaaagcgtcgtgaagtaagccaacaaaataaaggacctcctatacagccagaggcatctagagaagacattaatatgaagacatgtgagatggttaactttgaaataagtggagatgtccatcttggttcagttagtctttcagatggctatttcacaaactttgcaacacaagatggagacgaaaacgtaaatgtgaatcaagatgatggtatcgattggttgcataggaatgagacattcaaggcagacgatgttttcacaacgagagaccttctgacaccaggcggtgtgcatgaaactgttggtaacacgcctaaccataatttggaaagggtcgcctactttagagagcggtacaaaaacttaactcccgccgagagggagtttaggcgtgaacgccttaggttgtataataatacaccaaagcggaaagggtcaaagatagagtacataagaaaacgtagagcactgttggctgacacattgagtcaggagtccatcgccatggagtacccaacatatacccttgagttacccctgcgatgggttatccctgaaatcgccagtaacccattcctactagcttcaacacagactgaggatgtcgatccactgcatatgtctactggaccactaagacgtaaacaacatgtgccacgtggtggaagacaagctatcttagcccgtcgaaatcggcaatttgaagcatccatttcaaggaacatggctactgcgactgaggatactatcagtgacgctggggaaggggatgattggacacaaccccatatgaatgcaaagatcaacaacaatggtaattactatcattgttttcaagtcggacgagttgtcggtcattttggctga

SEQ ID NO: 23630 - DNA, 237 bp, Zea mays
  Peptide Sequence Number=SeqID_67005
atgtcaaagctgctcctgactcctcgagtcgcccttcttcatcggttgctcctgagaaaggcattgccaagtagaaatactgaatacattcatgaactatatgtgtatgtgatcaatgtgcccgaatactcgctaatgaggcatagagatcaccctaagatgagtgatcgtaagcatgttatactaggtcgagtaggggtgagcatgttgcaccgtcttaagtcattgccgacttaa

SEQ ID NO: 23631 - DNA, 177 bp, Zea mays
  Peptide Sequence Number=SeqID_67006
atgagcctcctctcggcaggacgtagaaccatccgacgcgtcacccacgccacctgcccccatagggtcaacctcctcatcctgcacatgagcctcctgctcaccctcctcaccctgcacatgagcatcctgctgaggagcctcctgctcaccctcctcaccctgcacttcgtctag

SEQ ID NO: 23632 - DNA, 330 bp, Zea mays
  Peptide Sequence Number=SeqID_67007
atggggctcggcaaggaggcaggcatggtgagggccgggcgcgctaatggggcatggcgaggggcggcgtggcaatggggcacggcgaggggcggcgcggcgatggggcacgacgaggaggcgggcacagcgaggggagtgcgtgcggcgtggcgcgggcgtgcgggaggcacggcgaggggagtgcgggcggcgcggcgtgcagcggcgcaccgattcaaaatagcgaaacgagcgagagagaagctgcgggcgcgcgaccgggacgatttagggcctctattttcgtcggcctcactgaggccgacgaaaatagtggtcggtcaatga

SEQ ID NO: 23633 - DNA, 54 bp, Zea mays
  Peptide Sequence Number=SeqID_67008
atggcgcaccggacgatccggtgcgccaccggtggtgacaccaagggcccttag

SEQ ID NO: 23634 - DNA, 213 bp, Zea mays
  Peptide Sequence Number=SeqID_67009
atgccttcgcttctctcccacttgctgtgccctttcgcctctgagctctctgtgcccctttgccttcaaggggtagagagcgagccgagttggggttctgccttccgcatgagctggtggcccgcttcttcctccagcatttggaggaaaaggatgttcactagccttgcgaaggaggcgaacttcggctacgcggtgtcggccggaccgtaa

SEQ ID NO: 23635 - DNA, 1929 bp, Zea mays
  Peptide Sequence Number=SeqID_67010
atgccatcctcttcttcttccgccgacgccccgtcgccggccgccgcctcgtctgaggagacgttgagtaacgtgatggtggaggagttgcgcgccggcgactctgttgaatttggtgtgtcacggatgacgtcagcccgtattgaagatatgcagcggttgggctactttggcggcggagtcgctcgtgctccggggacggaggaagtccccgagccggagggcgagttggttgttttcgaggcgttcttcgtcgccggactccgcttgcctgcgcaccgggtcttcgaattaaatcaactgccgtacgacggctaccccggtcaagacgaagcagaccgccgtgggaagaaaccggcggtggagactggaggcgaccctgcgctggtggccgccgcctcctcgaaaaagagaaaattagtgatggacaaggatcgccaaggggcggcgcgaaaacgccaggcgactgtgagggttcacgaagcccggccgaaaaggcagcggggaacggcgaaggctgaggcctccggcggaggcaagccgccgctgccggcgaaggtgggcgcctctgcgcccggcaaggcgccggaggtgacggtgggcgccggaggccccaagctgacgaaggtggtgccgtctgtcagcggagtggcggaggctgcgaaggcggcccgaacgttaccgccgcccggcaaacgcgttgccgacttcggcaccgagattaatgtggaggactatcttggggggtcggacgagggcccgcctgctctagttgtgcctggcgcggcgatcgcgacggctgcgccagcgccgaaggcggggggagagacccttggcgccggaggcgaggtgtctgccctcgcgttggtcagggacgaggcgggcgtggcgacccgccggctgaagggagcgacggaggcgctgagtcgagcgacggaggcgctgagtcaggtggcggacttcaccagccgcaccgcgtcgggggcccttacggcagctttgtctgccgaggtcgagagacttcggacgcaacatgctgacgctgtccgtgagaagtcggcctccgacagcaagtgccgcaaactggcggagaaggtggccgccctggagaaggagaaggctgacctccggcgccagctggcgggggagaggagggaggccaacgaagccgtcgctaaagagcaggctgctcaggcggaggccaggctggcgcgggcggaaggcaatatcgccaaggagctcgtcggagagctgcagcggcggcttactgccctggagagccgcgcggagggggccgaggccgcgacgcgagcggaggccgaacggacgcgcacgcagctcatgactgcatatcgcgagctgggtgtgcggacgggagacttcgaggtgccggagcgagaggccggacttcgctgtctggaatgggtgcaggaggaactgcaggagctccccactgtcttggcggggttgatgtcgttcacctccctggtcacctgcgaggcagcgatgaacgcgctctctcgcgaaggctgccggcactttgaggccctcgaccaggcagatgaggattttgggcgagatatctttgaggtcgaagacccccgtggtgaaggaatccgccggggcccctctatgacccggatgtggggttcatatggttgtgaggtggtccgggcgcgggccgaagctgcgagggctcaggcggagcgcgacgagcgggtggacgacttcggggcgctgaacagcgcgctgcctgacccggagacgacccctgcggaggccgcgactggagtcgccccgggaccgacccccggagactgcggaagatgcaccatgcgcccctgcacctgctgcggccggcgaagaccttcccccaaaggtggccgaaggcgcgcccgatgcccccgcagctgctgtgccgagcgctga

SEQ ID NO: 23636 - DNA, 666 bp, Zea mays
  Peptide Sequence Number=SeqID_67011
atggctgcgcctgagcagcgttattatgagagtgaaagtggacgtgctgctactcccctcattcccaacatggtcaccatgtggccagaaaaagcgatacactccaagatgccaacagtgggtccggacactcatggaaaagtgtcagacccctgtacatgtagaccggacctccggagcaagatccaggacccccgcgagtgtagcccggacctccgggtcgggtcccggatccctctgcgtgggatccggactacccatagccgggtcccaggactcaggggcagggaatacccaggccttgctcaagctagggtccggtgccgacatgtgtccaggcccagcctggtgtggacctgtccgcatagcgctactgctccccgcctagacggagacccgatgctgccgcatggcctaccacgcgtgacctggcaggcggcgtccaggccatcctgcaggcggcaggcctgtccattgccaaacagtatgcccgtgctgcgaggtgcactgtgctcatccatcatcactcgtacgttgccagggaagcttcccctgcacgccaatgctgcgcagatcgcagatatcagggcgtttttgcttgttttcctgctcgacgccatggttcacatcgtcgagcaccatgacttcatccctgagaacacctag

SEQ ID NO: 23637 - DNA, 426 bp, Zea mays
  Peptide Sequence Number=SeqID_67012
atgcaggcggtggcacgggcggcgcgtgggctcgcggctgcggctgcggctgcggctgcgcggccgtcggcgacggaggcagggcaccgcgggcaggtgcagcaagctcggggcatcgtggtgcaggtgagggacgggaatctggagcgggcgctgtcgatcatggagcgcaagatgcggtccagcggcatggagcgcctcatccgggcgcgcacccatcaccacgtcaaggactcggagaagcgcgtgctcgcacgtaaggggcttatgcagcgcgtccgttcccaggagctcggcaagaagctccgcgagatcctcatcaagaagatcagggctagtttgacaactctatttttccaagggatttctattttcccaatggaaaatgaactaaatttccttgggaaaatgaggttgccaaactag

SEQ ID NO: 23638 - DNA, 1608 bp, Zea mays
  Peptide Sequence Number=SeqID_67013
atgagtagtgataatgatttatttggtgatgctcatgatttatggaatagaattaaagtaaaatattgtgtggcaaattgtactgcttctactccctatattgcttgtgatgctaacctttcaaagggagaagatcaagaacgatgggcacccaacgatgaatccacctcgtcgacaggtttggtctccactaataataagtgttttgttgctaacaatgacggtggagacaaaagccatgatgatgaggaatatgaggatgatagcgaggatgagtcttcatcacctcaaggcacattttcctgtttggcttccactgacattaatgacaggaaaaatgataccgatgatgtggaagaagaggagattcgccgtttctacatccatctcaacaaagaggacaagacactcttggttaagctgttgagaaggaacaaggaacaaggcgatacgcttctcaggctagaggagtccctcatcaaaaccaacaacagcctggaaaagatgaccatagaacatgaggagctaaagtgctctcatgatgatttggtccaaagctctgttctcgagtctggtggtagggacgcctgccgttttgcgaccgcacaggcacagctctgcgccgcgcagctgcaagacgacaccaatgaccggttggtgtcacgtactacgcctctgcctgcctgcctccagccactgaaccgagctctgagctcgaccggtcaaaagccgcagcagcgcgcccccgcggtcccgcgcgcacagcgccgaaacgacgcgcacccgcctgcccgcgtccgaaatgctgccgcggtgccgccgcgcggtcacgggtcacggcacggactcacggcggtttcccaggcgaggcgaggcgaggcgagggagagaacgaaagggacgccaacgtcgtttcaaaaatcattgcatgcgaggcaacggtcgcctaacctaatacgagtcgtactcctcctggtctcttgcgggaagcggctcgcagcggccggcagcgagccgagtgtcacgctcgaacacacactgacaccgcacaaaggactcgccgctgttgatcaacatacgactccctcttttgtccgccgcgcgcatggcccctcccctctccgctctctccttataagcagccacataacggcggcgtcggcgagggcgagaagcggcggcaggcagacacagctcttagctctgccctgcagtgcgcgcgagcgcgacgggggtgctgtgctgccgcggtggtgggagaccatggcgacggtgccggtgccgttgccgtggccgagcgtgaggaggtcgctgcaggagggggccgccagcgcggcatcgtacgagcggcgagctccgtggcagggggcggcgcggcccgcggccacggtgaggtcggtggagacgctggtggtgatcgtggccgcgatcgtgctcgccgccgtgctggcgggcgtcctcgcgcgggtctgtggcgggcggcacgtcgtgccgagcgcccagtaccacgacgaggaaggctgggtggagaggcgctgccggagctgcctcgacagcgggctgccgccgccggagcagggggcgtccaagacgagcgaggccaaatag

SEQ ID NO: 23639 - DNA, 669 bp, Zea mays
  Peptide Sequence Number=SeqID_67014
atggagtttatggatgccaaggaggtaactgatgttagtggcattaaatcaattggagttcaccctgttgatgtttcaaaacctagatggaaaaggccacagctggttcttcttgaccacggcctctacaaagagcttgattataatactaggataagctacgcttctctttggaaggcacttgtttttgctgatgcaaaagcaattaaggagaacagtgccaaactgggtgctggggaggatcttcatgcactctttgctggtgttctcactatgagaccatggaaaagggtgattgacccatctcctgatcatcttgtactaggaaaaaatactgattattcagaattacagaattacgcctccttatattttactgagatctccgagctactgaggagattaccaagggttatattgttgatgcttaaaacaaatgactgtttacgtgcagtcagtcatgccctggttgggggcagttccttggagtcgtttatgattattggacgggtatcttctgaagctgtgctggatgctaaaaggatgaacaggaggtcctttctcgatggattgaagatatggctggaggaagccctgctggaagctcgattctttactttgaagctgatgctatgtgttatgcaacttaggaagttgttgcctggctaa

SEQ ID NO: 23640 - DNA, 1137 bp, Zea mays
  Peptide Sequence Number=SeqID_67015
atggtggttggggagcaggactactactattctagttccgactccgacgacgaggacgtcagccgctacgtgttcctcgcacggcagcccgtgcccgtgggccgccaccacccggaggaggacgatcgagacgcgagctttgcgaatgatgacgacgacggtgatggtggcgatggaacggcgggggaggaggaatcggaaggaggcgtctgtaggaggaagaagaggcctctcctggagatcttggacgacgacgccccgccgccgaccaagaaggcccaggtcgaactgatcatcgcgtcgccgctggcgacgcagacgccaccgagcggttcggagtcgaacttagcgtccccgcctttggccggggagtccgggagcgaggggagccacgagcatcgcgctccaagagagcaaggaagggccaagaacgcgacaaagaaccagcggggcgcgtgcggcaagcgaggcaggagttcgggctgcgatgtggatggcgaccgggacgcgcatcggcacgctgtggcggtggcggcaaagactggcgcgtcgtccagcgcaacctcggggcgcttcaccttcacctgcagcctatgcgacaggtgcttcgatagccatcaggcgctcgggggacatgtccttggacaccaccggaagagagccaagatcgccattgccgcaggagcagttcatgacgtcgtcgatgacaaggtccatggcaagggcaagggcggcgttggggagcccgtgtttgcaggaagccatgacatcgctgtatcatcaggccatggcttcacatatggcaactccagaagcgacaagaagatggacattggcacggcaagccccaaccgaaaggtcgtcgtcgctggaacgtgccgcgagggtgccaatggcaacggcaacggccacggtgacggctgcaggacgcggtacaagtgcaaggtgtgtggaacggaatgcctcacagggcgcgcgctcggtggccatatggggaagcaccagaagcgactaccagtcggtggtggtggcaaggcagacaggtcgcctagtccagcgacgcggacgacgactgccagacctttggcgcagctgttcggcgccgagaggttgcagagagagataagacctagttga

SEQ ID NO: 23641 - DNA, 417 bp, Zea mays
  Peptide Sequence Number=SeqID_67016
atgtacgacaagctctggcgccgccaccgcttggacgcggtgcagagcggctgcttcgcgctgtccatcgtcaagcaggggacctcatggtcgtcgccaacatcggtgactctcggtttgttctgggcactgcatttaacgacgacgccatcacgtcgtccagctcatcgtccacctgaagcccaacctgccacaggagtatgcatccggtggtgcaacggtcaggggtactaccttgctgatgagcccggggtgcacttcgttttacagcccagccaagagtcattagtactcggtatgtcgcgcgcgttcgatgactactatatccaggactgtggcgtcatcttggcgccagaggtgacgcagaggaggaccgacaacaatgaccagtttgtcatcctcgccaccgttgggtag

SEQ ID NO: 23642 - DNA, 429 bp, Zea mays
  Peptide Sequence Number=SeqID_67017
atggcgcaccggacggtccgaaatataattgactttggtgaatatcgtgccaattgtcgtgacatacaacaatcttttgctgatggcgcatgtctcgacaacgtgtttatgcaatgtttcattgagtgtgtccgcgttgactgttctaaacatattcctccactgaatgctcaccagctcattctagatgttaatgttggggctatattgaactttgaggagcaggagcaacataataatggtacccatgctacgctctggacattggacattcactacgactacatggttggagctatgaatgcagtcattgatccggataattcagaggacattcgctctcttgtactgcaatacataatattccatcgactaaacagaaacaactccatggtttcacatctggatagattcaagttctctcagtag

SEQ ID NO: 23643 - DNA, 1344 bp, Zea mays
  Peptide Sequence Number=SeqID_67018
atggcgcagtcgaccgttggcatccagagagccgttggcgcaccggacatgtccggtgcccaactccatcaacctctgtcggattttctggccgtcgatgacaaagaaatcacagggccatataacacaattgatgtgaattatacatacctttatgaagtaatggttgatattttgatgtggaaacaagctgctgcttcaattatgcgaaaggttgatcgacccccaaccaatccaaagtgtttaatcattgagtcaagtcaagaatgtttcagtgttgacattccgcgcttgactgacattggagaccctacaaatacgcggtctgatggtgatcctctgcagcatagaaagaggggtgttccagccgatgctaaaaagattcctatgcctaatgtggatgatgatgatgactttgagccaccaaaaaagatgtgcaatatctcaatggatgccccaaataagacacatagactcaacatcagatgcaacccaggagatgttcttgcgtccattcagatattgaatgaaaggcaatgtcaagctatagtcagaaaaggattctctagtattcttgacatgactattgatgcaattggatgtcgaacacttctttgttggctcatgcagaagctagaccccagagacatgactcttcgtattggtccagacaaagaactcaaaatcaccaagcagactgtccatcagatattgggtcttccaaatttgggtggtggaaagccacttaatattgatgaagcgaacgttgcggcaacacttcgggcctccttgaatattagcaaggatgaatttgttatttcaaagctccgggacagattgaggctaggccaggatgatgatctttctatcagatctgtattatttggatcatttgcaccatgccgctgctccaaacaacaaaagtggcactccacgcataaatttcggagcagcagtgagacatgttatgtctcaaaatcgccatctactggtcagcttgagaagttccaagctaagttgattgattatgacttagaggttggcaaaatatttgccactatcaagcaatgtttgaataatattggtacaaagcagtccaatctagctgctacatttggagagttgattgatgaggttcttagggctgatgaatctgttacacctaatactcaaggtcagacagtgctaggtggcacagttgaccatgactctggcccagtatttgacaagactcctattgggagtgtttgtgcaccatgcatcttcttatctgaattagaatgtgctcgcgctctttgggcctacttgtgttctaaggtcattgaattggacagatactgttaa

SEQ ID NO: 23644 - DNA, 678 bp, Zea mays
  Peptide Sequence Number=SeqID_67019
atggcggcatcggaccccgccccatgtggtggggtcagcggccccaaggaggcgcgctatcgcgtgcggcggttcacaccccgctctttccgcacccgaaatccatctcacaaactatccaggaaggctagggaccacatcggtgtctactactttcagacgaggccagatctggccatagtctacatccccacctttggtcgtgcgaggtgggaaaactggcgcagcgactgggtgatcgccagcaccgaggccaacgaccgcctcatcctgccgaccaatgggccagcactcgaccgcaagcaatggaggaccaagccatccctctcgccagagttcctacccatattggacaggatcaagaccagcggccgggaccccctccgcgggatccggatctctggtgcaccggctaggggtccccagcccgtcggtgtggctcccagtgctaatcccaccatgccccccagccccttggacaagggcaaaggggctgcaagcagtgcctccgcaggtagctccggggggtcgaaggaggagaggcgatgcaggttgtgtcgtgctgacgggtcgctcgtttcggagctcgcccagaagcgccagaaggctgcagatgggaccaaggaggccagctcccaggcccacgacgcgcagaggcacgtcagtcccccgatctag

SEQ ID NO: 23645 - DNA, 435 bp, Zea mays
  Peptide Sequence Number=SeqID_67020
atgggcaagagcaacaagcgcaagcgcgaaccgactcctccatcagaggatttcggtgactcggaatactcggaggaggagttctcctccgagtccgaggggtctccggctcccgtctctcccccggcgtcgtccgatgactcggacgactcccaggggatagccgcggaagtctggacatacatccgggccgtcgagcgctccgggctcgagggttcggatgagtcggagtactcctcggatgaggaggactcggacggcggcggcgaggacgaggacgacgacgacgacgacggcgacgacgacgacggtggcgacggcgacggcagcggcaatggcaggggcagcggcgacggcggcaggggcggtgacgacggcagcagcaagggcagcaccaagggcggcggcggcagcaggggcagggccagtggctag

SEQ ID NO: 23646 - DNA, 186 bp, Zea mays
  Peptide Sequence Number=SeqID_67021
atgaagcatgattctgcttctgaagctgcattcttagagccgaagcgattgcttgtatctgtatgttctacattccctaaggaacgtcttttgaacttcttcgccttctatttcggcagtattcgcgttaacttttcgcgcttcgccttatatttcggcggtatcagcgttgacttttcgctgtaa

SEQ ID NO: 23647 - DNA, 1359 bp, Zea mays
  Peptide Sequence Number=SeqID_67022
atggggcacggcgtcagctgcgcccgcaccggtgacgagcacgactacttccgcgcggcgcaggtcggggacctcgaggccctggaagcgctcctcgacgctgacccctcccttgcccgccgcgccacgctctacgaccgcctctccgcgctccacatcgccgccgcgaatggccgcctcgagacgccgctgatgctcgcggcgatgcacggcaagaccgactgcgtgctgaagctcctgcaggccggcgccaatatcctcatgttcgactcccagcacgggcggacctgcctgcaccacgcgtcctacttcggccacgtcggctgcctgcaggccatcctcacggcggcgcggaccacgccggtggccaactcatggggtttcgctcggttcgtcaacgtgagagacgaccacggcgccacgccgctccacctcgccgccaggcagggccgccccggctgcgtgcaggcgctgctggagaacggtgccatcgtctccgctttgaccggctcatacgggtttcctggtagcacgtcgctgcacctcgccgctcgcagcgggagcctggattgcacccggaagctgctcgcctggggagcggatcgtctccggagggattcagcagggaggatcccttacgccgtggcgctgaagcgcaaccacgaggcgtgcgcggcgctgctgaacccgtcggcggcggagcccatggtgtggccgtccccgttcaagttcatcagcgagctggagccggaggccaaggcgctccttgaagcggcgctgacggaagccaacagggagagggaggagaagatcctcaggggcaccaagcactctccgcatcctcccacctgggaccacgcgagcgacgccgccgacgccgacgccatcgacgacgcgtcctcagatgccagcgccagcgacgcggagctgtgctgcatctgcttcgaccaggcgtgcacgatggaggtgcaggactgcgggcaccagatgtgcgcgccgtgcacgctcgcgctgtgctgccacagcaagcccgacccggtgacgctagcgctgccgtcgccagcctgcccgttctgccgcggcagcatctcgcggctgctgctggtggcccgggcaagcagcgacgacgcagacaccgagaagtcggcggcagcggctgcggcagcggctgcctcctccccgcagctcgtccggcggcggtcccggcggtcgcacaacctcagcgacggcggcagcagcagcttcaaggggctgtcgtccgccgtggccggttccttctccaagatcgggcgcgggtcgagccggacgatggccgacagcgacggctgcggcgtggacaagcccgagcacgacccgtga

SEQ ID NO: 23648 - DNA, 827 bp, Zea mays
  Peptide Sequence Number=SeqID_67023
atggcgaccagggagatcgacagcaggtgccattctttttctcggtccaaggcaaggcgcactcggcggctgtgttcctggtgctatggtggcgcggtggtccatcagggtgcggcaggctcagagatttttttatactccgaagccaaggtaggtccaggcgaagggatatcccttgaccaggtcacgacggatccagaggaaatggtgaggttggttcatgccgcgctatcttcgcggggaagaagaagaccggacgacctgaggaaagccgatggcgcgagggagcggcggccctccattgctacagcggtgctgcacgatgagcttctgatgtgcgtggaggacgaggcaccgatctttattccgcccagtaggtttccccggctcccgaggtcaccatgcttgccccgaacgcacacatcgacgagtggatttggtggcggcgctggcgacgaagttcttcgcggcggtgcggtacccgaagaaggaaacagtcgaagggccgtggcttcttgcgcgaccgctggtggtggcgcgaggcggacggtggcttgcagcgacggcacagcatatggtttctcccgcataatctctccctctctcctcgatgacgcgtttttcggtggagcgcggatgaccaattcctatgtctcaggttggacagcagggcacttcgtaaagcagaggggagatgaagaggagcgaggacgagctccaacaacccggtcgaagcgcgcaagtggttacgggagcgggatctacgacgaggagatcggcaggaggcgttcttcggtcagcgcagtccgatcctcgcggggaagaag

SEQ ID NO: 23649 - DNA, 141 bp, Zea mays
  Peptide Sequence Number=SeqID_67024
atggtggattgctcacgatgtcccttcggcaccgtgaatccactggtcgtcatggcctggcttccccagaacttcattccgggacgggagacctatcgtaccggtgggcatgtccaggctatggcgtcgtcgtggggataa

SEQ ID NO: 23650 - DNA, 240 bp, Zea mays
  Peptide Sequence Number=SeqID_67025
atgcaggtggatacggagcccttcccagtgaatgtgatcgatttcgagggcaaaagggtcctaattcagcccagcatggccaataagggcaaaggcaaggaagtgcctgagtgcccagcatcttgggttaaggacgcatgtgccctcaggcgcccagcgagtctggcgaaggcatcgagcgaagggtggcgtcttcgacttcgccccaacatttgccctccgagggaccagttcggctaa

SEQ ID NO: 23651 - DNA, 1653 bp, Zea mays
  Peptide Sequence Number=SeqID_67026
atggtggcattagcgaagtatgtctgggcaacaacgtcgtatgacggtcagccttcggtggaagtcttcgccaagcactactgtctgcactggcagaagagaaggattggacataagattgcgcagttcgaatcgtgcactttcacgccgaagtccgggaagacttcgatggaggttgtggagctggtcccctatgctcgaaataagtggggcaactggtgggactactggttctatgtttcagaggctgaagtcgaagatcatcctgggctccctgctgccatcatgagtagcgggcgtgatctggttgaggaattcatagggtatggggtgtggcccttggcgcatggatggacgctgggcgaagtatgccctcgctgggtgggcggaaagtgcgaagtccgcttttttgctttggatgtgcgaaggcgggatcctgtcgcggttgtgcgtgaggcggaggatggggcgatgcgaattgttggtcgctacatgccgaggacggaggcccagcggagctgggacatacgtggatccaacgaccgcctgaatagggtctttgagttgaatggtttgtcgtatggcggttatcctggagtagacgttgtcgaccgccggggaaaaaccagcagcattgatggggacatgcgcggcccccgggggaaggatgtcttcgcccgagctccgggagtcttcggcgtggatgctggaggttaccggggttcgatggcccaagaacgttcctatccccgcgcggctggcaaagacttttttacatctcgcatggctcgtgatttgagagtgtttccttacggacggaacattgctgttgttgtgtcggcggtgatgaacaaggatcgccaggatgctgcgcagaagcgtcgggcggtcgtcaggctccctgaggctaggccgaagagagcgcgggggagtgcgaaggctgccgtccctggctgtagccagccttcgctggctgcgaagccggtcgcgcctggatctggcaagttgcaggagagcatgaaggcggccagcgctggcggaaccaagtccgccccggaaggagctgcgaaggtccgggagcagccttcaccggggaaacgtgttgccgacttcggcacaaatattagtgtggacaactatctcgttgggtggcgctttcagcgctggcggcgaggtttcggcggccactgccgtcaaggaggaggcggccactgtgtcccaccggctgcgggaggcatcgctgcagctgacatagcagctgaatcaagtaagttgaggtatgcttcattgtgtgccgctttcatggcggccgacttcgccgaccgcgtggcgtcgggcgcccttacggcggacgtggctgccgaagtcgagagacttcgggcgcagcacgcggacgccgtccgggaaaaatcggctgcggagagcaaaagtcgcaggctggcggagaaggtggccgcccttgagggcaagaggatggacctctggtgccagctggtggaggaaaggagggaggccaaccaggccatcaccaaggcgcagacggcgcaggcggaggccaaattggcgagggcggaggagagtctcgctagcccagcgcgccgaggaatgggaggcgcgtttcaacgctctgcaggcccgcatggagagggctga

SEQ ID NO: 23652 - DNA, 672 bp, Zea mays
  Peptide Sequence Number=SeqID_67027
atggcgctgtcccgcgaggggtgcagtcactatcagggcttcgatcgatccgatgaagacttcggccgcaagatttttaaggtcgaagaccctgttgtgaaggacgccgcgagggccctcttcgaccggatgtggggcccccacggtcgggaggcggttagggaacgggctgatcgggcgagggatcagatggcgcgtgctgaggacgtggaggacttcgggcatctgaacagcgcgctgcccgaagcggacgtcaacctggtggtggccgaggctgaggtcgacccggcaccgctcccgaaaaccggtgaaggttcccacgctgcccctgcgtctactgtatctggtggaggctcgctgccagccactgtgccgatggcggaggatcccccgaaggcgccgatggagccagcagcggaggatcccgtggcggcgactaggtcttcacaggattttgggcctgcgcacgcaactgctactgctaattttgtggcggcttcgaccgtggtcgctggaaatgaatcgaatgagtctacgtctaagttttctgagtttgacgactctgggagttcggttgtgtggacggaagagtcttcagatgagggcttggattactttgcggccttggatgtggctgaggcggaggcttctcccgcgtgttacggatgctga

SEQ ID NO: 23653 - DNA, 1417 bp, Zea mays
  Peptide Sequence Number=SeqID_67028
gaggcccaaggagggagggagagaggcggattgccatcctcttagccgggccgggactccgcgcggagggcagagcccagggacgactctggagccgataagtcaggcggcgaggcagacccctggacggggagcccactcagccttccccgacgatatcgcgccgtcgcccgcgacctcggcgtccacgccgcgccggttcttccgccgccccttcccgccgccttccccggccaagcacatcaaggcgtccctcgcgcgccggctcggccatcgctcgccggtctccgtgtcgcaggtgcccaggccgcccgtcgaggtcccgatcctggagcaaggggccggcggcgctggggaggtggagcgggagcttgacaggagctacggcggcgctgggaaggaggtgggccgcggccattttagccacacctgcctcacacgcgcccgcaagggagacatgagaggccagatgacaacggcaatatctattgaggatgtgcgcacagaggtgaaaattttgaaggcattatctggacattccaatcttgttaagttttatgatgcttgtgaggacgcccttaatgtctacataatgatggagctttgtgaaggtggagaactattggatagaatcttgtccagatattacattttcttaagaaatcattttgcgaacaccactacaagaggtggaagatacaatgaaggggatgcaaaaattattgttgaacagatattaaaaggtgttgctgcacctgctgctgtctcagttccagaggggaaatctgcaaagaaggggaagagaaatgcagaagatgagattgagaaggccgtgagtgcaaagaagcaaaagactgtacctgaaaaagttgtgccggttaagaagcagccccctccaaagaaagttgagagcaacaactctgatgaggattcttcagattctgaagtggagctatgttgcccgggccatctattccagtgttgtcacagtggagccagtaatggtccgattctctttgaagtcaaattcttttggccagcagtaatgatgatttcagctgcatttcaagctactgcttccattatcaaggagtttgttttcattaaaggtgcaaaacgccttgagggaaagaggcctgatatatttgtagtcaactcttttggttctggtttccaggcactttttattttcctactccttccatttctctctaacttgaaagggattccttttgctgaactcccttcatacctaacccatggtgttgcatgctttctgaatgttggagggaatctgaagggtgagtattgtttctcatatcacattcaggtggtgtattttagtggtggagctaactttgcggacatatgtctcaattttagtggtggagctacgaacaacaatccgatgtcctga

SEQ ID NO: 23654 - DNA, 1359 bp, Zea mays
  Peptide Sequence Number=SeqID_67029
atggtgtctccggtgagctgcaagcgggtaatccgagtggacgtccgtgccccattcgttaggggtcggctaggggcccagaggcacgcccaaaagtacctgcgggtgatctgccggactcggtccctggcgatggggtccgagggctcgatgcctccctctgatgggattccgttacaagatcgctcccgctggtctcggaaatgtcctagggtacctcgggagcgcagcccgagccttggttatgtatcgaacgtacccctggtcatccctcgctcggcgtctgaggcgactggcccacgcgatctgaggcggctattgaaacccttcggggggccagccttcgaacctctgatcagtaaggaggctcggagcctggttccttcacggggaaggatccttttcgggggagagttgcctttaaaaggagggcgacccctttcggaaggcgaccatgtcttctcgctcccttatgcatcgcgtctttccaccttccaagccccggatgggggatacccgccgtcttttcgcctcatcgttggaggaatgcaactccgtgggagttggtacctttcagccatcgttcggcttcaaggattttcatcagccagcccggctgtacccccccgccggcggtcacccgagacggtgaccaccagctcctgggtggggagaagcaagccgggctgcgatcttggtcccaccctcagcttcaaggatgttcatcatccccgctggggtgggtgccgggctgagccggagctctacctcccgcgcgggttcgcgggtcaccctctcttgcggcgttcgagggagagggcgctcgctggccccgcgggcggcccggacttcgacaacgtggggctggtcgacggcgggcgtcgtcacccccagcgtgtcgagctcgtcggcctggctcccggcggcgctttctgccggaaggcggctgccgcgccgtgtgcacggggggaccacccaagatgccgcgcgctgctagggtggcgttcgtgttctggggtggtcctgcctttgcaccgggacggcgccttcacgcggaggccggcggaggcggctcgagaagtccccgtcgccgacgggatcaccgccaccatccgcgcttcgggcctccggctcctcaagcttagtcaaagggaccccttggccgctcttcgacgagccgaggccagggccgaggcctcgggtcaggctggcgcccttggaagatggttggccgaggccccagggagtggggatccttggaccgcctcgccgttcgaggctaggtcggaccttgctgaaggtgtcgtcgatgccgagggtgttactgcccccttccagcgtcaagacccgagcctgtag

SEQ ID NO: 23655 - DNA, 258 bp, Zea mays
  Peptide Sequence Number=SeqID_67030
actcgcaaccctactctttctcccctcctccacgccgttcgccgctacaatggtgaacggaacgttgaggtcggcgtaatcgattacgtgttgtggatggaggacgaggacaaggtgttcgtccgcgtggacgaggtcggcaccgagctcgcggccaacttgcgcgcgctcgcggccaacttgcgcgcgttgccggagcccgccgtcatcatcgtcattgccatgggcgtgttcctcttcttcaccaatatatgctag

SEQ ID NO: 23656 - DNA, 375 bp, Zea mays
  Peptide Sequence Number=SeqID_67031
atgagggggacgaagcggccgctcggcgtggtgacgtcgtgggtgcggcggcagccgcccaaggtgaaggccttccttgccgttgtcaccggcatggccgcgctcgtcttcatccgcttcatcgtccacgaccacgacaacctcttcgtcgctgccgaggctgcgcacgcgctcggcataggcgtcctcatctacaagctaaccaaggagaagacctgcgccgctcttggctatggtttgtggccgtctatggtgcttttatcagaaatcgtgcagacattcatccttgcagatttctgctactactatgtgaagagaagagatactctgaataacagttatgctctagtgcccaacctgggagccttcttttag

SEQ ID NO: 23657 - DNA, 189 bp, Zea mays
  Peptide Sequence Number=SeqID_67032
atggtgtgcaacagtaggactacaggaaccgtgcccgtgctgctgggcggtggtgctgttggccgtcgtgtccgaaacatgaaaagcgcaacgccagatgcggcgtccagaagttttggcgtggaaagcatcagcgaagcctttacagatgtcctccagcaaaagacaacgcggcaacgcaagagctag

SEQ ID NO: 23658 - DNA, 1314 bp, Zea mays
  Peptide Sequence Number=SeqID_67033
atgaagcgcaagcccgggggccgccacatcaagccgctgccggtgccggggccgccgggggccatcgactccaagtacggcgacgcgctcggggtcgcgctccagttcttccaggtccagaaggcggggaagctggagaacaaccagatcccgtggcgtggggactcggcgttgaccgacgggaaggaagcggggctggatctttccaagggaatgtatgatgctggggatcacatgaagttcaccttcccgatggcattcacggcgacggtgctctcgtggtcggtgctggagtacggggatcagatgagcgcggcaaagcaactggaccctgccctcgatgcactgaagtggattacagatttccttattgctgcacatccttctgacaatgtgctgtatatccaggtcggtgatcctgatctggaccacaattgttgggaaaggccagaaacaatgaccgagaaaagacctctcacacagatcaacaagaagactcccggatcagatgttgctgctgaggcagcagcagccatggcagctgcttcaatggtcttcaaatccagagataccacgtattctgatgtgcttcttcagcatgctcagaaactattcacttttgctgacacttatagaggcctctcaagcgagagctatcccaagctccaggatttctataactccaccagttacgttgatgagcttctatgggcagcgagttggctctaccacgccacaggcgaccagacgtatctcagctatgtaactgtacagaacgggaaaagttatgctgattggggaaggccaacatggttcagttgggatgacaaaaatccaggcacacagattcgcctcaagccactgccagcagaactggagtttgacatatcagtcgactacatgctctcgacgcggacagcggcagtgcagtgcagcgggaagtactacagccctaccgatatacgcaactttgctgcatcacaggctaactatatcctgggagacaacccgatgaagcttagctaccttgtgggatatgggagcagctacccaaagcaagtacaccacagaggggcgtcgatccccgcggatgcgaaaacaggctgcaaagggttcgagtatctccactcacccagcccgaacccaaacgtggctacgggcgccctggtgggtgggccgttccagaacgacaccttcgtggactcccgtgacaacgccgtgcagacggagtccagcacctacaacagtggcaccctggtcggtctcctctccggcctcgtcaccacttcctccgtggtacagtcgttcacctag

SEQ ID NO: 23659 - DNA, 261 bp, Zea mays
  Peptide Sequence Number=SeqID_67034
atggggctcgtgggctggctggccggccggggttggttggtgcggtgtgggtgtgggtgtggcgcagtcggggtggccttgaacgcgcagcaaacagcgagtgactggctggctacctcgagcatactcgtagtagcagttgccaccaggaagttcgcgttgcagcggtcggcagcgcctagaccattggaaatgggatccgggatctcagatcatcatctaccacaaacagtaatctacgggcatgattttgctaggtga

SEQ ID NO: 23660 - DNA, 1443 bp, Zea mays
  Peptide Sequence Number=SeqID_67035
atggacgccgacgatccctccgccgccaccgcttcctcctccgacgaaaccttcttcgatgcccttgactcgctcccctccccgtcgccttcgccttccccttccccttcgccttccccttccccttcccatatctcctcctctacgctccatcgccgcccgcgccgcgcaaaaagtgtaaagcagcccgactctattctctcatcacccccctcggcctccgcggccacctccaccgtcaccgccgtcgaggacgagcatctcaagcccgattcctccgaggccaccagcgccacttcccgtactgaccccgcacccaaggaggaggaggagcaggaggaggaggaggaggaggacattaaggctacggacgtggatgcggttgttgaggtggaggcgcctgctcctacggcgacgccgtcgccggccccgagcatactcgagtacctcgccgtgctcgtcgttaaggcagtggtcttccaggtcagcgcgctcgtcagctgcctcgcgttcccggttcggctgctgcaatggtggttcctcttcgtgaccgacccgctcggtctggcccggcgcgcgagggcgtgggtgctcggtatggctggggacgccgcgggcactctgatcgcacgtcttggaggaggggatggtatggggaaggtggcgcggaggattgtgtgggggtcgctctgggctgcatatgtctgcgcggttctgtgtgcgctgctgattatggcattcctgggaggggggctcttggtgggaagaattgttgaagaacctgttcaagtgacagagaccctgaattttgattacaccaaacctagcccaatggcgtttgtgccggtgccgaggttggtgccccccaatcagcggatgcagcttgaggttttgctgacactaccggagtctgattacaaccggaggcttggtgttttccaggtaagggcagagtttctctccgccgatggcaaagtgatctcaacttcaagtcaaccatgcatgctcaagttcaaaagcgtacacatgcacttcatcgagacttttctccagagcgtctctcttctgtccggctactcatcggaatctcaggttattagactgaagatgaggggtatcacccaaggtctggaaccaacaactgcggtgaggataatcctggagcaaagagcagagtttggtcgcggtgcaggcattccagagatatatgttgcatcactaaagctcgagggcgaacttcctctcgtcagaagattgctctggaactggaggtggaccttttttgtctggagcagcacggggttgtttgctattgaattgctgtttgggcttgagaaagagcggtgcggcgcacgccaggtcgagcaggccggcgacgttctcggagaaggcgaggaagcagaaagaggagtcgtcggcgatggctatgaccgcgacgtgtag

SEQ ID NO: 23661 - DNA, 216 bp, Zea mays
  Peptide Sequence Number=SeqID_67036
atggcgcagtgcgtcgtcttctacgcagtagatctagatctcgcttaccgggagggatcccatcgggcatcgggaaagagagatcatagggcgtgtcttggtgttggcaggacacccaagaaatctctagtcgacgtagagccgaagagagaaggtggggttaaaactcataccctgatgaaagaagggcgggaaacattaagtaaagctatctaa

SEQ ID NO: 23662 - DNA, 387 bp, Zea mays
  Peptide Sequence Number=SeqID_67037
atggagagaggaattaagggagtaaaaacggctccattgaagtccaaggaaacggacgcaggccttcgttacttgggctgctcggacgcggtcatgatgcttgggcgctggcagggcgtcaggcagccggtcagcggcgcgggcgcggcgcgtcgaggctggctcggggcaggggcgcgcttggctgctggcgtccgctcggtgggtcctagcgcgggggagggcgagcggctgcagggcggtcggtgccggggccctggcgctggaggcacggccagatgtgatgcgcgggatgcgaagagccaacccggtgacggcgctattgctctacaaaccgcgacgactgcttctgttccgaggcaaagcgtatctgggagaacccggtga

SEQ ID NO: 23663 - DNA, 1731 bp, Zea mays
  Peptide Sequence Number=SeqID_67038
atgtacctggatacgctggtcgacttcgtggccgccaggccgggcatgcacctggtgagcgacgaggtgtacgcgagcacggcgttggcggatccgggcttcgtgagcgtgctagaggtggcggccgcggccgcgcgtgaggacgccaacgccgggtcgctggcggagcgcgtgcacgtggtgtacggggttgtccaaggacctgggcctgccggggttccgcgtcacctgctggcgtcgctcctgggcgacgggggcttcatgcggcggtacgcagcggagaacgcgcggcggatcggggcgcggcgcgcgcggctggcggcgggcctcgcggcggccaacgtcgcgtgcctggagggcagcgtggggctcttctgttgggccgacatgcggcgcctggtcgggctcaacgtctccccgggctcctcctgccactgcagcgagcccgggtggttccgcgtctgcttcgccaacgtgtccgccaagacgctcgacgttgcgctccagcgcctcgccgacttcgcggaggcgaaggccacccggggccccgcgcgccgcttgctcgctgctgcagggcaggagagaaccgggaacattggatcacgatggatcaacggcagacgagtggtgctgcacgggcaccgttatccgtgggccgataagggcgatgggtcggccatacaaaaaggccgtggacgcggacccgcgcacgggtcgctgtccctcgcctgccccgccgcccctagccctttccccccgtgtccggtggttgcggctgcccgcatcatattcccaccttgcgaacgaggacgaactgctaccccctcgcctcgccctcgccgcctgctcctctccagttctcccccaccaaccgcagcagcgagagcgagactgagaatggccgcggcgccgtcgtccctcgtgtcctcccatctctcccgcctcgccgacctccgccgcgcggcggcgccggccactcccaccgtcccacagcagcttcgcgtcggcttctcgcgccgccgcgcccagcgcgtcgtcgccatggctggatccgggcaagttcttcgtcggaggcaactggaagtgcgtaagtgcatgttctgcttcttcagctttacgcggcttggagatgctaacggaacaaaggactccgttagcaagcttgtctctgaactgaatgctgctaccctcgaaactgatgtagaacaactggtggacatcggttgtcaatgggttattcttggacactcagagcgtagacatattattggtgaaaatgacgagtttattgggaagaaggctgcatatgcattgagccaaaatgttaaggttattgcctgcataggagagcttctggaagagagggaagcagggaaaacttttgaagtatgttttgagcagatgaaggcttttgcagatagtatttcaaactgggccgatgttgtgattgcatatgagcctgtttgggctattggaaccggaaaagttgctactcctgagcaagcccaggaagttcatgctgctgtacgcgattggttgacgaccaacatatcacctgatgttgcctctagcacccgaataatctatggaggttctgtgaatgcagccaactgtgcagagctagcaaagaaagaggatatcgatggttttcttgttggtggtgcctccttgaaggccccggacttcgccaccattatcaactcagtgaccgccaagaaagttgcagcctga

SEQ ID NO: 23664 - DNA, 903 bp, Zea mays
  Peptide Sequence Number=SeqID_67039
atggctaaacagcaagtgaccgactgtttatcgtttaggataaccaaggttattaaggcgttaaggcgagacatggcgagcagcagcagaggaactgatgaagaggaagagcagaggaaaccaccgtgcatcggatggagcagacagcagaggaaagcaccgggccactggatggagcagcttgccgccgcgcgccggatggaggaggtcggccgccggatggaggaggctagggctggaaacgagccgagccaggctcggctcggctcggtgcagctcggaggtggaaaggctcgagcctggctcggctcgctggaccgagcaaatgaaatctacaagaaagttgaagatctcaaatctatcaggggaagaaatcaagatgccatattagctgcatgcctatatattgcttgtagacaagaagatcggcctagaactgtgaaagaaatatgttcagttgctaatggggccacaaagaaagaaattggcagagcaaaagaatttatagtgaaacaactggaagttgagatggggcaatctatggagatgggaaccattcacgctggaaattttctgagacgtttctgctcaactcttgggatgaacaatcaagctgttagggcagcccaggatgcagttaagcactcggaggagcttgatataaggaggagccctatctcaattgcagccgctgtcatttatatgataacccaactctcagaggacaagaagccacttaaaggtattgattctggagaatctgttgcagatatatccttggctactggtgtagcagaaggcaccatcagaaattcgtacaaggatctgtatccttatgcctcaaggctcatcccgaatacctacgccaaggaagaagacctgaagaatctctgcacaccttag

SEQ ID NO: 23665 - DNA, 351 bp, Zea mays
  Peptide Sequence Number=SeqID_67040
atggcgccccgcatgctccatgacaacggcggctctcagccctcttacggaagcaaggagaccaaggaggtccatatttttcagcatcctttgagtgacaaagttcctaaaacggtgccatcatgtgctgttagccttatagaacctccggttgctagcgtaaagcgcatccgtacagataagagaactggagacacttctgcgattgctttagctgttcatttttctacatgttgtaggggcttagcacgagtaggagggtgcgctcgcgacgacagcttgcacgggaatcactggaatcgcgtggtaggcgggcacggttgcgatgacggatctagatacatagtctaa

SEQ ID NO: 23666 - DNA, 564 bp, Zea mays
  Peptide Sequence Number=SeqID_67041
atgcaggcggcatacaaccgcgccaagtgggcgcacttctccgactcccaatacgcccggcatgggggcccaggcccacgcgtcatgcaaccgacgcgccgaatgcttcgtgcgtgcaactgcaccgccacttgcgccaccaccacgcctcctcgactgcggaaccaatgccgcgactcgaggcgacccagcgcacgacccagcagcgccagcctggcgcgacggagaagcgtgcgacgcttcgccttcgccataatgaccgcgtcaaaaaagggaccgggaaagggggataccctgaaagggatccttccccgtgaaggaaccaggctccgagcctccctactgatcagaggttcgaaggctggcccctcggaagggttcgacagccgcctcagatcgcgtgggccctacacccactactggtcagaggttcgaaggccggcccctcggaagggttcaacggccgcctcaggctactcgggctccgcgcccactactgatcaggggttcgaatgctggcccccgaagggttcacagtcgcctcagacacagagcgagggatga

SEQ ID NO: 23667 - DNA, 1023 bp, Zea mays
  Peptide Sequence Number=SeqID_67042
atgaactttggaaaaggtcaaggtttagcgaagggaaaaagaaaaggaaaaggtaacgcccgaattttggcaagtaaagaaaagaaaaaattcaactgcaaaattcggggcgttacaccgaggccgggcgacgtgggggctcctccgaagctggggtcgaatctgccttccgttgccgaggccgagtccgagcccctgggtcgggcgaggcggaagtcgttcggcagaggccagggcggagtccgagccctggggtcgggcggagcggagttcgccgtcttccgggtcttagcccgagtccgagccctggggtcgggcggagcggagttcgccgtcttccgggtcttagcccgagtccgagccttggggtcgggcggagcggagttcgccgtctttcgtgtcttagcccgagtccgagccctggggtcgggcggagcggagttcgccgtcttccgggtcttagcccgagtccgagccctggggtcgggcggagcggagttcgccgtcttccgggtcttagcccgagtccgagccctggggtcgggcggagcggagttccctatggcgcccctggcgaggcctgactgcctgtcagactcactctttcgagtggcaccgcagtcggagtggcgcaggcggcgctgtccttctatcagaccgatgtcgtccaggactcgtggacaggatggtgcgggaacctcccgtgggagggaagctactcctaacccgccaccagtacccccaatcttggctgaggctatcgctgccttagtcaatgcaacagccgataacacccgctttctgcgggaaatggtgggacaacaaatgcaacagcaaggcgggagagtgtatccgcaaggaccccgcaaaacttcatatctggatttctcagaaatgcgtcccccgctatttgtcaaggatgaatatcctcttgaagcggatgagtggatctgggttatcgaacaaaagtttgggcttctccgatgcacggagactcaaaagcccttatttgcggcgcagtag

SEQ ID NO: 23668 - DNA, 504 bp, Zea mays
  Peptide Sequence Number=SeqID_67043
atggcgccatggctgctggaggcgccgagctggaaaggggccggcgttggaggaggccgacggcgccggggaagacgagccaccggagcaaacaggggcgtcgcgccatggaggaaaaagcccttgctccctacgcgctgcttcatggaatggggagcgcgagaagagcaggccggctggagcacaaggagtttggattctatggctgttggccgagctcctagcaatcgggactgttggtggccacagagcaaaagggggcgctgggagagggagagcagaggcgccacaccatggacgccggtgagctcgctgctcgagctcggaccagaggagatgccgcgccctggctggagcagaggtggcgttggggaagaaggccccctgtcccagccgctcgccaggagaaacagggagggtgtcgcgccatggctggccttgctccctgcgctgtgcctgttgcgcgtgggggaagaagccagggagagaagaaatggcggctag

SEQ ID NO: 23669 - DNA, 660 bp, Zea mays
  Peptide Sequence Number=SeqID_67044
atggccatgatgggttcaacatcggaaaagatgtacctctgccaggtgaagaagcagcaaacttttgttgcttctgttccaaggtggtgcccaaagaaggaaatcaagactgaagctgcgggaggaagggtgaaacgctcttgggaaaggttctgtcacacccccggactccagacgctgaaggctatcggcggctgctcactcgggcatctaatcatcttctacccctcgctcatcccccgagcgatctacgacacgccatcaacagttggtgggacacgcagagctccatcaacgcttcacgtgaacggcgacatgagaatgaaatacggcgccgagaggagtacgatcgggatcatgaagtccctgcacgaagtcaggccactagagttgagtcggcaatggcttcaactggtggcacaacctggggacgatcgagacagcacatcggcaactcccctccccgggaccggcaccacggtcaccgacaggaagacacgtgtggagtatctgcgctcactccgtgtctcagggccattcaatggcccccaaacttcaaggtctccaacgtcaacaaatacgagcctaagcaggacccgggaggctggttggccgtctatacaaccgctgccccggccactggggcaactaaagatgtga

SEQ ID NO: 23670 - DNA, 1437 bp, Zea mays
  Peptide Sequence Number=SeqID_67045
atggattgggatctcaacgcggcgggcgcgtgggacctcgcggagctggagcgggaccacgcggccgcggcgccgtcgtcggggggccacgccgccaatgctgccgcggcgggcacggggacggagagccgcccgccggcgcccggggcagcaggggcacccgccgagtgctccgtggacctgaagctgggcgggatgggcgagtgcgagcccggcgcggcccgcagggagagggaggccgcggcgggggcggcgaagcggccgcgccccgccgggcccggcgggcagcagcagcagcagcagtgcccgtcgtgcgcggtggacgggtgcagggcggacctgggcaagtgccgcgactaccaccggcggcacaaggtgtgcgaggcgcactccaagacccccgtcgtcgtcgtcgccggccgcgagatgcgcttctgccagcagtgcagcaggtgccgcgttgtgagctgtactgctacagtatctctgcagaatgtattctgtagtagtatgaaaagactttgtaggttaataaattatcctaattcaaagaatcctgtggtcctaatcgattatgccatcattcattggttccatctacttgcggagttcgacgccgacaagcgcagctgcagaaagcgtctggacgggcacaatcgccgccgcaggaagccacagccagacaccatggcttctgctagctttatcgcaagccagcaaggcacgcgattctcaccatttgcgcatccaagactggaggcgagctggccgccgggggtgatgaaaaccgaggagagtccatatcacatcactcaccaaatccctctgggctccagcagcagcagcaggcagcagcatttcgtggctctgggagccgccacgcctgcctacgccaaggaaggccggcgcttccctttcctgcaggagggcgagataagcttcgccaccggcgtggtgctggagccgccggcggcggctccagcgtgccagccgctcctcaggacgggagcaccatccgagagcagcggcgccggcggcagtaagatgttctccgatcaggggctggctcgcgtgctcgactcggactgtgctctctctcttctgtcagcgccggccaactcctccggcatcgacgtcagcaggatggtccgcccgactgaacacgtccccatggcccagcagcccgtggtcccgggcctgcagttcggcagcgcgtcgtggttcccgcgcccccaggcttccacgggcggctccttcgtcccctcctgccccgccgcggtggagggcgagcagcagctgaacgccgtgctgggccccaacgacagcgaggtgagcatgaactacggcgggatgttccacgtcggcggcggcagcggcggcggcgagggctcctcggacggcggcacctcgtcgtcgatgcccttctcgtggcagtag

SEQ ID NO: 23671 - DNA, 120 bp, Zea mays
  Peptide Sequence Number=SeqID_67046
atgacgccctatgaaactaatgagaatggtcctataagccctagtgaagggaaatggatcgacatatggacctcggggcccacaacagggtcgcgggagcttctccagtttgacttctag

SEQ ID NO: 23672 - DNA, 225 bp, Zea mays
  Peptide Sequence Number=SeqID_67047
atggcgccaacgccgtggggcaaggacacccaccgtccgcagtggggaattcttgcggcggcaactggaggaccgtgcgcgattctctgccatcgtcgggaattggagcgccagaccgtgctgggtgatcgccgtctcttgctgcgggtgttggacgactcctcgggcaaggcggtcaacttgggtcgtgggaattcgtcgccggtgtccgatttgtcgccgtga

SEQ ID NO: 23673 - DNA, 115 bp, Zea mays
  Peptide Sequence Number=SeqID_67048
acattgtggtacaggtggttatgagattgatggttctggttatgattatggtgctggagaagatgaagctgtggaaggagacttccaggagttccaagattacgacgagttctag

SEQ ID NO: 23674 - DNA, 180 bp, Zea mays
  Peptide Sequence Number=SeqID_67049
atgaggcgccagtaccaaaaagtggcgctgagggctgtgcatcgaggcattcaacagggggaactagaggccgacaccttttggctcaaggttcaccacaccctagtcacaaccaagtcttgtctcgacgattcgatcaagcgggatcgagaatgccatggccacactaacggttggtga

SEQ ID NO: 23675 - DNA, 453 bp, Zea mays
  Peptide Sequence Number=SeqID_67050
atggtcgactgtgatgtcgagtgggtccccaaggaggtgattcgctttgggaacctcaacttcgtcctcgatggtaatgagaagagggtgagggcactaaaagtccgaccccttcctcctaggagtctcaacgctaccgcaagggctcgtggcagcccctgtgtcattctcactcccagagcaatcgcccgtttcgtgagcctcgacttcgttatcaacaacgacgacaatgtgtacaacgaggaaaggttgtctcgccacgacggctctggctatagccctcacatgtttccaccaagcctatgccatgcaccaggagtgatcacggccctcgcccaaggccacatccccaccaccgatgacttggagttcatcatgacggtcgaggacgtgggtgatctcatttttgatgcccttcgctcagatcaggctcggaccctggctccccgatga

SEQ ID NO: 23676 - DNA, 549 bp, Zea mays
  Peptide Sequence Number=SeqID_67051
atggcgtgcacgctgaggtggtcgccaccgctggggaggctgccaggcgtagaggtggtcgcctctgctggcgagccgctcggagcagaggtggccgccgccgctgacgaaccgtcggtgcagaggtggtcaccgccgctgaccagcatacctaagaaagagttggcaatggcccccaggaggcccacggtatgggaccaggctgagcggctacacggctccggaccaccccaggagacaagctttcgggtacgggaccaggctaagcggccacacaggctccggacctccccatggaacgggctcccgttctttagaaccggcccccaggctatcgggccctccttctttcgcagagaggtcctaaactgcaagcctggctattcaattcggatgccatcataccaacaggccgggcttatgagggcggacctcaccgggctagcgtacacgaagaggtactccttcagtcatggcaagatagtcaccctcgggtcggcgtattcccgtcaccttgaagggtccttcccagctgggggagagttgtag

SEQ ID NO: 23677 - DNA, 603 bp, Zea mays
  Peptide Sequence Number=SeqID_67052
atgcctgttcccgcggctaactggtccatgacctccgcactcgatggttttactgggtcacgcgcggggtgccttggtactgctgcgttgattttgaaatttcaccttcactgccttctgcggcagcccctaggggaactggcgcccaaggaggatgactcatgggcccaggcccctgtgccagggactaggctgtcggtttcggcggtggcgaagaggggttggaccgctggttgcggtgaagacgagggggcgcactaccgcggggcgggcggtggcatgctctttgtgcggcggttcgccttcttggcgctcgaagaccagcgcgccagctgtttgactcgtgggaccgggcccccatgtcataggatggataccccgactgagtgggtgctcgacatggtataccacctacttggatgggatgcgccggcgccctccaccccggatgttcatcagcctcgcggtggtggagagcgagctgtgccgcggctctgcctcccacatgggctggtgacccgcctcttcctccagcattcggaggaaaaggatgatcaccagccttgcaaaggaggcgaacttcggctacgtggtcctggctag

SEQ ID NO: 23678 - DNA, 591 bp, Zea mays
  Peptide Sequence Number=SeqID_67053
atgcgccagatcggaggatgtcaagcgcgatcatcgctgcgcgcatctcgggccttccgtgacgccgctcgctcgaagatcgcgcctcatgtgtcgccgtcgctactcgcacgtcgacgggcgtcgcttgctcgacggccttggaagtgccgcctcctcgggacctcggggacttcgccgtttgcccgcacaagggccccgctgtcgctcgccctctggatcggggagccgccgccaccgacctgggaatcgccgccactactccggatcgaggaacctccaccaccgcgcgtcgaggtcatggagttgcggccaccggctgggggtccatcgtcgcgcacgctctgggataggtgggagcagccatcgtcgcagatgctggaggaaggcccaagtggcggtgacatgtgggagacgaatatgaggggtggcaacagcgagggcaagagggacaaccccgacgacgaggacatgtgggagccagaaccgcctgaggaccctcttctcctcggccaagagacccacgccgcaactggaaccctcttctcctcatccgacgacagtggtggccactactccggtcaggcatag

SEQ ID NO: 23679 - DNA, 351 bp, Zea mays
  Peptide Sequence Number=SeqID_67054
atgcggtgctcggaggtgggtgtcatggcattgcgcgccggcagccatgcggtcgcactctgccttggggtcgtgcaccccatgtacagcagcgtcggtgaatcaaccaaccacatgttgcatcttttatcggctagcatcgagctcacagtatggttcgtcagccatccacatctgatcggtcacaaatgtcatgtcggcaaggcccatatgagcagagaagtcagaataccaaagaccattggggtagctataccaatgaaagccacatttttcatgacatacatgatggtagatgggtgggctgatattgctaacgagatcattcaagtgaaggatatggtgatatag

SEQ ID NO: 23680 - DNA, 147 bp, Zea mays
  Peptide Sequence Number=SeqID_67055
atgacgatggacttcgccatgacaacagtattaccaccatacgaggcttctcacatggagagtgtctcctggtttgtgtccagtggctgcagggcagcccctggtgctgttgtcttcttcggcggcatgatgaaggtggatgcttga

SEQ ID NO: 23681 - DNA, 870 bp, Zea mays
  Peptide Sequence Number=SeqID_67056
atggcgtcgtcagagatcgaggtggtcgaggacgccacccccgccgcaaccagtggtggagctggacgggccgtcgcagaggtggcgaggcaggagggggagggggaggcgctcaaggacgatgtgtacacgggcgcggcgtatggggacctcgagaagctgcaccgcctggtcgagcgggagggccgctccgttacggtgcaagacgcgctcgggtaccacgcgctgcagtgggccgctctcaacaaccgcgtcgccactgcccagtacattctcgagcatggtgccaatgtaaatgctatagaccacacaggccaaacagcacttcactggagtgctgtgcgtggccatgttcaagttgcagaattacttttgaaggaaggagctaaagtggatgccactgatttatatggatatcagaccacacatgttgctgcacagtatggccagacaacatttctttgtcacattgttgccaaatggaatgctgatcatgatgttcctgataacgatggaagaagccctctccactgggctgcatacaagggatttgcagataccatgcgtcttctcttgtttttaggtgcttatagcacgcggcaagataaagaaggctgtacccctttacattgggctgctattcgggggaatttggagtcatgcactgtgctagttcaggctggcaaaaaggaggatcttatggttcaagacaatactggcttgactccagcccaacttgctgctgataagaatcatcgacaagttgcattttttctacagatttttcatgtgttcttccttggtaattattttatttcacatattaaaaaaaatcaaaaccagtacattttacatggtaaaggtgattag

SEQ ID NO: 23682 - DNA, 744 bp, Zea mays
  Peptide Sequence Number=SeqID_67057
atgcgggaggacatggaggccatctgcgtggcgaagagccccagttggcgctggacttcggcaagggcggtggtgattgctgccaactccgacggctgggctgaagctgcagtttcggcttcatcagatcctggcatatccgataccgggttggtagaattaccccggctacggaggttgtatgagtggctaatggttggagggttggaggaagaagtgaaagatcctggttacatcaacaagaatataagagattcacaaaatcaaagagacgatgaacctttgttgaagatgggtttggacagtcctgaacttcttgatggtaattggtctcgcctatgtataacatgcaaatggcctcatttgcctagtattaatagattgtcaggcctgtacgctcaaaacattgctctacatgcgaccgctgtgttgagcaattcgatcatcactgcccttgggtatcaaattgcattggaaagtctaagctacagtggtttgaaattgcagcggaacaaatgggacttctttatgttccttatcctagaagtttctgcaatgattattactggtgtaatggccatcataagaagtgtaggagacccagcttccccagcatcatttggtggatggcttggctatacagctataaaccattcttgggtggtgtcttttgtcataatggacctcctccttttccttggtgttataactctaacagtaattcaagcatcacagggggactag

SEQ ID NO: 23683 - DNA, 615 bp, Zea mays
  Peptide Sequence Number=SeqID_67058
atgccgcccttttctcgtccgccgccgcagtggtttgatggctccgtaacccttcacagcgctagggttttgaccgcggagccgcaaatccgtcgtgaactccctctgctgtcgtcaacctgtggactcctccccccctttcccatctcggcgtctacgcaggggaaaccattgaaagatttccccatcaactcggattattcgtctgaggatccaagatccacttcagccaagatggattcagcagactccatagccgacaaggcaattggaaggatgcaagagatttccgacaagatattttccgtagcgagggaaacaatccgtcctggacgcgggttgacctcatttgatgctaccaaacttcgtgtagctttggaggagatagcttgcatgctggagcaagactctctggtgttgcaagagcatttggacatcgtgaacaacgtaaacatcccggttgacagcagctatgaaccttctaccttgtcgtcaccaccaccttctgacgacgaccttactctagactgggactttgcggagcacttccaaaacttctggggtgttgaatatgactccgatcagatgccttcgtttagtgacaatgatgtttaa

SEQ ID NO: 23684 - DNA, 552 bp, Zea mays
  Peptide Sequence Number=SeqID_67059
atggaggccgcaccttccgccgcgttttcctctcgcctcggcctcaacctcaacagattccgccctgattttcggtcggttgcggcatcttcgggcgaccgggctcctttaaatgtcaagcgccgcctgaatctcgaatcactgtgtagacctcgtcaccagagcgctgtgagttcgtcacctaggccggctacacccccttgctcgtcgtcgacataccgcaccgctcagagctctggctttgcccttgaaacgtcgctgcgcgggaggaaggtgttgccccgcatcagagttactccacgggcggggcagtccgggaattcctcgccggtgctcgcgcccaatctctctccgcaccctgtcgtggcctgcttccgccatagttccgcgtgctcggttgtctcggtcggggagattagtcgccagtgggccattttggccgtcgccggcaagctcgccgccgcggaggcactgtgcgccgccgcgttctgcctggtcgccgctctgctggccggggatgatgagtcgagggccgtcagatccgaatcgtga

SEQ ID NO: 23685 - DNA, 651 bp, Zea mays
  Peptide Sequence Number=SeqID_67060
atgtcgaagcttgccactttgacagggcatacatacagagtaatagtattgtacttagctatttcccctgatggccagaccatagttactggtgctggtgatgaaacactccggttttggaacgtggtcccctctccaaagtcccagccaggttgccaatgcagctatgtctacttggttgtctcccatgagcagaagtacattattgtcggtgtttcgaccccgggggggcggatgcgcttgcagttgggggttacaagcgttcgcgagggagagagggagagcctgtccgtcagcccgttctcccgcgcggccaccttctcgtacgagggccctagaccttccttttatagatgtaaggagaaggcccaggttgagtccaagccctggggtcgggcgaggcggagaccgtcttccggggtcgaggttgagtccgagccctggggtcgggcgaggcggagcttcctatggcgcctaaggctggactcggctgctgtcagcctcaccctagcgggtggcacagcagtcggagcagggcaggcggcgctgttttcctgtcaggtgatccttgcattgaatgctcctgcgatatggtcggttggcatggcgatccggccaaggttgtttcactgcgaagcctgcccgagctag

SEQ ID NO: 23686 - DNA, 447 bp, Zea mays
  Peptide Sequence Number=SeqID_67061
atggcgcggttaggacacgcggtggccaacggcgagggcacgtcggcggtgagcagctttatccacgacggtgagcaaggggaggggtaccgcggctgtggctcccagcttgacggtggcgaagatcttttaccccgagaggggactctgtccagctgggcgtgcggacgtcgggctgcctccctgatcgagggggagggatttgttgtgattctccacggtgaaccactcgaggtgccatcctttaatgttgtccttgagggggatgtcaaggtactctactttcctcccccggcgaagatccaaactggcaccaccgacaagttgatgctattctccgggccataccgggccgacaatggtaaagatacctccagagcccaaaatggggaagaattccaagaaaggcctcgcaaaggtgcacgaaaatggcaatttgaagaatag

SEQ ID NO: 23687 - DNA, 621 bp, Zea mays
  Peptide Sequence Number=SeqID_67062
atgggcaggggtaggaggggcagaggctggcctcttcgtgccaacggcaaacgcatgcgtgccccaagtcctccttcggaggactttggtgactcagaatactcagaggaggcctcctccgagtatgatcgttcgcccgctcctgcttctccagtggtgtcgtccaaggattcggatgactccatgggactgtccaccgctgtccgagcgtactggcgctccatcgagcgcgccgggctcggtggatcggatgactcggaggaggtatcctcggaagaggtgaactcctctgactcctccaaggagtggagcggtggcgatggtgacggcgagggcggcagcggcgatgacgacgacgagggtggtggcggcggcgagggcgacaatgacgacaagggcaacagcgacgacgacggtggtaagggcggcggtgacggcgagggcaacgactacagtagcaaggacaacggtgacgacagcaaaggcaacgacgacggctgcaagggcgatggtggtaaaggcgacgacaacaaaggcgacggtggcaagggcgagggcagcaaaggtgacggcggcaagggcgacggcgacaaggccagtggcataatgccgctggtttaa

SEQ ID NO: 23688 - DNA, 429 bp, Zea mays
  Peptide Sequence Number=SeqID_67063
atggaggccgaggactcgacaaccgtagcccgatttgccacccgcgtgactggggacgatgacgcccttgagtgcccttatgttgcctattcattcatcatggtggacgtgggcctcagcgacggcagctacgcgagggagccgtaccaagcggcgcatcaactgggctcagactcaacctcgaccccggaagacggtctccgcctcgcccgaccccagggctcggactcaacctcgaccccagaagacggtctccgcctcgcccgaccccagggctcggactcaacctcgacctcggaagatggtctccgcctcgcccgacccccagggctcggactcaacctcgacctcggaggagtcaccgcctcgcccgaccttgggctcagaccgaccatgttacagggaggcacatcattaccctacccctag

SEQ ID NO: 23689 - DNA, 303 bp, Zea mays
  Peptide Sequence Number=SeqID_67064
atggcgcctgaggctggcctcggctgctgtcagcctcaccctggcgggtggcacagcagtcggagcagggcaggcgacgctgttttcctgtcagaggacaagtttgcatggctccgtgatgatgagtttgctcgacggactgtggcaagaataaacccagttagcatcaccaggctcacgattttcccaccagtaagcaagatggatcctgcaatctatgacccgccagaatcatcgatcacagaagcgcatatcactggacagctcaatggactcacagtacaacaggtaccttcagtgtga

SEQ ID NO: 23690 - DNA, 736 bp, Zea mays
  Peptide Sequence Number=SeqID_67065
gggcagcgatattccaatgcaggccttatcagcacttgtcagccttaaggggttgtcgatatctgattttgaccaggcattggaagagatcatccccgagaaccttctatcagagcctcctgaggttgacaatcccgtcatctgttcagaggtttcagatgatgttcttttgccgtgcaatcctgtcgggcaagaggcaacctggacagtctctcgtgcttcgacgaccttggagggcggtctagctcgcgaaggcgcaccggccctcaatgccgctgattcgagtgatccgactcctatgggctccctttctgttgcttccatggacgtccacgctggatcaccaccggtccaatccgaggaggcagcggtgacacacttatctgctactctcattggtctggatgttcttgattctgtatctgcccaactaaaatcctgtggcgctcctgttcctgaccaagtttcatccttgatgcagtggaaccctctttggctcgatgatgctctgatactgaagagaagaggaaaacgagcactaattgcttctcatgacaatttggataggctatactgtgacgccagcacttccttgaccattctggagaggagtcaccgttttaccatgtcagacttggaccatcaccgcgacgaactgagggcatcccaatatgaagagatggagaccgctcgcctccatatcaaggccttggaggacgaccgcgtcattatgtag

SEQ ID NO: 23691 - DNA, 306 bp, Zea mays
  Peptide Sequence Number=SeqID_67066
atggcgcggttaggacacgcggtggccaacggcgagggcacgtcggcggtgagcagctttatccacgacggtgagcaaggggaggggtaccgcggctgtggctcccagcttgacggtggcgaagatcttttaccccgagagtcacctgacagccaggattttagggccaaattgctcctaaatttcaatggcaacacacgtcaagctcttgcagcatattgtagtgctattaaccatcttactcctttgctattatggaatggccacaaaaagaacagtaaattatggcatgaacttggttcttga

SEQ ID NO: 23692 - DNA, 342 bp, Zea mays
  Peptide Sequence Number=SeqID_67067
atggggagtgcccgctttgctttcgacttgctgctgttggaggagcgcaacttcgtggagcattcaggggagagggcgctcaccggcctagcggagggggcagacttcgacaacgcggggccgatcggccgcaagcgtcgtcagctccagcatgcctggcgctggctcagctggccctggcacagcttccggtgccacctcccaccgctgagcggagtgcggctatctgcccgccgtacgggcggctgttgcgtcgcgtgcaccgggggaccgcccaagacgtcgcgcgctgctagggcggcgttcgtgttcttgggctgtcctgccctcgctccggcatga

SEQ ID NO: 23693 - DNA, 1593 bp, Zea mays
  Peptide Sequence Number=SeqID_67068
atgtcttcgcgctcccttatgcatcgtgtctttccaccttccgagcccccggatgggggatgcccgcagtccttccgccttgtcgttggaggaacgcaactccgtgggagttgttacctttcagccatcgttcggcttcaaggattttcaccagtcagcccggctgcatcccctcgccgctggtcacccgagacggtgaccaccaggccctgggtggggagaagcaagctgagctgcgatcttggtcccaccctcagcttcaaggatgttcatcatcctcgttggggtggaggtcgggctgagccggagctctacctcccgcgcggtttcgtgggtcggcctctccttcagcgttcgagggagagggcgctcactagccctacgagaggggcggacttcgacaacgcggggctggtcgacggcgggcgtcgtcagcctcagcacgttgggctcgccggctgggctcccggtgccccctcctgccgcgaaggcggttgtcgcgccgtgcgctcaggaggaccgcccaagatgtcgcgcgctgctagggcggcgttcgtgttctggggcggtcctgcctttgcaccggtacggcgcctccacgcggaggtcggtgccccactcgtccgggaggatctgagtggggatctgcccggagggctgacggcccctgtcgtcggtgccgaggtggaggcggctcgagaagtccccgttgccgacgggatcaccgccaccatccgcacttcgggcctcccggctctttgtacttgtcctcgcccctcgagcatcggcgtgggcgagggcaaggttgcagcagcgtccgccctgaggccatcgctgctgcagttaggccacccggagcgggggccgttgtcgttgctgccggagcgggcgacggcgagccgcccgtcggtcttctgttgctccgcaggcccccccatcgagtggggttgttcgtacctgcggaggtggaaccggagttccgtttgtaatggcaccttgaatgccgactcgcctgttggttgtctgaaccgcttcaccaagcgtgagtcgccccgtgcaaaggtgacgagaacccctcggccgctcttcgatgagccgaagccaggggtagcggtgtcagcacggacagaggcagagttggctcgaaaagaagacttggtcggctggagcctggccgggttgtccgttagcgggatcaacgccggagttgatctaccgaggcctcgggccgggctgatgtcttcgggggacagctggccgaggcctcggggtgaccagccgagccgcctgctcgggccggattctcggagaagaccctggcggcgatggcccgtgcgtggtgatgacgtcgtccttcagagtggagatcctcggaccgtgtcgccgtccgaggctaggtcggacctcgccgaaggtgtagtcgacgccgaggacctcgccttggctgttggccagcttgtacgttccgggattcagaactttggcgatgacgaacggcccttcccagggaggcggactgctggtaccgtgccgagtgtagtaaggacttgtcccgagcctcttccagctggtccagcgagtcttctcgactag

SEQ ID NO: 23694 - DNA, 981 bp, Zea mays
  Peptide Sequence Number=SeqID_67069
atggcgaccaccaccaccaccactccacttatcgtctccttctcgcgcagctgcagctgcccctatccacaccgccacttccccggcaagcccaagctgcccgcacccacctcctgctccctctccctccgcctcctcgctgccccccttgccgtcctgccgcggcgcccgcgtgacgtgtcggcggcgtacggcgacggcgacatggacgacgacttcggcgacttcgaccccgacgacgcggacggcgtcggcgaggacgacgacgtcgacaacgagcaggactacgacgtcgactacgaccgcctcctagctcccgtcgtcaagccgccgtcgccgccgggcgcgtcggcgtcgcccggggaggagggcgacatcgccatggtcgccgccgacagcttcgtctccacgcgggattcagcgtccgacaccgtcgtcgactacgccgtggatgaggacgagtttcacaagattaggctgctccactgcgacttccttatccgcaaggtgcccgaccccgacgacgacgtcttcgacttcagagagatgtatgtcacgccaccggacaccgacatctactccattccgagggttcttgccccgatgccgcagaagtacgcgaggtgcacgaagaaaaactttggccgttaccacgtgagcgagccaccagttgagcatttgcgcgatccactgtacaagacagagagggagatcatgaaggagatctatgttattgactcgagaacaaggtcaatcacaagagctaaagttatggttagtgttcctgaaggaaagaaaagagaccggcggaacgacctgctactgatccgtgacgggggtgagtctttcagaatcatcgacaagactaaaagggacgacgcaagcactatcatacaaagagaggagtgggccaagtcgagacaagacgtggagaagcatttcaggaagctcagagactttgactactcgaattggttctag

SEQ ID NO: 23695 - DNA, 741 bp, Zea mays
  Peptide Sequence Number=SeqID_67070
atgtggagaagaagcggcgtccgtggtcaatttatagcctaccggccggaatcggatgagaaccgcggacatttgattgcgcagttgtttgtcagccggcaaggtttcccaagttggctctataatgatactggtggagacttcagaaactatcccttgaaccggccattcagggccgatttaatgggtctagatgtgttgtacccagcggagtcgccaaaaagtatgttgacacctttttcgggcgccaatcactcaacacgaactagtggtgggtgctctctgcacaggggcgggcggtccgtggccaggggccggacgtttctttgggacattaggcatgtcatagagttggcatacaaacatgtcccaattgttatgtataaacttgacgagtgtatcttcctatttattggacagaccgaccctaatggtcactatcttgaagatgttgaggaggtcgagcgagaccttcttagtatgcacaattggtcgaatgttgaggttgcttggttgaggctggagttgatgattgcggtcttgcactcatcggagaacccgaggctgatccttttggtttcctcagtcggccgcatagaggtcgcagccgatgcttcatttcaggggatcgtgaagccatccttcgcctgcttgtcgttgacctatgtagggagagctaccgagggcccgaccgtgatagccgtttatgtagcacctcggaagcactcggcggcgccttga

SEQ ID NO: 23696 - DNA, 279 bp, Zea mays
  Peptide Sequence Number=SeqID_67071
atggaggagccgatgaagcgggtgatgaagacccccctaccagcacaagagatctgcggcgtcttggcatttctgacacttcttggcacaatgcaggtgaaaacagtgcgcgagtccatgaaccggatgatcgaagcatggagggagatcccagacttggatgaggaggtctgctccttcgacgtgccaccatcgtcacagtctacatcttctctcacaggtgatgtgtctctatttaaggtctatgattggtttggactgcataccttgtctgcatga

SEQ ID NO: 23697 - DNA, 450 bp, Zea mays
  Peptide Sequence Number=SeqID_67072
atgggcaagagtaacaagcgcaagcgcgaaccgactcctccatcggaggatttcggtgactcggaatactcggaggaggagttctcctccgggtccgagggatctccggctcccgtctctcccccggcgtcgtccgatgactcggacgactcccaggggatagccgcggaagtctggacatacatccaggccgtcgagcgctccgggctcgagggcttggatgagtcggagtactcctcggatgaggaggactcggacggcggtggcgaggacgaggacgacgacgacgacgacgacggtggcgacggcgacggcaacggcagcggcaggggcagcggcgacggcggcagggacggtgacggcggcagcagcaggggcagcaccaaaggcggcagcagcaagggcagcaccaagggcggcggcggcggcaggggcagggccagtggctag

SEQ ID NO: 23698 - DNA, 453 bp, Zea mays
  Peptide Sequence Number=SeqID_67073
atgcgcctcggggtcccttttatagccccaaggcagctaggagccgttgagagcattccaggaaggcaattcttaccttctatcgcctggcgcactggacagtccggtgcaccaccggaccctgtccggtgcggattttttccttatttggcaaagccgaccgttgcagattcagagccgttggcgcactggacactgtccggtgcacaccggacagtccggtgcccccttctagccgttggctcggccacgtgtcccgcgcagatcgcgcggtcgaccgttggcccggccgaccgttggctcaccggacagtccggtacacgccggacagtccggggaattttagccgtacgccgtcggcgaattcccgagagcggccacttcacgccgagtcagcttggcgcaccggacactgtccggtgcaccaccggacagtccggtgtgccagactga

SEQ ID NO: 23699 - DNA, 654 bp, Zea mays
  Peptide Sequence Number=SeqID_67074
atgtaccactccggcttgggaggcctcctcgacgtgcagcccgacacggtggcgctggcccgcttcttaggcgcctattggcgcgacctcttcaactcctgccccgagtgctcgcgacaccaccacctcctggaccacatggccctaggatacttcccctacgttgagctcgcgaccgcgcccaccaagtgttcgatgctggtcctcaactgtggcgcctactccgttcccaacccttctcaagcctcgccagttggattcatccaatccaccccgtcttctccggctccggagattcaggacacacttgcacgtggccacggtggagtgagtgatctgctacgaaatggtgcggcggtcggtgcccatatggtcctacggcaacttgacccgctgcacaccgtcaccgaaatcatcgccaccggcgcatcaccgaactcatcgccactggcgccgaatacagcttcgacacctccatccacggaggcagcagatctgcgctgtcctacctcacccccatctgcgaggccaccagcgggaccctcgctcccgacgaccttctgctggagccaactcaagcagccgatccgcaagtggcacgcgactatggaggcaaccgcggcggtgcagaggctggccaacctagaggtgtag

SEQ ID NO: 23700 - DNA, 411 bp, Zea mays
  Peptide Sequence Number=SeqID_67075
atggacgcgttaaacttcgaatacctagactacgaaaggcttgacaaaggggccaaaggggtgaaaaggaagagggttgtcagtatcctgagtcagcaagctgctcgactagtgaaggaagatgaaaaagttttgaagaagacaaaaacatctcctgagctgaaggcgacaatctctaaaagacgaaggcttgacacagcgccctctgccgagccgaaggtggatgaatcaagagaagaagctcctttaacgccctctgctgccgaagtagcagaaattttgaagcacaagaagcaacaaaataggagctacaccaagtttcacctaaaacagagatcagatgtggtctacagaaaatcagccgtaggcgagtttggctggcctcagaatggtgtcaacaagctcctgtaa

SEQ ID NO: 23701 - DNA, 585 bp, Zea mays
  Peptide Sequence Number=SeqID_67076
atgactgcaggggcaaattgcttgacaggactgttggaaggacaaatgaactcaggaataaacatgaggaatgttggaaggaggaccattttccttggttcggtggacgcttcaagcgaggtagcaaatgcaaacatgctagagattgtgacaccccagcagtctgccttctcccttctcccccacgccactcctccctcccagccaggggtggacccaggccggggcgcaggcccaaaagaaaaattacaacttctacgtagcgtcgcagcccacggacagacactgaagactaaccctagccacgcgtcgtcccgtactcctgtcctcgcccgcccgcccagccaagcgttgtgcgccatcgcgcactcgcgtggtcacggcctgcggctgtgcggctccggctgcgagcctgctgcctgcggctcgcctcgctcgcccggcgcctgccaggccacgcgtcgtgcgccgtcgcggctgcggctcaccgctcaccagtcacctcgcccggcgcccgcccagccacgcgtcgttcgcccgtcctgcgtcagcccgtcactcgttgttcatggtttagaactttag

SEQ ID NO: 23702 - DNA, 528 bp, Zea mays
  Peptide Sequence Number=SeqID_67077
atggctttatcttttatggtagaaccagcggcagctgcaacatcagaggaagctgatgcaactgattcaccaagcaaagagcgactcaagactcaaaaggaggacgacaaaagaacagaagtgctcatctctgtttctagcaaaagaacagaagaccagaggagggattaccagacgtgctcatctccgtttgagcctttgagggacaactccacggtggagcagggacaggtcacaggcggacagctgcatgtcggagcagatgcggccggccggtcaaagcagctgagggcaacgagccagcgacagatgagggtggtggcgctcagcaccagcaagcagatgagaacggctgacggtgatgctcagggtaacagtaatgttgagggctactcttcacgcgcaggattccagctagggcaaaacattgtatatctcccatggtgggccgacccaaatggaaaagagcatatacatgcttcatctgctggagcccaaaacagagaacctagtcagacacaaccctaa

SEQ ID NO: 23703 - DNA, 678 bp, Zea mays
  Peptide Sequence Number=SeqID_67078
atggccatgaattggagctgccgtgatcgggacgtggggcatggcgacgccgggaaggacatctgctggaacagggagcgcgcgggcgtcgctgtccacgcgccgaggcttcaggctgaggctgagtcgctgagacactccgggtgtcaatgcgtgtgtccatggtcggccgatgtctctgacggcaggcacggcagcgccaccgtgtacgccgtgcagggagaggaggcaccaccggaaaggcagcggcggcgggagcggtggggcgttggtggcgtgggaggaggaggagcggcggcggcgcgggcggcgtacggggacgtgttcggcggcccgccgcgcttcgcagcgccgttcggggccgcgccgctggaatacgccgaggtgttcggcggcgtcgcggcgacctgctccatcccgtacctagacctgccgcccgcgccttcgctcgccgccgccgagggcttcttcgcctgccgcgggaagggggactacggggagatcttcggccgcttcgacttcgccgactttgcgctgccgtacgaggacctcttcggcgagccgcagccggagcccgttcccgacgccgcaggggagacggacccggagatcgcctcgtccagcgggagctccaccagagtggtgttagcgtcggagaagctgtttatgcagcattaa

SEQ ID NO: 23704 - DNA, 405 bp, Zea mays
  Peptide Sequence Number=SeqID_67079
atgaagagaggcgcgaagagtcgaggctggggcgggcgcgggctcgaaagtgtcggcttagtgtcgagcaggcgtaggagagccatccgaaacacccttgccggcgagacggcggtaggtctcggcgtactagcgctcgatggcgtcaacaaccgcctgctcctgctcaagagcacgagcggtgtccaggggccgctggcgagccaccgtaacggtgacccggatggcgacgaggatggttgcggcgtcatccgaaggagcggaggcacggcgtgcggcaccgtcgtcgctgcggccgaggaggagcgcggcgaagctggtggcagcacagagcgcggcgatggcggtgcccttgcggaggaggacgtggagcgcgaggcccgcgaggtgcccgatggtggctga

SEQ ID NO: 23705 - DNA, 288 bp, Zea mays
  Peptide Sequence Number=SeqID_67080
atggagtgggtatttctcaagaggaaaatacctggagatatatcggtggaatatttgggcaatatttctggaaacaacttgagggggattactggggaaatatctgggcggtatttctggaaagaaattgagggtgatcactggggaaatatttgtagggaaccttattggaacactaccccacttaaaaagaatgagggtagaactcttgaatcttggggatttgaactccttgaagtacctcataacaagggtgttacggggccttcttctgctattgctgcttga

SEQ ID NO: 23706 - DNA, 174 bp, Zea mays
  Peptide Sequence Number=SeqID_67081
atggcggtagtgggtgcgctgcaaaggggggtgggcggcggtagtgcgctgcaaaggggtcatgggcggcgcttgttccaggcttcaagggtaagcttcccggtatcttcttggggctctggccaaagtgaagaaaaacttcactacccaatgcacgcagaggactgggtataa

SEQ ID NO: 23707 - DNA, 336 bp, Zea mays
  Peptide Sequence Number=SeqID_67082
atggctttgttcagccaaagtctgctcggtctgggtgcaccggacagtgtccggtgcaccaggctggctctggcgaacaggctgctctcgggacttcgacgacggtgtacggctataattcaccggactgtccggtggtgcactggactgtccagtggtgcaccggactgtccgggtgctctcaaggatggaggtaagaagagcttcgaggtaccgagtgcatgggagaaggtcaaggagaccaggaacccaaagccaggggtgaagaagaagacttgcaaagtcaatgttgttcgagttaagaagagttatggtgcatcaaggatcactacataa

SEQ ID NO: 23708 - DNA, 111 bp, Zea mays
  Peptide Sequence Number=SeqID_67083
atgaaggtggtgctttgggcactgggcagtggtgcaacgcgtggactggatggtggcggtgctgagagagagtcagagatgagagacaagagaatcagggttagggaatga

SEQ ID NO: 23709 - DNA, 1554 bp, Zea mays
  Peptide Sequence Number=SeqID_67084
atggaatctctatttgtaggcttgtctcataacaagccaaaaacatccgtggcaactgcaatagttcgagaagttttatctcatgactgcttgctcctagactatatttgcacacaaggtgatcttgctctcatcgattttatcaaggaaatcccttgtgaaccaacggtagaagtcgttcttattgatgatgcctttgttgaaaggaagtggatggagtgtttatttcagccgaacacatatttaggtgacgaggttatagactattacataaatttgataaaggctcaaaagcatctaaagtgccgatctggaggtcgcgttcacatagaaaatgctttccagttcaatttcctgaagcgagatggtgatgttgaaattaaaacagaggagctatatgcaattaaagacatgacacacatatgtagcgctgaacgaagggtgttactttacctagaccatgacatggtgtttattctgataaacatccgagagacgcactggtatcttgtcgtgattcatgcaagaaatatggagatacaagtgctcgattcacttggtactacacaagaccacaaagacctcactgactctattaaaggactacaaagacaaattgatatgatatctcaacgtaaggagttaaaagaccacaagtggccagacctccaagttgcttcttggtcgctcagagaaatagacatgggatatgcaaagcagacagatagctcttcatgtggcctctttcttttgaactatatcgaatactggacaagggatgaactgtctgacagttttacccagggaaaaatggctgctatattactatcttcagacctgaataagagaagagggtgtctgttatacaaaaatgaaaaagaagttgactctggaagcccatcagatgttgagatattagaaaacccaacagattctaataagaggaaactactccacatgcttgatgatagcgaagtagtgtatgaagatgaggaaggccctattactcaagcggacttgcaaaggtggtttgttgatgattgggataaaagagctcctgtaaaagtctctaccgatgggtgcaccaatgactttttaatggttcttatgccatggaaattcaatggatgtcacacccttttcgtaatagatcatgttaaaaagcatgtgacttttatcgactttacaccgactcaagattggtgtaaacacatgccatacaagaggttcgcggaagcgattatcatggcctcaaaaaaatataagatttcttacagcaagaaacgttctggatgggcggaggatatctttaagtgggaacatacaattcagactcgtgttccaattgacttaagagggtttaataccagctacctcattctacaagctatgtccatgtgggggaatgacagacgaatgaaatttgttggggatgcaaagattattcgaaggaactttgtgattgatctgttaagttatgaagacaattcgtgccaatatgccatccctgcaaacatacaacagagacttatcgatatcgctaaaaaggattaa

SEQ ID NO: 23710 - DNA, 387 bp, Zea mays
  Peptide Sequence Number=SeqID_67085
atggccccgctcctcaacgacccgggcgtcgccagcgccgtgacgacacgcctccgtggatccgggtcgggcgccgagaacgacagcctctgccgctggctctacgacacattctggtccaacgtccccgagctccagctcgcggtgctgctgttggtgccgtcgctagctagggcacacctgtgccgcgccatgtcacggaagccactggccgggttcgaggcagtgctcctcgcgctgtacgcgcacgccgcgtcgcagcacggcgccggggaggtcgagactcgagaccatgtcactcccgaacctggcaaagattttggtacatcaaaaagagaacccgtaggaaaaattgaacaagtacaatcgatcggtgaggttcactga

SEQ ID NO: 23711 - DNA, 507 bp, Zea mays
  Peptide Sequence Number=SeqID_67086
atggagagaggagcttttctggtgcagcaagccatgaggggaggagttgaaatctttagaaaaatgaaggtcgcatgtatcagagatactatgagcacaacaattggaagtttaagtcaatttcttgctcatagagcctatggcctatgggtcgtatttatgcgtcaacagcaacaacaactactatggcagagtaagctgatgaagttgatgtggttattgatccaaaagatatcgaccttaaaacaacaagatctggtggagaagggcatcttcagcagttacaaggacatcgagaagctgttgcaggcactgtccaaggaggaggaggccgtgcggccgtgcctagtcaccttctatgccaacgtccttctcaacctctacgtgaagctcgatcctctagccaccacgtttaggttgtttgtcggaatgctagagcggaatatggtgtccttcgtcatgctcatgcagggctacaacacacacgctgacatgtataaagcatga

SEQ ID NO: 23712 - DNA, 2388 bp, Zea mays
  Peptide Sequence Number=SeqID_67087
atgcagaggaagtacaagctcacatgtcctgagcagtacgaccttttgatctcagccgagatcccaagcaacaagtaccctgaactacaaaagatggttatcaagcatatgatgcatggcccgtgtgggtcgctaaaccctaactgcccatgcactaagggtcgtaaatcatgcaagaatcattaccctcggcctttcagtgacacaaccttgcaagggaaggattcgtaccctatttacagacgtcgtgacgatgaccgtaaagaaaaggtccgagggtgcgaactggacaatagatgggttgtcccttataacccatacctccttcgtctcttcaactgtcacatcaatgttgaggcatgtgggagcatcaaggctgttaaatacctgttcaagtacatatacaaaggccatgatcgtgcgtctgttgttatgagagatgcgagcaaagcagatgatgatgttgatgagatcaagcagtatagagatgcaaggtgggtgactcctccggaagccttgtggaggatatacggctttgagcttagtcagatatctccacctttgatgcagctgcaactccatcttccaaacatgcacatggtggcgtttcacgagcggcaaatggtcgagcgcgtcgtcaaccgtcgagagagaatgggactgcttgagtcggacaacacactggatgagtgtctcactgaacgtgctattttccagatgccatcgtcgctgcgacggctttttgccacaatactggtgtactgtgagccaagcgatgtggctgtactctggcagaaacacaaagattctatgtccgaggactatcaacacaagagtcagaacaaaactcatgttgagcagatggtattgattgacattaggaacatgctacagtcaatgagaaaggacataaagacattccctctacctcctatcatcgacgcgtatgacgatgctattggtactgctagggccgcctatgataagattatgtctgccgttgacaccgatcagggtagattgttctttgtggatggacctggtggcaccaggaagacttatctatacagagtgttgctcgcgacgctatgcaaccagggcaagattgcagtggcaacaactacatctggcgttgcggcttccataatgcatggaggaagaaccgcccattcacgcttcaagataccactcactattgacgatggcgctgtatgtagcttcacgaagcagagtggaacagcagagttgctacggaaagcatctctcattatctgggacgaggcttctatgactaagagacaagccatggaggcactggacaatagcatgcgcgatataatgggtcgcctcgcactgccatttggtggtaaaaccattgtcttcggtggagatttcagacaggtcttgcatgttgttcgtaaaggctcaagggctcaagtggtcgcgtcttcgctacggatgtcttacctatgggagtccatgtcccacttaaagcttgttagcaacatgagagcaaaaaatgacccttggtttgcggagtttttgctgcgcgtaggcggtggaattgaggacacaaatagtgacggtgacattcgtcttcctgacgatgtgtgtgtgccttacagtgggagtgacagcgatcttgacaacctaatgtacttcgctttcccaaatctcaacgaaaatatgtcggattccacctacatcacttcaagggcgatactgtcaacacggaacgactgggtggatatgataaatgttaagatgattgatcgttttcaaggggatcatatggtgtaccatagtttcgatagcaccatggatgatccccataactactacccacctgagttcctaaacacattgacgcctaatgggttgccacctcatgttttgaagctcaagattggatgtcctgttatattgctctggaatatagaccctgcaaatggactttgcaatggcaccaggctggtcgttcgtggcttccaaagaaatagcattgacgcagagattgtactgggtcaacacgttggaaaacggattttcctaccgcgtataccgttgtgtccctccgatgaagagatgttccctttccagttcaaaagaaagcagtttcctgtacggcttagctttgcaatgatggttaacaaagcacagggtcagactattcccaatgttggtgtatacttgcctgaaccagtgttctctcatggccaactatatgttgctctatctagaggaacagcccgatcgaacataaagattcttgttatcccaaccgtcgatgagaggaaaaagtcaaggaagggtgtaaagaaaaaccccaccgtagattgtgggacatataccaagaatatcgtctacaaagaggtcctaacaaactag

SEQ ID NO: 23713 - DNA, 387 bp, Zea mays
  Peptide Sequence Number=SeqID_67088
atgggcatgcggcaaaccccgcttctaaaactccacgacatagacgtaggctcgaaccttaccaagaatatcatggagaagctccctccttatctcatcccagttagggttatatgtcatggcattgacagcaccaggctaagtacaatccatccactgaactattatggtagagttagttcgtcggtcccactcaccggcaagcgggaagctgaggagaaggagttgcttgaaaagcacaatctctggcttgatgaagaactgaaagcaaaagcgaaaaacttggctaaactaggaaaaacaaatatggatgagatgtcagcaaatattgctaaggctaatgctctggctgcagccggtggtggcagtggatcggtgaagctctag

SEQ ID NO: 23714 - DNA, 555 bp, Zea mays
  Peptide Sequence Number=SeqID_67089
atggatgtgtctgtcggatcaagagctcgacacttgactgatgtggatggtgacttgtgggatctggtcaggagggatctccaactaaaggccaccttcctgtacattgacctgaaccgttgcaggcaatcaaacattgattacacatcttcgcaggtgccatttaggataactgcaacaggatgggtccaagaattcaacaatactgccagaattgtgaagaagataaagctcacatgcacaccatgcaagatatttaagaagactacactaatcaagggaatgttcacatccgatttagaggttgctaggtttgaaggtgctgccattcggactataagtggaatccgaggacatgttaaaaaggtcaacgttgaagttcctacgtactctaaccctgtgaccactgctctgcaacctagagagcagacctggcaaggcatgagaacaactgctgagttgcggaaggcacacaatatccctaccccacacaacaaggattcagtttacaaggttctgagccttcaacagtttcctcataacattattgcatga

SEQ ID NO: 23715 - DNA, 534 bp, Zea mays
  Peptide Sequence Number=SeqID_67090
agccctgggctctctctaactattggaagccccgatcaggtgcgcggaccgcaccgtaccgaccagcggcggcggctgtcgagccccattcccgatctgaagcacctcaaaccaccgctctgccccagatccagatccacccagctactgcggcgagcccgtggggacggtggcggcggaggacccgagtgcacagagatgctcaactacgaccaggtcttcatcagggacttcgtgccctccgtgctcgccttcctcatgcacggcgagaccgagatcgtccgcaacttcctccttcacaccctccagcttcaggtgtggccgtcgtcgcggggcctgtcccgagccgcgagctcggccgcggacgctctgccgccagccgcgtgcgtgcgctctgctgccagccgcgggtccgaccgcctatggcatcaacaggtgaagctgctcggcttagagctgctctccggcgtgctccacccgacgctattcggcaacatcaccagatttataccggcttacacagacctgttttga

SEQ ID NO: 23716 - DNA, 201 bp, Zea mays
  Peptide Sequence Number=SeqID_67091
atggagcctggcggagggacagctgtcggagctgtcgagtccttgctgacgtcctcttgcttccgtaagggggttgagagccgccgtcgtcacagggttgggcgatgtggaagctcctccgaagccgaggtcgagtctgtcttccgtggccgaggtcgagtccgagcccctgggtcgggcgaggcggagaccgtcggctga

SEQ ID NO: 23717 - DNA, 447 bp, Zea mays
  Peptide Sequence Number=SeqID_67092
atgggggcccaggtcggctgcccctggcgccctgcctcaggcacggccctggacgctggtcccagatgccatggtgacgtcagccccgacgagaggcaaagtcttgaccctcaaacttccaataaaatgcaccacataaaaggaccacctattcacccccctctaggtgttctcacgaacgtcgacgttgttggcaccttcgccttgggggccaccaacaaaaccctggttcataagctaagacggaagacctcgcgaatggaaagggggcttgtcgacatcgtgaccggtcattcatttggtgaggatgcagtgagggccatccacggtcttcacaaacggaaggctgggcgtgacaaagggtcggacgaaagtgttgatgaccgcttcgacacagaaggaaaagaggccgacgacagtgagccaatgtgtcagcggctatggtaa

SEQ ID NO: 23718 - DNA, 135 bp, Zea mays
  Peptide Sequence Number=SeqID_67093
atggctgatctcctagctcggcctgctcagcggctgctgccgctgctgccgctgctcgggctgccctgtccatacgcctcttcttacggccttcctgctgctccaagtacacgagaaatatggcatagaaaatga

SEQ ID NO: 23719 - DNA, 867 bp, Zea mays
  Peptide Sequence Number=SeqID_67094
atgcaggtggcatgcaactgcaccacagagatgcaccctttcgacttcgacgcatccagcgtggaggcccaggcccacacgtcatgtaactggcgcactggttgctacgtgcgaaaaactgcaccgccacttacgccaatgtcgcgcctcctcgactacggaaccgatgctgcgactcgaagcaaccctgcgcatggcccaatagtgccaaccaagcacatcggtcacagggcaggcgacacctttggcagggcgaagcgggcgatgcttcacctccaccatgatgaccgcatcaaaaaaagggaccgggaaaggggatactccgaaagggatccttctccgcgaaggaagcgggccccgagcccccctactgatcagaggtcaaagctccgcccactcaagggacacgatctcgcctcgcccgagcccagcctcgggcaagaacagcagacccaggaaaacagcgctgcctgccctgctccaactactgtgccacccgccagggtgaggctgacagcagccaagtctagcctcaggcgccataggaagctccgcctcgcccgaccccagggctcggactcaaccacgaccccggaagacggtctccgcctcgcccgaccccagggctcggactcaacctcgaccccggaagacggtctccgcctcgcccgacccaggggctcggactcaacctcgacctcggaagacggtctccgcctcgcccgaccccagggctcggactcaacctcgacctcggaagacgggtctccacctcgcccgaccccagggctcggactcaacctcgaccctcggaagacggtctctgcctcgcccgaccccagggctcggactcagcctcgaccttag

SEQ ID NO: 23720 - DNA, 456 bp, Zea mays
  Peptide Sequence Number=SeqID_67095
atggaggaagcaagcacacctggatactgcgttgatggcaaggacgacgtccgtggcttgggggagcaccgacttgcagctggggactgtggagaggagcgtggccgaagacgacgcgtccacggtggaggagcaggggcgccaggcttcacggtcgagcgaggggatgagcgcctaggagcaaagaggggcgcgccatggggaataaccgtggaggactgggcaagtgcagggtactacccggatattgaatcccggatacgagtaggatacggaatcgctagcacccgattgttctacacaaagagaacagaaaccttgactgtcaaactacaggagcaacagatgccattgcctaacaatcccacatcgttcatttcgcaggaatggtttagtatgaagaataagattactagacaggagccacataaatctaattcaactactattgactag

SEQ ID NO: 23721 - DNA, 357 bp, Zea mays
  Peptide Sequence Number=SeqID_67096
atgaaaattgaaaaggggtgggcgcacctggtggacaatgacaaagcatttgcagatccagacggtggtaacataaaaccaagatctcggattatcggtggcatgatgaagagcgcgagcagggaaaaagaggagagtatagaaacctatagaggcgagtgtgtgaggcacgcacacctcgaggaggcggtcttttggctcgtcgtagccgagtgggatgatgcgcgcgccagcggcctcgacgaacttgatgtaggaggtcacggtgatgttgctgatccgaccgcccgcgccgtcccccgggtgcgagacgattctgtgggcatccacaagaaccggacggcacctccgacctag

SEQ ID NO: 23722 - DNA, 297 bp, Zea mays
  Peptide Sequence Number=SeqID_67097
atggcgcagaacattgccatcttgctgccctcgctgaatgtgaccaaagaagaggctatagagaagataaaatctgtcaggaataaatcatcgcaaggaagatggctgatgcaagaagacataagatttatcctagttcgggcaagagaaggccctactttcagtgagggggatgagacttatattatcttgcacctaggtgctcatggtaggggtacaagctggtcgagagagggagtgagtcccaagtctctgagagtgattgaggcatgtgccaatatcgggagtgaagaataa

SEQ ID NO: 23723 - DNA, 375 bp, Zea mays
  Peptide Sequence Number=SeqID_67098
atgggttggggaggcgtggtcaatggggccgcacgtcccacaggcggggtcgacggggccgcacgaggcgcgggtagaggctcgagcgaaggtattgaggccgcacgtggcgcgggtagaggcatgtccggaggtagtggagccacgcatggcgcgggcaacggtgtaaggcagggcagggtagaggctcgagcgaaggtagtatttgtagccaaagaggccgaggacaggagaagtccagagatcacaatggacacgatcaaaggcctgagcaacccgggacgtggaggtggagaaaggaagacgagagtgacggctgagctgataagcatgacagaggcgctcagaggaacctcggttgtaggagatatctga

SEQ ID NO: 23724 - DNA, 555 bp, Zea mays
  Peptide Sequence Number=SeqID_67099
atgccgcgcgagatctgcggtggtgcttccctggagttcgtggacatctcccaaccaattccactcgcctataagactggccacctcctctcgtccaaggcatcgagcgaaagcaccgaagagcgcggagtgggagagaatcctgcggtcccgagcaaaggaaatggggtgagagagaagaggatgccgccacacctggaacctattctcaccggcgcaacagaggcgtggtgggcggtggaggagcttcgacagggcatgaatttcatgggggaggcgccgcgggaccgtaagaacaaccaggcgccacaaatttcctgttggagtggatcctccgccgtgggaccgctatggcgtgtggacggatacagccatcccaaatcaaggtgcttaataacctcggaaaaccataacttcttaactgtaactccgaattcagcgattcttgttcccacgatctcgtaccaacatcattatgttaattggaacatggagcgaccacccgggaaaacagtgctaccacaagggtttaatgggacgcccttggctgattaa

SEQ ID NO: 23725 - DNA, 354 bp, Zea mays
  Peptide Sequence Number=SeqID_67100
atggcaagggaagctagtcccagaggtcacagtacacctcacaatctttggggcaacagcaaagctccttcaggccgccagctccaaggggcagaggtgccaggggcttcggaggaagatttggggatcatcccaggaagatttattgcttattctgtggtgaagacaagggccacactacaagaatgtgtcgaatcaccattcagaagcagaaggagatcgctgaagccaaagctaggcagaatcagccgaagcagctcaaaaattgttgaagctcaaaagtcgttcctaagggaatgcagagctaaaaatcacagccaaagtttcaccgaagctacaaaaaggcgttcctaa

SEQ ID NO: 23726 - DNA, 861 bp, Zea mays
  Peptide Sequence Number=SeqID_67101
atggaggtgatttttgggcggcggctccggtcaggtgccgagccagacgcgacgccagtcccccttccccgggtgctgtctcgcgcccaccaagtcctcaatgaaaccgaggcagccttcctacgggaatgggaggcgcttgaatctgagcaccagcgcctcagcgactggcgcacccagctggaggagcgcaccaaggcagcgtcccgccagttcgcctctgagtggtctgaactcgcgcgggaccgcaacgagtacaaaagagacctccagaaggtgttcgccagggagctagaggcatcccagtgggagaagaaggtggctaggagggaggaggccgcgagccatagggaggccctagcggcagagtaccagagcaagttgagtgctctggacaagaccctggaggcccagcgggtccagcaagtggaggccatagaaaggatgaagaaatggcagcaggagctagacgacaaggccagcgacatcgccctcgccgaggtgaacctcaaggagatggaggagtccttgggtaggcgggaggcgaatctcgccaagcgagagacagacctcgccttccaggaggaaatgcttgaaaggcggggcatgttgctggccgagcatgagctcgaggcggaggagaaggagaagaagctggaggagcggatcctcggcgcccgcctggaggcagagggcagcaggctctgtcgagcggtggtggactacgtgctgacgtgcttccggagccacgacccggccatgaccttggtgtcggtgctcgatggtctggtggccgccacagaatacgccgcccgggagagcgtccaagacgccatggagacggtggccgcacgcttctag

SEQ ID NO: 23727 - DNA, 558 bp, Zea mays
  Peptide Sequence Number=SeqID_67102
atgggcgagggggatggaactgataagtgggccctggctgccagcgagaggaagcggcgcgagagggaggggctccaagaggcagaggcgccagaggcttcggaggaagatatggggaccaacccagaaagttctactgcctattttgtggtgaagacaagggccatactacaagaatgtgccaaatcaccatccaaaaccagaaggagatcgcagaagccgaagcccggcaaagtcaaccgaagcaggtcctgcacactgcttcgtgtcactcaccctacatactacaatatgtgggtaaccatcctgcagcttctgttgcttcggctagtcagccacaggcttcttggccacaacttccacctctaccgccactacaacctgcctattcacgaggtcagcagccagaagggagccatcagactcatcagcagcgagatctcagggaggaatctgaagctcgcacagtcaacagtactgtgccagaatcaaaacacatctattgagagatatcctacctctgaagcatctttacattcattgtcattttctttttaa

SEQ ID NO: 23728 - DNA, 945 bp, Zea mays
  Peptide Sequence Number=SeqID_67103
atggagcgggaaattgaactgtccatgtttatggcggcgacgacgaccatgaggatgcacaccatggagccccggccacctaccgactgggccgaccaaccagctttctgggcccacgagaacttttatttgatggcccattttacccacgcatttctttaccctaactgctcccatctttatctcccgaaggcacgtagccgccgccagtttcttcttcccccatcttcatcttcctcgcagcgccggtgctacatctccagactgcccctgctccgtgcggacccactctccagcgcgactgcacggctgttgttcccgcgggtggagatggcggcggtcaacctcctcgctgagtctgtcgcggtgcgcttgagggcgccggcgccgccgagcgcgggggaggagcttgcggccaggctcacggagtgcgggttccccgccacggcgcgccgagggggagcggtcgcgggggttggggagagcgcgcgcaagtggagggagatggcggccaggaaggaggaactcctgctgctgagccagggccgagtcgcgtggacgatcgtcgcgctttggtgcggctcgcatgcgtcccacatcctgcactcgctcggtatccatgttcgccacggcacgcacggtgacggtgagcaggccggccggcatccagcgtcggccagccgcctttcctccggctccgcggccggggtcgttgtggttgcctcgttgaccagtctgcatccgtcggttcgcgatcgctctatgggccgggtagttcctggccacacggagaggagaggacgccctggtcagttcctggccagctctgggaacgagttgcgcgtggaatggaagtctgggaagccgcggacagcagagcagataggcgggccgggatggaaaagagggtcttctggggccgtcgaccgcgacgcggctggctaa

SEQ ID NO: 23729 - DNA, 342 bp, Zea mays
  Peptide Sequence Number=SeqID_67104
atggtggatgaagtgcaaatcatcaataagaatcagagaaaaagcaaaaggaaaaagacttggctggaacagccaagactctgcgcagtctgggtgcaccggacagtgtctggtggtgcaccggacagtgtccggtgcgccaggctggagtctggtcaactggccactctcgggaattcatcggcgatgtacggctataaatcaccggactgttcggggtccggcactttcccatgggggtccggactcactgttgatgccttggagtatatcactttctctggacacgtggcggccccggagccgcccacatggtggggtcaggtgctgttcctggcctag

SEQ ID NO: 23730 - DNA, 708 bp, Zea mays
  Peptide Sequence Number=SeqID_67105
atggtgcgccccttgtgccggccgcgagttcatcccagatggcgaccagggccggatcctgaagttgagcctgacggagacggtcgacgaagtcgaagcggggcgcggacagcaccaagaccgagccaactcggtctggaaagactgcatcagctccatgaggtccttgatggtgggctcagccatggtgatggagtggtcggtggaggcagtgggcgtggaaggggatggtggagggcaagagcgggtggaatggatgaagttgctttggttggagcatcctcagctagcagttccaagagtgttaatattgaaggagctagaagaatagcatttaagcatatagagacctttgtgctcactttctcagatccacaaatgttctctacggctgctgcctcctcagccccggcagcgctgtctcatgttgctgaagcagtgtttatacaggaagctggacacctgagatgcagtcgctctgagattggtagatttgttgtcatgcttcggaatccttcaccaattcttcgtgcttgtgctgcctttgcccttcttcagctctatctagaggcattattgtttgagacatgggccatactgtccattacaagagcagttctggctgctttgttgacagtgatattgttatctctttctttcatatgtctcagcatcttgtatagtactataaaacacatgagtttgtaa

SEQ ID NO: 23731 - DNA, 492 bp, Zea mays
  Peptide Sequence Number=SeqID_67106
atgtgggcagtcactcaatctgaactcgtacggtccaaccctagggttatgaaggctggggagcaccgggaggataagaagggggaatgttttgtccggtttggacatggtggtggcctgactccttccgaaaaaggagatcggcctcctgggactagtaattgtatcacatttgagtcccagaggatcgggacgcttcaggtgaaggaagatggtttccccaagttgctgagggcatgcacagttcgcctcggaattaggagtcagccagagtatgatggtcgtgaattcgtcgagcatggcacagagaagtgtgtcgtgactgtatacattggatccagtccgcaccatgtggaatggagtgtccctgctggtgggcacagattcaaagacacctgccaagtcgtcgctcgcaaggcattgagggccctgtgtcagatctatgaagaagaagtggccgacaccccgctcagattctttccgcccttttag

SEQ ID NO: 23732 - DNA, 1683 bp, Zea mays
  Peptide Sequence Number=SeqID_67107
atgaatgcatcgccccattcctataaagaagccctgctagccacccccacgaaccatgtggcttctaccccggtgacgacagagaaacaagccagtgaagagaagacggtggtcggctcacgacctgaggtgcagagtcggttggtgccccagcgactgggcaaggacggctggcaggtggtgcagtgcagaacgaagaagaactctgtgtggcaacagctgagtaaccagagtgagagagcttcagtgtggcaacgtttggcagggcagcagaaacacccgcctccgtttgctgcagactcccatagaagaaggtcggtgtggaggaggatcaacactccattggaacccgcgctgaaggaagacacctcaaggatgtttgctgcaggcgactctcaaagaagcctacgcaacaagaagaaaagacgttccaaacggggcaaaggatcgttgatgcctggtgctggtccaggctctatgtccccggtttcatctgataatgttgaagccccccggaaggtccatatgccggcgctgaggtctggaggacagatggagatattcaagaagacattgccttcttgtgttttgaaattcaccaccgagatggcgcgtgaagaggtaactctccgtcgtgccctgttcgtaaccgttgttgggactaggccggaggtgttaggagttgaagtgttagaggaagttgctcataattttgatgtcaatattgaagccatgtggattcatcaagtcctgccagaggatttcctcttgattctacctgatgaagaaaatgcctcaagggtgcttaatgatggcaaggcatataggggggctcatttcagtttgaagttcaagcgctggtcgaggtttactcatgcatcttcgacgatcatgtctggtatggtggaggttgagattagagggattccagagcacgcttggtttcgttctacggcagcaaacatcttgagagactcatgctggatatcggaagtgcatcctgatactttgcaaaagaaagattactcatcctttcgggtcagtgcttggtgtttcgatcctggaagattacatcgtgttatggacctccacatcgtcgagccaggcttgcacacgcttgagaagagatgcctcacttacaagatcagtgtgagcgctacccagacagacctacttgcggcggacatggggcctccaccgcccccacctccagcgtacggcaggagacctgatggtgacggcggtggcggcgaggaccaggacccccagtctcgccgttcgagcggttcccagttccagcggcgaccggttcatcttcgcctgggcccgcagttgtcgttgggacgtggtgctgcaactctggtgcctcgggctgcgcttcctgcgccgtcaaggacctcgggaggggaaacatcaaatcctgagcgagatcctgagcgtgatgcgctttcttctctgcgtattgaagaaacaccggtatccgaggagccccaggaagacagagaggttcccgaggcagttattgagggacagatctccccagggaagataaatagtccccgatgccacttgattgctgcatgcgacaggactgttgaaaccgtgctggtggatatgtcgattggtgaacaaacagagccgggctcaccccggagcctgaatgggccgcgtgagatggcctag

SEQ ID NO: 23733 - DNA, 1144 bp, Zea mays
  Peptide Sequence Number=SeqID_67108
aagaaattcggcctctgacagcaatgccgaaaagctgacgaacaaggtggcagcccaggagagggagaaggctgacctccggcgccaacagaaggcagagaggagggaggccaacgaggccatcgccaatgaacaggctgcgcaggcggaagccaaactggcgcgggcggagggcaatcttgccaaggagcttgcagaacatttgcaggagcggctcaccgcccaggagagccgcgcgaagggggccgaggccgcgatgcgtgcggaggctgaacggacgtgcgcgcagcttatggatacatatcgtgagctgggtgcgccggacccggtgacttcgaggtgccggaccgagagcccggacttcgttgtctgcaatgggtgcaggaggagctgcaggaactccccactgtcgtggggggggtttatgtcagtacgcctcccctggtcacctgcgacgggggtcgatgaacgcactcttcccgccgaagggtgcccggcactttcgagggtcttggcccaggcagatgaagattttgagcggggatgtctacaaggggagcgggccgagactgcgagggctcaggcggcgcgcggcgagcgggtggacgacttcggggcgctgaacagctcgctgcctgacccggagtcgacccccgcggaggccgcgtctggggccgccctggagccaaccccggagaccgcggcgatcgtgacggctgcccccacatctgctgcggccggcgaagacctgcccccaaaggtggccgaaggcgcccctgatgcccccgcggctgctgtgccgagtgctgaagatcccgcggcggaggcggcggaatcgacggcggaagcggcggcggaggcaacggcggaggctcccgcagcgtcagggccttcgcaggttcaagattttgggcctgcgcacgcaactgctactactgaaattttgacggcttcgaccgcggaaggtggtaatggatatggtgaatctgcatctgagttttttgattttactgactctgggagctcggttcagtggactgaggagtcgtcggaggaggacttggattattttgcggccttggatgtggctgcggcggaggctacgcccatacgccgcgggcgcaccagacgtgccaggcactag

SEQ ID NO: 23734 - DNA, 477 bp, Zea mays
  Peptide Sequence Number=SeqID_67109
atgggccagatcacacgtgggcctcagagctggacgaggccgagccgcgggatgacgtcgccgcaggccttcgtctggtgccgaatggagcgaaggataagcacgtatgtagtctctgaatcattagcgtgggagcgggcgggattccgtggtgccgagcgggcgcgggaagcgcacgaggatgatggcgaggccactttcatttttaatgagtgcatatcctttaacgagtctgttggagctactctcataaaatccctaagagtttgcctcatccaaagtaattgcgctgccctagatcagcaacttcctgcgtcatcgactgtcggcgccacgctcatcgtcaaccctaactacacgacatggtataacaaggaccagcagatcctcaggggtctcctctcctccatgtctgaggagatcctttgcgacgtcatcgacgccaagacatccaaggacgtgtgggattctctctag

SEQ ID NO: 23735 - DNA, 540 bp, Zea mays
  Peptide Sequence Number=SeqID_67110
atgacgggtgaaacgctcttgggagagctggctccaagacatgaagagagcagcaacggcagtaacgaccctattggagacctagaagcccaagtggagcagcttcggacggagctacatcatcgaaatagggtgtgggtagaagatggtcagcgtatgaacgagttaagagctgacatcaggcatctgcaagacgagcttgctgaacgggatttggcaatcgattgggccgtcaattcacgttccattgcttgggaccaggaagccaaagctcgtgctcgcgtggccgagcttagtgcggccgttgacaacttgcaggtgtattgcaataccttacatgaggaagtccatgtactgtattcacgactgcacccagacgtacctgccgaccctattgaaatgggagccggaccctcaggaacaacatgtgaaggacttggtggggtattggaccttttcaagccccctccttctatgaacctggctgacgaacggtcccctacaacagacagtgaagcaactaaagacgataaaaactag

SEQ ID NO: 23736 - DNA, 573 bp, Zea mays
  Peptide Sequence Number=SeqID_67111
atgggaaaccgatcgaacttggttttgcgtgctccagtcctccctcttttcgccgacctgacgtacgtggtgttcgcctgctccgactcccgcgtgtgcccgtcggtgaccctgggcctgcagcccggcgaggccttcaccgtccgcaacatcgccgccatggtcccagcctacgacaagaccaagtacaccggcatcgggtccgccatcgagtacgccgtgtgcgcgctcaaggtggaggtcctcgtggtcattggccacagctgctgcggtggcatcagggcgctcctctccctccaggacggcgcacctgacaacttccacttcgttgagaactgggttaagatcggcttccctgccaagattaaggtgaagaaagaccacgcatcggtgccgttcgatgaccagtgctctattctagagaaggaggccgtgaacctgtccctggagaacctcaagacctaccccttcgtcaaggaagggctggccaacgggacgctcaagctggtcggcggccactacaacttcgtgtcaggggagttcctcacatgggacaataagcagccatcgtga

SEQ ID NO: 23737 - DNA, 1074 bp, Zea mays
  Peptide Sequence Number=SeqID_67112
atgcgcggcgtgctcggggtcctgcccccaggcctgtcctcgcccagatccgctcccaatgtcaacgaggggggatggtctgttgtccggccgcggcattggtggcgcaagatcttgcaggatcctggtggtgctccacggaaccttcaatcggacaagaaaggctctagacttttcaaattgaagctcaggggtaaatgctacaactgcctctcatctgcacatctcgcgttccgctgctcggcccctacgcgctgttggcactgtttgaaatccgggcaccgggcgagatcttgcagccaaaaaggataccagggaccattcaatgctacgctcgtcaacactgaaccaaccaagcagtcatcaaggggttccaactaccaggagttactgccaatgcccagcatcccccataagtaccaggtcccttcccaggagtcttctcacggtcagctgcacccaatcctcaagaagtcctaccttcaagctgtccaggagggtcacggtatggaggcgcgctacccaggagatcctagggggaggcctgcgcgtgccttctgtgcggtctcggcgaccggttcctttcgtcgtcggagagatgagttgatcgacaaggccatcgtctgctccttcgacggcaacagccatgaggtggacactctttccgcaggggacatgctgagggaaaagttcaacctgcaccacgagcctgacagggagctgcctccggtcaactcccctctaactttggttggtgctcagcacgatgctcctgctgatctgaaacctggtcatgtctacactctacgcaaccacatagaggtggtggaggacctctctttccttagtgggaggggagctagtgggaggggagccagggggggtccgtctaaccgcaagcagcgcagggagtttgtttggagctatggtgccccggactcagtgggcgaaaaaagagatcgtgctgaagatttcagaggaagagagactgtgcgtcgtgactgggatcatgatgatgataatggggattttcagagagatagacgcagcggtggaatgccaagggagacctaa

SEQ ID NO: 23738 - DNA, 495 bp, Zea mays
  Peptide Sequence Number=SeqID_67113
atgacgacaccctgcgacggggcggcgagggagtcggacgccaggtcgagttcggcgcgagagaagaggaggggagcgtttgggggaaagggaggagggaagctgctcttgcgggaaggagcgtggaaggagggaggacgacatgaagagcaaaataatgggtacaaatccagtcaaatgaaattgatatacaggttacagggtactttgaaagccatctacagtaggatactgaaccccgagacttcttccaagaagctgaagcgggaaggcaaagatgaacatgttttgccaacgaaaacagcaatgacagttacggtcgaggcagaagatggtgatctggaggaatcacccgggtttggttttggcaatactcagcgtaatataatattggagccttcaaagccaccgatgaatttggaaaaccgggatgaagcgaagccaaatggaggggatccatctttatcagcaatacacaagaagggaattgtttga

SEQ ID NO: 23739 - DNA, 189 bp, Zea mays
  Peptide Sequence Number=SeqID_67114
atggatcctaaggggaagggaatcgtgatcaacgacaaggagaaggagtccttcgtcaacgagccaaaggatgtacaggagaagcacagatcctacgagcataaaagtataaagcacagcggatttaaaattccacatcaaatggcgtgctccaagtgctatgaaacaacggcggtgctaagtttataa

SEQ ID NO: 23740 - DNA, 561 bp, Zea mays
  Peptide Sequence Number=SeqID_67115
atgtcgcgtgcgttcgacgactactatatcgaggattgtggcgtcatcttggcgccggaggtgacacagaggaggatcgacaacagtgaccagttcgtcatcctcgccaccgtcaggcactgcccgccccggacggacggtcctactgatcactccgctgctgactcgcgggccggcgtcggcgtcggcggaggcggaggcggaggaggaggccaccaagccatgggcgtggtccgcgccgagcgcaaggcccggagtgcggtggatcgatgccgatgcctacaagagggccgcgccgctcgtctcgtgtcctccatcctgtgctcacccataccatattcccaggcggacagcggcaaagctcgtttgtctcggagctgcgctattctggtgaaagcccaagaacgtgacgtcccgggaacggccaaacccatccgcttccgcctcgtaccacactgtcggcttcctttcatcacgctggcgggtccgggattgctgtttggagtacgcgctcctttcaaaatgtttggtgaattgcatgatgcctatgctaccagctag

SEQ ID NO: 23741 - DNA, 429 bp, Zea mays
  Peptide Sequence Number=SeqID_67116
atgccctcaacatgtcttccaaaatctgattcaccctttctgtttgaccatctatttgaggatgtgtttacgtcactaagtccacaacctccagtctactccagcaaggcggcaaggcagaaactcagtgatattcttgaggatggtggcaatgagtttattatcggtgttgttccagatgaaaatgttgatcaagatgaagaccatgagggtgcacatgatgaaccatcacaggaaccatcaatatcaaaagcacaactactagccaaaagaaagaggcatgggcatcctaggaaaaagaaacttaggagcttcaaatctctcttgtctggtgatttagagcgtgcaacctgtgcttcatcttctgaatccgaagataatgaatctatgcaaattgaagcttcaaattcagattctggagatgagtag

SEQ ID NO: 23742 - DNA, 81 bp, Zea mays
  Peptide Sequence Number=SeqID_67117
atgcggcttcatacccttagagataatgtggttttataccctcagaggtgcttgttgctcatcaaggggagtgggaagtag

SEQ ID NO: 23743 - DNA, 1176 bp, Zea mays
  Peptide Sequence Number=SeqID_67118
atgtcttcgcgctcccttatgcaccgtgtctttccaccttccgagcccccggatggggaacacccgcaatccttccgccttgtcgttggaggaacgcaacttcatggaagttggtacctctcagccatcgttcggcttcaaggattttcatcaggcagcccggctgcaccccctcgccggtggtcacccaagacggtgaccaccagctcctgggtggggagaagcaagccgggctgcgatcttggtcccgccctcagcttcaaggatgttcatcatccttgctggggcggaggccgggctgagccggagctctacgtcccgcatgggttcgtgggtcagcctctccttcagcattcaagggagagggcgctcactggccctgcgagaggggcagacttcgaaaacgcggggctggtcgacggcgggcgtcgtcagcttcagcatgttgggctcgccggcttggctcctggtgccccctcccgccgcaagggcggttgtcgcgccgtgcgcacgggaggaccgcccaagacgtcgcgcgccgctagggcggcgttcatgttctggggctttcctgcctttgcaccggtacggcgcctccgcgcggaggtggatgcggctcgagaagtccccgtcgccgacgggatcaccgccaccatccgcgctccgggcctccggctctttgtacttgtcctcgcccctcgagcgtcggcgtgggtgagggcaaggttgcagcagcactcgcctgttggttatctgaaccgcttcaccaagcgtgagtcgcctcgtgcgaaggtgacgagtgagctcgaacagaggcagagttggcttcgaaaaaaagacttggtcggccggatcctggccgggtcgtccgctggcgggaccgacgccggagttgagttgccgaggcctcgggtcgggctgatgtcttcgggggacagctggccgaggccttggggtggccggccgagccgtctgctcgagccggattcctggagaagaccctggcggcgatggcctgggcatggtgctgatgtcgtccttcagagtggagatcctccgaccgtgtcgccgtccgaggctaggtcggacctcgccaaaggtgtagttgacgccgagggtgctgctgctcccttcaactatcaagatccgagcctgcaggatcggattatcttgtag

SEQ ID NO: 23744 - DNA, 1398 bp, Zea mays
  Peptide Sequence Number=SeqID_67119
atggcgcctcctattgacgtggtcggtccgagccctaggttgggcgaggtggaggctcctccgaggtcgaggtcgagtctatcttccgatgccgaggtcgagtctgagcccctgggtcgggcgaggcggagaccgtcggctaaggccagggctgagtccgagccttggggtcgggcgaagcagagttcgtcatcttccggggctgagcccgagtccgagccctggggtcgggcgaagcggagttcatcgtcttccggggctgagcccgagtccgagccctggggtcgggcgaagcggagttcgtcgtcttccggggctgagcccgagtccgagccctggggtcgagcgaagcggagttcgtcgtcttgtggggctgagcctgagtccgagccctggggtcgggcgaagcggagtttcctatggcgcctgaggccggactcggctgctgtcagcctcactctgtcgagtggcacagcagtcggagcggcgcaggcggcgctgtcctcttgtcagaccggtcagtggagcggcgaagccacctttgcattaaatgcccctgcgatttggtcggttggcgtggcgggttggccaaggttgcttctcggtgaaggctgggcctcgggcgagccgaggctttgtgctgatgggggttaccagctaagatttaggagtcttgaggggcgtatcttccattggaactcacatataagagatagccataggtgccaggaagaggtctgcgccgaattcatggcaagattcgcacgcttgcgatctctgcagacgcttgaacaagggaagaaacaaacctccacgtgttcgacgcgccgtggcatcgccagagcacgccccgacgctcagccccgcgcgcaccgcgccgcgccaagccaaacccgtgcccccgcccgcgcccgcgcctataaagccagccaaggcttcgaccatacgcccccgctcgctctgaaccttgccggagcgccagttcaccggcgatcgctctgcgcaaggcgtgctagcggccacccgagaaccgaccaccgtagaccgggcatcctagccattccccgccccatccgaccttcgagagagtctccatgtgtctcggtgaagctcccaaagctgggaatcgaactctacctcgccggagacaccggatcaacgtcgccggacttcaccagatcgccggcgtacgtagaccgagctccacggctggagcacacgccgccgacgagcccgaccgcctacgcacgtggcccgaccgattcctgccatcatcgccgacgagccatacctcgacgtgactgcaaggacttcccggagctaaccccacccttcgtcggacctccctcgccgtcgataagccgcgccgccctatttacttctgcggttactgcttaa

SEQ ID NO: 23745 - DNA, 507 bp, Zea mays
  Peptide Sequence Number=SeqID_67120
atgccctttacaaaagattacaatcatgactcaaacccttatggactaaaaagtcattctactttcaagtcggttcgatccttcatcttcggatacgccataataccgaagcttcatgagtgttcagttaaatctttgaaatccattcgatccacaatcaggggtgttctggtcattcctctggttgttgttcttctggggtgtccgtgggttactccaggggcagttgttggcatagtggccaagttcgccacacttgaaacagccattgggttgaactggattagttgtattattattcttggccgagcgctgtgcttggtagttattgtttccactctggtttccggagcggaactgagaaccttgggagttgttttgccgggtgtttctgctggtctgcccttggtactttcttttgtgatcagacaattctttccttttgttttcaaggccaattgccttgttcagcaaagtctggaagttggggaaactgtggctctataa

SEQ ID NO: 23746 - DNA, 1065 bp, Zea mays
  Peptide Sequence Number=SeqID_67121
atggggcacgggcgtccactcggattacccgccagcagctcaccggagacaccatgttcggcgccctccgagggcaacatggcgctttcccccctcctccttgcggaaaggcgacgcaggggcgtatgtaaaaagtcgagtctgtccttgaccgtcctctcgccctgtgcagaggctcgggggctgctctcgcaaaccgttgacagcgtcaacattccagcccgagaacttgggacccgaccgtgcacccgggctacggccagctcgcatgagggaacgaccagaccagccgaagcattgcgcgaggcattacgacctcagaggagtcaaaccactcctccaaggccttgggggctacacccggcggaaggacagcgccgcctgcgccgctccgactgctgtgccactcggctgagtgaggctgacaggcagctgggcccggccttaggaaccataggaaactccgcttcgctcgacctagggctcggactcgggctcagccccggaagacggcgaacgccgctccgcccgacccagggctcggactcgggctcagccccggaagacggcgaactccgctccgcccgacctagggctcggactcgggctcagccccggaagaaggcgaactccgctccgcccgacccagggctcggactcgggctcagccccggaagacgacaaacttcgctccgcccgacccagggcccggactcgggctcagccccggaagacgacgaactccgtttcgcccgaccccagggctcggactcagccctggcctcagctgacggtctccgcctcgcccgacccaggggctcgtactcgaccttggccttggaagatagactcgacctcgacctcggaggagcctccacatcgcccaacttagggcacagaccgaccacacaagcaatgatggcgccccgcacgctctatgacgacggcggctctcagcccccttacggaagcaagaggacgtcagcaaggactcgacagctccgacagctgtccttccgccaggctccagcgctcctccgacggccacgacaccacacgaaccag

SEQ ID NO: 23747 - DNA, 495 bp, Zea mays
  Peptide Sequence Number=SeqID_67122
atggagatattgcaggtacggggtctgctagtttcgattaggcgtgaccccgcttcgctcctcctcgacgcgcagtgcctcaccctcgggggccgagggtgcctcgggccgaagcgagggtgcctcgggccaagccgagggtgccgcggactgagccgaggatacctcgggctgagccgagggtacctcgggcagggccgagggtgcctcgggctcgggcgtgtcgtcgatcttgacggagggttgatgcaggtctcgggagaagacgtccgggggaaccgttgttcaccccgaggctattttagccagctcgtccacagtctcattgtagtgtcgggcgatgtggttgagctcgagctcatagaacttgtcttccaggcgccgaacctcatcgcagtaggcctccatcttcgggtcgcggcagtgggagttcttcatgacttggtcgatgacgagctgcgagtcaccgcgagcgtcgaggcgtcggacccctag

SEQ ID NO: 23748 - DNA, 63 bp, Zea mays
  Peptide Sequence Number=SeqID_67123
atggcgccaccgtgcgccagcgcggtcccgctgctcgtattcgcggcggacgactgtgattag

SEQ ID NO: 23749 - DNA, 516 bp, Zea mays
  Peptide Sequence Number=SeqID_67124
atgggggacatttggcctagagagcagctcgatggagaggtagggccgggtgcgtggaacagagaggcgaggatctgggcgtcactgtccagagcgccgagcgtcgaagcttggggagcccgcgctcgccacggaaagggaggaagggaggggtggcgctgggcagagaggtcgcatccaaagggagagcagggaagcgggaggctggctggtagaggagggcgccaggaaaagggccccgacctgcttgaggagacggagaggaggtcggacggcatggatgggaggagcagagacatcgcgccatggttgagggcgcgtggagcaaggagctcgcaggggccggcggccatggaagttgtaggggtagggaggagctcgtctgtgcctggggaagggaagagatccctactgctggcgaggtgcgccagggaggtggcctttggagctccggctggagatttggggcaccatggatgggagagggaggagatccctgcggaccggaggtggtag

SEQ ID NO: 23750 - DNA, 273 bp, Zea mays
  Peptide Sequence Number=SeqID_67125
atggctgaagcgaagagcatcctgagcgctggcagaggaagggggaagacgctaggagggagcgtcgacagggaaatggcgtggggaggaagacgacaggcttcgtacgttggaagcctggcggccaggaaatggaagaagggagcggcgactgacaacgagcagtccgaggttcctgagtgtattgttggagacctccctgagcaacaacctggaggtgatgctggcaacatggatgacttcgaggagttccaggaatatgacgagttctag

SEQ ID NO: 23751 - DNA, 501 bp, Zea mays
  Peptide Sequence Number=SeqID_67126
atgaagatggctcctattagatgcactacacgtaaatcagtgatcccctttttgctttctcgcctggtgaagcgtccactgcgtcacacggtgccagaggccttctcaaagaactattctatcactgagagggatactgccgagtattgctcgttgttcagtggggtagctgatggccttgacctgaagtactaccctcgctgttcgaccggcagtgatggaggtgtgattgtttcacccgttggtgaaggcaatcccaggctaaacaacatggtcaacttggtcaccgtgctcaacaccgagctggaccacgccctggacaaattgggcaaggttcgtgcggaggttgcggaattgtgtggtgagtgcgcagcacgccactatttggatggtggttctcccgcccttgtcgggattcagcaccctgtccgtttgccgccccgtggtcgctttgattatggtacccctgtttgcaggacccagatagatttggatccatag

SEQ ID NO: 23752 - DNA, 822 bp, Zea mays
  Peptide Sequence Number=SeqID_67127
atgaatgcgctgtcccgcgaagggtgccgtcactatgaggtcttcgaccgatctgatgaggatttcgaacgcgagatttacaaggttgaggaccctgtggtgaaggaatccacgggagccctctttgaccagatgtggggcccccatggtcgggaggtggtcagggagcggtctgacacggcgaggggtcaggcggcgcgtgacgagaaagtggatgacttcggggctttgaacaatgcgcggcctgaggcggagtcgaacccggtggcggctgggcccgaggacgctccggcacagccccagaaaccgtcggaggctcccctgatgcccccgcagccactacggccggcggttcaagattttgggcctgcgcacgcaaccgctactgctaattttttggcggcttcgaccgtggatgatgggaatgaatcggataagtctgcgtctaagttttctgattttggtgactctgggagttcggttgagtggacggaagagtcgtcggatgaggacttggattactttgcggccttggatgtggcggcggcggaggcttcgccgcgtgctgcggatgctgaagttgtgcctggtccaagtgttgggcgtaggcggcgaagggcggttgtgaagcgtagagtgagtgaggcggacgacggtcggcttcgtgtgggcagggctggcaggcaggaactgttgtccttgccggccgttgcgagtgtaggtgagggggagctgcgatgtctttttgagggtgaggagctgaggataatgctatttaactatagggagatgggaatcattccgaaggttgaaccgatgtaa

SEQ ID NO: 23753 - DNA, 1425 bp, Zea mays
  Peptide Sequence Number=SeqID_67128
atgccttcccgtggtgggatgctggtgcgaagtcccgccttcgcactggatttgcatagccgtgatcccgccgcattcgtgcgtgaggcggaggatggggcagtgcggattgttggtcggtacgtgccaaggacggagggccagcgtagttgggatattcgcgggtccaacgatcgtttgaacaaggtcttcgagttgaaccgtctgccgtatggcggttatcccgggcaggacgatgtcgaccatcgcgggaagaaaccggcggcagagaccggagacgaccccgcgccggcggccgccctgtcctctaagaagaggaagctaggtactgctatgggaggactgggggtctccgatagctttgctatggagttgatggggacatgcgcggcccccgggggaaggatgtcttcgctcgagctccgggactctttggcgcggatgctgaaggttaccgggagttggtggcctaagaacgttccgatcccccgcgcggccggcgaagacttttttacatctcgcatggttcgtgacttcagagtgtttccttatggatggaatattgctgctgttgtgtcagcagtgatggataaggatcgtcaggaagctacgcaaaagcgtcgggcggtcgtcaggctgcccgaggctaggccgaagagggcgcgggggaccgcgaaggctgccaccaccggcggtagccagccgacgctggcggtgaagtcggccggccctgggtccagcaaggtgccggatgtcgtgaaggcagctggcgccggcggagccaagtctacctcagccgaagctgcgaaggcccgagaattgcctccgccgggaaagcgcattgccgattttggcactgatattagtgtagatgattatctcactggatcgggcgaggggcaactggttgttgttccgcctgcgatggcgacaacggtgtctgccacagtgcttgtggcgaagggtggcgctctcagcgctagcggtgagatttcggcactcgctgccatcaaggacgaggcgggcgctgtgtcccaccggctgaaggaggcgtcgcagcggctaagtcagcaagtgccgcaactggcggagaaggtggccgtgctggagggcgagaggactgagctccggtgtcagcaggcggaggagaggagggaagctaatcaggccctcgccaaggcgcagtctgcgcaggcggaggccaatgtggcgcagatggagggtagccttgctaggcaatgcgccgaggaatgggaggagcggttcaacgctctgcaggcccgcgtggagagggccgaggcttcgacgcgctcggaggctgagcggacgcgcaagcagcttatggactcataccacgagctgggcgcgcggaccgctgacttcgaagtgcctgatcgagagtcaggccttcgctgcctcgagtga

SEQ ID NO: 23754 - DNA, 339 bp, Zea mays
  Peptide Sequence Number=SeqID_67129
atggctcattggagttgctctagcccgcccgagactctctcaccgtcgttctcccctctctgcccgtggattcatggcctcttccccaccattgagttcgccgtggcaccctcttcccctccacccaactccggcgaccccggagccacccaagctcgcgcctgcctcaacttcggcgacttcaccgccgcggagaggagcggtgccgcttcgcgcatgtctgttttccccgacaatgagcagtccgaggttcctgagtgtattgttggagacctccctgagcaacaaccttgtgaaggcaagtgtcctctgacccattatgtcctacatactttatga

SEQ ID NO: 23755 - DNA, 975 bp, Zea mays
  Peptide Sequence Number=SeqID_67130
atggctcgtatcaggtgcactgcacataagtctgtgatcccctttttgccttctcgcctggcggagcgtcacttgtgtcgcacggtgccaggtcagtccagtcagctagagagactgcatcgtcgcctgcacgaggagcaggagcgccgatgccaggagcaggagcaggagcaggaccaggagcagcaggactcttcccccttgcctcagcaagagggcatcctgactgctggaggagaccctgtcggagacggagacgacgacgacgcaagtggtagttcgagccacgacacagagctttcggaggagtcggagccggagggatggatcacaagacccatcactcgtgatgctactcgcgggtgtcacttccacgatgctctcgataccctgctacgtcgggccttcgatcgacacacatggtctatcgagtaccattgtgtagtctaccagcatcgtcgcaggctatacccggaccagtgggaggctacttgcttgttgcgccgtccggacgatgatctctggggcgcagaagccttctcaaagcactattctattactgagagggatactgccgaggcagccatgcaagatgcagcacgacgggcactttctcagtattgctcgttgttcagcgggctagctgatggccttgacctgaagtactaccctcgtcgttcgaccggcagtgctggaagtgtgattgtctcaccagtaggtgagggaaatcccaggctgaacagcatggtcaacttggtcatcgtgctcaacacagagttggaccacgcccttgatgagttgggcaaggttcgggcggaggttgcggaattgtgtgctgagtgcgcagcacaccactatcttgatggtgattctcccacccctgtcgggattcatcacccttaccgttcaccgccccgtggtcgcttcgactatggtaccccagactgtaggacccggatagatttggatccctag

SEQ ID NO: 23756 - DNA, 882 bp, Zea mays
  Peptide Sequence Number=SeqID_67131
atgcagtcacaaaagaatgcgttgctccagtatcaaataagacatttgcagaatgggcattgggagctggctgctggtgagttgctttctttgggaaatggttctcccaatggccgtgttcaccatagtggaaacatgcacgacttcctccttgagctggcgctgcttgattgctctggttggttgctggggaaggaagacaggctgcctggtttctctgacgctggtattgatttcctccttgctggttgttctgacggtactgctgctgctgaggaaattgcctctggtactactgctgctggttctgacgctaatgttggtgctggtgctggtagggaaggtgtggttcatcagctgatagtggaggggatcgaccaatcctctcaagaagcggtactgtctcttggcatccgtgctgaaatcctctggggcataacgcaacatctgcagaaacttgtccctgtactcactaatggacatgggaccttgcttcaaggcgagaaactcctccttcctcactatcatcagtccctcgggcacatggtagcggcagaagctatccctaaactcctctcaagtgatagcttcagggttggcatgtgtggcgaggcacttgtggcatctggacttgcactagaggctggggcggtggtggctgctggtgcacctactgcatggctgctaaggtctaaccaattgcctggactgcttgggtttgcatcaagaacatctgctcaatggtcatcttgggtggcggtgacaaatgctgctgcgaggctgcttcctcttggggtgtctgctgttcagactgagcatgcctcgcacctctgcgcctgttctcagacatctgtagaaatcacacacatatatcaaatctga

SEQ ID NO: 23757 - DNA, 1047 bp, Zea mays
  Peptide Sequence Number=SeqID_67132
atgagattgatggttcttggttttgactctggtaatgccctacacaccaaacccccccatccccaggttgtcagcattgcaaccactgctcaggagaagatgaagccgtggaaggagacttccaggagttccaagactacgacgagttctaggcatggatggctcgtcttagacacaccgcacggaagtctgtcatccccttcttaccctctcgtctcgctgagcgtccgcttcgccgtcccgtggccgcaggagatagagtctgtgaggagctgctcccccgtgcttcccctggaggcgccccctgcaccaccactgggcgccccaacccctggagtggctgctggaggagacccggacgacggaggtggcgacagcagctcgagccacgacaccgatttttctgctgaccaggagccggaaggatgggttgctcgacccatcactcgcaacgctgctcgcgggtgtcacttccatgatgcactcgacaccctgctacgtcgggcacttgaccagcgtacttggtctttcgagtatcgctgtgtggtcttccagcacagttgtggggtctacccggaccgctgggaggcgacctgcttggtgcaccattcggagaatagtctccgaggtgcagaggtctgctcagagcattattccatctctgagcgggactcagctgaggcggccatgcaagatgctgcacggcatgcgcttttgcactactgctcagttttcggcggggtagccgaaggtctcaacctgaagtattacccatgtcgtccatctggcagcacaggaggcgtgattgtctcatctgttggtgaggacaatcctaggttgagcagcacagtcaacctagccgccgtgctgaacacggagctggaccatgcgttagacgagctgagtagggctcgtgctgagatcgccctgctgcgggctgagcgtgcggaatgtcgtcacctagatgacggtttaccccgctcccgtcgggactcagcacccgtaccgctcacctcggcgtggacaccagtcttatggcaatcctga

SEQ ID NO: 23758 - DNA, 231 bp, Zea mays
  Peptide Sequence Number=SeqID_67133
atggcgtgggcggagctgggcgtgtattcgctggactggatagcaccaggtttgggtcactggggcgggttcttgaagctcgcagtaatggcgcctccgcgcccagagtttcgcgccgtcgtagatgtgtctggtgggggagatagggacgagcaaactacagaggattctggggttcagctggtagagagtgctgagcaggagctcgttgaaggcaagttgtgcccttga

SEQ ID NO: 23759 - DNA, 917 bp, Zea mays
  Peptide Sequence Number=SeqID_67134
aggcagaaacaaacgcccacgtgttcgacgcgttcgggcgcgccagtgcacgccccggtgctcggccccgcgcgcgccgtgccgtgccatgccagacccgtgcccacgcccgcgcccgcgcctataaagccgaccgaggcctcgactgtatgcccccgctcgctctcaacctcgccggagcgcaagatcaccggcgatcgctctacgcgcggcgtgccagcggccacccgagatccgaccatcagccaggaatcgaactctacctcgccggagacaccggatcgacgtcgccggacttcacccgaccgccggcgcaggtagaccgagctccacggccggagcacacgccgccgacgaacccgcccgcctgcgcacgtggcccgaccgattccggccattaccgtcgacgagccgtacctcgacgtgaccgccaggacctcccgaagctaatcccgccgttcgccagacctccctcaccgctgggagccggttatacgacacctccccagtatgcggtgcagttgttcgaggagcaccgggtaccccgatgtatggtgaggatgaccttggagcctcatcctttgcagtcgggctggcgtttgttggactccgagtctttcggataccgggctaaagacactattgaggccattgctctacacgagttgaggaccttttgtggctttcgccccttggagctgtccactcatcccattggcttgttccctgctgaaaaggaggatgacccaatgtggaaggatcgagtggagcataccaaggatgtgtgggctctttacccagggcagactgctcacctgacggtgcgatgcatgaatgccatgtaccgtctgcaagcagtgcgaggagaggcaatgtcccagctgatgggaggaccttgtggtagccctgtccactga

SEQ ID NO: 23760 - DNA, 612 bp, Zea mays
  Peptide Sequence Number=SeqID_67135
atggctcgtcttagacacacagcacggaagtcagtcattcctttcttgccctctcgtcttacagagcgtccgattgatcgcccggaggtagagtctatgaggcgttgctcccctgtgcccccgctggagacgccccctacaccaccactgggcgtctcggccgctggagtagctgcaggaggataccccgacaacggagacagtgatgacaacagctcgagccatagcactaacctctcagaggagcaggagccggagggatgggtcgcccgacccatcacccgtgacgccgctcctgaggtggccatgcaggatgtcgcacggcgtgcactttcgcactactgctcggtgctcggtggggtggcctatggtcttgacctgaggtattacccccatcgtccatctggcagctctggaggtgtggttgtctcacttgttggtgaggacaatcctaggttgagcagcacattcaacctagccgccatgctaaacacggagctctacaatgctttagatgagctaagtagggctcgtgctgtgatcgcccagttgcggcagagcgcacacctagtggatggctctcccgcccctgtcaacactcagcacccttag

SEQ ID NO: 23761 - DNA, 210 bp, Zea mays
  Peptide Sequence Number=SeqID_67136
atggagaacaaggctccacaaatcacgctgtcagaacaactgaagatgatggccatgcagagtaaagatcttggcaccggattggctcggactcggtcacggttatgttcgtcgtacccacttggtctacggctggccggggtgatcctcactggtgttagccgcttaatgatcatgcgccacgcgtcttggaagcttagcacgtcgtag

SEQ ID NO: 23762 - DNA, 315 bp, Zea mays
  Peptide Sequence Number=SeqID_67137
atggcgcctccagttgacgtggctggcctgcgccctaggttgggcgatgtggaggctcctccgaagccgaggtcgagtctgtcttccatggccgaggccgagtccgagcccctgggtcgggcgaggcggaggtcgttggtagaggccagggcggagtccgagccctgggattgcaatctcgctgacggagagtacgtgctcatccctgagcaaggagttgtccacgaggaagaccaggagcaagctcccgagactgccatcgaggatctccccgcagccccagctattgaaggcaagccccggttttatgcataa

SEQ ID NO: 23763 - DNA, 366 bp, Zea mays
  Peptide Sequence Number=SeqID_67138
atggacagacatcctccgaccaccatcgccggtgatgcgcacctcgacgtgatcgccaaagaatcccggacctcacccgaccattcaccggagcaacctcaccgccgagccttagactcaaatgaagattacatgctcatccctgagcaaggagctgtccacgaggaagaccaggagcaagctcccgagactgccatcgaggatctccccgcggccctagctattgaaggcaagccccgagataattctgatttggcggtagatgacccttgcgatccgacaaagacgagcaagcccgaggcgccaatgcaatcgctgaaccaactcccagtggttaacgaccttgctaatgcgagatcggcctga

SEQ ID NO: 23764 - DNA, 168 bp, Zea mays
  Peptide Sequence Number=SeqID_67139
atgggaaccgggaagccggatttgaccgagaatttctcatcggaattcagcgtcgccgcggactcgtttcggcggatcgacgagcacctcaccacttctattatgatgggtaacatgacttgtgggtacagggtacaacctctgcagagtgtaaaactggtatactag

SEQ ID NO: 23765 - DNA, 840 bp, Zea mays
  Peptide Sequence Number=SeqID_67140
atgtggagacttggagacgtgcgctatccgggcgagtcgtcgggctcgcgcgggggtgaaaaatccaagcgcgctgtagtcccgtcgctggcgacttcgattcatctcggcgagggggcctcgcggcgcggctcgtcggcggagccgggcaagctgggctcaaagcggccgtgctcgagcgggtccggcggcggaccgctctcggtggttgcaggcaaggaggtggcccgcgaggagaccgagatccaagggtccggtgcaaccgtcggtgtttgtcgccgtcgaaccgccatcgcgaagaagctgagaagatccacggcgccgacgaaggaaggtgcgcagaaacgcaagcgcatctcgtcgccgccatcttcatcggcttccactagctccggtgctccacatccgaagagaaaaagatctagggtttatggttacgccaacacacattccatgcttgtagggttcattgaccagttgaccatggattcggagaacgcaaagctccgaagagcactcgctcatttaatcagagtagtggaggagcgttgtgccgacatcgtcgatgtcgtccacggtgccttccaaccagttagcggaccagtcttgaatgaaatgaatcgtgcattagttcagatcgaggacctcgccaacgaccttgatcagcttgcactggaaaaagactgggagatggagcacatgacccctacaccaattgctgaatcatcacaaacagaggatgagcttctgattgattatgattcagagttaaacaatgacgatatcgtcggctacgacgacggccgtgactactccaccaacgacacctatccctactag

SEQ ID NO: 23766 - DNA, 411 bp, Zea mays
  Peptide Sequence Number=SeqID_67141
atggccatgatgggttcaacattggaaaagatgtacctctgccaggagggagctgcgcagttcgacgaggtcgtggcctgggcgaatttcagcgacgagcacgaaggggcggagcttgagactaatgaaggaggcacgatagtgcttggagaagacgagtttgctgaggtcgacggggctaccagagcacacgcaaggaagcagggccagccggccatggctcacggcaccacgacgacacaagggacatttaacggtgtccatggaagcgagctacagcagagagccaaggcgaggtcgcggccatgcgtgatggcgagcaggaagcaccagggagcagggaggagcaccggtcggacctggggaaagtcgagcgccatgggaaggacctcggccagctgggaggagtag

SEQ ID NO: 23767 - DNA, 735 bp, Zea mays
  Peptide Sequence Number=SeqID_67142
atggacgagtctggtgtgaaaaaggagatcggaagtcagatggaggtttgttgccaaaccagattttgccagaatgaagacggtttccccaagttgctaagagcatgcacagttcgcctcggaataaggagccagccagagtatgatggtcgtgaattcgtcgagcatggcacagagaaagaaactgtcccgtttggatggccaggatgcgtgcattggaagtgcagcagctgcttgaggacgaccccacagtcgcgtacctcactgcatacctgctcaccctggatgcatagtatgatttcttggctcggcaaccatcgtcagatgattgcccaagcagaagatgtagagaagagcaaccatcagctccatgtggatctcaccacagctcaagcccgtgcaactgccttggaaagtcgtgaagtcattgctgttgaagccctgaagcaagccaaggatgagcatgtccagaagttgatggaggcctacttggtaacccataaccaacgtagagccctgcgatccaagagcccgctccatccaacccagttcaacccaggagagctgaagatccccagattcttgaaggctatgaataagcaagagcaccccgagtcctcccaagatcccccgccagagttgtttgagcccttcaacatgaagaagattccagcaccatcccttgaaatcaaggaagaagctgcaagcaccccgccagcaccgccgccctcttag

SEQ ID NO: 23768 - DNA, 87 bp, Zea mays
  Peptide Sequence Number=SeqID_67143
atggcgggcggaaaagagctcgccggagctaatgaggggtgtctggccggcgaagattcaaagggtaggaagcggggttgggtgtga

SEQ ID NO: 23769 - DNA, 624 bp, Zea mays
  Peptide Sequence Number=SeqID_67144
atggtgctgccattggtgccttctcttcttctctgctcggtgagctacaatgcaatcctcctgggtgatggccaggttgaccaactcattgaagctatcagcccggacagtgttgagtcgttctcgcagcttggtgttaagacccctgcgaaagcgatctctcttcttttcatcagaatcagcatgtaccgtgcgggttccttgattaagcgccagaaactcattcagcttgcgatccagaatgccagctgggatgtggtgtcctctgaaagcagtcttgaattcctcccaagacacttcacgatcagcggggagcatggcacggaagtggtcccaccaagtccgagaagggccgcgaagctactgcgcggcgaagcgagccttggcttcatcagggcagtctcccgtgaggaggggaaacttggactcaacgacgcggagccacacgtcggcgtccaatggatcctttgccttggtgaacaagggtggctgcgtactcagaaactcctggttcgaaatgaagataacatggtgacaaacatcccacagatttccaaaagttcacagggttacattaggggaaaaggtgcccgtaaggctagtccaaaatctgacattaactaa

SEQ ID NO: 23770 - DNA, 231 bp, Zea mays
  Peptide Sequence Number=SeqID_67145
atggaaggaaagccatcgcgagaaaggaagtcagaactgaaacgagtgtctcctccactagcgggggtgggtgaattcatctgcggaagggaatcaaagtacaaggggtcaagcagtctcattagctgcgagaagcagatgattcgaatcgagttttatccttgcaagtggggttctggtggttacaagtacactggatttttattatccattttgggtctggttttgtaa

SEQ ID NO: 23771 - DNA, 621 bp, Zea mays
  Peptide Sequence Number=SeqID_67146
atgggaaagatgataattcaaaaggtaggcataagaaaagcatcatggaaggatccagtgattacaaaggtacaggaggtgcaagataagcatcatggtaaagatcgagggatgacaagggttaagggatggaaaagaggaggtttcaaaggatatgttcaagataagcatgagggcaagggcatagatatcacgagggttctaaaggtaataatggacaaggatgtaggagaggaggtggaagagaggggatttttaaagagtagaaataaatatgagtatcaaggcaagatgctggacgacaaggtgagggtgatagaaaataaaaacacctcaagggatagaattaacacaaaacttgtaaggcgacaagaagtgaatagaaatcaagggagagatatagaagtgtcaagggtaaaggtgataataataataaagagcataacaaaggatggagttaaggcaagactcgcgaagtggcaaaatggagaaaacaatcacaggtatcttcggactcaagtcggcaccacagtagaccagaataatacgaaggttgatacagcgccgaaggaaccattatatcctaaaggaaataatgcttcgaaggacgaagggctttaa

SEQ ID NO: 23772 - DNA, 663 bp, Zea mays
  Peptide Sequence Number=SeqID_67147
atggagcttgtgcgcgggggtggggcctcggccggtggctacgggcgctcgacgacggccaccacagccgggctagacgccgcacacgctagggatagggggtcggaaccgcgccgttggccgccatggctgaccagagactactgctgtcgtgctcaaggtaaagggcggccagatctcgaggggcacgatgagagggaggttgggcacgccctggagccaggcaggccaggcttggccgcaacattagaggaggtagccagggggcgagcctgggcagaggtgccgcgcccacgactggtgcgcgagccgggcttggccgcgaccttggggaagaagggcgcctgggagctgggctgcgcactggccggtggggaggccgggcaggggcgagccgccgcgcagggcctcctggacgcgacgacgggcggggctgccggacttggccgcacaacggagggaaagggatctacgcgaggtatcgccgagagggaacgaacctctcggccaggggacagagaggactgctcgccggggaaggagaatgacgcgacacggggctgcagggagggtccgtcgagggggagagaggatggggaagggaagagaggggagaggactcaccgggaaccgccatgtggagggacgacagcttctgcgtga

SEQ ID NO: 23773 - DNA, 210 bp, Zea mays
  Peptide Sequence Number=SeqID_67148
atggccacctgcctcgacctctcttatagcagggctatcagcacggcactggcagttgaagccaaatatgcaggcccaggaaaatcaaaaggctatgaaggtgacaggcccaaccaggggcctgagaagagacaaaggctgtacaaggggtcaagcagtctcattagctgcgagaagcagacgattcgaatcgagttttatccttgcaag

SEQ ID NO: 23774 - DNA, 414 bp, Zea mays
  Peptide Sequence Number=SeqID_67149
atgcatatatcttacacattgcattcattagattgtaatctcgctgatggagagtacgtgctcatccccgagcaaggaaccgtccaagaggaggaccaggagcaagctcccgaggctgctatcgaggatctccctgcagccccagctattgaaggcaagccctgctatggtgggtacaagtgcggtcactgcacggcggcagccggggtcagtggagcattgtatgccaaggcggtgaggcctggacgtgaacggggaatcaatggggatggttgtcatgtgcggggttggagtaccctgacatgccgtgcgattcaagaaatggttgatggtgtgacttggcctaccaccctgccaccgggttggacggtcgagtgggatgttgctccggcaggagaggagcacgaggagtag

SEQ ID NO: 23775 - DNA, 141 bp, Zea mays
  Peptide Sequence Number=SeqID_67150
atgaatgtattgtcagctttgaaactcgatgaaccaattaagaaagtactgcttatgaagatggagaagcatggaaggactattcctaaatcaaaggcaaaagaagttggaagagttttgatttgcatgaaggataggtga

SEQ ID NO: 23776 - DNA, 315 bp, Zea mays
  Peptide Sequence Number=SeqID_67151
atggcagcggtggctctaatggcgaggagatgttacaccatctcttcactcccattgcgtggtggcctttctggtattggtccgaccgaggcaaagcttatctatgacgaggcatgtggccagttaaaagagaacgaggaggaaatagaagttgaagaagcgaggactacaccaccaccacttgaagaacctcagacaggaaactacttttactttgatatctgtggagcagagcctgactcacctgtcacacaagacaagccccggtgcatttgccacctccttgctattttaaaatctttctcacttacttga

SEQ ID NO: 23777 - DNA, 3408 bp, Zea mays
  Peptide Sequence Number=SeqID_67152
atggccgctagtggcctcggtctctccacctccttcctccccggccacgacaccctcctccggcgccggcgccggcggccggcgggccacgccgccgcgtcgttccggccggtgacggcggagctcggcggcgtcgcgacggagctgggccgccagctggtggaggcggtgggcgtggggctcccctgcaccgtcatgcagtgcggcgacgtcatctaccgcagcacgctcccccggaacgacgggctcaccatcacggcccccggcctcacgctcgcgctcgctaccgtgtcgtacctctggtccacgccaggcgtcgcgccggggttcttcgacatgttcgtcctcgccttcgccgaacgcctcttccgccctaccttccgcaaggatgacttggtatttgggaagaagctcggggagggcgcattcggggtcgtgtgtaaggcttcactggcgaaccccgaagcggcgaagaaggcattcccttcactacgaactgatagcaacctcatacaatttaatcgccaactgaaaagatgtgattatgacttacaagcttggaggaatctggtggagccacgagcgagtgctgagctccggaggggctttgacatcatggatttagacggtggtatcggatgggaactcctcacctcgatggtccggtacaaagcacggcagaggaccagtgctaaggccgcattggcacacccgtacttcaaccgtgaagggctccttggcctctccgtcatgcaaaacgtacggctgcaactgttccgcgcaacccagaaggactacagtgaagcagcgcggtgggttatcggcctcatggcaaggtcaggaactgaagatgtgggaggctttacagaagcacagcttcaagagcttagggcaactctgcgggatgagcccctcgtctcccaccccgcgtccagcccccagctcctcgtctcccacgctcaacccctcgtctcccacgcccaactcctcgtctcccctccccagcccagccacctccacccaggacgccaacggccaccaccaccaccccatctcgccggacttcatcacgaaaccggcgaccaccttcccaaacctcccatcccttccaccctctggctcttctgtgcacacagtgcacaccgttttggctccccagggtgggcgggcaaagtctcagaggtggaaggacgccagccctgccccttcgagttccggcggctctgggacggagagctagacgtgctgcatctgatcctcgtcgatggtccccaaaggatctccgagaagaatacggagaagacagcgaggtcgcaccgtgcgcgtcaaagtccccgcgtaccggtgtggcagcgcttaacaaggatgcaaggatctagttctcaaggaggtgatttccagatgtccaggcgcaaggaatcagtgtggaagcgaatctctccgttgcagtcggccaccggggacgaatatcattcacccctgctgttggcgtcgggctccggggaggctgttccaccagttcatcgcagaaagaggaagagacgtcgagcgaagcgttgtcagggggcggcaatgcaacagttatcaccaacttctgtttcttccgacgatgctgttgctctgacagctttggaggagactacaacggtagagcagaaatatgatcagcaaggcaggcctaagttctctcctttatgtgtgctggaattctcggcggagatggcgcgtgaggatgcagctttgcggaaggctctgtttgtcacaatagttggtactaggccagaggtcctaggggctgagatcatcaatgaagttgctcgaagttttaacatcgatgggggttctatgtccattcaccaggcaatgcccgaggatttcattctgttcttgccggatgaacgaacagcttcaagggtattcaatgatggaagtattttcagaggaccacaatttgaccttgtgtttaagaggtggacgcgttgtgcaaatgcgtctgcgacatcgctcccgaccttgattgatgtggagatcaggggcattccggcccatgcatggtctcgttctacagcagaatttctgctgcgagattcgtgcatcatttccgagctgcacccagcaacagcattgaagactgacctatcgtccttcatgttgaaggcgtggtgtctggatccgaggaatctacatcgtgacatgactctcatcatttcggagccagggcctgcggcaggagaaaagcgttgtttatcctacaagatcagcctgaaggtcacccctgtcgatgcctcggaaaaagctattgttattcccactccgctgagcgacaatgacccccctgatggtgacggtgattccttcttccctgggtcgccacagagacgttcaatgcacagtgctggtgggcgacgctcagtccactctcgtttgggcccgcaactgccttctcgacgtatggaaggaggtcaacgggaagccggagaaccatccttgaagatgcacagctctgtggagtctgctttggggacaacatctgatccgtgcatgcgcaggaattgtttgctgggcggatccagcctgggactgcttgctggggctactgaacagactgctggactggtttccaaggaaacaattatgctggacagtgtatgggatggcagactcgaagagactcaatctgaggaggggcagctggagcaggacagtttacgggatggcagacttgaagaaactcactctgaggatggacagctggagcaggtcgcattactttccccccaacaatctgctggtccgctgaaatctaatgggcctctacagcaggatgagggcaccctgggtccggtgacccactctgacgtagggccgctggggcaggtcacattaatttccccccaacattctgttgggccgctggaaactgataggcctgtctcgccccagcgtcagagctgcagaatgcatccaaatgtctacgggacatcacttaaagtttatagtagaagaagacaacgtgtttcagttggacaggttgacgcgccagaggacgtatctccttccaaacagcagttctttgagatggtgtccaagaaaattggttgtttacttcctactccaaaagctaagaagaggagagaacctgccatcccttcgcagggactccgtcgtagtcgacgggtggctggtctaggcgctgagcacattccacagatccccagggccaagattttggtgatgaagactatccataatacttcagacaagaatcagctcaacagtgaggatctggagacttatgccaagctgttctgccatcctctttcctattcacagattcaagcccttgcagcacttttcggttgggcagtcccagatgacttgggtggagcggccaccatggtctgctaa

SEQ ID NO: 23778 - DNA, 198 bp, Zea mays
  Peptide Sequence Number=SeqID_67153
atgtcgcgggatagtccttggagtgctgttcggcgtgttcaccggagcactccgcacgtcctcagcacttacacgggcgacgccggtggccggagttgggttgattcctcgccgaagtcatgggtcgccgcaacttcgccctgcttcgtgggggcatgctcctgcagcataatcgctgcctcgctgaaactcatttaa

SEQ ID NO: 23779 - DNA, 1515 bp, Zea mays
  Peptide Sequence Number=SeqID_67154
atggacaccgtcggcgtccccgtggtggccgttgcgaatgggatcggggaggtggagcgcaaggtgcagaagagctactgggaggagcactccaagtgcctcactgtcgagtccatgatgctcgactcccgcgccgccgacctcgacaaggaagagcgacccgagatcctgtctttgcttccctcttacaaagggaaatcagttctagaactcggtgctggaattggacgctttactggagatctggcaaaagaagctgggcacgttctggcactagactttattgaaagtgtgattaagaagaaccaaagcataaatgggcatcacaagaacataaccttcaggtgtgccgatgtgacatctaacgacttgaagattgaagataactctgttgatctgatattttcaaactggctattaatgtatctttcagatgaggaggtccaaaagcttgtggggaaaatggtatttaaagagggccattcatttgatcaagatggaggttcgtttgaactttctctagtgacctgtaaatgcattggggcttatgtcaaaaacaagaagaatcaaaaccagatatgctggttatgggaaaaggtaaaatcaacagaagacagagattttcaaagattcctggacaacgtgcaatacaaaacaagtgggatattacgttatgagcgtgtctttggtgaaggttttgtgagcactggtggaatcgagactacaaaggaatttgtgggcatgctcgatcttaaaccgggccagaaagtacttgatgtcggatgtggaattggaggcggcgacttttacatggctgcaaactatgatgtccatgttcttggtattgatctttcggtgaacatggtttcatttgcaattgaacgtgccattggacgcaagtgctctgttgaattcgaagttgctgattgcaccacaaaggattacccagaaaatagttttgacgtcatctacagccgtgacaccatccttcacatacaagacaagcctgctctgttcagaagcttcttcaaatggctaaagcccggcggcaaagtcctaatcagcgactactgtaagaatcctggaaaaccatcagaagaatttgctgcgtacattaagcagagaggctatgaccttcacgacgtgaaggcttatggacagatgctgaaggatgctggttttcataatgtcatcgcggaagatcgcactgagcaggttatcaccctgtctggaaatcatcctcttgttgttgagcggttccttttcttgtatattataatgctagctgaaggaatcaactatgccatggatattttacccatttccatatgctttttcccccagttcttgaatgttctacagagggagataggtgaagttgaaaagaacaaagacgctttcctggcagacttcacccaggaggactatgacgacattgtgaatggctggaacgcgaagctgaaacggagctctgccggcgagcagaggtgggggttgttcattgccaccaagtga

SEQ ID NO: 23780 - DNA, 169 bp, Zea mays
  Peptide Sequence Number=SeqID_67155
accagagaacagctccggcgcccatgcctcgacagtgcagagccgctgcgtgtcggtctacgtggccagcatgggcgatctggcagaagggtacgatggggtatggcgaggggcgccgtccgcatgtgtcggcgtttcgaccccggggggtccttggaccgacgagtaa

SEQ ID NO: 23781 - DNA, 1668 bp, Zea mays
  Peptide Sequence Number=SeqID_67156
atggcgtcgatgcagagctggcgcaaggcctacggcgccatcaaggacaccacaaccgttagcctcgccaacctcaactcggacttcaaggatctggatgtggcgatcgtgaaggcgactaatcacgtggagtgcccacccaaggagcgacacctgcgaaaggttgttgcggcgacatccatcgccaggcctagggcggatgtcgcctactgcatccacgcgcttgcccgccgtcttgccaagacccgcaactggattgttgctctgaaagcacttgtagtaatccatagacttcttcgtgagggtgatcctacatttcgagaagagcttcttaactttacacaaagggggcgtattctgcaactttcaaactttaaggatgactccagtccaattgcttgggattgttctgcctgggtgcgcacatatggtttgtttttggaagaaaggttggagtgcttcagagttctgaagtatgatgttgaagctgagcgtttgtccaaacaaggtcaaggtcctgaaaagggtcacagtagaaccagagagttggattcacaggatctgttagagcagctgccagcattgcagcagttactataccgactcgttggatgtcggcctgaaggagctgcaaataataactacctggtgcaatacgctttagctttggtgctaaaagaaagctttaaaatttattgtgcgataaatgatggaattatcaaccttgttgataagttttttgagatgccaagacatgaagcacataaagctcttgaaatatacagaagggctggccaacaggctggaaatctatctgatttctacgagaattgccggggtttagaacttgcgaggaattttcagtttcccactctgagggaggaacttcctgagaggcttcttcttacatacaaacctgaagaatcggaggacattcctgagcctgcttctgttgaagaggaaaatgcaccagttgaagagcctgttctggtaccacctgttactgaagttgtttcacctcccaagaccgaggtggccgatactggtgacttactgggcttagatgatccaaatcctgctgtatcagctatagaggaaagcaatgctcttgccttggctattgttccaacagatggggcttccacaactggtaacactgcatttcaagataaggggtttgatcctacaggatgggaactcgcccttgttaccgcaccgagcaacacgacttcatctgcgtctgtcggtcaattgccatatgttctggagacaacttatgccctgtgccaggtttttccgtggatcaagggtggtggatttgacaagctcattttggacagcctttatgatgacggggcctacaggcagaggcaacagcaacaggtgtatggttcagcagtgcctaatccattcatgacaaatgatcctttcgtgatgtcaaaccaagttgctcccccaccatcagttcaaatggctgccatgtctcagcagcatcagcagatccccacgatgatgcaaccaaatccttttggaccacctatgcagccacaggtaggcatgggcccagcaacaaacaatccctttctggatgctggattcggggcattcccagtggcgaacaatagccatcagcaacacaacccatttggcagtgcccaacttctgtag

SEQ ID NO: 23782 - DNA, 239 bp, Zea mays
  Peptide Sequence Number=SeqID_67157
atggaagacagactcgacctcggcttcggaggagcctccacgtcgcccgacctaaggccgcaggccagccacgtcaacaaggaagcgccatcatcaccctaccccgagccgacttcggttcgcagaagaaacagaaccggcgtcccatcttggctagctcctgccagaataaagccaatgaatgggcgccttcgcaagcccttgtgtgaacgaacggcaaacttctccagctctctaac

SEQ ID NO: 23783 - DNA, 277 bp, Zea mays
  Peptide Sequence Number=SeqID_67158
atggcgcttcctgttgacgtggctggcctgcgccctaggtcgggcgacgtggaggctcctccgaagccgaggtcgagtctgtcttccatggccgaggccgagcccgagcccctgggtcgggcgaggcggaggtcgttcggcagaggccagggcagagtccgagccctggggtcgggcgaagcggagcccgagtccgagcccagagtcgggtgcaccgtacttcgtcgacttccggggcttagcttcgagtctgatccctggtcgagtgttagccaag

SEQ ID NO: 23784 - DNA, 945 bp, Zea mays
  Peptide Sequence Number=SeqID_67159
atggataaattgaaatgtgcaaaagaggaatacaaagttgaagcaaacaagataagacaagcaactactgaaatagctattgacctcagcactgctcaagtgaagatagaggatctcaaagatgaagtaaaccacgtggcaaactactatgccctcggcaacatatgctgtaatgaattgttgaagaccttttcttctgccggagctacctctcgggagaagaattttgcagatggtgaagggttgatgtggtgggtactcagtgaaactcgtgcctacaaaagcattctctcagcgcgagaggactattgcgcatggattggcactcgaagcaccgctttggttctgctgaatgctgggtgcaatcacgtgaggacctgcactgatcttgactttaaagtttttgtcgaccacatccgaaggaggtttctcacgtcccatgacactctcagggccctcactagtccgcctcgccatcaccgatgtcgccgtcatgctctgcactctccatgtcgagaaggtttaggtttctctcctctcaatcgatactcccaacctcggacgggagacatagtcacaaatcacccgagggcaacctccgatgggagacgcagtcatgactcgcccaaggccatccccggccaggagacgcaatcacgactcgtccgaggccagcctcgggcaggagacatagtcaccactcgccctagggtaggagacatgttaatgactcgccccatgccaaccctaggcagaagatgcagtcacgactcgctcgaggccaacctcgggcgggagatggtcacgactcgcctaaggccaaccccggacaggacatgcagtcacgactcagtcaaagccaacttcggctgggagacacagtcacaactcacccgagaccaatcctgggcgggagacagtcatgactcgcccaaggccatttaa

SEQ ID NO: 23785 - DNA, 249 bp, Zea mays
  Peptide Sequence Number=SeqID_67160
atgaggtgcatgagcataaggagccctcaattggtgacaacaggtgctctcactccacactacctaaaaagaatgaatctcatggcattcagaccaaggtatgttgtgatcccctctaattctgaggacactagaatgtgcaagggggagaatttgtgcattaaagctcacctcgactgttgggactatgcttcgtcgccgaaggtcctgcagggagaaacagcttcggctgaagctgtccgcatgtga

SEQ ID NO: 23786 - DNA, 162 bp, Zea mays
  Peptide Sequence Number=SeqID_67161
atggaggccgagctcgcggttgtagaagtcgtcgcggcattccacgagggagttggcgaggttgagtgcctcgacgagcttagactcaaggagacctctggggcagaggcgaataggactgcgcagatgagaagcaaatgggccgacacggggaggatatga

SEQ ID NO: 23787 - DNA, 1068 bp, Zea mays
  Peptide Sequence Number=SeqID_67162
atgattcttcgggccttctcgactgcgtcggtgacagaaccctatggacgagtaagagtgcgcgctcggatcttgacagttgaagggagcagcaacaccctcggcatcaactacaccttcggtgaggaatctggctcgagcagacggctcggtcggccaccccgaggcctcggtcggctgtcccccgaagtcatgagcccggcccgtggcctcggcaactcaattccggcgtcggtcccgctagtggacgacccggccaggctctggccgaccaagtcttcttttcgagccaactctgtctctgttcgagctgacaccgctacccccgactttggctcatcgaagagcgaccgaggggttcctttaactaagcaagagaagcctcggacagcaaggtcgaccgagccgagggactcctacgcctctgggatacggatacctcactcgtcacctttgcacgaggcaactcacgcttggtacgaacaaccccacacgattggggggcctgcggagcaacagaagaccgacgaacggctcgccgtcgcccgctccagcagcgtcgacgacgacgacttctgctccggggggccgaacagcagcaacgatgacctcagggcggatgctgctgccatgaggccctcgcccatgccctcactcgagaggcaaggacgagcagaaggccgtagagttggaggtcagtccgtgggcggcaccggctatctcgtcggtggaggaacctcttccagctgccgtggcgaaaggcggcgccgggagcgactccgaagccactcgggtcagagagccaggcacgcggcagctgccagcgccacgaacggcgaacgcccttccccccgatcactgagggaaggagcgggccaccgcccacgcagggaccgaccccaactcggcacactcccctccccagcactgatgataaaaatccttgaagctgaggaggggcagagggcgcagcccggcttgcttttccccgccatcgaactggaggtcaccgccttgggtgaccatcggcgagggggtgcagccgggctgcatgatgaaaatccttga

SEQ ID NO: 23788 - DNA, 969 bp, Zea mays
  Peptide Sequence Number=SeqID_67163
atggcgcacgggctggacgcgctccagcgcagcccgcacgcttgcctgtcggcggccttcctgcagcaggcggcggcgctgctgcggtccctgcactcgcagctgctgcacctggtgcagcgcctccacctgccgcccggcgagagttggctggacgagtacatggacgagacatcccgcctgtgggacgcctgccagctcgcccgcgcgggcgccgcggggctcgacacctactgcgccgccgccgcccgcgtcgcccccgcgctccgcgactggctctacggcggcagcggcggctcccacgccgcggcctccgcgcggcacctccagcgcgccatcaccgcgcccaggcgccacgccgccgcgctccaccaggacaaccgcgcgctcgccgacgccaggctcgacccggcctcgctcctgctcgacgaccgctccccgctcgagttcaagctcaacgccttcaacggcttccgcggcgtcctctacgcgctgcgcaatgccacctccttcctcctgatcctcctcatctccggcaccgtcacctgcctccccgacctcacagccggctgctgctctgcgtctgccaaccaccaccagctccgcgcctcggcgggcggcggctacgtcgcctccatcgcccgcctgcgccagcgcgtcgtcgaggagatggaggaatgcatcatcgctggggaccaccgctcgcactcggccgggatcatgatgcacgagttccgccaggccagggccgccatcgacggcctcaagcaggacttcgacagggcagtcgccatgggcggctaccgcgacgacatcagcgacagccttgtccagagagcagagatcatcaatggctgggttgggatgctgcgatcaggcgccgaggccgtcatcgctgagctcgatgacttcttcgacgagatcgtcgagggcaggaagatgctctccgacctctgcagccatcgctag

SEQ ID NO: 23789 - DNA, 4755 bp, Zea mays
  Peptide Sequence Number=SeqID_67164
atgtatggaggcccccatcctcaccgttttcccttttgcctgacacaacacaacagggaggctgcaccagaggctaatggttaccatcacagcccccatggtgtggaccagagtcaggttgtggatgctgataagcatataaaccatcattccacagacgacaatgctccctccagcgcttcaggccacagacatggtggtatcagccgtcatgcatccacatcttctgttgatgaccgctccatcaagtctggtgacgattctgatggggccgagagtaccaatggcagaagcagtaacacggagatctcgtttctagaaaatgataccgtctggataccacctcaagcggcagataaggaggatgaggcccagagttttgctacaagcattgcttatgacgacgacgatgacgattatagtgatgggataaagtggggccagtcaagtttcccatcccctggtaagcagcatgacgccggcactagcaatcatagggaggtacgagaaaaagcgatgctagaagctatgaatggccagctgaagatacttgtcagtcggtttctcgcatctgttggcattccgtcttcgaacgaggaggctagcgatagctggcttgacattgtcacctccctgtcatgggaagcagcgctacttatcaaacctgatggtagcatgggaaaggaaatggaccctggctcttacatcaaagtcaaatgcatagcatctggtactcgccggcaaagtgaggtgatcaaagggttagtattcaagaagaacgctgctcataagcacatgccgacaaattgccacaatcctaggcttctacttgtcaaaggagtccttgggcattctgatgtcggtttgtcgtcgtttaattcaatgggtcaggaaaaggacctgttggagagagctatcggtaaaataatggagatatgcagtcccaatgttgttctggtcgagaaaactgtttcacgaaacattcaagaacttcttctgaaagaaggtgtcactctaatttttgatttgaaactcaaccggctacaaagaattgcgcgctgtactggctctcccataatatcgttttcagaagttttggataaaccgaagctgaagcaatgtgactactttcatatcggaaaatttaccgaggagcacaacaatgccagtgagggtggaaagatgacatctaaaacattaatgttcttggaaggctttccatgtccactcggttgcacgatcttgctaaaaggagcaaacagtgaagaattgaagaaggtcaaacaagtaatgcattttacagtctttgcagcatatcacttgatccttgaaacatctttctttgaagatcaaagggtttttctgaatgatagtactacaaaagaaacttctgctactgctacagaagggacttatggtgttgctgctcttagtgggcctattcctaactttccttcacatgatgattctccggcacttagactgttccatgccacttctaatagctatgctgatgtgaacaaacctttgatatctccaagaaatgtggataaattcagtgcagtatccagcagctcttcaaatgaccttgaacaaggtgcaaatgtcaggtccaataatgccgagaggttaacattaccagtccaagggccactaaggaaattgttcgctgacatgttatgtcaccagaatatttacttacccgttacatcattgcaagaggcaaatgataacaggaaggaagtcagggttgaatccagtcaagaaactgttagtaatggtttccataggccaaagacaggagagtctgtgatttccattgaaaatggggagtccataaatgatgcccagacacaagaaattactcaagcaataatgccaactggttcttctgtaagtgataaggatgcagaatcacctgttatgggagacaatggggcacatagtactacaagtatcattatcaaagagaagcatgctgacggcgatcaagctgatgatgcacttgattctcacagcatactgattttgatgtctagccagtgcacagaaaagcaggttatctgtgaacaaagccatttaacccgtataaaatactatgggagttttgatgtgtccttggggcgatatttgcaagacattctacagaatcagaaactgagttgctcttcatgtggagagcctccagagtcgcacatgtactcctacacgcaccgcaatggaaatttgaccgttctagtgaaacgtctggtgcccaaacactatttgcctggcgaatctgaaggaaaaatatggatgtggactagatgctcaagatgtgatcatgaacatggggtatccaaaccaactccaagagtactaatatcagctgaagcacgcaacctctcgtttgggaaatttctggagctcagtttttcaagccactctgcagcaagaaggctgggctctaaagttgctatgttccggtactcacctgttgaaatttacactacctgcaaaccacaacctactctccaattcgtcaaccccatcagacaggattggtttgaaggacaaaggagaaatgttcatgctaaaagtatggcacttttctctggggttgcaagatttctacagaacttgaagaatgaacatcctgatgcaataacattagcagtcaattgtggcctcacactccctgttaaggacttcactgaactagaagagttgttgataaaagaaaaggcccagtttgagagttctttggacaaggccactgacgaaaatgggaaaccattcgggtctgtgcatggagtattgaatataaattggtactatcaggatcttctacttaagctttacatttgggaccgccgtctatatcaactattctattgcaaatctgtccaactagaaagttgttctaattacaagaatcctgctggtactgttgatgggaactgtgatgataactttggtgttgataagaaaatcggtgaaattacatctgatgaaattacggcagctttgggggtatccagtaccatggagtctgcaagtaacaaacttgatcatcaatcaggtgacaccacagcactcttacttcataaaagccaggaagctgggcactcggaatttccttgcaatggaggtagtaaagctgaagaatcttctattgctcatggtcaaataaaggtagatggcacaacagaaaccacaaatgatccttgttttgaaatatccaatgatatggaggtccaggccaatcttacagtagcagatccaatacccatggaacaggagcgttgtagcactccccaacaattcaaatatccttattgggatgacagggagaggtggatttggaattcattttctgagtctcaaatggcttacagggatgacattgaaattggatatttgggcaaatttgaactcattaacaattatttgccacattatctttctcccttgtttgaacaacatgatgattcatactctccgcagttcgcggtaggtccaggtagtaatattttgtgcataatggaagatgagatatccagcataatagctcgtgctcttgccatatctgatgaacgccaccatttgatagatttaaaattcgagaacggaatggattattccaaaggagagtatgctaaagcaatagagaaatcttttagttttctgtctgaaagttctttcagctcatcaccatggtcatctacagattctgaagcaagcttatcgtctctgtcttcattttcatctgatgacttttctggttatgatagctcatctttattgtccccaatgcatccagaaatgactgtgaatgggaaagtaactctcaaagacaaatattcagttactgttgtatatgacaatcaattctttgcactccgaaaaaagtgttgcccatccgagcttgcatatattacttctttaagccgctgcaagaagtggaatgctcaaggtggaaagagcaaggcctattttgcaaagacgacggatgacaggttcatcattaagcaaatcaagaaaacagagtttgagtcatttattaaatttgcacctgattactttaagcatgtttaccattctctggacactggaagccaaacttgtctcgccaaaatattaggaatctatcaggttaagcaaattaagcatggtaaagaggtaaagattgacttgatggtgatggaaaatcttctctttggccacaatatttcacgaatttatgacctcaaaggtgctacattttcgcgacgcatcactgactcaaatgatcatgatactgtttacctggatcaaaattatgttgaggacatggggttttctccaatctatattggtggaagaacaaagcatcttttgcagcgtgcaatctggaatgacacggcttttctcacttcggtgaatgtcatggactattctctacttgtgggagtggacaaagagaagcatgaacttgtgtttggcatcattgattatctgaggcaatatacttgggacaaacaactggagacatgggtgaagacttctctggtagtacccaaaaatgttttaccaactgtaatttcccccaaggaatacaaaaaaaggtttaggaagttcatggcgaagtactttctgtcagttccagacacatggagtcctgataatccgtctaagccatgcaaatcccttggtcagagcaatcgcaagttggcggaagtccagaatggtgataacctgtcagagcacccaaatgaagttgaggggtgtgcctaa

SEQ ID NO: 23790 - DNA, 453 bp, Zea mays
  Peptide Sequence Number=SeqID_67165
atgggcaagaacaacaagcgcaagcgtgagccgactcctccatcggaggattttggtgactcggagtactcagaggaggagttctcctctgagtctgaggggtctccggctcccatccccctgcgtgagtcgtctgacgactcagacgactcccaggggctcgcggcggaggtctggacttacatccgggtcgtcgagcgctccgggctcgctggctcggatgagtcggagtactcctcggacaaggaggactcgtccgaggagggcggtggcagcgatggcgatgacgacgatgatggcgacgacgacgacgacgaaggcggtggcagcgacgacggtgacggcggcggcaggggcagcagcggtggtggcaagggtgacgacggcggcagcagcaggggcggcagcggtggcggcggcaacagcaagggcagcaacaaggccagtggctaa

SEQ ID NO: 23791 - DNA, 291 bp, Zea mays
  Peptide Sequence Number=SeqID_67166
atgaccgactcgcctcgtacccacgtcgacgagcgtcggtcggctcgcgactgcgaccatgggcggggacaacaggttggggtggaagaacagggcgaaggcatggaagacgaatgggatatccgacgacggcgaaaacgatggtgcgcgtatgatgtgaaatatcctcgtggacgtgcaatagctactgcacgagtcggtgtcgaggcttatgtcggacgaatacagggaggaggcgcctgctcctacaccctttaccgagaatggggtggcatggaggtggaggcatga

SEQ ID NO: 23792 - DNA, 189 bp, Zea mays
  Peptide Sequence Number=SeqID_67167
atgaagaaacaccgtcgcgcggtcatctcctggggtcgccccaaacgctgggagtttggggagatgaaggcgtccgccgtcgtgggcgctcgagccaccgtgtctgggcacggtttggagaagacacacggttaccgttcatttacaaaacaagggtcaagattagatcgctcagggggctggctgtaa

SEQ ID NO: 23793 - DNA, 399 bp, Zea mays
  Peptide Sequence Number=SeqID_67168
atggccgtggggcccgatagcgaagaaccgacgggctcaccggtggttttcgccaccatgagctatgcgctgccgcctgggttccgtccgaggacaactgatcaagcaaaggatggaggcaagaagagctttgaggtaccgagtgcacgggagaaggtcatggaggccgaggaacccaaagccaagggcgaatcagaactgtgtctcccaccgaggttgcccttgaaagaatcagaaatgcgtctcccgccgaggttggcctcgggcgaatcggaacgtcacgagcaggttccctgggctgtgcagactgcaaaagggaaatgggccacgatggaaagaaggggagttgggccgtggaagaggaagggagagtgggttgagaccgaggtggcggcctag

SEQ ID NO: 23794 - DNA, 297 bp, Zea mays
  Peptide Sequence Number=SeqID_67169
atgcaggcggcatgcaaccgcgccaagtgggcgcgcccctccgacttccaacgcacccagcgcgggggcccacgcccacgcgtcatgcaaccggcatgtcggtcgctacgtgcaagcaactacaccgccactcgcaccactgccatgcctcctcgactgcggaatcagtaccgcgactcgaggcaaccctgcgtgcgacccagcagtgccagccaggcgcgacgggaccgggaaagggggataccccgaaaaggatccttctccgtgaaggaaacaggctccgagcccccctactga

SEQ ID NO: 23795 - DNA, 1020 bp, Zea mays
  Peptide Sequence Number=SeqID_67170
atggcgcagtacaggcagcagtacggcgtcggcttttccgactcccgcggccaccatcaccaggtgctcccggactggcaccggccccaccacgcctccgccaagtcctcctcacggatccgccgccccgggaagcctgcgccgcgccgccgctcgccggctgctgctgccgccgtcgccgccgctctactcctcgccgccgtcttcctcctttcgcgccgcatctcgcgcagccccgcagagatcagccaagattcgagcgctagggagacgttgccggactggaaccagagcaagagctggaaggagctcaagttcgggcacggcggaggtggccgcagcgcgcgggactccaggtactgggaccgggacgataggcgccgcgacgaggactacacagaggacgaaaaggagaagatctcgggtggaagtgggacctccggcgatgctggcggcagcagcgataaaggtaccacctctgagggaggtggggaggataaaggtttgactaccggcagcgatgctaaggatgttccagaggtgtctgaaggtgggaaaggtgggaccttgtacaatgagggtggcaggaaggagctggagcagtacgaggctgcagccatgggagccacaggaacaggggtgaaggaggttgatccagatgatgagtatgacgatggcatcgatacacaggatgaaatggaggatgctcacctgcattcatctgatggtgggaggaagcttggtggtggcagccatgagggtgctgagaagaaggacgaggtcgctactgagaggcacacagaagcaggtggagggattgcgggtagtcatgatattagcagcccagacaaaaagaaggtttcaggtactggagacaagaagcatgggcccaagaagaaaccgaaacgcaagaagtctgatgctgcagcacctagtaattaccagcgacttaagagtgtgaacaacatgcctattgtacctagtgaggatgtatcttgcaacacgaataacatgacttga

SEQ ID NO: 23796 - DNA, 405 bp, Zea mays
  Peptide Sequence Number=SeqID_67171
atgggttatcacagcccgatgcgtgttgaccggaggagattgaagacggcaaacgagaagagagcacaggaggcaatggaaatggaggcggctagagccgagaaacagatgttgaggaatcttgctggtcgtctgagtgcaaagaatggatgcgctgggaaatatatcgcagacgaggctcgtgcaagatacgttcagcaaaaaatagcgatgatggagctgatggaggagaaggatgactcatcaaggttgagtgagctcatcgtgctcgctaaggctggattaaatggggaagaggaggacgacgcatcaaggttgagtgagctcatcatgctagctgagacgttggaacatggcgccgaggaggacctggcggtgctgggccgcttgggtggcgaggagtag

SEQ ID NO: 23797 - DNA, 579 bp, Zea mays
  Peptide Sequence Number=SeqID_67172
atgccgacagaggagctgatggttgacagggcccggtgggaagatcatggatgcggtgtgggagccgatcttgaggagaaccgaggagcttgtcagtgtggagatatcgacgtcaatgttgcttacgcatctgggtgtcctgctctgggtacctattgggaggcatcttcgatcgagggcttcatcttttgggtctgcttcgccctagaggcatcttggaggatggccaggaggtctagttataaacaagtctttctaggcctccccgccttggttgagcaggattgggaccatcaaaatccaacacaaattgttacagagatgtgtggcttcatgactatcctatctgggacgtttcttcttcacaagacaaaagatatgactgagagtcctggacaatgtttgtccacacggcggtcaaagcatgctagtcagaatgcgtttgcaattgaagtcgtgccactaaaatgtcaagattctatagatgatgagaccttgactttgtcacttccccaggttgaaaatggttacctaaaggaagagcatcttcttagatacaaggactcgagtattgtctga

SEQ ID NO: 23798 - DNA, 525 bp, Zea mays
  Peptide Sequence Number=SeqID_67173
atgaagtcatcaatagagatctacccagtaaaaactaaagcggtcgtggtcttaacagtaggcattgaggtcgtcggagggctcctcactgtcgcagaggggagggacgcgcgctccacggtcaggggcgccaccatcgcggcatatgtgttgcgggtgcatcaatctagggttcaacttcgagctgcccccctacgggatccgtccgcgcgacgtgcgactgtctccatcaccagctccacatcgacctccacctttgtgggtctctccatcgccagtcgtggtctaatctctcatccggggctggggaaggggtcacggtggggaggggagtcgggggttgagggggtgtcggtcacgcgagcagaggcgggcacggtgtttgtcggggtgaggacgtcaaggctgccatggccgtcgaagacgccgccgacggtgccgaggggcggggcggacccgatgatgcggaggcaatttcagtggcacaaggggctagttgttgaaaatgggccacagttcggttag

SEQ ID NO: 23799 - DNA, 327 bp, Zea mays
  Peptide Sequence Number=SeqID_67174
atggaggagggcgaggaggcggagcacgaagagaaggtcctaaaagcagatgcgcgaggcaaggccgagacggcggaggcggaagagaagagaaaaagaaaaaaaaacgggtacccgtatccgacccgaatatccgggtatttatcgggtagttctcgttccgtatccgacccgaatatgaagctacagtatccggatattacccgtatccgtcccgaatataaaattacccgaattcgtatctgggtatttgcactatccatatccggtacccgacggatgcagtcaatggaaaagtatagaggaaacagcgaggattctctatga

SEQ ID NO: 23800 - DNA, 501 bp, Zea mays
  Peptide Sequence Number=SeqID_67175
atggcgcagcggggggaggcctggcggcagggagaagaggccggcatggcggggaggcaaaggtccggcgccaggagaggatgtcggggcggtcgctggagcaaggggcgtcggtcatgccaccggggagcaggagaggggcgtcggctgggcgtctgccagaccggcgaggagaggagcagggacgcgctggtgatgtcgtgggggcagcacgcccgtgcccacatcggcggcgacgacgtctactcttgtgcccgcggcggttgtgggggcgggggcctcgcctgcttgcgcggcggcggccgtgtccatcggaggggagggggagcgcacgactggtgcagggaggtccggcggcggcgaggagggggaggcagcgatggtcgggatgagggtgtggcccccgagggcgatggaggagcctcctgtggtcgtccggacctaggctgccgctggcggcggctgtggggttgtgaggtggcgattggtagggtgggatga

SEQ ID NO: 23801 - DNA, 1035 bp, Zea mays
  Peptide Sequence Number=SeqID_67176
atgaggggccgcaagaggcagcaggtgagcgccagctcggccgccgcgctggtgaaggggagggagagcaccaagcagaaggagaaagaagctaggaaggagaaggaggcgagggaggccggcagggagccggcggcgaaggagaggcagatgaggcgcaaggccgggaaggagaaggagacggagacgggcggagaggggaaggagccagccaaggagaaggaggtcagggaagagggcaaggagaacgacaagcacaaggagaaggcgaagacgaaggccaacgtctgcccgcagttcttcaaggtcttcttccccgagcagtccacggagcggctgagaatcccacccatgttcaaccagcacctcaaggagcagcagccaaccggagcagtttccctgagaggcccgagcggcaacagatggcaggcagcgctcgcttcagagtccgagtcggaggccgcgtggtgcttcgaccagggctggaaggagttcgtcacggaccactccctcaggctaggccacttcctggtcttcacgcgcgacgggcccgcccagttctccgtggcggtgttctcgtcgtcaggcgtcatcgacccggcagccctggacgcgaggcctactgcgaacggcggcgcggccgtcaagctcgaagatggcgaaggcgtcggcgtccgaggggacgtggacgcaggcggcgacaccagctccgaggtgtcgcttctgcccgcggaagagggcgatggaggagcgacagggaggagaacaggagcgacgagtggtggcgctggcggcgcctctgagatgtcacttgttcttagagaagagggccgtggagtgacagggaagagagcgagagcgacgacgagtgatctcccggcagatgccagtgcgccaaagaagcactctgccctcgcgaagaaagctgatcccaccttcagtttgttagacgaatccaagactttcaacaagactcagatcagagacaagaacgtgcctaggagcggtaaatttcctttggattgtattgtatga

SEQ ID NO: 23802 - DNA, 837 bp, Zea mays
  Peptide Sequence Number=SeqID_67177
atggttgccaaggatccatcagggaacgacatcaatgcacttgagcagcacatcaagaacctcccgagcccttctactccatttttcttcaatactttgtatgacccttaccgcgtaggcaccgattttgttcgtgggtaccccttcagccttcgtgaggatgttccaactgctgtttctcacgggctttggctcaacattccagactatgatgcccctacccagctcgttaagccccttgagagaaacaccaggtatgtggatgctatccttacaatcccaaagggcgccctcttccctatgtgtggaatgaaccttgcattcgaccgtgagctcattggtcctgcaatgtacttcggtcttatgggtgatggccagcctatcggtcgctacgatgatatgtgggcaggatggtgcacgaaggctagtgactattaccagtacatgcttattgactgcacattgcttggtgatttctctctcgtcttagtccagtatctttgcactgacaaaaccatgccaaatgtctcgtctgctgcaacaaacagcaaagcgagcaacccgtttgtgaacctgaagaaggaatacaacggcatcttctggcaagaagagctgatcccgttcttccagtcagtctcccttccgaaggatgccaccaccgtccaaaagtgctacctcgagttggccaagcaggtgagggcgaggctcggcaaggtggatggctacttcaataagcttgccgattccatggtcacgtggatcgaggcctgggacgagctgaaccccgcaaaaggtggagtccgagtccccacagcaaatggccctcacaagaagtaa

SEQ ID NO: 23803 - DNA, 816 bp, Zea mays
  Peptide Sequence Number=SeqID_67178
atggacctgacgtgtagcgaacgtgagagcatcctccacatttacaggccgacggagacgtccggtattatagcgcaccgtttaccaatcgctgctggaggaaaaaaggagtcgcaaaaacgaaaaacaaagaggctttatttggtggagttgctagataagattcgacaaatgcttatggtaaagtttgagttgcgtcaaagaattgcacttgagaggtttgatggccacatgataatcccagctgtgatgaagatgttgcatgaaaagactagagatcctgcttttggagaggatcagccacaagagccacaattgcaactacatacagctttaggagatgatgagtcaatagagccacaagtgccactacatacagctttaggagatgatgagtcaatagagccacaagtgccactacatacagctttaggagatgatcagccacaagagccactagatacagcttttggagatgatcagccacaagagccactagatacaacttttgaagatgatcagccacaagagcaacaattggcactagatctagctaatggagatgatgagtcactagagcaacaattgacactagatccatcttttggagatgatgagtcaatagagccacaagtgccctcctctgtggcctctatggtaccctcctccgtggttccatcttctattgcctctgtcgtgccttcctccgttgcctctgtcgtgccttcgtctgctgtctctgtcgtgccttcgtctgctgcctccgtagagccctccaaccttgctttggtgctgccctcgtcaaggttgtattaa

SEQ ID NO: 23804 - DNA, 471 bp, Zea mays
  Peptide Sequence Number=SeqID_67179
atggccttcccagggactccggcgaggaagatcgtaccaggcggcttcaccgcagcacgaaccgccgtggccagcggcggcgctcttagcttcgatctggacggcgccgacgactttttctggggcctgtggcagctcgtcaaggcgaaggccgccgaggcagcggcctacctcgccgccctcttcgcggcgctggcggagaaggcggacgagatcttcccgccggagacccgctcggagacgctccggcagtggatgcgcgtcgccgtctccgtggtgatcccggccctagtggtcgccctcgtgctttgctgctgctgctgcgcctgccgcagggcgcgcggcggccgccgcgcgcgctttatggctgcgccgggccgcggcggcgcgcgcatgccgcggggcgcgttcgagaacaacccccggctttacttccgcgacctccgcgccgggaagcccctcttgtactag

SEQ ID NO: 23805 - DNA, 294 bp, Zea mays
  Peptide Sequence Number=SeqID_67180
atgcatgccagcctccacctcctcctcttggagttccctctcccctgcaggctggccggccgcgtttccgtttcgtcttctggttcctggagcggcgaagacaacgcatacatcgcgctgccagacctgttcacctccggttcctttatctcgtcgctcacaggggggcgggtgtactcccaaggtcgattgcctcttcgcgtttcgtcttctgggagcggcggagacgggcagcaattaatgcaactatatgcaagcagcagcagcagccgccgcctgggctactacaaatag

SEQ ID NO: 23806 - DNA, 447 bp, Zea mays
  Peptide Sequence Number=SeqID_67181
atgctgtcaacggccgcgtgcctcgcagctcgacacctcctcagccttacctctgcatcgaaagccatcagcctctcgcttgcttcgtttccagtcgagcctcttctctgcccaactcatacccccaccattcccccaaactcgattccaggattagcagctttcgacgctctaaacatggtccaccacagttccgtctctagactccttgttattcccaggcacaagagtctatgcaagctttctgatgtccgtctctacatgttgagaatgctaaacaacagattatcagacctattgattttatgtagattaggaaggacgcagatagtcccttatgtgaaagtcgtaaatgtgcccaaacacaggaagcagcttgaccgtgggcaagaagttaaaatgtcaaagtttcagaactgcaaaagcttgatatccagcaaggcctag

SEQ ID NO: 23807 - DNA, 243 bp, Zea mays
  Peptide Sequence Number=SeqID_67182
atggggaggcgactggatgggcaccttggtggcgattggggggaggcggaaggtgtggtggctgcggtcgtagaggagcaggtcgccggagccacaagtgtcacagagcaggtcgccaacaccggcgacctagacgtctctaagcgcgtggtcggcgacgaagggggtggtggtggaaggttgtgccccacggcgagcggggctggtggagcgagtcgagcacgagcgacgagcgcgaggtga

SEQ ID NO: 23808 - DNA, 840 bp, Zea mays
  Peptide Sequence Number=SeqID_67183
atggatttcgcagagctctccacgatcgtcctcaaggttgaccttgaatgcgagacatgctacaaaaagatcagaaaagtcctccgcacaatccaagacaagatgaacatcgagacgatctcgtttgatgagaagagcaatgccgtgacgatctccgggccgttcgactccgacatggtctgcaacaggctctgctgcaaggccggcagggtcatcaaggagatggacgtcaaaggcaacgagaaggacgccaaggccaaaggaggaggcggcggcgataagcccaaagacgccgccaaaccggcggccgaggaggagggcggcaattcggagatgaaggcggagaaggccgagaagaaggagggcaaggggcgacaaggaggataccaagtcagacagggcagagaaaaggaaacaaaagacgggaaggcggaggccgagacggtggagttcgacctcgacgtggacggcgtggcctccgcggcggacgcgaagcccggcaaggccatggcgatgccgcccggcatgaccaaggccgacctcggcccgctcctggagaagatgatggcgccgggagccacgcagagcgtggtcgtgccgtccatctggcccgcgtccgccgggttcgtgtccggctactacggctgcaacccgggctacgaggcgccgccgtcctactacggcgctggcgctggcgctgtctacggcggctactacggcgtgccggtgtacgatagccaggggtggtactacggcggcggcgcccggcagcagccgtactacccgcaccagcagcagcactgctgcgaggaccccaatgccgggtgcagcgtcatgtga

SEQ ID NO: 23809 - DNA, 267 bp, Zea mays
  Peptide Sequence Number=SeqID_67184
atgcctgcgcggatcagcagcgacggcgatttctccctttcgttaaaggcacacggcggcggtgtaattggtggggcgaacagggaggagaagggggaaacgactgcttcgggtgttataggcgcagggtggaggaggggttacggaacccagctaacgcgagagacggcgagtagctcgggcgggtctgttaccatcgcggggagatcggggaagaaggtagcgctcctgacgtgcagggccacgatgtcagcgaccgagcactag

SEQ ID NO: 23810 - DNA, 1076 bp, Zea mays
  Peptide Sequence Number=SeqID_67185
atgaccgcgtccaaaaaggtacgccacgtcattcgatttcgtatccttttcctgttcctctttctctctcttacaacagggatcgagaaaggggataccccgaaagggatccttccccgcgaaggaaacaggccccgagcccccctactgattagaggttcgaaggctggcccctcggaggggttcaacagtcgccttagagcgctcgggctctgcggccactactggtcagaggttcaaaggccggcccctcggaagggttcaacgaccgcctcaggccactcgggctccgcgcccactactgatcagggcgggaacgatcttgtaacggaatcccatcagagggaggcatcgagccctcagaccccgtcaaaaggggaccggctcaccggagacaccatgttcgacgccctccaagggcaacatggcgctttccccccctcctccttgcggaaaggcgacgcagaggcagtgaggctgacagcagccaagtccggcctcaggcgccataggaaactccgcctcgcccgacccagggctcggactcgggctcggccccggaagatgacgaactccgcctcgcccaacccagggctcggactcgggctcggccccggaagacgacggactccgcatcgctcgaccccagggctcggactcgggctcggtcccggaagacgacgaactccgcctcgcccgacccagggctcggaatcgggcttagccccggaagacgacaaactccgcctcgcccgacccagggctcggactcgggctcggccccggaagacgacgaactccgcctcgcccgacccagggctcggactcgacctcggcctcggaagacagactcgacctcgacctcggaggagcctccgcctcgcccaacccagggctcgaaccgaccacgtcacaggaggcgccatcattaccctaccccaagctaactcaggctacggggaacaagaccggcgtcccatctggctcgccccgataaacaagctccagcgctcctccgacggccacgacaccacacgaaccgggtgccaaaacctctccggctgccacgacggcat

SEQ ID NO: 23811 - DNA, 234 bp, Zea mays
  Peptide Sequence Number=SeqID_67186
atggagggctctggggtggaccctacaagtgctaggttaaccaagcccccacgcaacccgagtgcgacgcggcagacgaactgttttgcgtcctatcagtccacccacgccgggcaacgtcatgatggctgcccgttactagttctattgagtcagctcaaggaatggtttagggatgtcttcagtacaccttcatctttcgtcacccctagcgtcatctttcatcatgcgtag

SEQ ID NO: 23812 - DNA, 470 bp, Zea mays
  Peptide Sequence Number=SeqID_67187
atgcaggcggcgtgcaaccgtgccaagtgggcgcaccccttcgactctaacgcgcccagcatggaggtccaggcccacgcgtcatgcaaccggcacgccggctgctacgtgcgagcaactgcaccgctactcacgccattaccgcgcctcctcgactgcggagtcaataccgcgactcgaggcaaccctgcagtgccagccatgcgcgacggtcaaatgcggacaggcggcgcctcaggcgggagaagcaagcgacgcttcgccttcgccataatgaccgcgtcaaaaaaggctccgagcctccctactgatcagaggttcgaaggccggcccctcggaggggttcaacggtcgcctcagatcgattgggttctacgcccactactggtcagaggttcgatggccggcccctcgaagggttcaacggccgcctcaggccactcaggctccacgcccactactgatcaggg

SEQ ID NO: 23813 - DNA, 210 bp, Zea mays
  Peptide Sequence Number=SeqID_67188
atgtcttcgcgctcccctcatgcatcgtgcctttccaccttccgagcccccggatgggggacgctcgcaatccttccggggagtgatgatggagttcgggaccccaaagcgatggatgatgttgcccccgggtgccttctgcaaggggccaacgagatccaggcccacacagcaaacggccaggtgatgggtatggtctgcagagcctga

SEQ ID NO: 23814 - DNA, 1537 bp, Zea mays
  Peptide Sequence Number=SeqID_67189
atgcccccgctcccgtcactaccgcgcccctcaaccctcccctccactcaccgcgacatcgccccattctcctgtgatcaccgccgagcaaacccgaccgtggtcctcctcctcgcctgccccttccatcagctcgagcgctcgctcccgtatttttctctccccgacatcgtgccctctgcgctcgcctcctgctacctttctctcctcgacaccgtgccagccgcgctcgcctccccaacaatcccctccatctcgcctcccactcctgtccttcccctttctctacccgacactgtggtcgtcgcgctgacctcccacacaatccccctccatccgcacgaggacgtggagttgttcgtccgttccctcctcagtggcatcttcctccgtggcacctctaccctgctcggccccactgacgtgctgctgcacgatttcaagttcgagctagagcaggtgctgagcagggagatcctgtgcaacgagaactgtgtcaccgttgtagcaaatctgatgggcaccaagtttgacttcttggcctactcgtcgacgctcaagcatttggtacttggtcaggttgagaaagctcatagtggagatgttcattgtgttgattggaatccccttgatgtgaactatatcttaactgggtatgatggcattaaggctcaattcagcataatcgttgaaacaaatttgatctcgaccagttccttatacgttcaagtaatgaatgtttcaattgatatttcaggtctgccgataactctgtctgaatgtgggatcgtcggaatctgggttcaggaggagctgtggtcacctgacagagcatctgtttttggaagttctgcagaagatggtttcttaaacgtgtgggatcatgagaagatttggcgcatgagtgatttgatctaccgcccagaggatgaagttcttgcagagctggagaatttcaaggctcacttggccagttgcttccaagtctgtcattcccttggaggaggcactggatctggaatgggcatgcttctcatttcaaagatcggagaggagtaccctgatcggatgatgctgacattttttgtctttccctcgcccgaggtgtcagacactgttgttgagccatacaatgcaaccatgtctgtccatcggctggttgagaacgctgatgaatgcatggttctttgcaacgaagcactttatgacatttgcttccgaactctgaagctgacgacccctagctttggagacttgaaccacttgatcagtgcaacgatgagcggtgtcacttgctgcctctgcttcctaggacagctgaactatgacatgcacaagcttgcagtcaacctgatctcgttccctcggctctacttcttcatgatcggctttgcgccactcacctcgcgtggctcgcagcagtaccgtgcgctcaccgtctctgagctaacccagcagatgtgggatgccaagaacatgatgtgtgttgctaacccacgcctctgccatgttccacagcctctgccatgttccgtgg

SEQ ID NO: 23815 - DNA, 1710 bp, Zea mays
  Peptide Sequence Number=SeqID_67190
atgtcagaggaggacgaggaccagccgccggccaagcgacccagcccgtcgccgcccgcggaccaggtgctcgacaacgtgctcgagacggtgctccagttcctggacgccccgcgggacaggagcgccgcctccctcgtctgccgctcctggcacagcgccgagtccgccacccgcgagtccgtcgccgtccgcaacctcctcgccgtgtcggccacccgcaccgcgcgccgcttccccaacgcgcggagcctcctcctcaagggccgcccgcgcttcgccgacttcaacctcctcccgcacggatgggacgcctccgccttccgcccctgggccgccgccgtcgccgccggggccttccccgcgctcacctcgctctacctcaagcgcatccccgtcaccgacgccgacctggacctcctctcccgctccctcccggcgtcattccgtgacctcaccctgcacctttgcgacggcttcacctcgcgcgggctcgcgtccatcgcctcccattgcaggggcctgcgagtgctcgacgtggtggagtgcgacatggccgaggagcaggaggttgtggactgggtggccgcgtttccgcaggagccctctaacctcgagtcgctctccttcgagtgttacgagccgcctgtggccttcgcggcgctcgaggcgctcgtggagcggtccccgcgcctcagacgcctgggggtcaatctgcacgtctcgctcggccagctgtgccgcctcatggcgcacgcgccgcgcttgtcgcacctgggcaccgggtcgttccggccggcggatggcggcgaggaggggacaggattcggggaggttgtctctgcattcgtggccgctgggcgagcgcgcacgcttgtttccctctccggcttccgtgacctcgcgcaagagtacctgccgaccatcgccgtggtgtgcgcccacttgaagagccttgacttaagctactccgcggtcaccccgaatcagattctgatgttcattgggcaatgctacaaccttgagacactatgggtacttgactcggtgcgcgacgaagggctcgacgccgtgggaatttcctgcaagaagctccagtctcttcgtgtgctcccgttgaatgcacatgaggacgccgacgagttggtgtcagaggttggccttaccgccatctcacggggctgccctgctctccgttcgatactatatttttgccagaccatgaccaacgctgctgttgtggacatgtcgcggaactgcccggagctgaagaattgcagcaagcttaccaggctatccacgtccgggcaacttactgatcgggcatttgagtacattggcaggcatggcaagtccctgcggacgctctccgtagcatttgctggaaacagtgatgtggcgctgcaatacatcctccagggctgtccaaagctagagaagcttgagataagggactgccctttcggtgacgctggcctcttcgccgggatgcaccatttctacaacatgcggttcgtctggatgtcaggctgcaacctgaccctgcaagggtgcaaggaggtggctcaggtgctgccacggatggtggtggagttgataaatggccagtctgatgagaacgaaaggaatgaaagcgtggacatcttatacatgtatcggtcactcgatggtccaagggaggatgttccaccgttcgtgaagatcctgtga

SEQ ID NO: 23816 - DNA, 67 bp, Zea mays
  Peptide Sequence Number=SeqID_67191
atggggcgtgctcgcgctcgtgctcgcggttcaccatcaccatgccacgtgagccagccagttgcag

SEQ ID NO: 23817 - DNA, 1470 bp, Zea mays
  Peptide Sequence Number=SeqID_67192
atggggaagctctcctccgtgggcagcaacttcatggcgtccgctggcagccgcagcaccagcggcgggtttgacgagggggccaagtacttcgacggccagatcctcaaggcgcccaacctccacaccttcacattcatagagctcaagacggccaccaagaacttccgtccggacagcgtcctcggcgaaggagggttcgggagagtctacaaagggtgggtggatgagaagaccatggcgccgaccaggaacggcaccgacatggttgttgcggtcaagaagctcaactcagagagcatgcaggggtttgaggaatggcagatgcagtatatgatcgtcgacggcgtttctagctcctggtacatcaagtttgatacatttactcctgcagctgagcgggggctcccggtcacaagggtcattagtcgcatgacgctgcaacagatccttgctcgagcagttgggtatgacgctatattgaatggaagccatgtagtcaattttacagatgatggcagtaaggttactgccatattggaggacgatagaatatttgaactgccatattggaggacggtagaatatttgaaggtgaggaagacactattcgggcactcagatgccacctattcaggttacacctgctacactggaattgcagattttgtgccgcctgatatcgatacggttggtgagagtgcaaatgagtacacagatgatgaggatgcaagctggaaagtccgtagggcatcatcaaagtgcctatctgcaattatagtgtctcgtcctgaaatgttggtgaagatgtttctagaggcttgtccaaagttaattgaacgatttcgggaaagagaagagaatgtaaagccctcgctggttgctgaagcaagaggtccaaaagttgtcaagtctatcaacaggcagttacgtgaaaaatcaatcaagacaaaggttgggacattttcagtactgaaggagcttgtggttgtattaccagactgtcttgctgatcattttggatcacttgttcctgggattgagaaggctttgaatgacaagtcttctacctccaacctgaagattgaagcacttgtattaacaaggcttgttatggcttcacattcgccatctgtgtttcatccatacatcaagtggatgaatatgcctgatcttctggaagttatagatttcaaggacacttttcttgatgccaaccatgttcagcaaagttttccagactaccaggttacatttatcaattctgatggtacaaaaaacctgcatccaagtcccccttttaaaatcaggctatccaagaaaatgagggaaagcagtcatgctttacctggcaacatgaactccaatttgactgttaagagcagaaataatatggacgatggggagcctcagaaagagaaactaattgttgagacttacattccagctgatcctgggccgtatccttaa

SEQ ID NO: 23818 - DNA, 498 bp, Zea mays
  Peptide Sequence Number=SeqID_67193
atggaaggccacaagtctttccaatgcaaggcgatgatcggggataaacaaaggcgaaagctcaagcaaaagccatcaagcaaaatctccaacacctacatcaaaaaggtgaacaaaaaggatgctacaccatatttgatcaagaagaaaaagaacggaaaggtgatagcaatcaaggccaacaagcaagccaacaaaggaaagggggccaaacgcatctgggtgccaaaggagataatttcaaccatgaaaagcaccaagaaggtttggatcccgaaagggaatttattgccaagtgggttagtgaaaattttggacccaaatttcccacccatgactaagatatgcgtatctatttatcttttatctagtttacctttcttgcctagttttacattttttatgtacttttgttcaaaatcatgcatactagttcacaagatgcgaagagaattggaccaaggcaatgaggatgcaacacctcaaaagaagacataa

SEQ ID NO: 23819 - DNA, 1489 bp, Zea mays
  Peptide Sequence Number=SeqID_67194
atgcatggtgttcatactgcagttgagcagggtagcattatatttggtcgctgttcgtcagacgtcaaggaccccagcgaggagtcacaactgctggacgccgacaccgacacagaggaggatgcagacgcggacgatagcggcgtcgataagaacgttgggcatggagggcgatgggcggtgctctctgcctccgtcaccatttctccatgccccaacgatatgggagtcggagctagggtttcatctaggaggccacggcgggggccgagctcaccggggaagtcgtgcggcgagaatcggatgcaaacagagacagagggcacggcgcgccggtgcatcgagaggcgggctcgggggagcaggcgtgaggtgcaccgggggaggcggcatcaggaggatgacatcatcgaatccagcagctgcgaactggaggtcgggtcgcgcccagccacagtcgagcagatcgtcgtggcgttcgagtgggcgctagccgtggcagcggaagtggaggcggagggatcatcgttgttggaggcgaggccgaggtggtggagatgcagtcaatggacgtggtcggggatgggacgagggccaaagctgcggcgagacgtgagggtcggagactcggagggcgtcgtgaggcgggttcgggggagcaggcacaagtgcgcgcgggagatgcgcctccaaaccaccctcgcgctctaccactccggtcgtgtagctccccagcaggcaaccaccatcgcgcacccaccggccaccgcgtctacatttgccaatctctgcttgaagcgttctgcccactctttcaaccgagaagttcactattatcctgcgcatgttccctttccccctttcgtcgtggcacgcacgttaggagttcgaccgattgccggaacgtcttccgccgtcttctgcgccatcgaaagagcgatgaggtttgtggtgacgaaagtttgcagcggcggagggaaggcgcgggcgggtgcgctccatatagccggcgccggcattggcattgagacgccggcgctgctgctgtccactcgtaaggggctgccggcattcttgtcctgtgacctccttgcctccttgccactcccggactccctccttctccatgtctgtcctacccattttatagaaggccctccagtgaagacaatatcagctattaggggtttgcacggtatgctgggtttacctgatcacattcttgtagcggcggcaagcgattctattgagagtctgccatcatgtgaagccaccaacaaatttggtgcctcctttgaaactccttcgggtcgtagactggtaaaaccatcagactatatggagttgatttcctgtatgaagcctaatatatgggccagtttggcggatgaggcttctgggactaatagttttggtgtaattgtgggaggatctagcttagaacagcgaaagctatgtgccactgaagtgtcgaagcggaatgtttcag

SEQ ID NO: 23820 - DNA, 423 bp, Zea mays
  Peptide Sequence Number=SeqID_67195
atgagcaggctggatcccttgccgccgacgagctccccgcctacgcacgtggaccaacctactccgaccaccaccaccgacgatccacacctcgacgtgatcgccagagaccctcggacctcacccgacccctcaccggagcaacctcgtcgccggaaaatgataaaggtactagaaaataatgaacagtggatgcaaatatttttcctactccacttaagtaatgaagaacctaggaaaaataaaaggaaccctagtccagaacaaattcaagattgcaatctcgctgacggagagtacatgctcatccccgagcaaggagttgtccacgaggaagaccaggagcaagctcccgagactgccatcgaggatcttgaaagggaaatgtgcctttgggccatttctaagtattttggtgattaa

SEQ ID NO: 23821 - DNA, 264 bp, Zea mays
  Peptide Sequence Number=SeqID_67196
atggggtcgggcgaggcggagcttcctatagcgcccaaggctggacttagcttatgtcatcctcactctgtcgagtggcacagcagtcggagcagggaaggcggcgctgttttcctgtcaggtgccttcggacttggatcagaaccacacagtatgaaaagcacgaacgatacgaagattgacgcagcgtcgaagctacgcgcaagagagcttcggcataacggcaaaaaagggaaccgacttaaaagggaaaaggctatttag

SEQ ID NO: 23822 - DNA, 452 bp, Zea mays
  Peptide Sequence Number=SeqID_67197
atggaggcccaggcccacgcgtcatgcaaccagctcgccggttgctacgtgcgagcaactgcaccgccactcgcaccactaccacgcctcctcaactgcggaaccagcaccgcgggcaggagcagcggtcacgtcgtcagccaagcttacgtcccatctaggggcagcgagagaaccctctctcacggcgtaaagacgggaccgggaaaggaggataccccgaaaaggatccttctctgtgaaggaaacaggccccgagcctccctactgatcagaggttcaaaggctggcccctcggaggggtttaacagccgcctcagagcgcgtgggctccacacccactactggtcagaggctggccctcgaagggttcacagccgcctcagacatagaacgagggatgaccctgggtacgttcgatacataaccaaggctcaggctacgctcccgag

SEQ ID NO: 23823 - DNA, 591 bp, Zea mays
  Peptide Sequence Number=SeqID_67198
atggggccaggcacagtgcttgctctgccgaggctgagtgtcgagtatttcctctctgaggagatggcttgtcttagacacactgcacgtaagtcggtgattcctttcctgccgtctcgccttgcggagcgtcgtctgcgccgcaccgtgtccggtcagtcgagtcacctggagaggctgcaccaccgcctgcgtgaggagcaggagcgccagcgtcagcaccgagagcagcagggctcttcctccccacctgagcaggaggtggagtccgtgaggcgccgttccactgttcctcagctagaggcaccccctgcaccaccgcgggacgctccggctgttggaggagctactggaggaggtcctggaggagaccccgacgacgacgacgactcagaccacagcacggagtcctctgagccgcaggaggcggaaggttgggtcgcccgacccatcacccgtgacgccgctcgcggttgtcacttccacgacgcaagcgacaccttgttgcgccaggccttttcggtaattgaggcccagttcagtactggtttaaatcgattaaatgaattagaaattggatttataatatga

SEQ ID NO: 23824 - DNA, 777 bp, Zea mays
  Peptide Sequence Number=SeqID_67199
atggctcatgttagacacactgcacgtaagtccttgattcctttcctgccgtctcgccttgcggagcgtcctctgcgccgcaccgcgccccctgcaccaccgcgggacgctccggctgttggaggagctactggaggaggtcctggaggagaccccgacgacgacgacgactcagaccacagcatagagtcctctaagcctcaggaggcggaaggatgggtcgcccgacccatcacccgtgacgccgctcgcggttgtcacttccacgacgcactcgacaccttgttgcgccaggccttcgaccggcacacctggtcgatcgagtatcgttgtgtagtctaccagcatagtcacgggaggtacccggaccgctgggaggcaacctgcctagttcgccgtccggaggatgacctccggggtgcagaggccgtttcggagcattactccatctccgagagggacactgcagaagcagctatgcatgatgcagcacgacagagtgtggttgtctcacctgttggtgaggataaccctaggttgagcagcacagtcaacctagtcgctgtgcttaacactgagctggatcactctctggacgagctgagcagggctcaaacggagattgctgagttgcgtgctgagctggcagagcgccgccaccaggagggtggttcccccgctcctgttgggactcagcacccttaccgctcgccgccacatggtcaccacacttatggttcccctgcctgtaagaccaggatagacctggatccttag

SEQ ID NO: 23825 - DNA, 462 bp, Zea mays
  Peptide Sequence Number=SeqID_67200
atggggctgaccagtgggccacagatgtcggagctggcggtgtgcgtgagagcgaggtcccggggactggtcagagggtcccgcatgacagtcgcaggatttctctccactgggccatgcggggtgggaaaaggagaatgggccaaaatgagtagtggccggcccagtgggtattacactaagtgcaaagaatgcattgtgttggcaactcctccagctaagtctcagatggaacagttcaagaaggtgcatgcacagtttctgcaagcaacctctcaagtggtagctagactccaacaagttgatttagcagaatttatagcacatgagcagactaccgataaccatatgacatcaaccacaacatcaccctcgatagttgacttagagaagctgttacatgcacaaactctgataatacagaaagcatctcaactcacctcctcaaacgaatcaagctga

SEQ ID NO: 23826 - DNA, 558 bp, Zea mays
  Peptide Sequence Number=SeqID_67201
atggggatccgcaagaagcccgaatatgtctggaaggagtaccgtgaaaatggaatagggaacaacaaaaatacccccacctggaggaaaaggcttcaggccctatcagggagagaccctaccgagcatgaccccaccatcgtctacatggccggatacctccacactctcgataaccactacaatgaccttttctcccacagcacccacctaaactcccgggtggaaagcttagagcagcaggtcaaggaacttaagaaggagaaggcatccctccaagagtgtctcgatatagcagaaggcgaggaggccaacacccgtgaagcctaccgaaccctgaagatggattatgataagaagctaaagaagcttgcccccacgaagaaaatccaaaagaagaccaagaaaccaggaggccaggctgggcaaaagaagaaagctcctctagcaccacctcctgccaggatagaaaatttgtccgacgtcgaggatatgtccctagctagccttgatgaccttctcaaggaatttagggacactttagaaaaagagttctga

SEQ ID NO: 23827 - DNA, 270 bp, Zea mays
  Peptide Sequence Number=SeqID_67202
atggcggtcctgcaagggattcctgcattggagcttcctataaactgtagcgggttttctgaagctagtcaagaacaggtactacaggatgaggcgcatggaggatgctctggcgagttcgtgagaggtgttgagatactctgcccacatgacccagatggggctgatcacgaggaggcaaagcatggtgaggcgtgtatcggaagagctattgggattaaagacgatgacacgcgtcatgatgaggcggcatatggcgggggaaaatag

SEQ ID NO: 23828 - DNA, 225 bp, Zea mays
  Peptide Sequence Number=SeqID_67203
atgcgcacccgagaaaacttcccggtcggtcacccatcccaaattgctccaagccaagcacgcttaacttggaggttctttcgagataggcttccgaaaaagaagatgcaccttgttggtacactgcaggatatggttgatggtgtaacttggcctacaaccctgccaccaggttggacggtcgagtgggatgctgccccagtaggggaggagcaggaggagtag

SEQ ID NO: 23829 - DNA, 543 bp, Zea mays
  Peptide Sequence Number=SeqID_67204
atggataatctgggcatcgaggcaaaggaggctgcggcgcgcgagatcgggcatcatgcctgggacggtgctgatcctcctcatggggcgcttcatggggaagagagtggtgttcctcaagcagctcaagtcaagcctgctcctaagactaggagcgtttgcaagttgtctctggagaagtccgatcctatggatggtgatcttgataaaataaataacaacaaccacactgtactttttcgacaattgagtgtgcatggaacatgttttggtatccacaaagattcattcttttaccaggagcaaactgccatcaacaaactcattagggcgctggataaggtgggatcatggtatatcaacctagaaactgatgtagttggttcaacaattactagtggtagggttggcaagtatttaaaagctcttactgctggctctgttgatgtgactggaaatgttgtagcaactgatgattcgagcgagaatagacaagcggattgcatcaactcataccttcaaaagtcatttattgttctatag

SEQ ID NO: 23830 - DNA, 363 bp, Zea mays
  Peptide Sequence Number=SeqID_67205
atggccggatgcacagagggggacgcgaccgaggttggtggtgacggtggaggggctgttggtggcgctgtgggtggggatgcagcggcggtggatcgaaaggatcgacgcgacgttgataccaggttgtcaagagcagtgttcggcagggatgccggacctctactccggagctcgtactctcgctccgtgataactccggcagggttatgcccccgtgccgctgacacgctcaccgggttatgccccctggctcacgcgtcctctttccttctcaacgtcggccagctgtttggcgcgctcctgcgcacggcgcacgtccctggctcggcgacgcctagtatccctaaggaacatctttga

SEQ ID NO: 23831 - DNA, 597 bp, Zea mays
  Peptide Sequence Number=SeqID_67206
atgggctccgcccactcgtccgtctccaccactggcggcgaagacgaagaagacgacgaggatccgtccgcgtcagccgtctcctccgcgggcgcacaggcgccaccgcccgctctgtcgccgtcgccggtccgcgtgcccccggcctccgcgtccaaagtgctggagcaggagcccgaggtgctgccgtgcctcgccgcggactcgccgctctcgccgcagccctcggcggcgggcaccccgcgcctcctcgcgggtcccggcatcaaggtctgggacccctgccacgttctcctgcccccgccgccgccgtctccgcacgcagggaggcaggttgacgccgcggccatcgaggtcgttgtggtcagccacggcgagtgcgcagccgcgatgcgcccggaccttgtcggcggccggtggccggccacggcgctcacggcgcgcggggagcgtcaggctcgcgcgctcgctgtgttcctgcgctcccgcggcgccaggctcgccgccgcctatgcgtctccgcttgaccgtgcgcgcgccaccgctgctctcgtctgtcggctagttgatataggcacttctgtgattaatgggtga

SEQ ID NO: 23832 - DNA, 177 bp, Zea mays
  Peptide Sequence Number=SeqID_67207
atgactgtcgtaacctccccgacctccctggacacttcaccggagcttaatcgccgccggaaaatcaaaaagggaatagaaaacagaaaccagagggtgaccatatttttcctagtatgcctaagtgatatagatcatagaaaaaatatatggaaccctggtctagtgctgatctaa

SEQ ID NO: 23833 - DNA, 1146 bp, Zea mays
  Peptide Sequence Number=SeqID_67208
atggtgcaaatcgttgagcactgcgccaagacttcggtggatttcctggtggaggaagaagctgcttcttccacgccacaggttcccaaccgcccagtgtcgggcactgctgctgtgcacactgcacagcagcgtacaactgcgcagacatctcggactctgtcgcgggcggctccgggggcattgtctgcggccagggagttgctgtgtcaccctccaagctccacggcctcaccgggagccatgaagcagtggcgggacgacgtcgaccgactgctcgtcatggcacactctggctcgaccaggttgaggccacgaacatcccggtgccagcatgaggcgtcggcgtctgtgcgctcaccctcagtaaggggtgcacagaccaacaacctccgggcagagctcaaccgcaggcgtgcgggggaggatgcccgggtctcgctggagagggcacgtgagcgccggcaaaacatcgagggccgcaacctcgatcaagactttgctgcggtaaccccgcaaaccctagtgggtgccccgttccaggcggttgtccctttggccggcgtgggctgcgcgccgcactcgtggatcatcttcgtgccgcgacttggccatccaaattccggccgcacctgccggaaatcgaacttcgtcagcgcttaccaacaacacggcgtggaggcccacctccacgcagtgaggcaggaacccggagagaccctccggacgtttatctcccgcttcaccaaggtgcgaggtactatacctcgcatttacgatgcttccatcatcacggtcttccgtcaagggatgggtggctcgggtgccgtcccccgggacggtaaaaagaaaaagaagggctgcgaccacgagaagccgtggtcaagcgctctagtcatcgcagctgcgactaggggccggggcgaccacaacaagcgcccacggccgcagaggggtaacagtgtctcatgccctgtacaccccaacagtcgccatagcgccacggagtgtcgcgagatcatcgagctcgcgaagcgcgttagcgggcggcatgagcagtcttccaggagctcgcgaaggtgtttttgcttagaggaccttcggcgaagaagaaggcccccaacagtagccccttcgcggtgctag

SEQ ID NO: 23834 - DNA, 3654 bp, Zea mays
  Peptide Sequence Number=SeqID_67209
atggcgcgcgagcagccgcggtcggcggtggttgcggcgggcggagatttggtcactgctgccgggggcgggggcgaggggtcggatagggactcttcggggtccatagaggagattacggctgacgacttcaagaaggactcgtcgtcggcgttgggcggcgcggcggcggcggcggggccgagatctaggtcttgggtggccccgcccgccgtgggttacatggcccggaactttcgctatgccttcaatagctttgcgtggtcgcaggccgtgcggaataagccgctggggctacaaccgcctgccccagacgacgacgaggtggagcacgccgtggacgtctccgacggagagaaggaagagggcgagattgaggagggggaggctgtggaggccttggcctcgcctgctcctgcgcagcctgagaccatcgatttggactccgacgccccggagaagtcagagtcggtggctatcgatggaagtgccagtgttgtgcctgtcccagctgctgaggaagaggaggtgaaccttgatcagcgtgtggggagtatactggaggagctcgagatggtctccattgaggaagctgagaagtatatgggcatatgcttcatgtttttccttgaacaaaggctttgtttcaggtcgttcgagggtgcatgcgcacgactgcatacctgcttcgagaacctgaagcctctgttccaggaactggagaacgggagcccgatggctatccttgaacccctcatgcagcaggcgtttattggaattgacacactcaccactgtggcgaatttgtataacttgccgaggagggagcagaataagacaacacttttgaagttgttgttccacataaaaaacagatattcggacatgctgacgcctgagcagcgagaagagatggacagccgcgtgaggaagttagtttttggagagaaagacaatgtcagtgacccaagtaccagttgtggcaccagtgcgataaatgtttcagctccatctgggcaggtttcaaacacaggaggactgccatttgaatcaggtgcagcaaatctatttagtagcttgccaaggttggaagtacctgccaaaaggaatagtcccttgttgaatcttcatgcagattatgatgagaacagcttaccctcgccaacccgggacaatgcaccgccttttcctgcgctaaagcctattggttttggagcatttccaatggtacctgagaaactatctttcctagacagagttgagcctacaaagaattcgttatatccacccttaaatgatcctctgaaggctgtctcttcctatcagcagaagtatgggcagaaatctgtatatccaagtgatgatctaccaagtccaactccatctggtgatgagggtaaacctgcagataaaggtggtgatatatttagtgatgtttccagcttccctgttccaaagagtattgtattaccaagtacaagtcagatgcctgcttctcaacctagcacagtcagcagcagcagtattagttatgcttcaagtacaagtcagatggctgcttctcaacctatcacagtcagcagtagcggtattagttatgcgtctggtccacctggttttgctaaacaaattgagcagtcgactgcaggtccgaatcatgcaataaaggcagcatccaaaagtagagatccgaggctcagatttttgaaccgtgattctgctggtgctacagatgtaaattggcgtgcaaatttttcagaactgaaggatgggaacttgggtggagtttcagttggtaaccgtaaacagaaagcagttgatgatcctcaggtggatgacaatgcgttaaaaagatttaggggcggaattgcgaatcagagagacatgcagcctacggggaaccccaatcagcttatgaacatcagggctcctacacatagtagcagtatcaatatgaaaactttgcaacctcctcaaactactgctccacatgtcagtgcggctcctgctgtcccattgcctcctatgttgttaaaggacattgctgtgaacccagcattgcttatgcatttgatccaaatggaacatcaaaagaagtcagcatcagaaagtcagggtggcatgtctagtgggatgaccaacaatggaattgcaggcatggttttcacacctggcaatgctccgaagatcacagaagctgcacaagtcccatctgttaggccacaggttccagtgcagacacctcctttgaactcacaaaatgatggtggaatcgttcgcatgaagccccgtgatccacggcgcatcctacacaataacatagcacagaaatctgatgcaatgagcttggagcaagtgaaaaataatggaactacacagccagactctcagggcaccaaggaccagactactccagtgccttctcaaccagccttgccgtctagcattgcaaggccattcagcagcgcaaaacatgttgatcctgtctctaattcacagttagctgctacagctattatggctccgacacaagctttgagtagcgtaaataaggtggatccaagactagcagttgaacagaatggacaaaatgctgatgcaacaacaaatggtgcttctgcaacaacacttgaagctacacagcctgttagtccatggggtgatgttgatcatctccttgatggatatgatgaccagcaaaaggctctgatacagaaggaaagggcaagacgaataacagaacaacacaaaatgttctcagcacggaagctatgcttggtgcttgatttggatcacacccttcttaattctgcaaagtttatagaagtggaaccaattcatgaagagatgttacggaagaaagaggagcaagacaggactttgcctgaacgtcatctctaccgttttcatcatatgaatatgtggacgaagctgaggccaggaatatggaactttcttcagaaggctagtaacctgtttgagttgcatttatacactatgggaaacaaactgtatgctactgagatggccaaggttcttgatcctactgggaccttgttcgctggacgagtcatatcaagaggtgatgatggtgatccttttgacagtgatgaacgagtgccaaaaagtaaagatctggatggggtactgggtatggaatctgcagttgtgatcatagatgattctgtaagagtctggcctcataacaggcacaatttgatagttgtagagagatacacctatttcccctgcagcaggcgtcaatttggccttcctggaccatcacttctagagattgacagagatgagaggcctgaggatggtacccttgcttcttcacttgcggtcattgagagaatccaccacaattttttttcacatcctaacctcaatgaggctgacgtgcggagcatactagcatctgagcagcgaaggatacttactggttgccgtattgtctttagccgggttttcccggttggagacgccagccctcacttgcatcctctgtggcagactgcagaacagtttggtgcagtctgcacaaacctggttgatgatcgggtcactcatattgttgcaaactcccctgggacagacaaggtgaattgggcattatccaaaggcaaattcgtagtgcatccaggatggtga

SEQ ID NO: 23835 - DNA, 423 bp, Zea mays
  Peptide Sequence Number=SeqID_67210
atggagaaaccatcacgatcgacgtctgccactggcgagaccaaggatagaggcgtgtgggagtgctccccgcagctggtagaccacctccgccatgatgaggttgacaaaggtgtagcctttactagcttgtttgttgggctccactgcggctcgcttcctgagacgtcgtctgaggtcgacggtgaacctcttgatacgtcgattctctaccatgcgccaaatatcgacagattcaccacgatcgagctcaccgacggcccgaacctgtataattcctttgtgtaccgacgtgctcatgtaggtaccatcgagtcacgatcagcgatgccgccctcccaaaagcactacgtgggttaccccgtagctcctggcatcctcttgccccgtctaataggaacacaggcgcaggccttggtgtag

SEQ ID NO: 23836 - DNA, 627 bp, Zea mays
  Peptide Sequence Number=SeqID_67211
atggtgcgcatgaagaatgtgtcagcgctagggggaggagacgatgaggaccctcctcgcccgttcaggcaggtcaagggcaagaccgtgtacttagagcagcaggaaggccacaagaagcggcgtctggatagagcagcccgaggagctcttgcagcggcagcagcgacagagcaggcagagcgagcccacttccaggagcgagacgagaccgaggtgcgaccaatagctgccgatcctcgtatgattgatcttcagcgtgccactgtagcccggatcctcctcgacgccctcacggcggagtcactccagccactgctcacgtcgcggccctgttcagaccgcctttcacagatgggtcgcggcgctcaccagctgatttcacctctacagcaaacccctgaggacccagtggcagtactagatccagtgccagacactcaggctgaggatgcggtgttccaccagttcgagacccagggcacagctatccctgatgatgatgattttgggatcccgccaccgcctcttgtgcctccacgctcacatgatcacgaggcagggagttccagtgctgcccctgctgcccctcctgtcattgaccctactctggctgcgatagtctag

SEQ ID NO: 23837 - DNA, 1281 bp, Zea mays
  Peptide Sequence Number=SeqID_67212
atggaggccgagaagacggatctccggcgccagctggcggaggagaggagggaggcgaataaggccatcgctgatgcgcaggctgcgcaggccgaagccaaagtggcgcggacggagggtagtctcgcccgccaacgcgccgaggagctggaggcgaggttcaacgccctacgcagccgcgtggacaagaccgaggcctcaacgcgcgtggaggtcgagcggacacacgcgcagttcgtggacgcgtaccgcgagctgggaggagctactggtgctcccgaccattgtgacaggtttcatgtccttcgcctccctcgtcacctgcgagggggccgtgaatgctttgtcccgcgagggtgcaggcattacgaggtcttcgaccaggcggacaaaaattttgaacgtgaaatcttcaaggtcgaagaccctatgctgaagcagtcggcgggggctctctttgataggatgtggggtccgcacgaccgagaggcggtcagggagcggtccgaccgggcaatagatcagatggcgcatgccgaagatgtcgaggaccttggtggtttggacggcgcgctgctcgaggccacggaggtcgatccggcgctgccatctgatgccggtgaaggcccctcgacgacccccgcgccgactgcggccggcgaagaccccgcacctgcccctgcgccgacgtgtgaggacgcctcaaaggcggtggccgagcttgctactgaagaccccgtgacggcggctgagccttcgcaggttctgacgtttgggcttgcgcaagcaaccactactgacaataccaattttgcggtggagacttcaatttcagtgccggccaatgatgaagtgcctggctctgtgtctgaatgctttgagtctgacggtgagtctgggagttcatttctttggacggaggagtcctcggacgaaggcttagattattttgttgtgttggatgtggctgcggcggagacttcgccgcgtgtggtgggtgctgaggatcttccgggtgcgagtactggctataggcggcgaagagcggtggcgaaacggagagtgagtgaattgtcgcggagtggtaggcgtcatcgtagtgagatggagagtggtcgtctttgcgtggacgggactggtaaacgggaattgttgtccttgccggctagggcgagtgtgggtgaaggggagctgcgaaatctttttgaggatgaggaattgagaataatgttgttcaactacagggagatgggtatcatcccgaaggttgagccaatgtaa

SEQ ID NO: 23838 - DNA, 699 bp, Zea mays
  Peptide Sequence Number=SeqID_67213
acttccacgtatgcaaggcggacctttgggatggggtctagacccttctacgcggggtccgggccgctcacagccaggcagggacccaatgctgtcacgtggcctacggccgtgacgaggcgtccaagccatccagtaggcggcgtgcccatccagtccatcgccaaacagtactcccgtgctgcaaggtgcatgctcgggatgatggtgcgaatcgtcgagcaccccaccgatgcttcggaggacttcgtggtggaggaagaagctgcatcctctgcgccacgagtatccagccaccctatgtctggggctgctgcggtgcacgctgcgcggcagcacgcgcccacgcaggcgtcccggactctgtcaagggcagcgcccagggcgttgtccgcggccagagaattgctgcgccacccgccaagctccacgacctcatcgggggccatgaaacagtggcgtgacaacgtcgaccggctgctcggcatggcgcactctggctcagccatgcctaggccacgctcgtcccggcgtcaacatgaggcgttggcgtcggtgcgcttgccctctgtaagggctgcaccgaccaaagacttgcggacagagctcatccgccggagggcgggagagggcgccataacctctctagaggagccagatgacatgcggacagaacttaaccgcaggcgtgcgggctaa

SEQ ID NO: 23839 - DNA, 990 bp, Zea mays
  Peptide Sequence Number=SeqID_67214
atggcccagcccagccccatatggagcagcccacaaggcggcccacaggagacaggacacggcccacacggccacacaccgaagtgctcagcgcctcagcccctcacggtcagcctcttggtcacaagcggctacaggcctataggcagtcctccgccagtctccctccctcaccctctcggtctctccctctctctccccaaaatggaaaccctagcgccgccacggtccgtggaggcgtggagcagagtaggctgcaggcgccgccgcaccggtcttcagcagtccgcggtgtccgtggccgagactccagaagtccagcattccgaccctccagcgccctcgccttgttcggctgtccgatcttcgccgtcttcccgacgacgccctcgccctgttcggctgtccgacacccacctgcccatcactggtcggcggctcgccaccatggaagccgaagaaccagatgggcatgaaggtcatttgcgtccgccaataccacgaagttccggatcaatgagcaagtgcacgaggaagcttgtgccagcagctaagaagatgtcagcggcggctagaactacaccttcatcgtccacatctcattgtagcgatgtctctgtatctgtagaaaagcaacttgatgttgtgatggaggaggggcaaggggaggagctagaattagaggttatgttgtcggaattagatgacagtgagtttgatcatcatgatgagtttccaccttcaactgatggagatgagttgtcaaaaactaaaaagacaaagagaggaggaaagaggtcaagagctggtattgagttgtccccctccaagtgcaaggcaaatagagtaaagagggctggttgctggaagtattttaaggtggtcactgttgcttctagaaaggaacttggggttatggagacaaaagccaagtgcaagttttgtcataggtcttatttgtaccatcaaggggcagcactacaacactaa

SEQ ID NO: 23840 - DNA, 291 bp, Zea mays
  Peptide Sequence Number=SeqID_67215
atggtgtcaacaagctcctgtaaaaatttcagattttttggacacccgagcgaaaagttatgcccggtttacggaaggaaaaaaacgctcgataaactcaccgatcaacctggaaatctgataccaattgatgaagctgaggtgcccgatctttcggcgagtagagataattccgatttggcggaagatgacccttgcgatccgactacgacgagcaagcccgaggcgccaatgcaatcgctgaaccaactccctgtggttaccgaccttgctgatgcgagatcggcctga

SEQ ID NO: 23841 - DNA, 291 bp, Zea mays
  Peptide Sequence Number=SeqID_67216
atgacgaggcatgtggccagtaaaaaggtcctcgatcagcaagcctacatcgactcggtccttaagcgactcagacggagacactacaccgagactctcttctcgtgcaagtcacccgtctggtcttatctttatcatttacaaccccaagtttgttacctgacagaggcgacaaggaatggtaatcagtttccaaggaagggaatgaagcaattgtttagcacagaactcctatcacctaatgcatcatctcaaatgataaagagtttaaaacaacaaggaaaggggtaa

SEQ ID NO: 23842 - DNA, 264 bp, Zea mays
  Peptide Sequence Number=SeqID_67217
atggcaccgcttccgccgcgcgagctcctctctgtcatcgaggcggcgctgctgggctccacggcgccatcgccggcgcagcgcgtggagctcctccacgccgtccgcgatgctgcccccgcgttccgcacgttactctcctatccggtgccgaaggcgtcggatcggactcaggtggagagcaaggaagtgcggctaccgggcatgcctcccatcactcttgatgacacagacgtgcggaccggcctgtttgtataccgctaa

SEQ ID NO: 23843 - DNA, 552 bp, Zea mays
  Peptide Sequence Number=SeqID_67218
atgcagcaagtgcaacagcaacctcaacccctaccgcaagtgcagatgcctcagctacccagggacaagcgtgcagagttcatgagagtagagtgggagttgcacatcgctcaatgcaacgtcaaagagaaggttctgtatggtccccgtctactaaggggagcagcacattcctgggaggaatttagagaaaatttccacctgtatcatgttccagagggcttgatgatagtgaagaaagaggagttcctagcactgaagcagagttataatgatagagaggaagcacaaggaaatggaagatcagaagcgcaagataagtggaccccagcctgggagcaacggttgtccccgtttctcaggcaactcatctcaacagttcaggcatggccacccacatgggtatcagcagcagaatcagcgccagaatcagcagcagacccagagacagtactagcagccgcaacagtaccgttagaacaatcaaccaggaggaaaccaatatcagaggcagaacagtcatgcacctcgccttcctgccccaacaactaa

SEQ ID NO: 23844 - DNA, 762 bp, Zea mays
  Peptide Sequence Number=SeqID_67219
atgggtcaagttaatgtggtagaaatcaaggaggccgcggaaaaagggggagatgggaaggccgaggccgcggagaagaaaaggagcgtagactacagactcgtgggtatcctctgtcaggacagtagtcccgtggcaaatccgccaagaacaaagttcccgcggaggaagaaccccgatggatacgaggtggagaagttcagcttcggaaataatggacatatgtggcgtttagccactggccctgctgctgctgccaccgccgccgcccctggtgctgcccttgctgctgccgcctctggtgctgcccgtgctgctgccgcctctggtgctgcccttgcccccgtcgccgccgccgctgcccccgccgctgccgctgctgtcaccgtcgtcgtcgccaccgtcgtcgtcgccgccgtcgtcgtcgtcgtcatcctcgccgccgtccgagtcctcctcatccaaggagaactccgactcatccgagccctcgagcccggagcgctcgacggcccggatgtacgtccagacttccgcggcaatccccctggggagtcgtctgaatcatcagacgacgccgggggagagacgggagccgaagacccctcggactcggaggagaactcctcctccgagtattccgagtcgtccaagtcctccgacggaggagtcggctcacgcttgcgtttgttactcttgcccatggcggaagcagacagaagggaagagaaggatgtagtaaagaacagcgaagagatgtga

SEQ ID NO: 23845 - DNA, 582 bp, Zea mays
  Peptide Sequence Number=SeqID_67220
atggcgtgtaccaagaccacccaacgaaaagcaaccagacctcgaagtgtgcctcgacaccatttggctcctagacatgaagggagcagtagcggaagcaatgatccaataggggatctggaggccaaggtggagcgactcatgccagagctacgtcatggaaatagggagcatgcacgagatagccgccgcattgctgagctgtcagcggaggttaatcgcttgcagcaggaaatcgtggaacgagatacagctattgattgggtcgtaaattcgcgctctttcgccttggactatgaggcaaatgctctagcccgggtagcggaactaagcgcatccctggagaatctacaagcgtattgtaacaccctgcatgaagaggtgcacgtgttatacgaccggctgcgtctgaatgtggcaccagaggttgcagcaatgggagccagaccatctggagcagctagtggaggacctgatggggagttggacctttttggagcccctctttccatgaaccttgcagatgaacgttctcctgatgctggcagtggagcaggagcggccaaggacaaagataattag

SEQ ID NO: 23846 - DNA, 204 bp, Zea mays
  Peptide Sequence Number=SeqID_67221
atgtcgaagaatcaacgtccaaagatctcatcgatgaagacagtgtcctcgccctacaggccctcaacaaatatcaggctcaaaccaaggcctgggcgtgacaacccggttatcccaagagagttcaacaaaggagacctcatactcgcccggaccacccggacagaatcacggggcaagctgacgaatcaagctgattcatga

SEQ ID NO: 23847 - DNA, 264 bp, Zea mays
  Peptide Sequence Number=SeqID_67222
atggcacccaagagagctagctcgaaggcagccccatccgttgacgaagcagcgaaggcagcgctgctggccgagaaaaagggcaaggcccttgtctacaccacccaccaagaagcctgcgaagacgacgcactcagcaagaggcagcgcaatgaacaacctacacccgaaggcagtctccgcacctgcagctccggaggacaaccgcaacctcccccaggcttcactccaccggagggcgcggacaccactaaggatggcgaa

SEQ ID NO: 23848 - DNA, 336 bp, Zea mays
  Peptide Sequence Number=SeqID_67223
atgtggaacaactcaagcgatagggcgcgtcgacatgtgagaacgacacgcacggtgcgcgcgaacggcacacacgacttcaacgcgctatgcccggacatcaacgaggatagactactacgtctagcgatagacaaggccacggggctcaccgcatgcgcagggcacgccgggctggccgcgcaggccgcgagccgcgccaggacgctgcgcttatggtggggctgcgccgggccgcagtggggcacagcgcaccgcgccgggctgcaccggggctcgccgcgtgcgcagggcacgccgggctggctgcgagccgcgctaggacgctgcgcttag

SEQ ID NO: 23849 - DNA, 357 bp, Zea mays
  Peptide Sequence Number=SeqID_67224
atggataaagatcgccaagatgcgcggaaacaccgggtgttcactagggtcagggaccctagtcacaaggtcaagaaggcgcgggggatctcgaggtctaccgccttcggcagcagcaaaccaccgccagctgcgaagcctgccatccctggccccagcaagccttcgtctggcgcgaaggtcgtcgctcccggctcgagcaagacgccctctgctgagcccacactggagcgagggtcgtcgtctctgctgcgcacggccgaggcggcggcaggtggggccgaactctccatggacatctgcgtgggtgattacagtgggggtgaggtgttgatgtttgctgcccgtcggttttag

SEQ ID NO: 23850 - DNA, 99 bp, Zea mays
  Peptide Sequence Number=SeqID_67225
atggggaggctagaaccccgggcagaatgggaatcatggcttgtgggtaaagtgtgcaacctctacagagtgttagaaactgggagtgcttctgggtaa

SEQ ID NO: 23851 - DNA, 1026 bp, Zea mays
  Peptide Sequence Number=SeqID_67226
atgggcctgtgcgtgtcgctcggcgggacggccggcgccgaggccgcgcgggcggcggcgcccagctgcaagtgcggcacggcgctggtgctcatgcccagcggcgacatgcgggagtaccctttcccggcgacgacggccgcgcgcgtgctggaggacgcctccgccgccgccgacggcggcgatggctggctcctgtgcgacgcggacgggatgggcttcgagggcccggccccgccggcggtgccccacgcggagccgctccgcgcggggcagctctacttcgtgctcccggccgccgcgcgccgccgcggcctgcggcgcgaggaggtcgccgcgctcgccgtccgggcctcggccgcgctctcctcccgggcctccgcatccgcctccgccgcgccgggaaggcggaggcgcggcgccgtcgtcgcgcccctcgtcttcgcgccaccgccggaggacgaggaggaggagcgcgagcagcagaagtcgacggccttggcggcgccaccggtgcggcggcccgcgcgccccggcaggcgcctcgtgcggttcgcgtcggacctcaccgcgatccccgacctcgagcgcaacaggaagctccgcctcgcccgacctcatgctccggcctcgggaggaggtctccgcctcgcccgacctcaggctccggcctcgggaggaggcctccgcctcgcccgacccccggactcggcctcgaccccggtctcggaaggaatcgcgtcctcgcccgaccccgacgtcggcctcaagagaagtctccgcctcggccgaccctgggctcggaatgaccgcgctaatatgggatgcatcatttccctattcctagcctgctcaggctacaaggaacaagacaggcgtcccatctggcttaccccggcgacgggactcaggcgctcctccggcggccacgccatcacatgtacagggcccaagctctcccccaacggccacgttggcatgtacacagggcttaggcactccactgtcggacacgttagcgcatag

SEQ ID NO: 23852 - DNA, 900 bp, Zea mays
  Peptide Sequence Number=SeqID_67227
atggacggggaggagattggcctggtcctcgcccgcgcctcggacctccgcaccaggatatcggcctgcgccgctgccgcggcgggggcgccgggtccgcggcgggacgatgaggaggcagcgaagcggttggacgcggcggagggcgatgaggagggagccgaggaagaggaggatgaggaggaggaggtggagagccttgtcggcatcagcgacgcgctcgagtcgctcgagcggcagctcgccgcccttcaggatctccagcaccaacaaagatacgaacgggaaaccatcttgagccagatcgaccgaagccggaggtccctgcttgccaagctcagagagtacaaagggcaggactgcgaggtgatccacgaggctgccgccttcgctggcgagagaatagagcgcgacgacagcctcgtcctgcctccttactcggaccatgtcaccaactcgttcgcgctcgacgacctgtaccctctgagctacatgtccaagcccaagcgcctgcacactcaaccagactccgaggacgacgggactgcgcaggacgacgcgagaaggaacgggcgtgagagcagagataccagggcctcgaaacgcggctcgggaggcggagggggaggaggaggaggaggaggcatcggagccttcatgggatgggtggctaaaacggcggtcatggtggtgggcgccgtctgtgtcatgaaggccgctggatacgagtccgtgacgtggaggaacggcggcgccaggctggacattgcgggtctgttcggtggcggtggtggaaagggtgaggtgccgttcgacgccgtcctggcaccgccgagttcgaggtacggtttaaggctgaagcccactcttcccccgctgcgcccgtccccgaatgtgtga

SEQ ID NO: 23853 - DNA, 1164 bp, Zea mays
  Peptide Sequence Number=SeqID_67228
atgaccagcagcgagacgacgcgccgtcagaagaatgtgagctgcgactactcgcacgagctggcggactcatccgaagaccccagcaaccgtcgaggagatggtggtgcatggccggggtgtactgcaggctggcgacccgccgctgctggcgcgccaccgcccgtcggcgtcgtcggcgtcggcgtcgctgtctcgcggcgagcgcggtctcccaacacagtgcctcggcggcggcgacaacaacacgtgagcccgaccagcagcagcagctaccactgcggcaggagagacgccgcccggctagtcatcaacccgttccgcgtcgagggggtcaaggagttgttcagcgggccctacagcgccatggtcgaggtgccggcgatctcccgcgaccgccccaggctcagggaggccgaggacctgctccagacgtacaagctgattctctaccggctggagacggtggatctgaggcggatgacgggcggggagaagctcgcgttctggatcaacgtccacaacgcgctggtcatgcatcagaaccagctgaagacgacgacatcactgcttgtcaaggcggagtgcaagatcgcggggcgcgccatcaacgcggcggccatccaggggctggttctcgggtgcacggcgcactgctcctccgggcattggctgcgggctttgctgcgctacccgaggacgacgacgaaggcgagccggcgggcgagcagagccgggggcgaggagtggcgagccttcgccgtccgccagccggagccccttctgcgttttgcgctctgctccgggagccactccgatcccgcggtacgggtgtacttcccgaagcggctggcgcagcagctggaggcggcgcgggaggagtacgtccgggccacggcgggggtgcggaaggacgaccgccgggtgctgctgcccaggctgctggacgcctacgcccgggacgccggcctcaccgcggaccgcctcctcgacgccgtgcagcggtgcctcccggagacgctgcggacggcggtgcagcgatgccgccgccgcggagacgggcccggtgccgcgaaggcagtcgtcgagtgggtgccccaccggcggagcttccggtacctgttggccagggacctcgccttcccgcacctcagcctcagctag

SEQ ID NO: 23854 - DNA, 843 bp, Zea mays
  Peptide Sequence Number=SeqID_67229
atgtcggaatcccagcagcagcagcaaggcaggttaccagttgtccagttcccacagggatttgacatcgtctttgtgacctcgtttgatgagggtgtcttctcactagacctcaagtctctccaacggagggtggtagatgaagataaggaaggcgccgccgtctttccctgcgtggccttctacaatccagcgtacaaagctcaggatgaggcgatggctccagcagtgtttttcagtcacaatgcttccggttgtcgctgcggtagacataaccgcgaggagttaaatccattgctcgaggctgccatctgggaacaagtaaaagatgcagctcctggcatcgcgtcagttatcctagacgcaattgtcttcaccatctcatccatggcagggcttggggctgcttggtccagggacaaatggaaggatagaactactgcttgtcatgcccgtgtaatctccgtgcgccctgacacccgtgatctgcgtcgcctcggcgcgctgggggaagcttctcgtataagggatgaatacagtgcaccgcgcagcacgggcacactgtttcgacaacagactggacatgtgcgccgtctgcagggtggccctggtgccgtctgccagcgaaatggacaggacgcaataaatgccgtgggggcacatcatctgtcagaagggggtcctgcgccttctgggcctgatggcgttgtctccgagaacgccaccttaactgcctacgagacacccctggggctgttctccgcgcggctaagggtagccgcacagccatcgtgctttcataccgtagtaaggggtacccctaatccagggtaccgacagtga

SEQ ID NO: 23855 - DNA, 798 bp, Zea mays
  Peptide Sequence Number=SeqID_67230
atgaccaccagcctcgtggtggagagaagcgagtcgggctgcggcctcctccctgccctcagtttcaaggatgttcatcatcctcgctggggtggaaggcgagccgagttggggtcctgccttccgcatgggctggtgacccgcttcttcctccagtatttggaggagaaggatgttcaccagccttgcggaggaggcgaacctcgactacgtggagccggccggctgcaggcgccgtcagctgccgcgtgtctggctccttggcttggatggctttggtgccgcctccaacgctgcctcccgccgccacgtggggcatggctgtccgtccaccgcacgggcgacggtcgcgccgtgcgcaggtccaccgcatccgtagcgtcccttgcgccgccggccacgctgctccaacgtcgcccagggggtcgtacaagacgtcgtacaccgtggaggtggcggccacattcttggatggtcttgtcctcacccccgcaggagggcgggggcgaggacctttctgcacgcgctgaggcgtccgccgtcgccggtaagccactagtgcagaggtggccgctgtcgtcgatactgaggtggtcgcctccgctggcggggctgcccgttgcagaggtggttgccgctgctagtgaggctgcccagtgcagaggtggttgcctccactggcgagaccaccagcgccacctgccgccgagcctccaactctttggctttaatggcctcattgtcgccccccgtaggaggacgggggcgaggacctcttcgcaatggcgcatgcattga

SEQ ID NO: 23856 - DNA, 603 bp, Zea mays
  Peptide Sequence Number=SeqID_67231
atggggggctcgaccctgcgtaactcgcacaaggagcgtgcaaccgccctgctgttatacgcccttccatcttcaccacaaccagcggtcaagaaggcgaaccgccgcacaaggaacgtgcaaccgccctgcggttatatgccctttcatctccgccgcaaccagcggtcaaggaggcgaaccgccgcacaaggagcatgcacccgccccgcggttgcgcgccccctcagcttcgctgcaaccggtggttcaacctctggcatgggggccccaggcccacatgccatacacccggcgcgccggttcctgggtacaggaaagtcgcactgccgctcgcgccaataccgcgcctccttgagaccttcgcagaagactaagaagataaattttcaaaaaccaacgcagcgactcgaggcgccccgcgcatggcccaacaaaggcattaagtacggaggtcacgggccagttagccacaggggcaggcatggcagtcggcgtgatcataggcgggccggcagtaactgcatcaacgggcgcgcaggagcagcgagccgatcgccagtcaaactctggccccgcctgcaggctcgcatcctcccctga

SEQ ID NO: 23857 - DNA, 702 bp, Zea mays
  Peptide Sequence Number=SeqID_67232
atgacaaaggttgatgcttgccgaaggtggtcgaaaagggttcaccggagcttcggctctgttccatcctccgtttcccttgtgcttcttcgcattgtgattttggctcatgtccgaaggttcgagggatgccgaggggctgtacctcgccagcgattcggacaagtggctattgatctacttccccttcatgcaagtggtcaagctacatttcgtgctattcaaaggccccaaggatgtcaaagatactcatatggtcaacctcttctcattctcaaaggcttatgggatgatgggtggcgtgtaggatactttgcattacaaatgaaagttcatagtttccacaatcagctcctcaaagtgcaaactgatcaagcttatgccatatttagtgatatggatgccgttgcgctagtgcacaatgattgtgttcaattaaggccaataccatggccttcctttagactgtgtagtgagggacatatcaaagtgctcaagatgctgctagcagaccaaggtgcagaacaattctttgtcatgatttgggatcccggtggaacaagccgaagcttaagaagggcgaaggaaatgttaccagtctgtctgtgccggaagagctccaactgcctgagaaccatgagatgcagagaagaagtttgttgccccaactctcattgggctggtccagagtgggccaagtga

SEQ ID NO: 23858 - DNA, 1728 bp, Zea mays
  Peptide Sequence Number=SeqID_67233
atggcggtgatgagcggcgctgcagacagcatgttgccaaagctggtggacgatccggaggcggtggcgctggcggtagagccgtgggcgcagccagggaggaagaacaagaagacgtgccgtcgggctttgctcgtcggcagcctgatgacgctgctgctcctggcgtgcttcgtcctcggccgagagagcgcgtcgtcagcggcatggctgcagatcgatctcctcgccaagctgaccgccatgaacaatggaacggcagggcttacgacgacgacgcacgctcctcatggccgtgacgagctcctcggcggccttctcccggcgggcatgaacaggcggacgtgccggagccggtacgagtcgtggcggtactacaagtacttcccgtacgcggcgtcgccgcacctccaggacaagctgcgggcctacgaggcccggcacaggcggtgcgcccccggcacgccgctctacgccaagtccgtcgagcagctccggtccggccgcagcgccgacggcatggagtgcacctacgtcgtgtggctccccttcgacggcctcggcaaccgcatgctgtccatggtgagcggcttcctctacgcgctgctcacggaccgcgtcttcctagccgccttgcccgcggactcggccgacctcttctgcgagccgttcccggacacgacgtggcggctcccgctggaggacttccccgtcgccgacctgctcccgcgggggcagagcatcgagcggtcgtacacgagtcttctcgacgccaaggaggtcggcccggacgcgaacgcgacggcgggcgtgccgccgtacgtgtacgtgagcttggggtggcagctcaaggaccccctcttcttctgcggcgagcaccagctcgttctcggcaaggtcaactggctgctgctgtacagtgacctctacttctccccgtcgttgtacgcggtggccgagttccaggacgagctccggcggctgttcccggccaaggagagcgtgggccacctcctgtcccggtaccttttccacccgaccaaccccgtgtggagtctgaccaccaggtactaccgctcgtacctggctaccgcaaagcggaggatcggtgtgcaggtcaggatgttcagctatggctccatctccgccgacgacatgtacagccagatcctcgcgtgctcccagcaggagcacatactgccggagaccgaagacggtgatgaggacgaggtggtggccgcgacgaggaacggcgacaatgccgatggctccaactccacggccatcttggtggcgtctctgtacgcggactactacgagaggctgaggtcgaggtactacgaccacggggcgaagggcggcgagagggtggccgtgttccaaccgtcgcacgaggagcgccaggcgacggacaacatggcgcacaaccagagagcgctcgcggagatctacctgctcagcttctccgaggagcttctcacgtcggggaggtccacgttcgggtacgtgagcagcaacctcgccggcgtccggccgacgatcatgctcaccgcttatgaccacaaaattccggagccgccgtgccggcgggccgtgtccatggagccgtgcaacctcacgccgcccctgggcgtggagtgccgtggcaagcccgtggacaaggaggacctggcacgccatctcagagtctgcgaggattccaaggactcggtcaagctttttgactaa

SEQ ID NO: 23859 - DNA, 1188 bp, Zea mays
  Peptide Sequence Number=SeqID_67234
atggagcggaaacggtgggcgagtggacgctggacggacggactggcatcgcctggcctgccctgccccggcccgggcctttcagcgggacaagcggggcatcgttggcgccacctcgtgggggctaagactaaaggctctagcaacaacaaggttttggtgctcggatcaacaccgtccgagtcagagattaagagcattgccacatggctgcaggagaaccatgatggttcaactgggctgagtactgacagcttagtggaagcgggttatcctggtgctgctgcacttcgtgaagtcgtgtgtggcatggtggccattaagatctcttccaaaaattttatcttctggttccgatcacacacaacaaaggaaatcaagtggagtggggctaagcatgaaccgtttgatgcagatgacaatggcaggaagatgcatccacgatcttcattcaaggccttcttggaggtggttaaatggagaagtgttccctgggaggatgttgaaatggatgctatccattctttgcagttaatattacgtgactccctgcaagatgaagatgccaacagaaacaacatcaggtccattgtaaaagctccatctgataatatgaagaagatacaggggctacttgaactaagaacagttacaaacgagatggtccgcttaattgagacagcaactgcccgtgtcttggctgttgacattcctggtaacataaatggatggaacaaaaaagctacagaactaccagggttacctgtaatggaagccatagggaggcctctgatagatcttgttgttgctgattctgttgaagtggttaagcagattttggactcagctttacaaggaattgaagagcaaaatctggaaatcaagcttaaaacattccatgaacaggagtgttgtggtccaaaatgcgaagaagggggtcagccctcgtttggcgccgtcggccttcctgcgttcagacgagggggcatgacgctcactgttgggtcgctcgacgatcacggagccatcatggacagattgtgtgtgtttccttcacctccaacagctatcaaagctcgtgcaaccatcatggacagtaaccatgtcccagttctggattcatcatacatgagcattatcatccttgggagtgggagccaatccaatccaacctttgggacgcgctga

SEQ ID NO: 23860 - DNA, 720 bp, Zea mays
  Peptide Sequence Number=SeqID_67235
atgtcaagattacctgccatagtgaacgtgttgaaagagacatcattttatcacacaagtaagcttgcagatgctgatatgacattgttggtaaagatattgaagtcttggcctccacaaatgatgtttccagtcattgattttctgagaatgttcgtgttgcatcctgatggagcttctttacttctcaagaccatcgaaactggaaatgatatacttttggaaacctttcgtaaagctgttgcgtcgcctgtacagccagcaaatttgcttacagtcctcaaagctgtgacaaacttgtttggcaactcatgcttgcaccagtggctgaggacccactgtgctgagatcattgattcggtgtcaaactgcaagtcttcttttagcaagaatgcacacttggcatatgccacgcttctactgaactacgctgttctttcgattgaatcaaaggaggaacagagtcaggcgcagattctttctgccgcccttgaaatgctcaagggccttgtgaagtcccttgccctcgaccttgatgttaagagcgttgcaagcagcgccaagtcttcaatggaccagaagattgcggaagtaggagatacagttcaatatttctcgcggagggatgcagatcagacacgcaacgaatatttcgatatcatctgcatttctatcaggcacgcaactacacacaaaggacctcctaaacgtgtcacctaa

SEQ ID NO: 23861 - DNA, 180 bp, Zea mays
  Peptide Sequence Number=SeqID_67236
atggagagccacacaaagaagcccgtcggcgatgttttcctcaagatcggattactggaaggccagaccagctgctcacattcactagtgcatggtgtgggagctgagagctccattcctatggccgggccccacctctcttgggcccttgtgcagatacgcagaggtagtgtctcctaa

SEQ ID NO: 23862 - DNA, 942 bp, Zea mays
  Peptide Sequence Number=SeqID_67237
atggatgaagattttggttatgttagcccacttttggcattcaacttgggattgcatgtttcttgccttaaactttttattcaaagagaagggcaccctttcaagttctgttctcgagctgaagagattgatgcaactgccaggtctggaagtgatctttatcttcacttagaccttcttccatgccctcaagagcctaaatatgcattgcatttacgagtttctgttgtgaggattcctgattgccttaattcatcctttggaggaagtgagtaccaagacatggtgactgacatggaacctatacttcgtgttaattgcaatgaaacaacccttgtacttggtggagctgcttctgctgcaatccccccttattccttttttgcttcttctggtaattcagtacctttgcacagtgaagtagtggagcatttagcatctgtcattgcaccagcattgtgtccttcggatattttaccaaaaatcaagtttttcacttttttatatggcccgccagagaacgagcagggcatattcgaagaggttttgcacgggaggctcgacttcgacgtggagccatggcccagcgtctccgaaggcgccaaggatcttgtgaggagaatgctcatcagggacccgagctgtgtttgttatcctcttctagggcatccttgggtccaggttggtggtttggctcctgacaagccgctggactcggctgttctttctcgcatgaagcagttctcggccatgaacaagctgaaaaatatggctctcagggatgaagtggagatggatggtcgggtggtggagcagaaagtgcagatgacggcggtggtggtggagatccggaagaaggaatccggcgagctggtggccatcgggaggcagtggatgacggcctccaggcccaaagtcgctgctgctcacagcaagatatga

SEQ ID NO: 23863 - DNA, 1347 bp, Zea mays
  Peptide Sequence Number=SeqID_67238
atggccgagtaccgcctcggacttcagctgcacggccacaccgacgacgttcgtggcatctgtgtatgcggcgatgctgggatcgcgacatcatcgagggaccgtactgtgaagttctggacccggaacccagaaaaggagagcgaatatgttctctccaagacactcgcaggacattcgagttttgtcggcccattggcttggatacctccttcagaccgttttcctgaaggtggaatcgtctctggtggaatggacacatttgttttcctctgggatctgcaaaaaggagaagttgccgagacaatgaaggggcacagttcgcaagtcactggactcgctgtggacactaacggtgacatcatctcttcatccatggattgtactgtaagacgttggagaaatggcaatgctatagaggtttgggaagcgcacaaggttgcagtgcaaactgttctaaagctgcccacaggggaactcttcactgacactgttagattttttagcctcaatgccaggtctaggaattctttccgcctcacacgacagcactgtcaagttatgggcgttgtcaggtcagcccctgctggacatgatcggacattcttctcttatggtgtctgcgttcaaagcattgaacacccaggatgtatatgggatgctaagttcttgggaaatggagatattgtaactgcttgttctgatggcactacaaggatatggacagcagattctaacaggttctgcagtgatgaggaaattgcagcttatacagatcttatttctcaatacacacttagcagaaagactgttggtggacttaagttgatggatctaccaggtgtggaggcgctgcaagttccagggaactccgatggacaaacattaatcgttcgagaaggggataatggtgttgcatattcatggaattcagcagagttaaaatgggacaaaattggtgaagtagtggatggacctggtgaagctgctcaaggccaagttcatgatggtgttcggtatgattttgtttttaatgttgatattggagatggagaacccatacgaaaactaccctataatcgttcagtcgcggacaagtggctcctgaaagaaaatctgcctttgacatatcgccaacaggttgtagaatttatactgcagaattctggccagaacaactttgttccagatccatcttttcgggatccctatactggggccaatgcatatgtgcctgggcaaccatcatcatcatccaatggtaatactccggaaccaattttcaagcacataccgaagatctggtgctggcggttaccacatgagtggggtctagggaaggaataa

SEQ ID NO: 23864 - DNA, 513 bp, Zea mays
  Peptide Sequence Number=SeqID_67239
atgaccaacgcgttcgactccggagcagctgctgagctgcaggaagcaggatttgcactagcaccgccccacccccttccacagcctttccctctctttcccatggccaccaagcccggcagggcggccgccgcggtgctgctcctcaccctgctcgccgctctacacgcggccgcccgcaacaacaacaacaacgagaaccgcaacccgggcggcggcggcggcgacccgggcgccttcttcgccgggatgccgcggttcagcggcggcggggtgccaggcggcggcgggttcttcggcggctggggcgagggcggtctcgggtaccggcgcggcgctgtggtgccgccctccacggtgtgcccgcaggacgggccctgccgcgggaagcgcctcacctgcccgccgcgctgcttccggaccttcagctacggcggcaagaacgggggcggcggcggaggcggcggaggctgcagcttcgactgcaccgagcgctgcgccgccacctgctga

SEQ ID NO: 23865 - DNA, 717 bp, Zea mays
  Peptide Sequence Number=SeqID_67240
atggatggacagcggtggttccgctgccggtggtggagtgtggactccccactgcatccccgtcgccaccagcaccggtgtttgacgcgggatcgtctacatcggcccccatggacgtcgatttggaggcaccactgccaccaccacccactgcagcggcagttgctcgtcgttcgccatctccaccagtgcctgtggtcgtcgggaccattgctgcccgtcgtgggcagcccccgcgtgtcgtcgatgctccacgtggacgcatcatcttcactggccatcgcccaagtggcctccccggcgtgggcactcgacgagggccccacatgggcgctcggcgcggccagccatggcccgctcggcgtggcctcccgctggcgctcggcgcggccagcccaggacgctcggcgcgagcccccacggggcgtgctcggcgcggcctcctgtggcgctcgacgcgggcccccacgaggtgcgcggctccggcgcgagccccggcgcatggcgcggctgcctgctcctggcggcgcccgggcgggccaccacaaggcgcgcgcacggccccctcgttcggcgaggcgcgccggccaggcggcctccggccctgcgacggctggagcttgcttcctggcggcagctggtattgcgtctgtgccaactgcggcttctactctcgcctccggaataggcgcgttgaagctctgctccataacagag

SEQ ID NO: 23866 - DNA, 555 bp, Zea mays
  Peptide Sequence Number=SeqID_67241
atggccagtgaagatgatgcgtccacgtggagcatcgacgacacgcgggggctgcccacgacgggcagcaatggtcccgacgaccacaggcactggtggagatggcgaacgacgagcaactgccgctgcagtgggtggtggtggcagtggtgcctccaaatcgacgtccatgggggccgatgtagacgatcccgcgtcaaacaccggtgctggtggcgacggggatgcagtggggagtccacactccaccaccggcagcggaaccaccgctgtccatccatggagaacgcagaagtgcacattttgcacttgcacacggcgttcagggatctcgtgcaccggtgggagtgcagtggcttgcccaacggtgaacgcttccaacattgcatcatcaacaatatgaagaacttcgcgcatacggcgtatgcgcatggaaacgtgctcagtggcaaatggaaaacaacagagacaaatgacagaggatcgtttctttattgcagagatagatgtatatatagtgtagtacacagggtccccaaggggtgcgacccttag

SEQ ID NO: 23867 - DNA, 1041 bp, Zea mays
  Peptide Sequence Number=SeqID_67242
atggagaagcaaaaatccttgaaatcttggttgtcgaactgcttgccgttgtcaactgttagctcggacgccgcctttgtgcgtgatgcggaggacttggcggtgcggctcgtgggacgttacgtgccgaggacggaaggccagcgcagctttgatatccgcgggtcaaatgaccgtttgaacagggtcttcgaattaaatcaactgtcgtacgacggctatcccggtcaagacgaagcggaccgccgtgggaagaaagcggtggtggagactagagacgaccctgcgccggcggccgccccttcctcgaaaaagagaaaattaggtactgcgatgggaggacttggggtgtctgacagttttgctagagagttgatgaggacgtgtgcggccccgggggaaaggatgtcttcgcccgagctccaggagtcttcggctcggatgctgagggttaccgggggctgctggcctagaaatgttcctatcccctgcgcggctgaggaggactgttttacatctcgccgaagcggcagcggggggctgcgaaggctgtggccccccggcggaggcaagccgccgctggcggcgaaggcgggcgccgctgcacctagcaaggcgcccggaggcgacggcggggcgccggaggctccaaggccggacgagggccagcttgctatagctgcgcctggcgcggcgatcgcgacggccaccatagtgccgaaggcgaggggcgaggcgcttggcgccggaggcgaggtgtcggccctcgcgttggtcagggacgaggcgggcgcggcgacccgccggctgaagggagtgacggaggcgctgagtcaggtggctgacttcgccagccgtactgcatcgggggccctcacggcagctgtgtccaggccccagcgctggagaggccatgcttcggatagccgcgaggtattgcatgagcgcggggtcttttgctgcatagtctttctcgacctggccggcaactatcttggagtctgtcttgatgatacatgtggtgactccgagggcccttag

SEQ ID NO: 23868 - DNA, 87 bp, Zea mays
  Peptide Sequence Number=SeqID_67243
atgggttgcctggttgctctgacgctggtattgatttcctccttgctggttgttctgacggtagggaaggtgtggttcatcaattga

SEQ ID NO: 23869 - DNA, 1185 bp, Zea mays
  Peptide Sequence Number=SeqID_67244
atgtcttcgcgctcccttatgcaccgtgtctttccacctttcgagcccccggatggggaacacccgcaatccttccgtcttgccgttggaggaacgcaactccgtggaagttggtacctttcagccatcgttcggcttcaaggattttcatcatgcagcccggccgcatcccctcaccggtggtcacccaagacggtgacctccagtttgatggtggagagaagcgaaccgggctgcgattttggtcccgccctcagcttcaaggatgttcatcatcctggctggggcgggggccgggctgagccggacctcttcccccccgtgcgagccggctggccacctcctcttccagcttctagcggtggaaaccatcctccggccctgtggaggaggcgtcctccagccatgccggggagggcgaactgttgttgtccagctaggatgcaacattccgtccttctcctcgctttcgtggcgaggacgggagtgaggacctgccggtgcaccttgccaactgtcggcgttggtcgagaggcggacgccgccgtctgtgccgacgtggtggagtccctcggctcggtcggccttgctgtccgaggcttctcttgcttagttaaaggaacccctcggccgctcttcgatgagccgaagccggaggtagcggtgttagcacggacagaggcaaagttggctcgaaaagaagacttggtcagccagagcctggccgggtcgtccactggcgggaccgacaccggagttgagttgccgaggcaacaagccggggtgatgtcctcggggaatagctggccgaggcctcggggtggccggccgagccgtctgctcgagccggattcctggagaagaccctggcggcgatggcacgggtgtggtgctgatgtcgcccttcagagtggagatcctccaaccgcgtcgccgtccgaggctaggtcggacttcgccgaaggtgtagttgatgccgagggtgctgcggccccccttcaactgtcgacgtccgagcctgcaggatcagtcgagaaggcccgaaaaatcgtttcggcagaggagctttcgagcgtgaagacttgttcggtccgtggagtcacttatccgagcgcgagttacttatcgcagaaggtgatgagtgaggaaaatttcgacgcagaggagggggtcccccccttctag

SEQ ID NO: 23870 - DNA, 963 bp, Zea mays
  Peptide Sequence Number=SeqID_67245
atggagtcggcatgcaaccgcgccaagtgggcgcgccccttcgactccaacgtgcccagcatggaggcccaggcccacaagtcatgcaaccggcgcgccggttgctacgtgcgagcaactgcaccgccactcacaccactaccgcgcctcctcgactgcggaaccaacgggcaggagcagcagtcacgtcgtcagccaagcttacgtcccatccaggggcagcgagagaaccctctctcacggcgtgaagacggcgcgcccgtgttccgttccttgaacggctcgcacacgcgcaacggccgcctcgcgaaccactcgccccgtcgcattaactccacggccctgagcctccctactgataagaggttcaaaaggctggcccctcggaggggtttcaacggccgcctcagagcacttgggttctgcgcccactactggtcagatgttcgatggccggcccctcgaaagggtttaacggccgcctcaggccactcgggctccacgcccactactgatcaggggttcgtaggctggccctcgaagggttcacagtcgcctcagacacagagcgaggggatgaccctgggtacgtttcgatacataaccaaggctcgggctacgctcccgagcgccgcgtgcgccgctccgactgctgagccactcgatagagcgaggctgacagcagccaagtccggcctcaggcatcataggaaactccgcttcgcccgaccccagggctcggactcgggctcagccccagaagacgacgaactccgctccgcccgaccccagggctcggactcgggctcggccccggaagacgacgaactccgcttcgcccgaccccagggctcggactcgggctcagccctggaagacgacgaactccgctccgcccgaccccagggcttggactcgggctcggccccggaagacgacgaactccgcttcgcccgaccctag

SEQ ID NO: 23871 - DNA, 453 bp, Zea mays
  Peptide Sequence Number=SeqID_67246
atgacatccgagtcagtaacgttgggcagctcggtgcgctgctttgaaaaccgccggatgaggcagatgctccaactaggctcgagcggcgtcggagagcaaaagggtcggggctcggaaacgggcagggaacggtgctcgtcatatggtccggctgaagactcgcggaccgggtggttcgggcgaaggactgcgatcctcctcactgttgcagcgtcccccatgcctaggatggtagcctcggtgcaccttctcatcgaggcgggctcgatggtcgagatggtggtgcccgttgctgaggcgttcccgggcggcgggcgcctcgtcccgtgtacgctcgggatggaccgaggcttcccgaatgcgtcgggaggacatcgcgtgatgctccgagaggtcagctcacctgcgggaggcggagctatcggctcgtcgaaccgcggcgccttctag

SEQ ID NO: 23872 - DNA, 1101 bp, Zea mays
  Peptide Sequence Number=SeqID_67247
atgcatcgcgcccttccgccttttgagcccccggatggggtgctccagcgccgccttgatcttgctgtcgttggaggagcgcgacctcgtggagatcggcacctttcagccattgctcggcttcaaggattttcgtcgtgtagctcggctgcattccttcaccaatgggcagtttggtggggagaagcaagccaggctgcggcctccgccccgccctcagcttcaaggatcttcgtcatccttgctgaggcggagggagagctgagccggggttctacctcccacatgggccggcaggccgtctcctccttcagcattcaggggagaaggcgctcaccgaccttgcggaggggcgaacttcggcaacgcaggaccggtcggccgcaagcgtcgtcagctccagcgtgcctggctcgctggctcagttgggtctgtcgcggcctccaacgctgcctcctgccgcttgatccgggctcgggcgtctgttgcgccgtgcgcaccggtggaccgtccaagacgccgtacgccgcatgggcagcgttcgtgttcttggattgtcttatcctcagtccggcacgatgcctccgtgcggaggtcgaggcctgcccgtccgtgaggacccgagtggggatctgccgatgcaggctggggcgcccgccattcgtcaacgtggcgctggcgtgcaggtggccgctgtcgtcggtgctgaggtggtggcagccgaagaaggccctctggtatggaggttgttcatacctgcgggagcggaaccggagtcccgtttataaggagatataccgggtttttgccggagcaaaatgtaaccgcttcaatttttggaaccctccgctgctctgcgatgagccggagccggaggcagcggtgttagcgcggacagacgcggagtcggctcggaaagagacttcgtcggcccgggagatgatggtccttttggccgggtcgccgtccgaggccgggcctagttccgccgagggtggaaacaacaccgagggtgctgccactccccctgccgatgcccgaacctacaggaacagtttgtctgtagcgtgcgcatgctttttcacggccaccgaggcctaa

SEQ ID NO: 23873 - DNA, 462 bp, Zea mays
  Peptide Sequence Number=SeqID_67248
atggcgcttcctgttgacgtggcgcccgagtccgagccctggggtcgggcggagcggagtttcgtcgtcttccgggtcttagcccgagtccgagccctggggtcgggcggagcggagttcgccgtcttccgggtcttagcccgagtccgagccctggggtcgggcggagcggagttcgccgtcttccgggtcttagcccgagtccgagccctagggtcgggcggagcggagttcgccgtcttccgggtcttagcccgagtccgagccctggggtcaggcggagcggagttcgccgtggcggcgctgtccttctgtcagactggccagtggagcggtggagtgacggcggtcactttggctctaccgggggcgcgtgtcaggatgaagctttatgctgatgggggttaccagctgagaattaggcgtcttgagggtacccctaattatggtccccgacagtag

SEQ ID NO: 23874 - DNA, 420 bp, Zea mays
  Peptide Sequence Number=SeqID_67249
atggggtgcaccggcgtcgccttgctcttgctgtcgtcagacaagcgcggcctcgtggagattggcgctcttcagccaccgctcggcttcaaggattttcgtcatgcagcccggctgcattccctcaccaatgctttccatccttcatccgggcggcggtcgtgccgcgggccggccatgtccaggtcctacttgcaccgtcagctgcaccgggggtcactcaacacgtcgtacgccgcgagggcagtactcgtgttctgggacggcctcggcgaggacgaaagtgaggacccgccggtgcgctttggggcggccgctgttcgccggcgcggtgttggtgggttcgatcccacggacggcgccctccgactcttcggcaagaaaggcttgtcctcgcccctcgtgtggggacgtgggtga

SEQ ID NO: 23875 - DNA, 499 bp, Zea mays
  Peptide Sequence Number=SeqID_67250
atgggagctctagcccgacgattccacgcctggggaggggccaagctcgcctgcgcgccaccaagggcctgctggccgcgccttggggctcaccgtgcgctcggctgctggcagcagcacgccggtaatggccgagctgttgtgcacggggagagaggagggttgagcaacagcacgccgacaatggccgagctgctgtgcgtggggagagaggagggctgggcgccacgagggactgctggccacgagccactggccgcgcactgcaggggcaagctcgattcacaggagaactcgacgtgcactggactggctgccatgggaggaaagagagaggggagggattcgcctcggcaggggttggagcgagcggcacaggggcacgccggccacggggggaagggaagtcgcgcctggggacgccgctcgccatggcccgagatcgtgcgaagggtaagagtaggggaggaaggagatggaggggactcactgatgcctg

SEQ ID NO: 23876 - DNA, 96 bp, Zea mays
  Peptide Sequence Number=SeqID_67251
atggggtctgggcacagtacttgttctgccgaggctggttgcagaggtggtgacaaggatgatggttatgactatggtaatgctctcaatgagtaa

SEQ ID NO: 23877 - DNA, 123 bp, Zea mays
  Peptide Sequence Number=SeqID_67252
atgggtaactcacagctctcaaactgggttgagagaaaggggaggcttttaaaagatcagttcaaggcgacaacaggcaaggatatgagagaaaagatgaaggcattgaagagccagtggtag

SEQ ID NO: 23878 - DNA, 273 bp, Zea mays
  Peptide Sequence Number=SeqID_67253
atgcaggataggggtatgagcataataaaggatggagctaaagcaaggattgtatcccgacagggagagaatgcaaccaaggtcaggataggtaaaacaccattctcaaatcgagatgggaaagatgatatttcaaaagacaaaacttgtaaggtgtcaaaggattggggagcagtcaatgatggaatagatgatgcattatccccgaacagggatggaaatggggaggcttcaaagggtaggttcaatgtaatcaggaaggcaagggaatag

SEQ ID NO: 23879 - DNA, 282 bp, Zea mays
  Peptide Sequence Number=SeqID_67254
atggcgctcagccgcattcccgccctgactctggctagcctcgactaccgcgcaagcccaccagcccagtccatggattggtcaccggggtgggatacacctttcaccggcgagcacatctctgtgaacggcctgggcaccgcgctgctcggcctcgatcggatggtggaagaaggtcttcgaaccattggatttggaatggatgagagagattggagtgggggtgttggatggtttcgtagaagcagaaccgttgatctagcgggttatggcccggattag

SEQ ID NO: 23880 - DNA, 1704 bp, Zea mays
  Peptide Sequence Number=SeqID_67255
atgtcttgcgtcccacgtctcccccatttctcggtttccaaaaccgtcttcgcgcaatcaatagagagaaacccacgcgagtccaggattctagcttctgcatacgccgaacaggaaggaaaccccttaacccctgcggccgaggcgactttccctgcggccgaggcgacttgccaggcgatttctgccgctccaatccagctgtgctccttcaatctccgaacattggagccccgattgaagagccattgctttcctgataagttccagaaattgaatatccgttgcatcccttatgatgtcattgtctcaacttggataatgagcgatcgacagtgggatgttgttgctaggttgggatttcaaagtatatttgatttgcgtactgatgcgttagagagcagatctctcataaggtggttgatggataagttggatccaaacgacatgacaatacgcccaggggctggtaaagaactgaagataacaaaagagacggttcgtcttattttggaattgccaagtgatggaggtggcagggagttcactgattggtatggtgaagttgacgctgcttcaaaactgagacgggatctcaaaatttgtaaagaagagtttgatgttgttaagcttcaggacaagctagtgcttggcaatgatgatgagttatcaatcagatgtttttttctgattttattcaatcgacttcttttcccatctgcttcatggggcattacgaacaatgaggtcctaatgacatcaaacatggaccggatggctgagattgattggtgtcaattagtttatactgatttgtgtgatgctgccagtcgttggcacaagaggaacagaacaaacattacaacaacagtatatggatgttcactcattgttcttatatactatcttgatcacttacaccaccctgcatcacctgagaacaagtatggtactcctcgcattaagtattttgataacgagacaataagagatttggctagatgtgacagacgtgccccccgtcaaactggtgaaccatttggtcatgcagagaaatccctcccactacctcaatgcccccgacaaataatcatgtatccactcctcctgttcgaacccctgatcatcagcaacacgatcaggaaatacatgttcctactgatgataacaaagtatcggaataggaaggataaaatcctgttaaacatgatactccctcatctggcaactcctgaacttgctgcaagggatatttccactaaatctgcaattgctgaacctccccatgtatcacgtgaagaatgtgctcaccaactatttaagttcatttgtttaggacaactagatccgagcatgtctatcattgattttggaggatatggtggttctgtcttggatgttgtccaatcttttggccctaataaatgccttgagaacttttttatgcagggattcattgtctgtattcgtgatgatgatttattatacaatccagataccataagcaacacactcatactaaatgtcaatgctgggactgttttgaatatcgatgagctcaaacaacacagtataaatcagcagcccttctcaacatcagttcttaaagatttactagtctcgacgcttcctccggatgaagatctaaaccaaattaaactgatcatggttccttttttacgccgtagtcactggaccctttag

SEQ ID NO: 23881 - DNA, 102 bp, Zea mays
  Peptide Sequence Number=SeqID_67256
atgggcgggggcctcctggcagcgacatcgaccctgaggtcagtgctgccactgttcggcccccgggagcagaagtcgtcgttgtcgctgctgccggagcag

SEQ ID NO: 23882 - DNA, 570 bp, Zea mays
  Peptide Sequence Number=SeqID_67257
atggtgtctccggtgagctgcaagcgggtaatccgagtggacgtccgtgccccgttcgttgggggtcggctaggggcccagaggcacgcccaaaagtacctgcggcaactggcgcgccggccgcttgacgcgtgggcctgggcttccaagctggcgtgtcagaagtcggagaagcgcgtccacctggcgcggttgcatgccgcctgcatggctgcccgccccttccgcccgttggtctgggcaaaagtggggggtcgcttgggagggccttggagcgtgttggagaagactcagcccgtggcgtctaggagcgcacgcccccggatggggggtatccgccgcctttccgcctcctcgttggaggaacgcaactccatgggagttggtacctttcagccatcgttcggcttcaaggattttcatcagccggcccggccgcacccctacgccggcgatcacccaggatgcgtgtcggagtcgtcggccgggcttccggcggcccctcctgccggagggcgaccgccgtgccgcgtgcacgggaggaccacccacgatgccgcgcgccgttag

SEQ ID NO: 23883 - DNA, 3651 bp, Zea mays
  Peptide Sequence Number=SeqID_67258
atgggtatggttatggttgatatgggcggcagcaaggcagaggttgatgatggaagggtggtggaggtagatgggagtggagcgatggtggtggcattggtggtgatggggaaagaagtagtgctaggggtggtgggcgctgggggcggcggtggtgttggcgacctactggacatgcggtcgatggcagcgattgcggcaaatgtgttgacagcggagatggtgggtggagttgatcccggtggcgacttcttcggaacctggcatcaccgataccagattgttgggattagggttacgaatgtcgtacgagtggtaggtttgggatctagggccaggacctggacgcttgggagccgtccagatgctggtggagaaggcgcggatttcattgatattgatactgagacaagaataccatatgcagctgaatttgcggagtcaatttatcaagtagaagtccctgtaaaacatgatgatgatgataactgtccttatgctaaagatagctactgcatggaaatcataggactagagaatggtcaaataataccccagttggaggttagtatgaattcttgggagcttgatgagtgcccagcaaaaacaatgatatccaatttttttcatagtattattgaacacttatttgatggagcacaagtctgtcttccatcatttggctcaaatgagttcttgagaccatgtgatattgacatttttgccttggtttgcaaagatgccccacttgtggagtatcaagcagataaaccaattacagcaaatgatgtagcagtaatggattttgtaaggatcaatgatggtattttactggataaaaagtcagcattataccctctcaaacctgatgggacctgttcacattttccttgcttcattctctttgaggaagtaaagatcatcgactttccttccaaggatgcctttaagtcacttgttcttattcagtcagagaaagctgagatgaatacatctgaggaaatattcaaagacgactttgatcaagcaaaacatttctatgaatcagtggttagctctgaattggctctagttgatgatacattcaaatcactacctacacctattttacatgatgataaagcaatgcgatctatgcttccccctatagaagaagtactttgctccctaaaaccacttcctctatctgcagcagatgggatttatttggattggcatcttttatcagaagggccatgcaaccgggagagttgctctacttatgagagcatggttgaggaggtaaagccttgcagtttaaattctgaactacaaataagtggccagcagatgccagcgcttgacattggttttctggaggattttccgagaagtgcaaagcctcaacatgaggacaagcagaatgaggtttatgttcctgggcctatatctcatgatccatcagctaatttggaagcaactcaaaagaacatgctagaaaatgttgttagaggtcatacccacatggataaattgagttcagaaaaggaatcatccttgtttgagtcaacgtcacagtccaatgggctaagcttctacttgaatgtgagaaatggcactaataaagtgagaaaagctgaggatatttctaccttagacatcccctcttcaaaacaagcagcttcaatttcaaccagacctaaagttaacaaactcatagaaattcatcctgtcaacctctcagatattatccaaggccttatcaatgacatccatgttgcatattacctatgtttctttggtctgcatgccgcctatctgtatgtaggcaatttgactggaacctttgaaattattcctgagaggttaagacatcttcaacgctgcattggtgaagctcgactgaaagctgagaagcaattacaggagtctcatccgtcattatctgtcatcgagacaatccttagatctaatacccaaatcgaccaaaagatccttatagtgtctgatagagctttctggttgccattgggccaaaagcttactgcaatgaagataacatctgttgagtttggaacataccattcaaccacttattcagatgcggtgattgagacaaattctaaaagatgtatgctgcaagaattatggaaatcagactgcattctgctagataacaagaacatcccagcttcattccccttcagtgaattttgcatgatagtggaatatggaggcccaaataaatcatctatcttgttatctctggctcccaaattagatgggttgccaccactgcatttcctgtatgtcacagttgatggtgaaggccttccaaatgctcttgtcgaggacaatcacacagacccggatttgaaatccacattggatgctgctttgcatacacttcagaaggacttgcaagagaagatgaacaaaatgcgcattgttgattcattaaactttataccggcaacaaatcaacagcaacatttgcagaccaatcatctcactgtggattcatcaaaaaaaattcctgcagatgttcaactgcacaatgcgggaaatctgaacgaaaagaatattgttgattcacacaacttagtgactgcaactgaacagcccaatggcttgaaccaaataaccattgccaatttacaaaattttgtgcctgtagttgagaagagcagttcgactgttgtatctgcgaatgtgataaaagccccccaagtcaaccaatctgccggtgtccttcctctcagtgagaaaatggacagcaccaaagcaggaagattgcctggcccagaggtggcgattgttgtcaatactggaaatcatggaaaaaatatgcttttctctcgaagatcatcttatcagcagatactagctttggagagaggaggtatgcaggttgtagagcgagatgttgatctgcctgtggatctaatacttactgcggcagtttgtttactatggtatgatacaagaacctctggttccagtgagttaacaatatcagcaggcacatctggtataacaaattttctagaggatattgctaccaacgttctgatggcacttagcttctgtttctgtggctgcataatggtcttcgagggtgaaaatcacttgctttctgctgtaatggaggcatctgattctctatatgcttcagctgttaacctggacatgaatttgcagctattcttctcagaaatgcccaaatcaacagatcaaatcattctcaattgcatcaggaatgctgttaggataaatcaggctctttgtccacaaataactgaatcggaaagtctggttgagtcatttctcacagcattcccttcagttagtcctctgtctgcacacatgatactttcttctggcagtcttatggatttcctcagatggtcacatgagcaacgtactcaggctgttgaaaagtatcatttgccaccgcagagcatttctctcttcagtgctttgtgcaaattcggtgaactaggtgaatcaaagtctgtaatgactgaatgctcttctgttgattcagatatcagtagtactttgctgcagtctccgaggaaaaagaaaaggcgtgccgcacaagacttttccgttgcagttagtaatcctgcttccctaatccatgtactcaattgcatggtgactgtgtag

SEQ ID NO: 23884 - DNA, 543 bp, Zea mays
  Peptide Sequence Number=SeqID_67259
atgcggactcgcttcctcaccgccgactacttcgcgccgtcgccctcggctgccgcctcctccgacctagccatagcgctagcatcccttcccttcccttccctccccgtcccgactcttcctcccgaaccccacctcaccccattcccgttctccgccgatttcctccccgccgttagtgtagccggcgatgatctcgactcgctccccttcgactccgcggtgaccgagctcctcaccgctgtcatcccgcagcccctgcctgtgccggatatccctgtcgctgacgagggactggaagacagccacacaaacggcgataaggaagagggcctcaatttggagggctcagcagttactaagcgaggggacctgttggaggccttgtttgaggttccagagctcgatttcctgtcggttttgcagaagaaaattgcatcgtttgatgacgaagagccagatgcttgtgccggcacctattcatttggtgtccgagacatgaaaatcattccagtactctacaccatctcatctaagttttaa

SEQ ID NO: 23885 - DNA, 870 bp, Zea mays
  Peptide Sequence Number=SeqID_67260
atggggcttggccttggcgtgcgggcggcgcccttcacgtacgcggcgcacgcgctggccgtcgcggcggcggccatggtgttggtctgggccatctacttccgcggtgggctcgccatcgaggccaccaacaagaacctcatcttcaacgttcaccctgttcttatgcttatcggttatattatcatcggcggcgaagctataatggtatacagggtacttccaacatcgaaccacgagacaaataagctgatccatctagttctccacgggattgcacttgtccttggtgcggttggaatatatttcgccttcaaaaatcataatgagagtgggattgccaatctttacagtttgcactcttggattgggatagggacgattactttgtatggtattcagtggatagttggattcgttacattcttcttccctggtgctgcgccaaacgtgaagaagggtgttcttccttggcacatactctttgggctctttgtctacatcttagcactggctaatgcggaactcggctttcttgagaagctcactttcctcgagagctcgggtctcgacaaatacggcacagaggcattcttggtgaacttcacagcgttggttgtcgtgttgtttggtgcctctgttgtggtggctgctatagctccagttcgccttgaagaaccacaggcccggccacgcgtcgtcgcgccctctgcggcgcggccagctgacgccgtgcgccagccaacaccgcggcgcccgcacggccgcgccctcctggcctcctcggtagacgccgaggaccgcaacgacgaaggctaccaaagctgtctgtctgctttggaacgagcggttgggaacgacgctgtatag

SEQ ID NO: 23886 - DNA, 1311 bp, Zea mays
  Peptide Sequence Number=SeqID_67261
atgtctttgcgctcccttatgcatcgtgtctttccaccttccaagcccccgaatgggggatacccgccgtctttccgcctcgtcgttggaggaaagcaactccgtgggagttggtacctttcagccgtcgttcggcttcaaggattttcatcatgcagcccggttgcacccctccgccggcggtcacccaagatggtgacctccagttcgatggcgggggaaagcgaaccggactgcggcctctgcccctccctcagcctcaaggattttcatcaccagggctggggaggggactgccgcgtgcctggctctcggacccgagtggcttcggagccgctctcggcgctggcttccgccatggcagctggaagaggttcttccgccgacgagatagccagggccgcccacagaccgacctccaactctacggccttctgcccgtccttgcctcacgagtttgggcacggggggggcctcctggcagcggcatccgccctgaggtcatcgctgccgctgttcggccccccggggcagaagtcgtcgtcgccgccgctgctggagcgggcgacggcgcgccgttcgtcggtcttccgttgctccgcaggcccccctcccgtcgagtggggaacccctcggccgcccttcgatgagccgaggccaggggtagcggtgtcagtgcgaacagaggcagagttggctcgaaaagaagacctggccggccggagcctggccgggtcgtccgttagcgggaccgacgccggaattgaccagccgaggcctcgggtcgggctgacgtcctcggaggacagctggccgaggccccggggtgaccggccgagccgtctgctcgggccggattcccggagaagcccccggctgcgatggcccgggggtggcgatgatgtcgtccttcagagtggagatcttcggaccgcgtcgccgtccgaggctaggtcgggcctcgccgaaggtgttgtcgacggcgagggtgctgctgctccctttagccgtcaagatctgagcctgcaggatcggattatcttgtacgagagctgcttctcacggaaggtgatgagtgaggtatccgtatcccggaggcgtaggagtccctcgtctcgatcggccttgccgcttacgcgcactcttacccgtccatggggttctgtcaccgacgcagttgagaaggctcaaagaatcgctccggcagaagagcttccgaacgtgaagacttgttcggtctgcggaatcacttatccgaacgcgagttacttatcgcagaaggtgatgagtgaggatccgctttcgaagtag

SEQ ID NO: 23887 - DNA, 99 bp, Zea mays
  Peptide Sequence Number=SeqID_67262
atggcttcatcatcatcaagaattgtccctgcaagaactatcagacaaggatggagattccttggaaaagatagggagcttccaagttccaatgcatga

SEQ ID NO: 23888 - DNA, 420 bp, Zea mays
  Peptide Sequence Number=SeqID_67263
atgggcaagaacaataagcgcaagcgtgagccaactcctccatcggaggagtttggtgactcggagtactcagaggaggagttctcctctgagtctgaggggtctccggctcccatccccctgcgtgagtcatctgacgactcagacgactcccaggggctcgcagcggaggtctggacgtacatccgggccgtcgagcgctccgggctcgagggctcggatgagtcggagtactcctcggatgaggaggactcggacggcggcggcgaggacgaggacgacgatgacgacgacgacgacggtggcgacggtgatggtgacggcagcggcggcggcagcaagggcagcaaccggggcggcagcagcaggggcagcaccaggggcggcagcggcggcggcagcaacatggccagtggctag

SEQ ID NO: 23889 - DNA, 375 bp, Zea mays
  Peptide Sequence Number=SeqID_67264
atgcagttcttcggtggctcgttgtcgacatcgatcgcgcaggagcgaccccaacctctggcagctcccccgtccatagtggcacccacggcggctgcactgcccccgcccgggtcacgactcgtcacaacccacgctcgccgtcttcgcgcgtctgatattgttgccaccgcggagggcggcaccatcttcacggacctgtctgcagatgtcaaggaaagggagctacacaacctgttgtgctggctcttgggattcgaggtgtcttactggatgcggacggtgccggagctgagagaggtcattcgaaggtcgatgccagaggtggagaagacaagggtcataaatagagaagagaaaaacacttctctctag

SEQ ID NO: 23890 - DNA, 264 bp, Zea mays
  Peptide Sequence Number=SeqID_67265
atgaagaagagcaagagagatttggagatgaagcacaaaaaactgcagctctcaaaactcactcaaagatttctctccaaagatttgaaatgggagaggcaagagatgtgtgatagagagtgggaggtgttcttcaagttagaaatggggtttgggtcgtgcacttctatgggggagagagtggtagctgatccatttgctttggccttaacttctccccctttggcattaagcacaaaaacgggaccatttttggccctttaa

SEQ ID NO: 23891 - DNA, 309 bp, Zea mays
  Peptide Sequence Number=SeqID_67266
atggcgcttcctgttgacatggctggcctgcgccctaggttgggcgacgtggaggctcctccaaagccgaggtcgaaggccagggcggagtccgagccctggggtcgggcgaagcggagttcgtcgtcttctggggctgagcccgagtccgagccctgggtcgggcggagcggagttcgccgtcttccgggtcttagcccgagtccgagccctgggtcgggcggagcggagttcgccgtcttccgggacttagcccgagtccgagccctgggtcgggcggagcggagttcgccgtctttcgggacttag

SEQ ID NO: 23892 - DNA, 231 bp, Zea mays
  Peptide Sequence Number=SeqID_67267
atgccggctcgcgcacgcctggccgcgcgccctgccggccctttggccgcccgcccggccgcccccccccctgcgcaggccggttcaaccgcccctaggccggtggcaatgagattgatggttttgatcatggttatggtgctggttgtcagcattgcaaccactgctcaggcgaagatgaaagctgtggaaggagacttccaggagttccaagactacgacgagttctag

SEQ ID NO: 23893 - DNA, 888 bp, Zea mays
  Peptide Sequence Number=SeqID_67268
atggtgcatgagagaatgaaacaggaccttgcaaggaataagtcatggaatattgggaaatcagatgaaagctcattggagaaaacctatactgtgcagaattcctgtgacaagataaatgtaacagacaccaattcatatcgagtttcatgggatgtgcatgagtggtttcagcataacttcttacgattgttcaaatcagcacatcaaacaaataagatcgctcacaccttcttaaatctgaagctcatgggtgagcaagcaaatcacacgttctcggagaagcatctgtacattcccaccgacaccgcgaaatcctatgccaagggcgctgagatccaagatttagagggcggccgtttgctgggcaccgctggagggtctggccggagtggagatggcatcgcgggtagtggctccgtcgcccttcgcaagggtggtggtatgattggtgccgggacacctgggggaacggagtcgctggcgaaggtgctgacggacttcgcggcgaaggcaatggtggcaccggtattgatggagatggcatcactggagacggaggagacggcactggcgtcacgggagaaggcggcgatggcaagggtggtgttggaggagtgggtgttggtggtaccggagccacgggaggaggggacgacgtcactggtgctggcaccgctggggatggcggcggtaatggcgtcagtggtggcgcatgcgtcactggaggcgatggaggcgcagatggtgcaggcaccggcggcggtgatggcgcaggcggcattggaggcgccggaaagctggggagccggcgtagatggagcgcgtggactgcgaggcatggcggaggttgcggcgcgcggatccaccacattatgccatcgctaa

SEQ ID NO: 23894 - DNA, 240 bp, Zea mays
  Peptide Sequence Number=SeqID_67269
atggcctctgactccgacaatgtgatgaacatgcgatgtattcttcttaagaaccagtcctcctgtatggccgtggatggcacactctcgcaccctagctgggtgtggagaccaaaaggtgctaggccatcgacaccgcctgccacacttgagagggttctttatgaagttcttattcagattcttcgagctcatgtctacctagcagttcaattgctcaagacatccatcatcaagtga

SEQ ID NO: 23895 - DNA, 315 bp, Zea mays
  Peptide Sequence Number=SeqID_67270
atgccctttacatttggtagtaattctatagtaatccaccaagctcaagcgccgccgcccccaccggtggtcgagatcatgctcgcgcccgttgacctcgcgccgtccaggagcacccgcccaggggacccgcgcccctgctgttccgagccgagtagtgcccctgctgtcccgagccgagcagcatccgacgccgagcacccagccgcccctactgttccgcgcccagctgtccagaccgcgcctccctacgccggtcgaccccgctccgtccaggagcacccgcccggaggacccgtgcccctgctatgctga

SEQ ID NO: 23896 - DNA, 300 bp, Zea mays
  Peptide Sequence Number=SeqID_67271
atggccatgatgggttcaacatcggaaaagatgtacctctgccagttatgtaatcgcttccgcatttctttatctccgatggtctgtaatgtctgcaagacgggtgaaacgttcctggtgaggctctgtctcagggggcacttaaggcccaacttcggtttcagattgaattactacaacttcaacttctgcctgctttgttccagcttcgacttctgcctgctttgttccaacttcgacttctgcctgctttgtttcagcttcgggttgcgatttcgaagcttcaacaagttttcttga

SEQ ID NO: 23897 - DNA, 210 bp, Zea mays
  Peptide Sequence Number=SeqID_67272
atggcgacgaccgagccgtgggaggagctcaccacggatcgcgcgagttctgttgccgcgaccacgtggatgctggtgacaggtgggcccccaaacgcagcgatgaaagatatctttaaagcatatatagttttgggtaagaaggaatggggtaagaaaagactccatccaagattgtggatcttgactcatcttggtgatctcacttga

SEQ ID NO: 23898 - DNA, 312 bp, Zea mays
  Peptide Sequence Number=SeqID_67273
atggcccaagggcacatttccctttcacttctgagtagtaatacgtacatccgggccgtcgagcgctccgggctcgagggctcggatgagtcggagtactcctcggatgaggaggactcggacggcggcggcgaggacgaggacggcgacgacgacgacgacgacgagggcggtggcgacggtgacggtgacggcagcagcagcaaggacggtgacggcggcggcagcaggggcggcagcggcggtggcggcagcagcagaggcagcaacaggggcggcaggggcggcggcagcaacagggccagtggctag

SEQ ID NO: 23899 - DNA, 564 bp, Zea mays
  Peptide Sequence Number=SeqID_67274
atgggcgcaattcaggtcaaggctccgtccaagggacacgatctcgcctcgcctgagcccagcctcgggcaagaacagcagacccaggaaaacagcgccgcctgcactgctccgactgctgtgccacccgccagggtgaggctgacagccgccgagtccaacctgaggcgccataggaagctccgcctcgcccgaccccaggactcggactccacctcgacctcggaagacggtctccgcctcgcccgacccagggctcggactccacctcgacctcggaagacggtctccgcctcgcccgaccctagggctaggactccacctcgacgtcggaagacggtctccgcctcacccgaccccagtgctcggattcaccttccatctcgggagacggaaaagattgaccaggacctcacagccccaaaggtagtacttatcaagggtataagcgtccctccaaagtcgcataatattctcgagaaggggagcaactcctctccaatcacaagctccggatcgtggggcatcaagggcctctggtaccttctcgtggaaaaactttaa

SEQ ID NO: 23900 - DNA, 594 bp, Zea mays
  Peptide Sequence Number=SeqID_67275
atggccgtttcttttgcaaatgtcaacgccgaggcagggctgaaaaagcttgatgagtaccttctcactcgcagctacatcactggctaccaagcttccaaggatgacctggctgtctactcttcatttttggctgatccctcatccaagtatatcaatgtagcaaggtggtttaatcacattgatgcactcctgaggctgagtggagttaccgcagagggcctaggtgttaaggttgagccatcagcggttccttcagcttcaattcttgatgttgctgatggacaggccccagctgctgacgaggatgacgatgatgatgttgacctttttggcgaggagactgaagaggagaagaaggctgctgaagaacgtgctgcggctgccaaggcttctggcaagaagaaagaatccaagcttgtcccagttggatatggcatcaagaagctgcaaatcatgatgaccattgtcgatgaccttgtctctgttgacactctcatcgaggaccatctctgcgctgagccagtgagcgaatacgtccagagctgcgacattgtcgccttcaacaagatctgtaagtcattcatcacttaa

SEQ ID NO: 23901 - DNA, 117 bp, Zea mays
  Peptide Sequence Number=SeqID_67276
atggcctccccgttcctggtctgctccttctgtcaccgctacgaccgtgtgtccctcctcgacctcgcatcccgcaaccgctctatgcacatggccgacgacacctgggctttgtag

SEQ ID NO: 23902 - DNA, 456 bp, Zea mays
  Peptide Sequence Number=SeqID_67277
atgggtactacctcgctgatgagctgggtgcacttcgtttggcagcccaaccaagagtcatcggtactcattatgtcgcgcgcgttcgacgactactatatcgaggattgtggcatcatcttgtcgccggaggtgacacagaggaggatcgacaacagtgaccagttcgtcatactcgccaccgtcaggggacacttttgcccctggatgaaaatcgccgctcacatctcatctggcatatacggcgacgcctctcctcggtgctcggtcggacctcagcttccaccggcggcgtccgaaccttggcctctgtcggcggttcccgagctcccctcggcatccaccgacgccggccggctcactatctccctcccccccggtaggggcgagatggaaggggaaagtgaccttcgcttagatgctggatgggatgattgcttgatgatgagggtttaa

SEQ ID NO: 23903 - DNA, 279 bp, Zea mays
  Peptide Sequence Number=SeqID_67278
atgaagggcatggcagactctctccgcgacctcagcgagcctgtcgccgaccgtaccttggtactaaacattctgcgtggcctcagcccccggtacggccacctgaatgctctcatcaagaggacgccttccaccactgacggcggtcgtcgctcccgcaagggcggccgcggtagtggcgggtcctcccgtggtggtccctccggccggggtggtggccaggcgtggccatcgttctacaacccctggaccgggaccatcgccatgtggctgggctag

SEQ ID NO: 23904 - DNA, 255 bp, Zea mays
  Peptide Sequence Number=SeqID_67279
atggcggctctcggcccccttacggaagcaagaggacgtcagcaaggactcgacagctccgacagttgtccttccaccaggctccagcactcctccgacggccacgacaccacacgaaccgggtgccaagacctctccggctgccacgacggcataaaagctattacagatgaggcccgtaacatgcttgtccacgcggggcccgttacagtgggccgaattccacgtgggcctccgagcgagatgaggacgtag

SEQ ID NO: 23905 - DNA, 1245 bp, Zea mays
  Peptide Sequence Number=SeqID_67280
atggttgccctccaagggggttgccccccttttaaaggcgactctccccacttgcgccctcaaccgttgcgggtcgagtcttctccaacacgctccaagattctccccccacggcgcgggggctgggtcccacatgtcatgcaaaccgatctaggagagaagaagccaaaccgccacgcgcgcggtgcatgcaaccacccggcggttacaagcactcctccactttcgcctagaccagcgggtgaaagggcggacagccatgcaggcgggcatgcaaccgtgccaagtggggcacgccccttcgactccaacgagcccagcatagaggcgggcaggtgcagcggtcacgtcgtcagcccagcttacgtcccatctaggggcagccagggagccctctcccacggcgtgaagacagacaggcggcgcctcaagcgggagaagcaagcaacgcttcgccttcgccataatgactgcgtcaaaaaaaaggctccgagcctccctactgatcagaggttcgaaggctggcccctcggaggggttcaatggccgcctcagatcgattgggttctgcgcccactactggtcaggggttcgatggccggcccctcgaagggttcaacggccgcttcaggccactcgggctccgcgcccactactgatcagggcgtcgcctgcgccgctccgactgctgagccacccgacagagtgaggctgacagcagccaaggccggcctcgggcgtcataggaaactccgcctcgcccgacccaagggctcggactcgggctcagccccggaagacggcgaactccgctccgcccgacccagggctcggactcgggctcagccccggaagacggtgaactccgctccgcccgacccagggctcggactcgggctcagccccgaaagacggcgaactccactccgcccgacccagggctcggactcgggctcagccccggaagacgccttagaagacaacgaactccgcctcgcccgaccccagggctcggacatgggctcgaccccaggagacgccggactccgcttcgcccgaccccagggctcggactcagccctggcctcagccgacagtctccgcctcgcccgacccaagggctcggactcgaccacggccacggaagacagactcgacctcgacctcggaggagcctccacatcgcccaacctagggcacggaccgaccacgtcgacaggaggcgccatcattaccctaccctga

SEQ ID NO: 23906 - DNA, 56 bp, Zea mays
  misc_feature (52)..(52): n is a, c, g, or t
  Peptide Sequence Number=SeqID_67281
atggcgaacgcctcgttttcagcccaaacgcaaggccgaacagccagtgtancccc

SEQ ID NO: 23907 - DNA, 189 bp, Zea mays
  Peptide Sequence Number=SeqID_67282
atggaaatcggcaagaaggccacaagccacgggaaggctccatcaaaggagtccggcatcaaagccaaggagggaattaatgtgggcagcaagacattgaatatggtgggtggagggggtattaatagccctcacccaccaactagccgttaccaacactgttctgcgcatgggcgcaccggacagtga

SEQ ID NO: 23908 - DNA, 486 bp, Zea mays
  Peptide Sequence Number=SeqID_67283
atgagggtggcgtactggactgaggcatcagaccggtttgacagagaggccttctcagaaaatgagtttgttagagatatgtattatagtttgaattttattattaatgagctcaactctattggaataaataagctaggtgatgtgaacattgtaaggaagatcatctcccttctacctcaacaaaaatatgggagcatcatcaccattcttcaccatttggaggacttgaaccaaatgaccctcacgcttttgatcgaaaaaattatggcatttgagatgtcacaaaagatgtgtcaagaagaatcaacccctttaaagccatgtctgttcacctatgatgagcacaaaatgatgaaaggcaagaagaaggttgaaaggttaagttcctcaagtgaagaagaggaatatgaagaagaagatgaagaagatgatgaagaagaagaagaagatgatgatgatgacgatggtcaagcctctacatga

SEQ ID NO: 23909 - DNA, 510 bp, Zea mays
  Peptide Sequence Number=SeqID_67284
atgtcgcgtcttctcgactgcgaaaccagtacagcgactcgaggcagccctgcatgtgacccaacagtgccaattgagtgcaacgatcacaggggttcgaaggttgcgccctccggggttcggcaaccgccccagaacactcgggctccgagccctctactgatcaggggttcgaaggctggcccctcggaagggttcgacagccgccccagagcacgcagagtcagggatgaccctgggtacgtctgttacatggccgaggctcgagctacgctcctgaggtaccctaggatatttccgagaccagcaggaacgatttgtaacggaatcccaccggagcgaggcatcgagccctcggaccctatcgaatgggtccgggtccggcaaatcacctgcagaggatcgggggctgctctcgcactaggctatggccgaactgttgaccacgtcaaaaccagcgtgaaaactcgaaacctgaccgtacacccaggctacggccaggccgcatga

SEQ ID NO: 23910 - DNA, 234 bp, Zea mays
  Peptide Sequence Number=SeqID_67285
atggtgtcgtgccctgggtccaagaaggggcagggtgctggaggagtgatgagctgctcgatggcgatgcgcggacgacgaggaagggcccctgatgcagcgagaacgagaaggtcgtgttcatcagcatcgtggttcaactttgctttgttgggagtcctagtggggagatatgctagcaggtccatgcgtggttattgtgtggaaattttcatgacaagaaagctaatataa

SEQ ID NO: 23911 - DNA, 1545 bp, Zea mays
  Peptide Sequence Number=SeqID_67286
atgccgcgcacgaagaatgtgtcggcgccagggggaggcgatgatgaggatcctcgtcgccccttcaggcaggtcaagggcaagacagttcacctggagcagcaggaaggccgcaagaagcggcgtatggacagagcagcccgtgcagtggcagcagccgctgcgcaggccgagcttggagatcagccacagactccgtcagatcagattgcataccgtgttcgtcgtctcgcctcccggcctcgctcctccactcacaccactgcttccactccaccacccactatgcctgctcccgtcacccctgttgcgccatccaccaccacagccatacccgctacctccactacaccagcttccactgctcctcctcccgctcccgcttcagctcctcctatccctccacctcgattccgggagcgcgatgagactgaggtacgaccacttgctgcggatcccatactttttgaccttcagcgtgctacagcagcacgggtacgtaggttcagatacgtactcgtagagtcttggttaccggctcagagggaccctgcagcagttgacctattcagcacccgtattcaggagtccttctttagggcacagttgtctgcacagattgctcttcgagtgcaccggcttttggatcttccagcttttctgcttgccgccggtgctgactccgaggcgcacctcacatatctgtctggccttctgacccttttgactaccagcggcagtcagattcgccagctctttggatttcccgagtcgacgactcgacttcacagcctctgctacggcacctctgaccctcctcgtcgccctcacggcggtgtggctccgggtacagctcacgtcgtggctctgttccgcccgcccttctcagatgggtcgcgacgttcaccggcagattttactacagcagccaagtacttatttgagcttatcagactgactcttcttccgaggatgggatacagggaggctaccacacatattcagctctggctccttggtgccctggtctctcactctgagtttgacgtcgtggatttccttatttgtgagatcgaggacaccgttttggatggcattcgtgctcgtcgacagttgccatatgctcactacttgtgccacatctttgcgcagctgattcggcctccacagtttcagggcacgcttgaggcctcacgccttgtttttggatcctaccgtcctgcgcctgaggctcctgtgccagcttctgctcctgtttttaactctcaggccgaggatgcagctcttcgtcagttcgacactcaggatacaacagttgttgatgatgatgatgattttggggttcctcctccgcctccgcctcctatgcctccaccctcacatgatcatgaggctgggagttctagtgctgcccctgctgcccctccagctattgaccctgctattgcttcgattctccagtctctcactcagcagcaggctcacctggcagccgagcagacccggttatccgagaggatgctctcgatgtttcagactatatag

SEQ ID NO: 23912 - DNA, 219 bp, Zea mays
  Peptide Sequence Number=SeqID_67287
atggctaagctgagcttttcagctcagctgaacttcaactgtgttgagctttctcaacttcagttgaacttcagcttcaactggggtctaggcaagttcaaccggtgtccaggcaggttcaaccgaggtccagggcaagttcaaccggggtccagagaggttcaaccgggacctagggaaagttcaaccggggtccagagaggttcaaccggagtctag

SEQ ID NO: 23913 - DNA, 132 bp, Zea mays
  Peptide Sequence Number=SeqID_67288
atgacgaccgacaggccacttgagctactccacatggatctatttggcctgatagcttacataagcatcggcgggagaaaaatctcaaacccaagaaactttaaagggattcttgagacgggctcaaaatga

SEQ ID NO: 23914 - DNA, 1353 bp, Zea mays
  Peptide Sequence Number=SeqID_67289
atggccgagatctgctgcgaagaagccaagtccacgccggcgaccgccgtggctgcggcttcagtctccgccacggccgctgcggccgccgccgtggcagtggcctcctcggcgttagagaggaggcgacgcaggttggagatgaggaggttccgcgtcgcgggcgatcccgaggcgccggtcgcggaggacgtccgcgccgccaagcggcagaggctggcgcgcacgctgtccagcacctgccccgacgcgggctcaggctcgggctcggactccgacaggcctgccctaccggagcggttgcccaggtacggggtcacctccgtctgcggccgacgccgcgagatggaggacacggtctccgttaggccggactttgtgcccggcaccagcaaacagcacttcttcggcgtcttcgacggccacggctgctcccacgtagcaaccatgtgccagaacatgatgcacgaggtggtcgcggacgagcacaggaaggcagattgttctggcgaagagacggcgtggaaggccgtgatggagaggagcttcgcgcgactggacgagcaggccgccagctgggcgaccagccgcagccgcgacgagccctcctgcaggtgcgagcagcagaagcccttgcgttgcgatcacgtggggtccaccgccgtggtcgccgtcgtcagccccacccacgttgtcgtcgccaacgccggcgactcccgcgccgtcctatcccgcgccggcgtccccgttccgctgtccgtcgaccacaagcctgaccggcctgacgagctggcgcgcatcaaggcggcgggcggccgcgtcatttactgggacggtgctcgtgttctcggcgtcctcgccatgtctcgagccataggcgacggatacctgaagccgttcgtgtcgtcggagccggaggtaacggtgacggagcgcaccgacgacgacgagtgcctgatcctggccagcgacggcctgtgggacgtcgtgaccaacgagatggcgtgcgaggtcgtccgcgcgtgcttccacagcaacggtccgccggcgccggccgctcgggcgaacggcgcggccctccgggcagccgagaacggatccgcggccgccaagggcgtgagcgtggaggattccgacaaggcgtgctccgacgcggccatgctgctggcgaagctggcgctggcccggcggagcgccgataatgcgctgttgaagccattatcgaggcctgcgccgcgccttttggtactcctctggagtctggagtgctacggcggggcgcgccgctcgcacatggcgcggctggttgacaggagctgggtgttccggggtgtcggagaccccgtagcgtag

SEQ ID NO: 23915 - DNA, 441 bp, Zea mays
  Peptide Sequence Number=SeqID_67290
atgggcaagaacaaaaagggtggaagttcgtcgcaccactccggcgataagcggaaacgcgagccaagtcccccctcggaggactttggggactccgagtactcggagaggagttttcctctgagtctgagggggcgtcggtctacgcctctccccccggtgtcgtccgatgactcggacgattcccaggggatcgccgccgaggtgtggacgtacatccaggctgtcgagcgctccgggctcgagggcttggatgagtcggaggtctcctcggacgaggagaactcctccgactcgtccgaggaggagagcggcggtgatggcaacgacgagggcgacggcggcgatggaggtgacgacggcgatgacggcaagggcgacggcgacggcaagggcaccggtggcagtagcaaggccagtggcaaagcgccactggtttaa

SEQ ID NO: 23916 - DNA, 1455 bp, Zea mays
  Peptide Sequence Number=SeqID_67291
atggttgtgcttgtccagaagccgtggctgcccatcgacctgcgtctgccggcagggccgcaggcgtcgctgggcatcctggcgttcgaggcggcggcggccatgtccaggctgctgtcgctgcaccggtcattgtcggaccaggaggtctcccggctgcgctccgacgtcatgcgctcgccggccgtggcgtacctcaactccaccgaccaggcgttgctcctcaagctggcctgcgccgagttggtcgtgtcgctggacgccgcggccgccgccgtcgcacgcctcggcctgcggtgcggcctcgactttggcggcgtgtacgcctgcctcaaggccggcgcccccgatgcgcgtcttgatccgctcgtggccaaggggctcagggtcaaggccaagaagatggagcgcctcgtcgccgccacggccaagctctgctccgagatggaggcgctcgacgaactggagtccgccgagcggaagatgagcgtccagggctggagccgcctcagcggccccatcccgcagcagccacaggcggcggcccagcagcagcaactgttggccaaggattcacccggcgcggagtcgcttcggcaggagctcaagacgcagcaactcaaggtgaagcgcctcaaggaggagtccctgtggaacgagagctacaagaaggccgtggggctcatggcgcgcgccgcctgcgcggtgttcgtacgcatctgctccatcttcggcccattcgtccccggcctcccgccgccgctgccgtcggccaccacggacagcgtccagacccggctgtcgaagctgctgcacccgcgattggggaagacgaaggcgtcgtccgggccgatcacgcgtcgggacggcccctcccaccgcgtgcacccgccgatgagcagcaactcgtgcccgatcatcgggcgccacctgcctggccacaacccccacaccaactggcgcaagctcctggacgcaccgcccagcaccgtcgggagcgcggggctggaccagcagtacgcgaacgtgatcgcgtccgcggaggagctgctgcggatggaggctgagggccgtcaggaggaggccgccgcagagcgcgccgagatgtacgagatgctcccggcgaagctccgcgtggcggtccggtcgaagctccgggagtggtggcgcgacccgggcccgctggacgaggccctggcgcgggggtggaaggatgcggtggaccgcatcatggcgtggctggggccgatggcgcgcgacacgctccagtggcaggcggagcggaacatggaccggacgcgccggttcgacggcgcgccgcgcgtgtacgcgctgcagacgctgctgtgggcggacaaggaaaaggccgaggcggccatcgtggaggtgctcgtcgcgctgagctgcatctgctggtacgaggagcgccggagaggctccgtccgtgtcggttga

SEQ ID NO: 23917 - DNA, 369 bp, Zea mays
  Peptide Sequence Number=SeqID_67292
atggtgtgccgcctacttggatgggatgcgccgtcgttcggcaaaaggattggcgccagcgccatcctcctcggtgaacatgccgctagagagtttgtgccttttgtcctccccagcgggttggtgctgccgatcttgtctttcctctactggagcattcggagaaaaaggatgatcacgagccttgtgaaggaggcgaacttcggctacgtcgtcccggccagaccgcaagcaccgccttccgtcgtgctcctagctccatggcttggatggtcttgtcctcacccccgtaggagggcgggggcgagggcctcttcgccatgggtacgcgctgaggtggccaccgtcgctggcaagccgccggtgtag

SEQ ID NO: 23918 - DNA, 327 bp, Zea mays
  Peptide Sequence Number=SeqID_67293
atgtccttctgcttgggtgtgagcttcaaaaacacactgaaatttactaagctagtagttcatctaaaagaaaaggatttcggctctcatcaagtgactcctccccctcacgttgactttgaggacagatgtctcaattctagtggtggagctacgaacaacaatccgatggttaagaacgtgggtacccacgttcttaaggttaagaacgtgggtacccacgttcttaaggttaagaacgtgggtattgtcgaacttaatgggcagccctcgccgacccacgcacgacccatatgttcgacggccacgtggccccgtcgaacttaa

SEQ ID NO: 23919 - DNA, 402 bp, Zea mays
  Peptide Sequence Number=SeqID_67294
atggagttcttcaccatgaacttttcattatatgaagcttatgtcaaaagtgtccttggtttaggagttgttttgtttatccacaattccaagcaaggttttgaaatctcacttaaggtttttaagataaactacgcctctgctcatgacaatgaaacactatttgatattattagtgtaaagactctgatgaacctctcaattgacgagcgatgcaggaaaaataatttgtccacaagcatgattgcattatcccagatttctcatggctttccgcaattgcagttaactgcaaaaggtttgaacttagaagatggccctacacactctgcctcgacgtcatcttcaccagagcagactactgatgttgatggaagtaccactggtgatgtcaccttctaa

SEQ ID NO: 23920 - DNA, 564 bp, Zea mays
  Peptide Sequence Number=SeqID_67295
atggggatagctgtcttctccggcgaggttatacccctctgccgcaggcttggttctaggctatgtcctcctgtcctcctggatcccaaggaaagagctgaactgcggacttcacgttggatgaaaggggggctgcatacccagatctcgacttctgcagggggttcaaaaagtatagacgagacctggtggttgggcgcgcaggctgcgagttggtgcagcgatgagctgatcagcaagtgcagcttccgcaccgcccgcctaacaaggaagccgcacactgcggcttgcaggcgcaccacggcctgctcatgtgatgacggccatggggtagccctggaggccacagcaagagttgttgagggcgggtgggagggcgttgcggcggcagatgacgcggcggctggtggtggtgagggatgggcggctggtggtggtgaggataacctggagctgataccaggtgtcatggaccttcggtccatggggatagctgtcttctccggcgaggttatacccctctgccgcaggcttggttctagggtagcagccctaggcgcttga

SEQ ID NO: 23921 - DNA, 297 bp, Zea mays
  Peptide Sequence Number=SeqID_67296
atgagggagatcgggactggcgacaagttcacaagctcggggagaacacattcaagggagtccgcccacaagcacaaggaggaatcctcttcctccatcaagtcccaacggaagggtgacaagaagaagaagatgacgaatcggtctactacgagaccaactcttcgtcaccctccacctccggctcaaaatcggcatccgccacttctaagcgccatgagcgcaagaagtatagttaagatgccccttcgctatcctcatattcataacacactccattactttccgtcccattag

SEQ ID NO: 23922 - DNA, 201 bp, Zea mays
  Peptide Sequence Number=SeqID_67297
atggggaagcctgtcccatcactcctcatgctcctcctcagtcgagtgaccgcacttgtacccaccataaccggaatgggaggccacgtctcaggtcgcgtgaggagatatgtctgcgggcaggttcacttaggtactaggcttaccgatttaccatatttctcggatttaataacatttatgttaagagaagaaagataa

SEQ ID NO: 23923 - DNA, 1530 bp, Zea mays
  Peptide Sequence Number=SeqID_67298
atgaacaagacaccggcactcaaggtgccattacaaacggaaccccggttccacctccgcagcagcgatgacgacgacttctgctccggggggtcgaacagcagcagcgatgacctcagggcggatgctgcttccataaggccctcgcccatgccctcactcgagaggcaaggacgggcagaaggccgtagagttggaggtcagtccgtgggcagcaccggctatctcgtcggcaggagaaacctcttccggctgtcgtggcggaaggcggcgccggaagcggctccgaagccactcgggtcggagagccgggcacgcggcagctgccagcgccacgaacggcgaacgcccttccccccgatcactgagggaaggagcgggccgccgcccgcgggctggtggtcaccgtcttgggtgaccaccggcgaggggatgcagccgggctgcctgatgaaaatccttgaagccgaacgatggctgaaagagcagaagaagccaaaccgccacgcgcagtgcatgcaactgcccagcggttacgagcattcctccactatcgcccagactagcgggcccacacatcatgcaaccggcgcgccggttgctacgtgcgagcaactgcaccgccactcgcaccactaccacgcctcctcgactgcggaaccagcgggcggaagcagcggtcacgtcgtcagccaagcttacgtcccatccagggacagcaagggaaccctctcccatggcgtgaatacagcgcacccgggcggcacctttggcaggagaagcgagcgacgcttcaccttcgccataatgaccgcatcaaaaagggactgggaaagggggataccccgaaaagggatccttctccgcgaaggaaacaggccccgagcctccctactgatcagaggttcaaaggctggcccctcggaggggttcaacagccgcctcagagcgcttgggctccgcgcccactactggtcagaggttcgaaggctggcccctcggaagggttcaacggccgcctcaggccactcgggctccgcgcccactactgatcaggggttcataggctggccctcgaaggccaagctcgaccccaggcgccataggaaactccgcttcgctcgaccccagggctcggactcgggctcagccccggaagacgacgaactctgcttcgaccgaccccagggctcggactcgggctcaaccccggaagacgacgaactccgcttcgctcgaccccagggctcggactcgggctcagccccggaagacgacgaacttcgcttcgcccgaccccagggctcggacttgggctcagccccgaaagatgacgaactccgcttcgcccgaccccagggctcggactcgggctcagccctggaagacgacgaactccgcttcgtccaaccccagggctcggactcgggctcagccccggaagacgacgaactccgcttcgcccgaccccaaggctcggactcgggctcagccccggaagacgacgaattccgcttcgcccgaccctag

SEQ ID NO: 23924 - DNA, 552 bp, Zea mays
  Peptide Sequence Number=SeqID_67299
atggccttgctagatcctcccgagtgcctccagcctgaggtagcactcaacttggtgcgcaacctgctcggatggggtgtgccgacgttcgccggaaggatccgtgttggcgcctctcctcacggtgacctcgccgccggagagttcatgctcttcgtctccaacctccccagcgggttggcgctgccgttctcgtctttcttcgtgctgctgctggaggagctcggcctccaacctcatcacttcatgccctgcttcatccttcaggcggccatcatcgcctatctctgcaagatgtccgtgggggcgacacttcttcctccagcattcggtttcaaggatgttcatcagccttgtggaggtggaaagcgagttgagctatggctccatctttcgcgtgagcttcaccagtgcctcatggcatgggacctacaggatttagtctgggaagtcaagttgtgtgcccggaccccttggaccatggttctagatactaggacacccgtcgcagagtggtggattgtgcaggcttacggtacaggaccaggctaa

SEQ ID NO: 23925 - DNA, 225 bp, Zea mays
  Peptide Sequence Number=SeqID_67300
atggcggccttggtgctgcccacgtggtggggccaggcactgtttgccacgtggctagaggaaccggcgcccagggaggatgactcatgggcccgggcccccgagtcagagactgggctgctggtttcagcggaggcgaagagacgtactaccgcgggtggcggcttgctcctccgcgacgattcgcctcctccgcactcgaaggccgacacccaagtagtatga

SEQ ID NO: 23926 - DNA, 1230 bp, Zea mays
  Peptide Sequence Number=SeqID_67301
atggagaagaagagaattttcctagatgatgtgacacacaatatgctgatgagggggttttgctggcttgggcagcttgatgaaactcgcaggctcattgacgagatgaaaaggatgggtattcatccagactttgtcatccataacatgttgatcaatggctatagcatgaagggtggctggagcaatgtgatagtggacagcgctgtcacacacttctatggtgctttagaagttgcgtacaagcgtaatggggtgcctgcattgcttgctgaggtcaagaaagcaaccccgagtaggggtgtgctcatggaagactttaatactgttgaaattgttcaaccttatgaaaagaatggagctgcatgtttgagcattttgacggataaaagatactttcagggaagctttgaaaatcttgagaagatttgcgaagagttgggaataacagctcttattgaggttcatgatggaagagagatggagcgggtgctgaacataaatggagttaagcttactagtctgtttactctggaagatgttgcttatgttcagaatgctagccaagtctgcaatactacttcgtgtctactgttgcataaggaaattgcaaagcaattcttggatagattggttggatgggcaaagaatatgaaagtatcagatccagtggagaacgactgcacgctagattcagttgtcagtgaagaacaatgcgagaagataaagaagttgatcttggttgtaagaagtgaaggtgccacatttctgtatggagatggacgaccacatcatctcataagagggctctttcttgcacatacaattataacagctgttagtacgtccatgcaaattgggcaagaggaagtttttggactagtcatccatgttaaggagtacaagacagagagtgaagttgtggaacttgcaaatggtacttactttggcttagctgatgatgtgatcttccatgaccaagagaggtgtgatgggattggtgtcttggacttgcaatgggatcctggtggaaacaatgcgatgtatcggcttgatggcgagccgatttttaagggaggaatgttaggaatgttagcccaaatgggcccatacggccccaggttgctaaaggcagctggccacgtggcagcatcgggtctccgcctgagaggcatacgcgacatggtccggacacctgtcggctccggacccccgcctggccttgattaa

SEQ ID NO: 23927 - DNA, 309 bp, Zea mays
  Peptide Sequence Number=SeqID_67302
atgagactgaggtccgtcctctggcttcggatcctcgtctgtttgatcttcagcgcgctactgcagcacgggtacgtcggttcagcttttttgctagcagccggtgttgagtctgaggcgcatctcacctatctgccaggcctcctgactcttctgactatcagcggcagatatgttgaggagtgggtccgcgtcttctacgcctctgtttggattgacccggatcatcattggatgaggttccgctttgagcgcgaggaatgtcacgatcactgccagtcagatccgacagctatttggattccctga

SEQ ID NO: 23928 - DNA, 405 bp, Zea mays
  Peptide Sequence Number=SeqID_67303
atggctcaccggagagctcggtccacgcgcgggggcgggcgaccgaagtcccgcgagggcgatcttggccttccggtgaagttctgccgggtccgagggctgggaaatcttcacaagctaatggcaaagctaactgaagtgactggagtgggctggccacggtggccgaggctctggcagcaatggcaggcggaaaagagctcgccggagctaaggaggggcgtctggccggcgaagagatttggagcccggaaatccggtctgtctctctgctcaaacccgaggcaaatccagggttttgtcgtgtctagggcttgcgtcccaatgccatcttctggcacaagacagggaggatttgagttagggatcaaggtgaacacgcttgatctttggctcaaggtctga

SEQ ID NO: 23929 - DNA, 177 bp, Zea mays
  Peptide Sequence Number=SeqID_67304
atggaccggccagcccagcctttcccaaccccatccaaccctcggacgagtgtgcacaactcaatgaagctccccgagcgaggaatcgaagcctgcttcgccggagaggccagtccgtgctcgcggagttcatcaccccgccggcgcacgtggaccagaaactttaaaaactcataa

SEQ ID NO: 23930 - DNA, 675 bp, Zea mays
  Peptide Sequence Number=SeqID_67305
atggagagtcatgatctccgggcagaaagggaatcacggcttgtgggtggcaatgagtctgatggttttggttatgactatggtgatggtaagtggtattctttccgtttggaaagggttgccagcattgcaaccactgctcaggagaagatgaagttgtggaaggagacttccaggagttccaagactacgacgagttctaggcgtggatggctcgtcttagacacactgcacgaaagaccgttatccccttcttaccctcccgccttgctgagcgtccgcttcgccgtcccgtggccggagatagagtccgtgaggagctgctcccctgtgcttcccctggaggcgccccctgcaccaccactgggcgccccagcctctggagtagctgctggaggagacccagacgacggaggtggcgacgacagctcgagccacgacaccgacttttctgctgaccaggagccggaaggatgggttgctcgacccatcactcgcgacgttgctcgcgggtgtcacttccacgatgcgctcgacaccctgctacgtcgggcacttaaccggcgtacttggtccattgagtatcgctgtgtggtctaccagcacagtcgcggggtctacccggaccgctgggaggcgacctgcttggtgcgccgtccggagaacagtctctag

SEQ ID NO: 23931 - DNA, 567 bp, Zea mays
  Peptide Sequence Number=SeqID_67306
atggccgggaggcagcgtcgtggccagaatgagcgtgttcctccaccgccgccaccgcctcccactctgcaggagctcatggctcagcagaatgagatcttgagacagctggcccagcgtcagccaccacctcagcattatggtggtggagaccatcagcgtcaccctgcggcggctacctatcaggagttcctcagcacccagcctctattgttcacaagggcagaggacccacttgatgcagattatgcaggatatcacgcagatacggatgagaagaagagagacaggttcaggaggggactcagcattaagctccgtgaccgtctcaacaccgtccgggccaacagttacaatgagttggtcaacatggctatctcccaagaggactgcattacagctcgacagacagagaagaagaggaagacccctgtggcaggaccctcagctcaaccacagcgcttcaggattgtgtccgacactcagaacaggggaccccagcagcagcaagggcgatgggtgatccgacctcaacaccagcagcagcaggcacccaaccgcacctag

SEQ ID NO: 23932 - DNA, 948 bp, Zea mays
  Peptide Sequence Number=SeqID_67307
atgacttcccacggatcctccggtgacggaaatgcactgtcccacactgacgggcttgcacgagagggctttccccgcattttgtgggaggtacttcagggggccggatacgtgacaccctttcagtacgcggtgcagcagttcaagaagcaccgagtgccccgctgtagggtgaggatgaccttggagcctcatcccctgcagccaggctggcgctctttggactccgagtctttcggataccgagcggaggacacgatcgaggcgatcgctctgcatggactgactactttctgcggattccatcctttggagctggccacccaccccattggcttgttccccgctgagagggaggacgacccaatgtggaaggatcgggtggagcatgccaaggatatctgggccatctacccaggacagaccgcgcacctgaccgtacggtgcatgaatgctctgtaccgtctgcaggtgatgcgcggtgaggcgatgtcccatctgatggcactgctggaggcaacaaagattacgttggacaacagagaggaactcatggttgacttgtcccaagagatggtggagaaggacttgcaggtggagcagctatccacggatatccaagagttggaggagctagtgggcaccagggagaacaccatcgaggttctagaggatcagctcattaacactcagcagcagcttgctgaggctaacgagcacctggatatgcatcaccaggagatccaggacctggaggccaacgaggacgtcgacatcgagggaggagatgagcctgcctccagtgtggacactgctggctcgggaagaccaccttccccccgagtcgagtgttgcttcgttcgctcactaggtgttcaggataggattagaagttggatagtcggactcctcgcagctagcttagcttttgcacccttggggtactag

SEQ ID NO: 23933 - DNA, 750 bp, Zea mays
  Peptide Sequence Number=SeqID_67308
atggcccacgcccgcgcctataaagccctcccaggcttcgactgcactcttccgcgcaccctcaaacctcaccagagtttagctcaccgccgtttgcccgtgcgcagcgtgtccgcggccgcccaatccctctgccaccgtagaccggccaatagagccattcccaaccccatccagccctcggagaagactgtgcacacctccgtgaagctccccgagcgaggaatcggagtttgcttcgccggagaggccagtccacgctcgccggagctctcaaccccgccggagtacgtggaccgggtaatccactcaaccatccttcgattccttgtgcacacggtcactacgttaccccgtgaagctcaccgtgcccttggattgaaccagttcgccgtggtttggccggtacactcgccgccgacgagaacacccgcctgcgcgcgtggaccgggcgattccggccatccccaacgtcaagccgtacctcgacatgaccgccggagcctccccgagccaaccccacccttcgccagacctccctcgccgccggatacaagagcaatacaaattccctatgtttatcctcaacaaaaacctaagcctaaagactgtaaccttgctgacggagagtacatcctcgtgccggagcaaggagctgctcaggaggtagccccggatccagcacccgagcctgcaccagaggacctgcctgccactgctttggaaggcaagccccggttttatgcataa

SEQ ID NO: 23934 - DNA, 595 bp, Zea mays
  Peptide Sequence Number=SeqID_67309
atggcgcgcgcggcggtatgggcgtactgcccactgtctgattggataggcacgctgcctgtagagtggcctggtcgtcgcctaccaacggagtggacggggctcattaaatgccgaggcgacacatcgcctgtcagcagggcggataggcggcacgtcgtttccgcaataaatgtggagatcgcgtggcccagaggccttacgtcaggctccgtccgctggcttacgtcacgggcaatatgccacgtggcagcatcgggtctttgcctgagcggggagcggaagcgctctggacaaagccctgacaagtgcctgcgctggacccctgtccgggctacgtatgctggggtccggcactttcccatggggtctggatccactaacgatatcgcgggtaccgacagagtatatcgtctcctccggccacgtggcggcctcggtgctgcccacgtggtggggtcagacgttgtttgctatgtggctagagggcgtgtttggcagggctccagctctaccaaatcaactctggagctgctgctccaccacagagcagctccacgcatggagctggactctcaatttgatgctgaggaat

SEQ ID NO: 23935 - DNA, 540 bp, Zea mays
  Peptide Sequence Number=SeqID_67310
gggtaccccttactacagtatgatggcacggtgcctgtgcggatgcaatctgttggaccggacctccacgaggaagcaccggacccctgcacgcacagcccgaacccccaaatatggtccgggacttccaagctttatcctgtgcgcttgcgctccccgctcaggcggagacccgatgctgccacatggcttgttgcccgtgacgcgatgtgccgcctcagcatttattgtgacctgtccactcagctggcaggcggcatccaggccatcctgcaggcggcgtgcctgtccagtccattgccaaacaggtgcaagaagattgctccaccaactccaaatattacatccattatattcctgggcccacatgtcggggctcagcacccttctctcaagctttcacagcaatccaacatacagtggagtagggtattaagctccggcggcccgaaccactctaaatcctcgcgtgttcctgagttcatcgttcatctaccaacaggcaaaacgcttaagccccctcctcatcttaggatttag

SEQ ID NO: 23936 - DNA, 237 bp, Zea mays
  Peptide Sequence Number=SeqID_67311
atggatgatgaaagccctgatgagatcactgacccacgggcctaccttacgcacagtttgcccgcaaagagaggagcggaggtgtatgaagccctgatggagatcactagcccacgtgcctaccttattcactgtttgcccgcagagagaggattggaggtgacagacggtgccatcgaggctcccaaatcaatcgtgttcccccaggccgagaacagaatgcacgctcagaaatag

SEQ ID NO: 23937 - DNA, 312 bp, Zea mays
  Peptide Sequence Number=SeqID_67312
atggcggcgggatctggagccttctcgccggagtcgcgggcgggcggggaagggtgggtacggggagaggcggcgggatctggaggcttgtcgccgcagtcgcggacgagcgaggaagggtgggttccatccgaaaagccactaaaagcaggtccacgggtgctttcagatttacactacgagaaagtcggctttttagaaaaagctactttctggatccacccctttggttggcttttggcttttaggggggcaaaagccaaagccaaaagtcaaaccaaacacaccctaagattatctccaagagactag

SEQ ID NO: 23938 - DNA, 2022 bp, Zea mays
  Peptide Sequence Number=SeqID_67313
atggaggacttcgcgcgcgcggtggaggacgggctcaagctctcgaagcggctcgtgctcccgggaggggtgccgccgccgcgcccgccggcggggatggagcgcaccatgtcgtccgcctcggcgtcgggtcccgacccgcggctgctccccacggcgccgatggcctacgcggtggtcaccgacccggccgccatcgacacccccgacgtgcccagctaccaaccctacgtctacggccacctcgacccgcccgcgctcatcccgctgcagatgaaggaggtcgacttggccgtcgactgcgcgctcgacgccgcgcacgtcaccctgcgcgcgcgctggtggctgcactgcatcacgcgaagccgcgactgcgacgtgcgcctcgtcgtgcccttgggcgagcaggagcagggttcaattctaggcgctgaggttactgtcggaagaagatcatataatacccaagtaatcgaagtagaagaaactttggagaatcatgcaaaaattgagagtggtggccttctgaagccacatctgtttttcttgacaatatctcaggttgagggaggagcagatatctgtgctacatttcgatggtctcagaagttactatatgatagtgggtgtttctctgttgacatacctttccattttccatactttgtcaacccattaccaaaagtgttcatgaagagggaaaaagttcagttgactgcgaacactggtttcagtaaagaggtttttctgcaaggaacaagccacccgttgaaggaaaagagtaggcaaggagataaattgtttttcctgcatgaagccattgttgagaattggtcgagcaaagtttttaatttttcgtacagtgtttactcaggtgatttgtctggtggtgtgtttgtgcaaccctcaatattatgtgactatgatgatagagatagcttctgcatttttcttttacctggaagtggcaacagaaaggtattcagaaaagcagttgtgtttgttgttgacacaagtggaagcatgcaaggaaagcctcttgagaatgtcaagcatgcagtttctaccgctctttcagagcttgtgcaaggggattacttcaatattataacatttaatgatgagcttcactcattctcttcctgtttggagcaagtaaatgacaaagcaatagcaagtgcaactgattggatgaatgcaaacttagttgctgagggtggcacagatattatgcatcctttgagtgaggcaatggcattactatcaagtgttcatgacacacttccgcaaatatatcttattactgatggttctgttgatgatgagcataacatctgccaaactacaaaaaccgaagtcaccaacagagggtctaaatctccccgaatttctactttcggactaggatcatattgtaaccactatttcctgcgcatgctagcatcagttggcaaaggacattacaatgctgcacttgagacagcatcaatcgagaatcagattgttaagtggttcaggagagcatcaagtacaattgtggaaaatatctccattgatgctatgacacatcttgatgaatttgaagtggattctgagtacattccggacctttcagcaaattctcctttgtgtgtgtctggaaaataccgaggaaaattcccagacacagtgaaagctaaaggttacttagctgacatgaaggaagtcctgattgaactgaaggtccaacaactaaaggaagtaactcttgacaaagtattggtgacacaacatattgatcttatgacagcaaaggcatggctttctgcggccaaacaactggagagaaaggtggggtatttggtgattaaattaagcatacaaaatggtgttccatcggagtacacagatatggtattacttcaaacaaatttggacaatactggaacacaaaaggtcaagcaaaaactaaaaggacagaaaggcagagatgagcaacagatcccgctccatgggctgaaactgggattcggtaacaactaa

SEQ ID NO: 23939 - DNA, 810 bp, Zea mays
  Peptide Sequence Number=SeqID_67314
atgatatcgtcgtcatcgaacgcggtagcggtgctagagctgcagcagtccggcttcgtcacggtcgtgccaactatggcatggtcgttggctaggacgacgagcgtgggccgccgtgcacgctgtctctccacggcgcacgtccctacgacggggaagcgggagcagaagggccttttcgacaccatcttcggcgcgttgtacagggaggagcagatgctggagacaaaccccatcctgaataaggtggggagcaagagcaagccccccgctgtcatcgctgctccggcgcccaagaaagccgccgaagagagcggcagtggcgggctcagcctgggcaggggagatgctaacggggacatcaagggcttcactgcaagaagcaatggcttatacctaaagattcaagttactctcgcagggttccaagctaagcagcacggttttgctctctatattaggttgtttactcaagatcaagctctaaagctcgtcatctgtattctctggaactcaagacaaatgcacatcctgccagaataccgtgtatccattggagaaggccgcgtcgtggttcatcctgatgggctcatcaattggattcgttgtgtggatcaagttagattttccccactggtggagatcggcaataccactcaggctggtcatcagggcatggaacgtaaggaccaccacacaattcatcccgagttcccgaccaaggctttcaaggcacacaaggtttattacctcaatgaggtaatcatatttctaagtgaaacatcgaaattgttcatcaagtccaattaa

SEQ ID NO: 23940 - DNA, 417 bp, Zea mays
  Peptide Sequence Number=SeqID_67315
atgatgctaccaacaaaaattgatacaatccaaaaacacaagggacagataaatcttattgttcaactggattgttatatatgcccaaatgtgaagtacttaagagaaggtgctttcattaatgttgatattgaaaaggggatacaagatggacagaaagcagttggcgacgaagcaactgttgtaaagaagcgtccacacggtggcaggacctcaggccgttctttgcacggcagagctcgggagcaggtgtccccagtttgtgtgagccacggcagggccggagtggctgcatgggagcaggtcgtcgcaaggcctcgactatttcctttccgagaattattcatcttccggtactgtgtgtcgttcaaggcaaccgtctcaacattcaaccagggttacgcaaccatttgttga

SEQ ID NO: 23941 - DNA, 721 bp, Zea mays
  Peptide Sequence Number=SeqID_67316
agcacaggtggtgggatggccacccgtgcagaactaccgaaagaacaccctcgccgcgagctcctccaggagaaaggcaccggcggaggacgccgcgtccacagctcagaccatgtacgtgaaggtcagcatggacgacgtgccctacctcaagatggtggacatcaagatgtactctagctacgaggacctctccatggcgcttgagaagatgttcagctgcttcatcactggagaaagttttgctttatcacgccacaatctaagtccaatggtccttggctccaccgctcaattttcatcaaaatggatgggtaggagaggcgagggccacctcaccgtagatggagcccacggggcacacaaggagtggcgcgccttctctggctccttgctccgctccaatggcgtcgatgtccatgtgccacgtcatggaacggatgcgacacaattggctagggatgatggttcaacagcttcaactgcaattttggtgggtgaccgtctgtatgttgcaaatgttggtgattcttgtgctgttattccaaaagctggcaaagctatggcactttcagaagatcacaaacctaacaggattgatgagcagaagagaattgaaaatgcttgtggtattgtcatttgggctgacaaaatatgcacaatgcactcatacttcaacgccccctcacttgtaggttcccttaagcttgatgtcagatag

SEQ ID NO: 23942 - DNA, 495 bp, Zea mays
  Peptide Sequence Number=SeqID_67317
atggaagccagatcagctaataaaaaagaacagacactgaaggactcagttaatcttgaatcaattcaattacctcttgcactgacgtgctatgttctgagagacgttgtcagggtgttcgatgaaatggccggtgcctgggtcaagcccgacgaatacgtttatgccaccacaatcacaggtttgggtaggctacatgatgcagatcgggcacttcaggtactgggaaagatgagggaggcatgggtcgagctgtgggagttaacatacaattctatggtgggtgtacttgtgaaggtgggaaggatggatgaggtattgcagctgaaggatcagatgatgctggctacagggaagatggatgtggctctcgcgagaatgttgatgcacgtgtactatttgagtggagaagttgggaaaacattagaattgtttgatgtggttgccagtgacactgtccaatgtggcatatgggttgatgaacaaaggttgtga

SEQ ID NO: 23943 - DNA, 684 bp, Zea mays
  Peptide Sequence Number=SeqID_67318
atggatgtttctgccctgcctgatggactatcatacgactcgaaggtcgaggagccattcgcacgacaccagcgtgcttacgtggagtactcaaacgagtttcgacgcacttactcctttcgatggttcgacagacagagacagaagaaggtcatggacttcgagacccaccaccgtgattacattgatgaatgggaacaacagggggatcttaactatgagaacgaccaggcgcacacaaactacaacttccggaggtgcaagctgaagggacagtggacagctgcaaactacgccgagcaagaatcgttagacgacgaagacacaactttcgacatagctgctcggcacgggtctcaaattgaggctgctccaatccttgatagagtgcaggacgttcagcctcccatttgtgcagttggaccatctacagcaggactgagctcctcgcgatcgacgcgggagacgtttgaggacgtggcccacgacgacgaggacgacgacgacgacgacactagcgctggcgccgcaggtcaggaggagattggaccatctcagttgcaggatgctcctacaactcagccaccacagctgacaccacgtagaaggcgtccacgagacccgtacactccaggcaccgacgctcttggggccaagggcaagggtaagactaggaggaaatga

SEQ ID NO: 23944 - DNA, 885 bp, Zea mays
  Peptide Sequence Number=SeqID_67319
atggcaatgggtaaatacccaccgggtatgactaccccatacccatacccacaacacaaaaataacctcatcgggtcacccatatacactggcgggcccatagatacgcagtacctgttgggaattgagaacatcacagcccagcagcccacagtaaaaggtcaacaggacaagcaacatactcctaatacagatggtacgggcaggaggatcaggccaccgtcgaggaacgcgctctccgctgtgttccagcaagaagatgagggatcgagggcggcgcaggcggcgagctcgtgggcggaacagactggtgagagcaagaggatggatcaggagcttgagccccaggtacaaagactaacatcagcttctactgtactaaggagggtgttggataatccagcactccaggactatcaagagaataatggatttggagacttgaactgtccggccgcgtgtaccgcgtcaccttcaccaaccggctcaacggggccgcaggcgcggtgccgtgaagcagatacggaccgccgggaaactgtacctccacaattttgtaatgggacatcactcctcaagtatccagaaggaaatgaacttccatcagacttgatagacacactactaaagtggatcccaagcaatgatgaggagcttaggcttcgactgtcctcccgtagcaccgccacaccgcacgcgtccgtggcggtttgcatggaagcaataactgaatcaagaatgctctatttatttcgatctcagccattttggaggacgaacgagcaccggggagagtccaggaggaggcagatactgctgggacatgtccaagccagtggagatgcagtggagatggagatcaacattggcatggagaagctgtga

SEQ ID NO: 23945 - DNA, 495 bp, Zea mays
  Peptide Sequence Number=SeqID_67320
atgtcgattctgccgccggcgggcgggttgtcggccgccattgtcgtcgtcgcgcggcgggggaaggagtatcatgtcgtggctgccgtcgagggacatgaacccaagactcccgaaacggagcaccgttccgggctggaaaggtcgctggagactgcccatctggagcttgacgggaagctgttcgtcaacacgcagcaggcccctacctggcgcgccaactgtcggcgtttcgaacccggggggtccctggaccgacgagtaaattgtcgccgcgtgccccagcccagatgggtcggcgcgagacggagcgcgaaggggggaagaagccggagggagacaggcgtaaaaggggaaacccgcggccttcgtgtttgtcctgcgcccaggtcaggtgcgcttgcagtagggggttacaagcgtccacgcgggagggagcgagaggcttacacgagcgccgtctcgtccttccccgcgcggcccaaccctctgtaa

SEQ ID NO: 23946 - DNA, 327 bp, Zea mays
  Peptide Sequence Number=SeqID_67321
atggcgatttggccaaggttgcttcttggcgaagactgggcctcgggcgagccgaaggagatcgactcgaactcgacccgaatttttcgggtaccccatggtttctactgcctggctgtttcctactttcctctgcacgactgcacatcagcacatctgcgctcggcacacggacctggctgggctcctgcagtcttgctcctgcttcctggtcctgacgtcatacagacttacactcgacactcgggcatcaagcagccaagtaccaagcaggcgcccaggcaccacgctgtcacgcaccagcaccaggcagcagcacagcactag

SEQ ID NO: 23947 - DNA, 279 bp, Zea mays
  Peptide Sequence Number=SeqID_67322
atgaatagccggcctgggtcgctggagggggcatcgattaaaggggatggtggggagcggggcgaggatggcaggggcaatcgtggcagctgtacatggggtgtggacaccgatggaaggacgcgacaattgcggatgtggagcggtgatggaggggtgctgatggaaggggatggcgggcgtcaattactcaacaagaaccagcggcggtactctctggtcaggcgcggatggtccgcggcacagggccggacggtccacgacctggcgcgaggctag

SEQ ID NO: 23948 - DNA, 996 bp, Zea mays
  Peptide Sequence Number=SeqID_67323
atggcgcctggcctcctcgctgccgccgccgtgctggccgcggtggcggcgtccctcgcggcccacgtcgcgctcaactgccccgtgcagccggtgccgtcgcatcgcccgccgcccactccgccgcccaacaacctactacagcggatgatgcaccccaacaacggctcctgggagcggtggcgcttcgtcggcggcacgggcctgctcggggtcgcgccgtccgccgacggcaccatgctcgtctgcgacgccgacaaggggcttttgagggtcggtgacgagggagtgacccttcttgcttcggaggtcgagggctccccgatcaggttcgcggacgcggcgatcgaggcatccgacggcacggtctacttcagtgacgccagcaccaggttcggcttcgaccggtggttccacgacttcctagagttcagctccaccggccgcctgctccggtacgacccgcgcagcggcgagacgtccgtcgtgctcgaccgactcggcttcgccaacggcgttgcgctgccgagggacgaggccttcgtcgtcgtctgcgagaccatgaggttcaggtgcatcaaagtgtggctgaaaggggataaggccggcgaggcagagacgttcgtcgaccttccggggtggccggacaacatccgcctcgggtcagacggtcacttctggattgccgtcctccagctgaggtcgccatggctggacttcatcacccgctggaccttcacgaagagagtggtggcctcgttccccgcgctcagcgagtggagcaagggggcggcgaagggagccatggtcgctcaggtgtccgaggacggcaccatcctccgcgtgctcgacgactcccaggggaaggtgatcaacttcgtcacgtcggtgacggagttcaacggggacatcttcctcggcagcctcgcgaccaacttcgtcggcaaactatctctggcgcgggtggcacagaagcagggagcagtatcttcgtag

SEQ ID NO: 23949 - DNA, 600 bp, Zea mays
  Peptide Sequence Number=SeqID_67324
atgacggtggagaaaggccacgggtcgcgcggagcaacaatggtcacccggtcggccatcaccaagcagaggaggagaagcgggtggcgcttcgccttcgccataatgaccacgtcaaaaaagggaccgggaaagggggataccccgaaagggatccttctccgcgaaggaaacgggccccgagcccccctactgatcagaggttcgaaggctagcccctcagaggggttcaacagccacctcagagagctcgggctccgcgcccactactggctggccctcggagggttcacagccgcctcagacgcagagcgaaggatgaccctaggcgccataggaagctccgcctcgcccgacccagggctcggactcgggctcagccccggaagacgacgaactccgcctcgcccgacccagggctcggactcgggctcagccccggaagacgacgaactccgcctcgcccgacccagggctcggactcgacctcaacctcggaagacagactcgaccctcgacctcggaggagcctccgcctcgccctacccaggactcggaccgaccacgccacaggaggagccatcattaccctacccctag

SEQ ID NO: 23950 - DNA, 531 bp, Zea mays
  Peptide Sequence Number=SeqID_67325
atgactccgcttgctaaggagaaaaggaaagtcagggtcgggacatacaaaggaggagccgggatgaagacatccctaagcgttttcggcgacggctccctcgggagcccatccctctcctgccgacgatggagcctttccaaggcatcccgagcccgcatccgctcgcgggcccaagccttcttcatgtcctttttctccttcctcttctccgcggcaaccctccacgcagctcggtccaccgcgtcctctgggaccgttggccgggaaggcttgtgccaccctacctcctggggacagacggaaagtctcggctgtgagaaccaagggcaatccaacgcaaggagaaagaaggagcggacactcaccagggacacacacccgcggtcgggacgcatcaagggctgggaaagggcgccgaagtccggtttccccaacgtgacggctacccgcctgtggagggcgtcgacaggaaggggatccaaggacatccgcaaaccctccaagtcggcctccggcgtcatctcctaa

SEQ ID NO: 23951 - DNA, 1185 bp, Zea mays
  Peptide Sequence Number=SeqID_67326
ctcaggattcttcatccatcctgctgggacgaagggcgagctgagccggaagctcctaccttcccgccacgggtctgtgggaccacatctccttcaagcaattcaggggagaagggcgctcaccggcctagcgaaggggcgaacttcgacaacgcggggccgagcggccgcaagcgtcgtcagctccagcatgcctggttcgctggctcagctggctctagcacggcttccagtgcctcctcccaccgctgggcgaagtgtggctatctgcccgccatacaggcggctgttgcgctgcgcgcaccaggggaccgcccaagacgtcgcgcgctgctggggtggcgttcgtgttcttgggctgtcctgcccttgctccggcacgacgccttcgcacggaggtcggtgctcgcccgtccgggaggacccgagtggggatctgtcggtgggcagatggctgccgtcgtcggtgctgaggtggtggcggctgaagaagtcctcgtcaccgacgagatcgccgccgccatccgcgctccgggcctccggctctttggctttgatggcttgtcctcgcccctcgagtggggacgtgggcaagggccttatcgcagcagcgtctgccctgaggtcatcgctgctgctgtttggtcgcccggagcggaggtcgttgtcgctgctgccaaagtgggcggcggcgagccacctgagattttgtcgtcccgcaggccctccaatgtggggggttgttcatacctgcgtttcacacccgtttccaaagggcagagccggggacagatcttcctggcgatgatgacggtgttcggtgtggcgatggcgcgacggcagcagcaggcgcggagaagaacaaaccctcggccgctctgcgatgagccggagccggaggcaacggtgtcagcatggacaaaggcggatttggctcgaaaagaagacttcgtcggcctaggagcaggtgacttcccaggccgaggaggtgtagcggcggcggctagaacctggttaggtcgtccactggtgggaccaaccctagagtcgggctaccgaggccatgagccgggtggtgtcctcgggggacagctggttgaggctacggagcggccggtccagccgtctgcttgggccgggttcctggaggagacccaggcggcgatggctcaggcgcgatgctga

SEQ ID NO: 23952 - DNA, 456 bp, Zea mays
  Peptide Sequence Number=SeqID_67327
atggccgccccacgaatcgcctgtcccgtcgcattaactcctcagcagggcaagcgacacctttggcaggcgaagcgggcgtcgtttcgcctccgccatgacgaccgcgtaaaaaaagggaccgagaaaggggatattttgaaaaggatccttcccggcgaaggaaacgggcccccgagccctcctactgatcaggggggttcgaaggctggcccctcggaagggttcgacagccgccccagagcacacagagtgagggatgactctgggtacgtctgttacatggccgaggctcgggctacgctcccgagtcacgtcgccctttcactgaccgatctgacaggaaaacagcgccgctcaacccgctccgactgctgtgccagccacccgggcaaggctgacaatagcaagttcagcctcgggcgcaacaggaagctccgcctcgcccgaccttag

SEQ ID NO: 23953 - DNA, 1167 bp, Zea mays
  Peptide Sequence Number=SeqID_67328
atgacatccaaattgaacagccaggcttgcagtttaggacctctctgcgaaagcaggagggcccgacagcctggggccggttctaaagaacgggagcccgttccatggggtgcaacctggagtctggaactagagaatggacacttgtctcctgggatggtccggagccgtgtagccgctcagcctggtcccgtaccgtgggcctacacgctccaccactctatgacaggcccaggtcccagtagagactacctcctaggggacattgccaactctctcttaggtatgaactacctccacaccagtagggtcacgtgggtagctagctccgagcggctcgccagcggcggcgatcacctctgcaccgacggcttgccagcggcggcggccacctctgctccgagcggctcgccagcggtggcaaccacctttgcgccgggcagcctccccagcggtggcgaccacctcagcgtgcgtgccatggcgaagaggccctcgcccccgccctcctacgggggtgaggacaagaccatccaagccatggagctgggagcacggcggcaggcggtgcttgcggaaaacagcgccgcctacgctactccgactgttgtgccacccgtcagggtgaggctgatagccgccaagtccggcctcaggcgccataggaagctccgcctcgcccgaccccagggctcggactcaacctcgacaccggaagacggactccgcctcgcccgaccccagggctcggactcaaccttgacaccggaagacggtctccgtctcgcccgaccccagggctcggactcaacctcgacaccggaagacggactctgcctcgcccgacaccagggctcggactcaacctcgactccggaagacggtctccgcctcgcccgaccccagggctcggactccacctcgacctcggaagacggtctccgcctcgaccgaccccagggctcggactcaacctcgactccggaagacggtctccgcctcgcccgaccccagggctcggactccacctcgacctcggaagacggtctccgcctcgcccgaccccagggctcggactcagcctcgacctcggaggagtcaccgcctcgcccgacctcgggctcggaccgaccacgtcacaggggggcatcattaccctacccctag

SEQ ID NO: 23954 - DNA, 848 bp, Zea mays
  Peptide Sequence Number=SeqID_67329
gtgcccaaaagctgaacagagctgagcttgaagtcgcttgtgaagattttagcaacatcaacacttttcctacatgtaccgtgttcaagggcatattatcaggcggagtcgagatcagcattgtctccactgtcatatcgtcgagcaaagactggtccaggagcgcagaaacatgcttcaagaaaaagtgtttattcttgttcgattacttcgattctaggactgtgattttagttcgattacttcgattctgggactaccaaaatacagataggggttacactgtttacttcgattctaggactgccaaatcttatgtccataattcttcaagtctgcatatgactgcatcattcttcagccttctagactccttccacttctgccccctcggatacaaggacttcccagactttggtaacacaacctcttctcttctttcaacatgttgtcatgttgtgctcgagttatggtacaactggagttgggtgaaagcgacatggagccttgaagtgatcttccctgatggcatcttcccggctgatggaaagtcagagatagagggcaaaaacaaatactttgagttgttccagttcaataagagagtcccagacaagttggacgcctcgagaaaggcattgctccgtgcgctgaagctattttgtcttggtcttggtcttgttctacaaggtggattctttcatggtgttcgtagtctaagtttcggggttgaccttcaagaaatacggctaatgggtgtattgcagagaattgcaatagcttatctgctgaccgccctctgtgagatttggatcagaggagacgaagatgtagactatggatactga

SEQ ID NO: 23955 - DNA, 405 bp, Zea mays
  Peptide Sequence Number=SeqID_67330
atgaagccaatgccatgtgcccatgtcactaataagttgattgatgcttcatggaccgccttccctgccttttcatcctcttcgggccatgttcggtggttcattaatccattacccttgggctttggactctctggaaccacagaaatggatgtgtttttgatagagctacacctagcatggagggtgctatcagaagagctgaagaagaaattattatttggaattttgcgggggccaaacatcttgcccttattacagctcccattccaggtgtcatgtagggatctaggagtgagttcagtagttaacctcattagggaagggtgttggttggttaagtttagattgtgggggcagtttgctaaatatattgcattttcagatgatgacaatagtgtgtaa

SEQ ID NO: 23956 - DNA, 144 bp, Zea mays
  Peptide Sequence Number=SeqID_67331
atgggaactaatgggcatctcgacctcgacacgggaggtaagtccgtggatcaaaagggggagaattcaaaaaagcaaaaggactttgtctttgggggagaaatgagcccaaagcaaaaggaccggacttcgtctttggtataa

SEQ ID NO: 23957 - DNA, 378 bp, Zea mays
  Peptide Sequence Number=SeqID_67332
atggctgctcgccgggcggtgaggttgggggccgccgctggagatccttaccggcgcttcataggaattgctagatctcgggccttggcgagtcttttgggtgtgctgtccgatgaccaggaaccattccgggtggattattcgcacaatcgcggcttcctcgccgttgaattgctcgccggcgcatcaattttaccgtcgggccgcactacatcgtgggcgggcctcttcaccactcgaccgccgcaccgctcggggtggctttcggggtactgggccgtcaacgggtgctcgccggtgagcacgccgtggagctctactcctggccgttcggatgatcgtggggagaagacggtgttcgggccattagatccatag

SEQ ID NO: 23958 - DNA, 456 bp, Zea mays
  Peptide Sequence Number=SeqID_67333
atgcggccggcatcgtcgccagagctctcgataaggctcgccagagctctcatctcatacgccggaggtgctccagagagcagggctgaagaggtgcggcaagagctgcaggctgaggtagtgaggtggtccctgatcgcgaatcagctgccggggcggacgggcaacgacgaacaccaaggtagggatccattagggggcactaatgttggtcgaccccttaagcccactgccttagagtcaaccagacctaaaaccatcattatctatggggacatcgtcgagggccctagcccgaggaacaccatcaagatccaaagtttgggggacatcggtgcaaattcccccatgactaaagtgaggccctttgagatgtcatcactgcctctagatgtttccctcgctcaagcccaagagactgacaaagaggtttgtgccatcatgaccgtcgagtag

SEQ ID NO: 23959 - DNA, 510 bp, Zea mays
  Peptide Sequence Number=SeqID_67334
atgtccgacctccacccgccggagcaccaagtcgtcggccaccgcacctccgccagcaagctgggcccgctcatcgacggctccagcctcttctacaagccgctccaggccggcgaccgtggggagcacgaggcgccctgcgtcgcagacatcaagatcggcgccatcacgtggccaccgagttcgccggagccctacatcgccaagtgcctcgccaaggaccgcgggaccacgagcgttctgctcggattccgcgtctccggcgtccgagtcgtcggccccgagggcgccgtgtggcggatggagcgcccggaggtgaaggctatggacaccgtcggcgtccgccgcgtgctccggcgctacgtgtcatccgttgccgacgaggggatggactgcgcgctcgcggcggcgttgtacggaggaaaaggtggagtcttgtcacagctgcgcgagctcaaggcgtggttcgaggagcagactctgttccacttctacctcgatctcatttga

SEQ ID NO: 23960 - DNA, 1431 bp, Zea mays
  Peptide Sequence Number=SeqID_67335
atggatgaagtatttgttgaaatcgggacgattttggttggtgccctcaatgaccagcctgctccagggcccaggcatgcatctgagctctttgcattatgtagatgggactctgacagcacagttggtgagtttgatgggcactcaaagagggttctgagctgtgacttcaagccaacacgtccatttcacattgtgacatgcggtgaagattttctggctaacttttatgaaggaccaccattcaaattcaagcattccataagggatcactcgaattttgttaactgtatccggtatgctcctgatggtagtaagtttatcactgtgagttctgataagaagggtttgatatatgatggtaaaactggagaaaaaataggagagctttccactgaaggcggacacacagggagcatatatgctgttagctggaatcctgacagtaaacaggttctaacagtttctgctgataaatatgcgaaagtatgggatatctttgaagatgcaagtgggaaattgaatcgaactttggtttgccctggtataggaggtgtggatgatatgcttgttggttgtctctggcagaatgatcatctcgtgatagtctctcttggtgggacatttaatgtgttctctgcaagcaacccagaccaagaaccagttacatttgcaggacatttgaagactgttagatctttggtcttctttcctcaaagtagcccaagaactatactatctactagctatgatggtgtcatcatgaggtggatattgggtgttggatttggtgggagactgatgcgcaaaaacaacactcaaataaaatgctttgctgcagtagaagaagagcttgttacctcaggttatgataataaggttggacagaaacgtggaagattgcttgcagatctagaagaagatgaacaacctaaaaagaaggggtttaagaatttctccaagactgcaagagaacttgtgcaccggatgcagaagattgatagcgactattatcccgagacactccaccaaatgtttgttgtgaacgctgacagtggatttaagtggatttggaacagcgtgaagggcttccttgacccaaaaacttcatccaagattcatgtgcttggttcgaactaccagagcaggcttcttgaagtaatagattcgagtgagctgccagaattccttggcgtttatgaggaagtaaagggcacagatcgtgtgacatacttaagctatgatgatcaaagccacccggatatggctcctgaatcttaccatggagtgcgacgagctactggaatggagcaccataaaccaatggctgatttcagccaatattctgccaatagaaggcctggtatattcttttcctaccattttggtcaaatgagtctgaacctacagttgcttgttaacatttcataa

SEQ ID NO: 23961 - DNA, 1245 bp, Zea mays
  Peptide Sequence Number=SeqID_67336
atggcctccacatcctcctccaggtacgcgaaacatcgtcggatcggagaggacgatgagttggaggaggttgaggaggaggccgaagaggagcttccatgccttgttgggtaccatttgccacactgtttcgattgggagcatcaaaaaggtgcagagggtgttcctccttttgaaaacttatatatgatcaagcgtgaattgaagcatgggaaaagagtctattctatggagtaccatttcatgaaatctgcaaaaggtcaaaactcatattgggacgatgacacacatagcatgcagctctcatttggagttgatgagtttttgataattgctccgctgagtgccagtggtgtgatcctcgatgatccagaatcaactaagcttttgagttctgtagcaattgctctttctaattgtggcagcaattggccagcgtttgtaccagttcacgacccttcacggaaagcctatatagggattcaaaatctgggaactgtatttactcgaagatttgaagctgaccgaattggtagtcaagtgccaataagactcatgcatctggaggggttacatgagctatttctgtcaaaatttgtcctatcctcgtcagattttccagctagggtaaaggttcacttctcaatgaagcttagctacaagaccccagaatatgatcatgataatgaaactttagattctgaagctactgagccattgactgaaaatgaagttgtgaaccaccctagaaaactatgggacgatgattgcccttgggcagagtggtactctgctgaggatcctgttaaaggttttgagttgactgccatctggggagagaggacatttgaagagacccttgagatggctgaagtggaaaatgcctcgtcctttgatgctgatagctggttccttcacccagttgtatctcgatacatggtagatgattctattggaaaatttgttgggtttgcatcccagctacatcttctagtagcagatacttcaggccaggataatgcaaaatctactgctactgtgcctccaccatcagttattgatcgtgttatgaaagatcttttcagtgatgagactggcaactatatggaagcagaaaacaagtatagtcgtgctatgcgaggtgcacctgcagattcactttttggccagttctgtttgcatgcactgtggtttggcaactgcaatatatgcggtatgtcaagccggtccctaaactcagaatag

SEQ ID NO: 23962 - DNA, 378 bp, Zea mays
  Peptide Sequence Number=SeqID_67337
atggctgctcgccgggcggtgaggttgggggccgccgctggagatccttacctgcgcttcataggaattgctagatctcgggccttggcgagtcttttgggtgtgctgtccgatgaccaggaaccgttccaggtggattattcgcacaatcgcggcttcctcgccgttgaattgctcgccggcgcatcaattttaccgtcgggccgcactacatcgtgggcgggcctcttcaccactcgaccgccgcaccgctcggggtggctttcggggtactgggccgtcaacgggtgctcgccggtgagcacgccgtggagctctgctcctggccgttcggatgaccgtggggagaagacggtgttcgggccattagatccatag

SEQ ID NO: 23963 - DNA, 534 bp, Zea mays
  Peptide Sequence Number=SeqID_67338
atgaagatgttcctgactctgatcttgactgatttggaggagttggaggttgccaaaatgacaggtgcaagaggaaagaataacgagaaaaggcgtaaggagaggatccaggtgtacaatgggggtgtagcagagtgctacgtgtctagcggagggagagctagcgccctagggttagcggggcgccatcattgcctatctggcggagctggccagacgggacaccggtcttgttctctgcggcccgagtcggctcggggtagggtgatgatggcgcttcctgttgacgtggcgggcctgtgccctaggtcgggcgacgtggtggctcctccgaagccgaggtcgagtctgtcttccgtggccgaggccgagcccgagcccctgggtcgggcgaggcggaggttgttcggcagaggccagggcggagtccgagccctggggtcgggcgaagcggagttcgtcgtcttctggggcttagcccaagtccgagacctgggtcgggcggagcggagttcgccgtcttccggggcttag

SEQ ID NO: 23964 - DNA, 108 bp, Zea mays
  Peptide Sequence Number=SeqID_67339
atggggtccaggcacagtgcttgctctgccgaggctgagtgccaaggtaaacaaggcgtcgaggcggatctccaggagttccaggacgtcgacgagttcgaggattag

SEQ ID NO: 23965 - DNA, 276 bp, Zea mays
  Peptide Sequence Number=SeqID_67340
atgagcaagaacacaagaaacacaagatttatcccgaggttcggtcacaccaccaaggtgccctacttcctcgttgaggcgcccacaaagagccgggtctctttcaaccctaatcctccctttgccgaccacaaaggtcaagctcacacactaatctttgctcaaacgagcgggagagaaaaccccagctcaactgcccggaggcaagttcagctggtgtatggtcaaagaggttcacagctgaagttgagttcagctgaagttcagcccagctga

SEQ ID NO: 23966 - DNA, 234 bp, Zea mays
  Peptide Sequence Number=SeqID_67341
atggagctaattggcaaggtttgccagcatcagaacactgtcccattgcgtgcttactactactccaaggatgagaagctcttggtgtatgtcccactaggtagcctttgtgctgctttgcatggcaatgctggcgggaacaggaggaataataccaggcaggcaccggagactagaacggtcatcagttcccaggcaccggagactagaatggacagttgggggtacaagtag

SEQ ID NO: 23967 - DNA, 1044 bp, Zea mays
  Peptide Sequence Number=SeqID_67342
atgacaagtacattgacatcaaaggaataccagagctatcagtcatcaacagcagcgttaagggaattgagcttggatcggttgtgtccatctctacaggctacaaccattgaggtgttgtcagatggaaatctggtcttcagaaaaattgccaatcacctaagcaaagtggcttcgccatttgttcggaacacagcaaccataggtggcaacataatcatggcgcagaggttgccattcgagtcagacatagcaactgtgctactggctgcagcgcctcggccatttggcaatgctgcttcatatgtcaatgctgctctcttggcaaggacttcaactgatgcagcttcagggaagaacatcatggaggatatatgcttggtgttcggtgcttatggagctgaccatgccatcagagctagcaaggtagaggattttctaaagggtaaatcactgagctcttctgttatacttaaagcagttcagttgcttaaagagacggtttcaccaccagaaggcacaacacatcctgagtatagggtcagcttggctgtcagcttcttgttcaccttcttatcctccttaaccaacagcatgaatgaaacagcaaaggttaatgttatcaatggatcacttactaatagaactacaaatattagcggtaggtactcactgaaggaaaatcttgaggttgacagaaattatttaccaatacactcaagacaagaaatggttttcggtgatgaatacaagccagttggcaagccgatcaagaaagtcagggcagagctccaagcttctggtatttcccctccaatgtactgccttgccaaaaaaaatattttgacagcatcagcttataacctttcttcagcatattctgcaaaatactgtatagtgatgcttctgttcatttttagtacttcctctgttccaaattatagacgttttagtacaaaacaacaagaagatggatatttccccttcagaaaaaatgagcggggagtggcagtgatcatcattgttctaagagttcagagttga

SEQ ID NO: 23968 - DNA, 2657 bp, Zea mays
  Peptide Sequence Number=SeqID_67343
ccgaagatgcagatgaactacagcaagatgctgttggaagtggaactggaatgggtgagggggatggtcaaaagagtgtaagctctgatatagatgatgaatcacaacttggtgacagtaaggacttgacatgtaaggcagatcccgctcctaagaacgatgataaagctgttgaaatgcaagacggttttaatgcacaattatctgatgtttctgaggatcttgaaggcaaagactcgggtggcgaagatgaggataccttggataatcagatgggtgatactggtgatgcaagtgaagtggttggcaagaaatcatgggataaggatgaagatgatgatcctaagacatctattgagaaatatgagtcaggctcatcagccaagggaacacaacaggatgatagggaaatgagagataaggatgatggttctattgaggaggaagatccgatggaaatggattctgaggaaggaaagaataataatcttgaacatgatcctagtacccatgatgaaaccgaactgaatactgatgaagtcatggacaaagctgatgcatatgatgaccggactggacctgaactccctgaaccagagaatgattccattgatgttgacatggtggaacaagaacaaacggatgaaataaatgctgacaatgaagatataggtacagaagaagctgaacaagcagatcagaggttagatgcttcagatgatatggaggaaggagatatggcacaacatagcgatggtgtggtagataatgaaggggagcatgttgaagatgcaaatacagacgcaggtgagatggattcacaccaattggacaaggcggattcacttatgcctctgtcacaaggcctacagcctgacaatatgcaaataaattctaatggagaatctgaagcgaacttggccaacagcagtgatatgcatggcgctgttgctccttcagtaaatttttcaggaaatgaagtgcccaatatggaaatatctatgcccaatactggtaacgattcaatactatcgtctaactccaagccagatatgcaaaatgatgctcagcagcacatcaagcagacaaatcctttcagaagcatcggagatgcattggaggactggaaagaacgggccagagtctcagctgatactcaggatcatcaaccagaaactggaaaagatagtagtgagaacactactgaatttcgttatgtgcctgagggtgaggagagcacctctcaggcattgggtgctgcaacagctgaccagatcaattatgacaatcagattaatcaatctttcttggaagatgaaagctgtatcaggaatttggaacatagtgatgagagaacacctgataaccctgaggtgccttaccttcaaacttcacaagcacttcccaacaagtctgaaaatgccaatgaattggatggaagagaaattcaaactgatgcatccgttcaaaatttagttgaaagaacagatcacactttccaagatctagtttctttcaaacaacccccggcagatgataaaatagctcttattgacctaactactgacagggaattgccttctcagatggatctcgacatcactgatgcagagacaaaaagatctaatgcggtctggaaaaatcttgagctcgcaaccatgaaattgtcccaagaactggcagagcaattgcgcctggttatggaaccaactcttgctagtaagcttcaaggggattatagaactggaaagagaataaacatgaagaaggttattccatatattgcgagtcatttccgcagggacaagatatggttgcgccgaactaagcctaataaacggaattaccaagtggttattgctgttgatgactctagaagtatgtctgagggcaaatgtggaaaatttgctatcgaggcattagttactgtgtgccgtgctatgtcacagcttgaggttggacaatttgcagttgcaagttttgggaagaaggggaacgttagtgtgctacacgattttgatcagatctttaatagtgaagctggagttaatgtgatctctagcttgtcgtttgagcaagataacaaaattgaggatgaaccggtgtctgatctcttgacacatctgaatgttatgcttgatactgccgttgcacgggcacgcaccccatcagggcaaaatcctctccagcaactgatactgataatatctgatggaaaattccatgaaaaggaaaacttgaggcgccatgttagagacgttctaaatcgaaagaggatggtcgcgtatgtgctcctggatagccccgaggattctattattaatctaaaggaagcatgcttcagagtaggggagaaggtagagctgaaaaaatacatggattcctttccgttcccgtattatgttatgctacagaacattgaagctcttcctcgcacattggccgacctgcttagacagagtgagactgacaggcagtcaggcccggccgagggcaccataggaaactccgctccgcccgacccagggctcggacacggggctaagtcccagaagacggcggactccgctccgcccgacccagggctcggacacgggctaagtcctagaagacggcgaactccgctccgcccgacccagggctcggacacgggctaa

SEQ ID NO: 23969 - DNA, 149 bp, Zea mays
  Peptide Sequence Number=SeqID_67344
cttggaccaatcttcaactcatggggcgcttcatcctcggcctcctacgcatgcacttctcctgcttctcctgctggtcatcgcccaaggatcgtgagggtgttattgcaataatagctgatggagaaatgagaatgattttcaaatga

SEQ ID NO: 23970 - DNA, 195 bp, Zea mays
  Peptide Sequence Number=SeqID_67345
atggtgcgcccgagcacgtcatgtagtaccaaatgtacgatcaatagagtagcattgggattacgatatttccagggtaaggtcaaggaccacggcgtcggcagtgcattacaaattgcagatgcgtccttcgcgcttgtacgctactcccaacaacttgttagcatgacatggacaatgcacggcaaggactag

SEQ ID NO: 23971 - DNA, 1170 bp, Zea mays
  Peptide Sequence Number=SeqID_67346
atgcggttcggccggtgcccctactgccggaccatggtctaccagaaccctcaagcggtcgtcttcttctgcagcaaatgccgcaccccgatcagaggcaagaacccttcgtcgacggaaggaatcgaccaggccctgagcaggcttgagatcctctcggtggacaacgcgtcggtgttctccgatgagctcgatgcctgtcaggacattgttgcacctccccgttcctcctcgccggcaccacatggaggattcggttccatgtggcggggtcatcctgctaccaatggcgcacctgctagtgctggatgtgacgatagtgtcgttgactcagacgaacaagataggatccggctgttctcccgacggacgagacgcacgtcgggctctgattcgagcgttctgcgctacggtatgctgatggcagcggattcggagacggaggaagggttctcttcgccgaggaacgcgtgcgagcggcagcggcaccgccgccggagatcgctcctgggatcgcaagcgttcgagacatcgaccggacatgacccgtacggcgtcgcgccgtctctgctgagagacccgtccttccacaacgagctggtcaacgcgctggacaacctccgaggcctggtcgccgctatcgagccgtcctcgagctcgagcggcaggagagcgtctgcgccgcccgacgcccgcctgtttcgccggctggagtcgcagctcgcgcgggcgttgcacgtcgatggacgcggcggccaccgccggaacgcgagcagcgccgtctcctcctcgtcgtcctgcagctatcgcagcgaacggcggaagaaccactgccgcccggtcctgggcggcgcaccgttcctagtttgcggcagctgctccgagctgctgcaggcgccggcggcgacggggctgccgcgtgggaaggtcgtcaggctgcggtgcggcgggtgcgaggaggtgatcgagatgacggaggtgccggcgggtgtcggtggctcggcgccgcacaagaagacctgggcgctgtccccgccgccggtgttggaccccagcagttgcaacagcggcgcggttggggacggtgcgcagcacctaccgccacagccgctgcaccgcgcgttggggtacagttcaccgagcccgcttctgcagagccggcggtactga

SEQ ID NO: 23972 - DNA, 550 bp, Zea mays
  Peptide Sequence Number=SeqID_67347
atggcgctccctgttgacgtggcgggcccgcgtccaaggccgggcgacgtgggggctcctccgaagctgaggtcgagtctgtcttctgttgccgaggccgagcccgagcccccgggtcgggcgaggcggagatcgttcggcagaggccagggcggagtccgagccctggggtcgggcgaagcggagttcgtcgtcttctgggggctgagcccgagtccgagccctggggtcggggcggagcggatcggagtggcgcaggcggcgctgtccttctgtcagactggccagtggagcggtggagtgacggcggtcacctcggctctgccggggacgcgtgtcaggatagagctttatgctgatgggggttaccagctgagaattaggcatcttgaggcccccgagcctctgcacagggcgagaggacgatcagggacagactcggctttttacatacgcccctacgtcgcctttccgcaaggaggagggggggagtgcgccatgttaccctcgatgggcaccgaacatggtgtctccggtgagctgcaagcgg

SEQ ID NO: 23973 - DNA, 282 bp, Zea mays
  Peptide Sequence Number=SeqID_67348
atgcggccggccggccgttcgttcgtcgtcgccggcgccggcgccggctggtccgcgtttccgctgccgcacgcgtcacacctgcaagcgttacgctggccgtgcgctgatcggcgttcgacatgccgaccaaacaaccaccgagtgccttactctgaatcgaagctgatcgggcgctgctgctgctgcaaccaccgagatcagtccgtggcgccaaacccgatggccatggctagctgcacgaaggttagaaaacggtatcttgaacgaccgatgagttaa

SEQ ID NO: 23974 - DNA, 141 bp, Zea mays
  Peptide Sequence Number=SeqID_67349
atggcgcctgaggccgggcctggctgcttgttagcctcactctgtcgagtggcacagcagtcagagcggcgcagacggcgctgtcctcttgtcagaccggctattcacttttcacgtgctcagaatgttctgcagaattag

SEQ ID NO: 23975 - DNA, 942 bp, Zea mays
  Peptide Sequence Number=SeqID_67350
atggaggttcgttgccaaaccagcttttgccagaatgaagatgctttccccaagttgctgagagcatgcacagttcgcctcggaatcaggagccagccagagtatgatggtcgtgaattcgtcgagcatggcacagagaagtgtatcgtgactgtatacattggatccagtccgcaccatgtggaatggagtgtcactgctgctgggcacagattcaaagacacctgccaagtcatcgcctgcaaggcattgagggccctgtgtcagatctatgaagaagaagtggctgacacaccgctcagattctttccgccctttcagagaaactgtcccgtttggatggccaggatgcgtgcattagcagggcagcagctgcttgaggacgacccctcagtcgtgtacctcaccgcatacctgctcaccctggatgcgcaccctgaagcaagccaggatgagcatgtccagaagctgatggaggcctacttggtaacccacaatcaacgtagagccctgcggatccaagagcccgcttcatccaacccagttcaacccatgagagctgaagatccccagattcttgaaggtcacccggtctctaacaaaggagagaagaaggcttgggaactcccgaaaggagccatagtcttggaaggaattccagtcttccctcaggctatggataagcaagagcaccctgaatcctcccaagatcccctaccggagttgtttgagcccctcaccatgaagaagattccagcaccatcccttgaagtcaaggaagaagctgcaagcaccccgccagcaccgccgccctctgaggatctacaagagccagtcctgcttgaagaagagttcaaccccatgttgccacctcagtcaccgccagaagaagtcatcaacatcagctccctcttaacccatccaggagatgtctcagattga

SEQ ID NO: 23976 - DNA, 462 bp, Zea mays
  Peptide Sequence Number=SeqID_67351
atggctgttgctaccgcagcccctccatgggcctccttaggccctgacaaaaacaataagagtttttgggttgaactggttggtgcatgcaacttaatatggtatcaaagccagagatcacgggaaagaggtcctacctgttttagtgtcatcatgaacatatcagatgatgctttagttgggccatacattattgtccacaatgaaggccaacatgatatggacattgatgtcaaagaaccatcatcaaatacaaacaatgataaaaaagcctctacatcttgtcaaaggtgcctttggacagttttagaaaaatatataacatctacaagttcaaatatgacctcatctttgatggaggttgcccttctttctgttcctggaagaggttgttccacgaggaagctaagcttcaagcccttagattcagtgatggtaatcggccttccttattctgtttag

SEQ ID NO: 23977 - DNA, 609 bp, Zea mays
  Peptide Sequence Number=SeqID_67352
atgggggacttatggaccaacataaagattgatctcgcaaagatgcaagccacactccagaaggttgagcaagggctgatgcaaatcaaggtagcagtgcaacatgagcagcaccagctagcgttgtccgcacggctccagacgtcggcgtctgtgggcatacaagctgctgctcgtggcttccttgcacgacagagagtgcgggagatgcgccgtcagatgctcgaggcagccttggtgacggttgacctcggcacacgggggcgcgacctcgccctgtcggacggccatcagcagcggcaccaggccgctatctccaagtgcgagcatggtacgtgtcccgcaggcgacgaacttcaactctacggcagcggcggtaaggaaggcactcccctcatcatcggcaagggcgcactatttagcgccaccacattccgctaccggccgccacgagggcgccttcgctggttattgttgcaacctattccaggtgcccgtccatgtgctccgctttcatctagatggcgtccatgggatccaggtggctgcacacgtgcaagtccaatgcgcagagggtgtccgccttatcttatggggtcaaaaaaatag

SEQ ID NO: 23978 - DNA, 504 bp, Zea mays
  Peptide Sequence Number=SeqID_67353
atggacatggacgagcaggggaaactgccagctggcggcgcggctgttgtcgccgtggacgtcgtcatgtcgcggttcagcctcgacgtgagcgccgggtgcggtgggcggcacagcacgctgctcgacgagtacgagcggctggcgttcgaggcccagctcaaccgggccatcgtcctgcgccgctgctactccgagcccagccccgtccggtacgcggaggcggagcaccagcgcccaccagcgggtgctgatgacgcgcgcgcgccgccaccgcctcgcggggcacccgacctgcagggaggggcggcgcggcgcgacggcggcggcggcggggacggggacgggggctgtaggttctggcggctccacgaggtgctggcccggtggatcgaggcgttgaggccggtgttgcgctggctgaggagcccgtgggagtgccggaggaggaagcagccgccgccgccgccgccgcgggtgcagttgatggactaccttcgttaa

SEQ ID NO: 23979 - DNA, 348 bp, Zea mays
  Peptide Sequence Number=SeqID_67354
atggccggggcgggcggggccggggacggcgagctcggggcgggcgcggccgggggcggcgtggtcggggacgggcgcgaccgggggcggcgagctcggggcgagcgcggctgggggacggcgcggtcgggggcgggcgcggccgggggccagcgagccgaggcgggcgtggccgaggcggcgcggccagggacgggcgcgcacgggcgggggcgggccggcgagcgcggccacgccgcggggagagcgccggcgggtgggggaaggaggagggaggggaaagaagaggagagggggagggaggggctcaccgcgggcgggggagggcggcggcggcggtggtttcgg

SEQ ID NO: 23980 - DNA, 1110 bp, Zea mays
  Peptide Sequence Number=SeqID_67355
atgagattgatggttcttggttttgactctggtaatgctagtccactacagccaaacaggatacttgctgagtatgttgatgtgtactcacccttgctctacacaccaaaccctccccatccccaggttgtcagcattacaacccctgctcaggagaaggcgaagtcgtggaaggagacttccaggagttccaagactacgacgagttctaggcgtggatggctcgtcttagacacaccgcacggaagtttgtcatccccttcttaccctctcgtctcgtggagcgtccgcttcgccgtcccatggccgcaggagatagagtctgtgaggagttgctcccccgtgcttcccctggaggcgccccctgcaccaccactgggcgccccagcctctggagtagctgctggaggagacccagacgacggaggtggcgatgacagcttgagccatgacaccgacttttctgctgaccaggagccggaaggatgggttgctcgacccatcactcgcgacgctgcctgcgggtgtcacttccacgatgcgctcgacaccctgctacgttgggcacttaaccggcgtacttggtctatcgagtatcgctatgtagtctaccagcatagtcgcggggtctacccggaccgctgggaggcgaccctgcttggtgcaccgtctggagaacagtctccaggggtgcggaggcctgctcagagcactattctatctctgagcgggactcagctgaggcggccatgcaagatgccgcacggcgtgcgctttcgcactactgctcagtgctcgtattacccccgccgtccatctgggagcacaggaggcgtgattgtctcatctgttggtgaggacaatcctaggttgagcagcacagtcaacctagccgccgtgctaaacacggagctgaaccatgcgctagacgagctgagtaaggctcgtgctgagatcgccctgctgcgggctgagcgcgcggaacgttgtcacctggatgatggttcccccgctcccgtcgggactcagcacccgtaccgctcaccttggcgtggacaccagtcttatggcaatcccgactgcaagaccaagataaatctagaaccatag

SEQ ID NO: 23981 - DNA, 60 bp, Zea mays
  Peptide Sequence Number=SeqID_67356
atggaggaaggacgaattgacccaagggaagggaagggaaggagcaggcaagaggtataa

SEQ ID NO: 23982 - DNA, 480 bp, Zea mays
  Peptide Sequence Number=SeqID_67357
atggagatcgcgcgcagtccgttgaggcacgtccttaaaggtagcacgtccaggctcgcctctccctccttgtcccctaccttcgcgacctatctaccccttttccagttcgccatcgacaccgagagaaagggagagagagaccttcatcgcccccaccacggtagttggccgtcgttccataatcaggacctcgagtggtgccggggcgtcgctccactcgttccgcacgtgtgtgacacctcggggggcacgaatcccggtcgcgtggctcttaattcctcactggagcttgcgcccagactctgttccgccctccgccatggcctgcttcttccagtggtccgcacgctcggtaaatcacctcaccgtgttcgtctctgtttacttttcgtgttgcgtcagttaatcgaactgagggtcttggtcggtccagaaatcaccgtgccgtccatggcgccgccgctgggggccggctag

SEQ ID NO: 23983 - DNA, 540 bp, Zea mays
  Peptide Sequence Number=SeqID_67358
atgacctgggacatctgcgttcccctggatgggacccggacccctctaagtgaggtccggaccatccaagacaagatctcgggacgaagaataccctggcctaagtcaaggacgtacaggggtccgacacagacacttgtcagggtcttgccaggcgcgccacgtggcctacgacccggtgctgccacgtggcctatgactcgtgacgtaaaccggcgagcagactctgacgtaaggcctctgggccacgcgatctctgcatttattgcggagattgcgcgcctgtccgccctggagataggcgatgcgccgactcgacatttaatgtgccccgtccactctgatggcaggcgacgaccagaccaccctacaggcggcgtgcctgtccaatcagacaacgggcacatgatggtgcaaatcgttgagcaccgcgccgagacatcaacggatttcctggtggaggaagaagctgtttcctccacgccacaggttcccaatcgcccagtgccgggcactgctgctgtgcacgctgcacggtag

SEQ ID NO: 23984 - DNA, 1443 bp, Zea mays
  Peptide Sequence Number=SeqID_67359
atgccagaaaagtacgctgtcagacagcgagaagctgtcgggcccacgcgcagaggtccaggtgtcccccactccccagtccccctcaacctctctgccaaccgcttcgtcccctcctttctctccttggattccactactccctcgtcctcggagcagttgctgcagctgcaacccccctgcgcctctcttctcccggtcccacccgcccctccgccgcctagggcttccaaatcccctcagcttccccggattccgctttcccccgtcgctgcaaggttccgggaggttctaatctcctttgagcgccgcctgcccgccgtggctgtttctcgggaggagaaagagtccggatttcgaggagttagtggttgcgtgcttgtctcggcggaggtgaatctcaagtgcccgtgtggaaagcccgaggcgaggccggtgctggtgccaggaggcaacaaggccaggtcgggcccggcgaacgcccggaaaccgtcgccgaagcccgtgaggaaggcggagccggcgccggcggggacgccagcggagactgtgcccgccgcgaccaaggcggaagagggcgcaaagaggaatgcagtcggcgggggtggaggtggcgcgcccaagagtgcgtccccggtgccgtcgccgcggcgcacacctcctgggccgccgtcgaggaggaacgacgcgccgctgtcgcatccgggcttgccgctcagcgcgtcttgctcctcggatgcatccgcggagtcggtccgcgcccggcgggctttcaccgggaaagtagagaagggccggtcggtgccgacggctcaaccgaagcaaggcaaggctgtgggtaaggcggtggagagcaagcccatccgcgtggaggttgttgctccgatgacagtgacaccagaggctgtgcaagggaagaggagggaaattttcatggagtttgaccctgctgctgtctctgaaataaatgagaagaagcttgtggcacctggatgcgttgcccattctcttttatcagagcaaaagctccgagctgtacttgagaatgctcgccagatactaaagatcgctgacgaatttggatcctttgatcggtactgctggggttttctgaaccacaagcctatagtaagcaagttccgctatccaagacaagttcctgtgaagagccccaaggcagatataatcagcaaagacatgatgagaagggggttccgaggcgtgggcccgacggtcatatattccttcatgcaggctgcggggctaacaaatgatcacctagtcagttgcttccggttcgagcattgcagtgccgtgccaactctttgcgcatgcgacatcgacagggcaaacacgaaggcggatctgaaaaaagatgaggtgacagcgaagatctatcgcgaggaggctgttgaggacgacgccctaaatatatggagctag

SEQ ID NO: 23985 - DNA, 2607 bp, Zea mays
  Peptide Sequence Number=SeqID_67360
atggcgcccgcggccctccacttcctcctcgccatcctctgcctagcttcgcgtctcgtctggacgcaccaactccgcggccgcgtggagattctcgacggctgctcgttccgcgtcgctgcactcgacctcctcccgggttcctcctccgcgcggtggtggcgcgcggatgggaccgacctcgagtccctatcccgcggcgagcccgcggccgccgacccgctggaccgcaccttcctgtccgagtccctcgtgttccgcctcctcccgggcctctcctggccgctcgtccccgtcctcgcagccttcgaccccctcacttcctccctcttcggcttcgtgcgcctctccggtgccaacgcctccgactcatcctcttcgtccgcagcggcggtgcccaccatgctcgactcctgcgttcagctctccccgcgcttccgcgtgcggtggacgctccacgaggcgaacaattccatcgacatcgccctcgaggcggcggttggatcagagtactacatggcgctcgggtgggcgaagcctggcacggccaaaccgtccgtgatcggcgccgacctcgccgtcgccggcttcactgaggacgggctccccttcgccgaggacttctacgtcaccaattacagcgagtgcttgctgcgcaaggacggcctcgtcgagggcgtctgcccggacacgatctacgaccgcgacaactccaccgggctcgtcaataacacgcggctggtctacggccaccgccgcgacggcgtctccttcgtgcgcttctcgcgcccactggtgtccgcggacaataagtacgacgtccccgtgaacgccaccaggaacatgactgtgatctgggcgatcgggctgctgcggccgcctgactcgctccggccgtactacctgccgctgatgagtcaccgcggcgggtctccggggacagcattcaccttcgccaggctcaacctgtcggacgcgagcagcgggtgcgtcggtccgttggacgccgaggataaggaggaccaggccaggatcacgacggagcgcaatacgccgctggctgtgacggttgggccggcgctccattaccccaatccgcccaaccccgacaaggtgttctacatcaacaagaaggaggcgcctctgctcaaggtggagcgcggcgtgccagtcaccttctccatcgaggccgggcacgacgcaccagtctacatcacgtcggaccccgtcggaggcaatgccactctcaggaactcgtcagagatcatctacgccggtggaagcatggcggagggcgtgccggctacaccaacagaactcgtctggttgcctgatcggaacacgccggacctagtgtactaccaatccttgtatgatcccaagatgggctggaaaattcaggtcgtcgatggtggcctcagcgacatgtacaacaacagcgtgctactggatgatcagcaggtgacattcttctggactctctctggtgactctattaacattgctgcacggggtgagaagaagagtgggtaccttgcaattggatttggtagcgtaatggtaaatagctatgcttatgtcgggtgggtcgatggcaatggcaaggggcatgtcaaatcttattggatcgacggaaaggacgggatgagtgtgcacgagacacatgaaaatgttactcataagcgatgccgattggaaaatggtgcgatcgtgtttgagttcactcgtccattaacaccttcatgcagtggaaaggtggagtgcaagaacataatcgacccgacgactcctatgaaggtcatctgggccatgggtgctcaatggtcacccggccccttaagtttgaagaacatgcactccgacacaagcaatcgtcctatcaggattcttctgttgagcggcttggctgaagcagtggaggacctccgcccggtgcttgctgttcatgggtttatgatgtttgtggcatgggctattctgctgccaggggggatcatggctgcgagatacctgaaacatctgaaaggcgaggcctggttccaggctcacacctatctgcagtattcaagcatagctgtcatgttcttgggtgttgtatttgcagttgctgagctccgaggtttctctttcaaatccagacatgctcgaatcggtgcagtagcactgacattcgcatctatgcagccagtaaatgcgtatcttcgaccgcataaaacagagaatggagagaccccgcctggaaacagagtagtttgggaatatctccatgttttgaccgggagatctgctgcgcttgctggtaccttggcgctctttactggcttgcagcatcttgggcaccgatatggcagtaagactatcaagggacttacatgtgggctaatcttatgggttataagcgttactttgttaacagcttactttgagtatatggcaattaagcgaaggactgcaggtgttgatggtctttcaggaaattgggtgcttggcaacactgaggaagatgatacagtcgaacttttgcaatctaacagggtagtcagtaaaatggagtctaatttgtcacctgaaccaatggaagtacagctcgagccacttaaaggatga

SEQ ID NO: 23986 - DNA, 693 bp, Zea mays
  Peptide Sequence Number=SeqID_67361
atggcacatcaaccaagctttggccccacctacaggcttgtaacctcccctgaggcgggcccgggggccactgtcggtaccctggaacaagcccaggcgagagcattgcttgcgctgctggctccgctgacgcgtgggacccacctgaccgtctctcgctcgcgctcgcgctcagcgtctcacggcatgcgcgggcccacagatcagcttctcaaccgcgcgccttcgctttccctcccactacgccacttccacggggtcccacctgtcatctcgctcggctataaccaaccgcgcgcacctgccgggttgttggagctcaggtccgccttctcctcccctctatgtgctccccagaaccaccgccgctaccagtgccgggcccgccgtcgtcaccttgagccgtcagcgtcgcccatgctccgggaaggagtccagggacttcgtttggcgctgttgaagctcaccgggcaccgaactcgacaattaatcaactgcaccgtcggcaattgctcatcggagtgcgcaaactgccgcggcttcaaccgcgccgtggacctacctcgccgtccctcgatcgccgaagagcctgtgatcgaggatcctggtgagcagcagatagaagtagctgagcaggagctcattgaaggcaagttgtgccttgaccactttttacccaataatgttctttaa

SEQ ID NO: 23987 - DNA, 1329 bp, Zea mays
  Peptide Sequence Number=SeqID_67362
atggcttctctggttcatcccgagcgttaccagaccgagaggaggctcgacacgatgcgccgcctgctcggatggagagctcggtctccagctccagcacctcacaccccactccatcctttaggcgaccatcttcgctcacctgagcgagatgttcgtgggggtggctctgtgcacctctctcttccgccacttttttgtgctggtgaagtctgggaaggccaaggaccatctcggagcgtattacttccagacaagggggattcggctggcgcctatatctcctccctcagcggtgcgaggtgggaaaactggcgggtcgaatgggtgatcgccagtaccgaggccagcgatcgcctcgtacttccgactgatgggctgaggctcgacgggaagcaatggagagctaagccgccgttggcaccggagttcgagcccgtgttgggcaggatcgagtccctggcgaccggtggtctgacgtcgatgcacgtggtcggcgacatcttgcagcgccggatcgtgccactgctggcgagggcacgccctgagctgctggggatcaccggtgagtccttcgttgctaagtccttaattcctcctgagggcattcttccgctttgcgacgaccaagggttgaggacgacgatcctggattcgctgccgacccttgatgagagcggcatagcggttcgccagaccggcggtcgggacccccaccgtgggattcagatccccggtgtactggctggaggttcccggcccgccgatgccggctccagagctcccctcacgactctcagcccctcggggaagggcaagggagctgcgagcagttcttccgccccgggtggttccgggaggtcggaggtagagaggcagcaccgactgcgtcgtgtcgacgggtctttcgtcacggatctgccccttgattcgggcctccctcagaagcaccagaggacaactagcggggtcggggaggccggctccccggcccagggctcgcagaagcgcgtcagtcctccaccagcaccaccatcagtcctgccgccaccaccgccatcatcatctagcttgccaccgccacaggggcagcagcatcaacaacagcaacagcaggcctcttatccctctgtctccaaagtcgctcctactggtgagtccggctcccagcagcaggtgtctgctggccttgatgccgacgacttgcctccacctgctactgctgaggtggcgccatcgggcccccaggttctggctgctgccgcggcagcgccgtcgagcccccaggttctggctggcactgccgaggcagtgtcgtcgggcccctag

SEQ ID NO: 23988 - DNA, 438 bp, Zea mays
  Peptide Sequence Number=SeqID_67363
atggccgttgggaggctgctgtcgcatggcgcaccggacagtccggtgcgccactggacactgtccggttcacctgccacgtcacggagccgttggattctgaccgttggagctgaagtcttctggaccaccggacagtccggtggtgcaccggacaggtcctgtagactgtccggtgaccgttggcgcggaagaagtcgttgctccgctggcacaccggacagtccggtgcgccaccggacactgtccggtgctacaccggacagtccggtgaattatagcggactagcctccagaattcccgaaggtgagcagttcggagttggagaccctggtgcaccggacagtctgtctggtgtctctatcctgaacttctgtgtctgtggtaaagtacccccatctaatgatattcttagtcgcggtaaattgttgaattag

SEQ ID NO: 23989 - DNA, 507 bp, Zea mays
  Peptide Sequence Number=SeqID_67364
atgtcgtcgaatataccttcggcaacggcagaagccgcggggggcgtgcccgattccatcccgccgcccattccggaggagctagaggaggcgctcgagactgagcaccagtgccttggtgattggcgcacccagttggaggaacgtaccaaggccgcgtcctgccaatttgcttcggagcggtccgatcttgagcaagggcgtaaggacctcaaggaggacctggagaaggtgctcaagctggagcggaaggcgacccgggaagggaagaggctggtcaagaagaaagagcacttagaccagcgagatgcggagaaggacctcgcctggagggaggagatgtgggaaaggcgggacaagttgttggccgaccacgagctcaaggtggaggagaaggagaagaaactggaggagaaagagcggacactggaggagcgggtccgtcggttccaggcggcgcaggcagcgcaggtagcccagacggcgcaggcggctccgggttcctag

SEQ ID NO: 23990 - DNA, 126 bp, Zea mays
  Peptide Sequence Number=SeqID_67365
atggcggcgtctagggttcttataccaggactgagtccgatttttggggaggatcgtttaacggagcacgctggcgagttttgcggcacggttcctacggtttcaattatcaaaaagtctacatga

SEQ ID NO: 23991 - DNA, 543 bp, Zea mays
  Peptide Sequence Number=SeqID_67366
atgggttatgttaagaacgtgggtaccgacgttcttaagttaagttcgtgggccctggataaaactgtcgaatttaacgagttagaaacgactgatccagcaatcactgaagaatgctttgaacttctgtcacttattgcaatagcatctgaagatggggcatatgagttttgtgagcctcgtgtaatagacatgatcttccttcaaatcttaagcttaacagatggacatattgctaagaatctgccacattatgtttgcttgagtttgcaatatttccttgcatatcgaagatttctagagatagatactctccattcttctcggaaactctacttatgtgagaaaatatctcttactggtgagatgtactttgccatcacccttgataggaaaactactggtccagtcaggcccgcaggagaaaaaacgaaggaggaacaataccttatttgtgttggtgatattgatcttaaaagtacactactttgcaacatggaaattattattgtgaaagctttgaaacttgatgatgttgaataa

SEQ ID NO: 23992 - DNA, 480 bp, Zea mays
  Peptide Sequence Number=SeqID_67367
atggccggttctaaagatcacaccgatatctccccggacaatatcctgaagccggctgttgaaagtctgacggccgatgagcaacagcaatacgaggactacatgcgtcaagcaagggagaaattcttatcacaatacacggtggatcgccaccagaaagttgtcaaacatggagagaccgacgtcgcatctcttctatcttcgcttcaagtccccaactatgtagatcagcagcaggatcaaatgaaacaacagattgtagggttagaagagtcaattagaaaattaacgcgtacgttggagaaatctgttgctcctagtcttccatcatatgagactagtaacaagatatctatgtctaatacatcggcaacaattgggggatttgcagccccagccattatatggtatgccgatgaactcctatacaggactagtaccaccaccgcccatccctgcttggtagatcagcacccatga

SEQ ID NO: 23993 - DNA, 351 bp, Zea mays
  Peptide Sequence Number=SeqID_67368
atgtcaagtttcgctttgggtccacgatgctacactccaactttgctcaccacacttggtgacttctggaagctcggtgtcagcatcgacgtcatagagttgtccctcgaggatagtggcgctgctcatccagaaggttggcaatcctacgggctatcgcccccacccgaacctatcaaatttctggaccgctggagttccaagtccctcgcattatcaaatctcctcgtgatcattgaaaatgcaaaaaacaatggctcccccgagctagcgatgccacgcaagaacgacacaacagcagcagtccttgtaatcattgagaatgcaaaaaaaacaaaggctcacccctag

SEQ ID NO: 23994 - DNA, 1049 bp, Zea mays
  Peptide Sequence Number=SeqID_67369
tgcatgcgagccgagccaagggtcgggcgaggcgaagtcgttcgccgaggcagggcggagtccgagcctggggtcgggcggagcggagtcgtcgtcttccgggtctagcccgagtccgagccctggggtcgagcggagcggagttcaccgtcttccgggtcttagcccgagtccgagccctggggtcgggcggagcggagttcgccgtcttccgggtctttgcccgagtccgagccctggggtcgggcggagcggaggtcgccgtctttcgggtcctagcccgagtccgagccctggggtcgggcggagcggagttcgccgtcttccgggtcttagcccgagtccgagccctggggtcgggcggagcggagttcaccgtcttccgggtcttagcccgagtccgagccctggggtcgggcggagcggagttcaccgtcttccgggtcttagcccgagtccgagccctggggtcgggcggagcggagttcgccgtcttccgggtctttgcccgagtccgagccctggggtcgggcggagcggaggtcgccgtcttccgggtcctagcccgagtccgagccctggggtcgggcggagcggagttcgtcgtggcgcccttggcaaggcctgattgcctgtcggactcactctgtcgagtggcactgcagtcggagtggcgcaggcctttgcagctttatgctgatgggggttaccagctgagaattaggcgtcttgaggcccccgagcctctgcacagggcgagaggacgatcagggacagactcggctttttacatacgcccctacgtcgcctttccgcaaggaggagggggggagtgcgccatgttaccctcgatgggcaccgaacatggtgtctccggtgagctgcaagcggcaactggcgtgccggttgctcgacgcgtgggcctgggttccaagctggcgtgtcagaagtcggagaagcgcgtccatctggcgcggttgcatgccgcctgcatggctgcccgccccttctgcccgttggtctgggcggaaatggggggtcgcctgtaa

SEQ ID NO: 23995 - DNA, 82 bp, Zea mays
  Peptide Sequence Number=SeqID_67370
atgaccagggctcttgcaagcaggtccagatcgaactgcattctgccggttctcattcgtgttaaggaatgctccgcctgtt

SEQ ID NO: 23996 - DNA, 1074 bp, Zea mays
  Peptide Sequence Number=SeqID_67371
atgccgccagcgccgattggtgatggaggggtcgggtcggcccgcgatctatcctcgggtaacggaggtgactgtcttcttcatggagaaggcgaggtccagcggggaggacacacgacacgcggagaggatgagtcggctcatggtgctcacagtgacgagcttgctgctgcttcaaggctggaagatagcatcaacttttatcaaacttcgattcctgatgttgctaagcttttccatatcgacccagcagcaaagcgtccatccatagtattactgaagaaagaggaggagaagttgaccttctatgatggaaagtttaaagcatcagccattgctgattttgtgtctgctaacaagcttcctttggttaccacactaactcaagaaacttccccttctatttttggcaatgcaatcaagaagcaggcacgtgatgttgcctacaatgagcgagacaatgatgaagttggtgaaccagttgccaactactttggtcttactggacaagagaccacagttcttgcttacactggtaatgaagatgctaggaaatttttccttgatggcgaggtgtcacttgaagccattaaggacttcgctgaaggtttcttggaagacaaacttacaccattctacaagtctgaaccagtacctgaatctaatgatggggatgtcaaaattgttgttggaaagagtctggatgtaatagttttggatgaatcaaaagatgtacttctggagatatatgcaccgtggtgtgggcattgtcaatcactggagcctacttacaacaaactagccaagcatctaagtggagttgactcccttgtgatagccaaaatggatggtactaccaatgagcatccacgtgcaaagtctgacggatacccaacaattctcttctatccagctgggaagaaaagctttgagcctgtcacgtttgagggggagcggacagtggtagatatgtacaggttcatcaagaaacatgctagcatccctttcaagttgaagcgccaggagtcaagaagggagagcatccagacggatggtgtcaaggacgaactgtag

SEQ ID NO: 23997 - DNA, 402 bp, Zea mays
  Peptide Sequence Number=SeqID_67372
atgggtgtgggcaagggacggtttgatgggtgggagtgcttattgaatgctttgcgactgttcagtgaccgcggttggaaacgactccaggggattgccgcggaggtctggacatacatccgggccgtcgagcgctccgggctcgagggctcggatgagtctgagttctcctcggacgagaaggactcggacggcggcgaggacgaagatgacgacgacgacgacggcgacgacgacgacggtggcgacggcgacggtgacggcagcaacggcggcgggggcagcggcggcaagggcagcaccagaggcggcagcagtacgggcagcaccagaggcggcagcagcaagggcagcaccaggggcggcggcggcaagggcagcagcagcaaggccagtggctaa

SEQ ID NO: 23998 - DNA, 798 bp, Zea mays
  Peptide Sequence Number=SeqID_67373
atggcgcaccggacagtgtctggtgcaccaggcccgagcataagcgaacatgtcactctcgggtttctacgaggcgcgctccactataattcaccggactgtccggtgtgcaccggacatgtacggacaagggttcctacggtcgtccactccaaaaccccaacgggcgtgctgacatggcgcacaccagacaatgaacagtgctgtccgggtcgggcgaagcggagttcgtcgtcctttggggttgagcccgagtttgagccctggggtcgggcgaggcggagttcgtcgtcttctggggctgagcctgagtccgagccctggggtcgggcgaagcggagttcgtcgtcttccggggctgagcccgagtccgagccctggggtcgggcgaagtggagttcgtcgtcttctggggctgagcccgagtccgagccctggggtcgggcgaagcggagttcgtcatcttccggggctgagcccgagtctgagccctggggttgggcgaagcggagttcgtcgtcttccgaggctgagctcgagtccgagccctggggtcaggcggagcggagtttgtcgtcttccggggctgagcccgagtccgagccctggggtcgggcggagcggagtttcccatggcgcctagggccggacttggctgctgtcaacctcactctgtcgagtggctcaacagtcggtgcggcgcaggcggcgcagtcctcttgtcagaccggtcagtggagcgacgaagtgactgcggtcacttcggctctgtcgtctggagggcgtgcgtcaggataa

SEQ ID NO: 23999 - DNA, 357 bp, Zea mays
  Peptide Sequence Number=SeqID_67374
atggccggttcaagggatagttctgaagtctcccccagcaacattatagagccgacttgggaaaccttaccggctaacgaacagctccagttcgaggagcacaaggagcagctgattcaagaggcaaaggcgaagttcctagctaacttcaaggtggacaggaacaataaagtcgtccaacaatgggcgacggatccggcatcgctccgacccacaccagatatccccaatatttgcatggccgaagaagatgcgtctaaaatgacctttatatgtccaggcttcattggtttatttgagtgggttgtcatgacatttggtctgaaaatgtcggtgctacttatcagagggatatga

SEQ ID NO: 24000 - DNA, 714 bp, Zea mays
  Peptide Sequence Number=SeqID_67375
atgaccttagagcctcatcagcaccgggtaccccgctgtagggtgaggatgaccttggagcttcatcccttgcagccaggctggcgttcattggactccgagtctttcggttttagggccgaggatactattgagtccactgctctgcatgtgctgacgaccttctgcggctttcaccccttggagctatcaacccatcccattggcttgttccccgctgagaaggaggacgacccaatgtggaaggatcgggttgagcatgccaaggaagtgtgggctctctaccctggacataccgctcacctgatggttcggtgcatgaatgccctgtatcgtctgcaggcattacgaggtgaggcaatgtcacagttgatgggtctagtggagtctaccaagatcaccctagataacagggaggaccttgtggtcaacctgtccactgagctggtggaaaaggacctccaggtggaggccagggaaaacaccatcgagattctagaagatcagctccagacctcccagcaacagcttgaggaagccaaccaacacttggatctgcaccatcaagaaattcaagacatggaggcagaaggggccgatgaggatgtacacatcgagggaggagaggagtcggagcctgcatccagcttggacactgctggctcaggaagaccaccttcccccgagcctagcgttgccttgtttgctcattag

SEQ ID NO: 24001 - DNA, 942 bp, Zea mays
  Peptide Sequence Number=SeqID_67376
atgccggctaacattgatgacgcggagatagatgttgtgcttagcttgctggctggggaatcatctgactcaacccacaccgagccaatggctatcacagctggacaagaacttggtgaagaagtggagactcggaaacccgaaggcgcccgcccaaagcatccatgccgagtgagtcgtccaactgcacctgtcgaggaaaaaaggaagaagaggcaacttcggcgactgtcatgcttggaccagggtgcatgcccttctgctccggttcctgatgatgtaccagaagaggcccttcctgaggttgatgccaagagttgtgatcgtgcacaggccgctgtttgcctatttgacgaggacgaagaggaagaacaagaagaagtcccgctgatccacaagaacaaccggcactatagaggtagcgagggggtagtgatattccttctccagctctatcggatcttgttagtcttcaggggctttcaatatcagactttgatcaagtactggaggaagtcgtcctcgaagacatgctatcagagccacctgccgatgatatcccggccatccgttcagaggtcccagatggtgggctttccttgcttgattccgctgggcaagagccccgagagtggtgccggcagttacccagcccctgagagtggtgccggtagtgatccagctcttatgggtaatgcaagctacaacccagcccccgagggtgttcaggtgggctctctttcccacgcctccatggatgtccacgttgggttgtccccacctcggttcgatggggcgacgatggcttttgttgatggaatatctgcccagctgagatcctgcggtgccgctgttcctgaacaagctttgtctctgatgcagtggaacccaatgttgctccagaaacagatcgacgacttgaaggcatcgaacactggttag

SEQ ID NO: 24002 - DNA, 432 bp, Zea mays
  Peptide Sequence Number=SeqID_67377
atgggcaagaacaacaagcgcaagcgcgagccaactcctccatcagaggagtttggtgactcggagtactcagaggaggagttctcctctgagtccgaggggtctcctgctcccatccccctgcgtgagtcgtctgacgactcagacgactccccaggggcttgcggcggaggtctagacggctcggatgagtcggagtactcctcggatgaggaggactcggacggcggcggagaggacgaggacgacgatgatgacgacggcgacgacgatgatgatggcgacggtggcggtagcggcagcggcaggggcagcggcggcggcagcaaggacggcgacggcggcggcagcaggggcagcaaccgtggcggcaacagcaggggcagcaccaggggcggcagcggcggcggcagcaacagggccagtggctag

SEQ ID NO: 24003 - DNA, 1392 bp, Zea mays
  Peptide Sequence Number=SeqID_67378
atgctgcagatgctgggcttccgcgggggaagccccagcaccggcgacgcgtcccccgccatcagcggggacggcggcgcggccgcgcggccgctccgcctggtgtactgcgacgacaagggcaagttcgtgatggaccccgaggcggtggccgcgctgcagctcgtcaagggccccgtcggggtcgtctccgtctgcggccgcgcgcgccagggcaagagcttcatcctcaaccagcttcttgggcgaagcggcgggtttcaagtggcttcaacacatcggccttgcaccaaaggactttggatgtggagtgcgcctttgaagagaactggtctggatggaactgaatacagtcttgtgttgttggatactgaaggaattgatgcttatgatcaaaccgggacctatagcatccaaatattttccttggctgttttgctgtcgagcatgttcatctacaaccagatgggaggtatagatgaatctgcgttggatcgtctctcgctggtcacagagatgacaaagcacatacgtgtccgggcctcaggtggaagctgcacatcatcttataaaccgtcaaacataaacctcaggccctgttatgcatcagacacctttggtgtgcgacgagccgatgacaccgtgcttcctttactacaggacttttatctggatttggcagaagacaacagaaaaattactccacgggattacctagagctagcattgaggcctgttcaaggtggaggaagggacatatctgcaaagaatgcgatacgggactccatccgtgcactttttccggacagggaatgttttacacttgtgcgacctgtgaacaatgagaaagatctccaacgtcttgatcaacttcctattgctcttgaaacatatttacactttaaacagtttgatggcatttacaaattatgtctgtcccttcatgacctgagtaatttccgtccagagttcagatccggtctggatgctttcacgaaatttgttcttgaccgaacaagaccaaaacaacttggagctactacaatgacaggtcccatccttgctggattgacacaatcgtttcttgatgctattaataatggtgctgtccctacaatctcttcatcatggcagagtgtggaggaggcagaatgccagagggcatttgattctgctgtgggcacttacaattcttcttttgaccataaaaaacatatagaagaggattctttgagagaagcacatgaagatgccatgaggaaggctatcagtgcttttaatgtttctgctgttggtgctgggtcagctcgttcaaaatttgaaaagcttcttcacagttctctcaaaaaggcctttgaggtgatcttatccttactcatcagctgcttttga

SEQ ID NO: 24004 - DNA, 555 bp, Zea mays
  Peptide Sequence Number=SeqID_67379
atgtcgtcgatggccacgaagctcttcaacaccgccgaggtggagtcgtcggacgcgcaagccctagtcgcggtgaagaagcttgaggagacggttctggagttggtggcttcgtacgaggactgcgcggccatggcccaggcaattaaggcagtacctggagtgtatcagtcatctgatcagaatgttcaccatgctggtcagcctatgcctggtgaggaacaggaggacattgtcatgactagcactcagatgagcatcttaaatgtcacatgcccattaactggaaagcctgtgattgaattgatgaatccagttcgctgtgtggattgcaagcatatctatgaaaaggaccctgtaatgcaatatataaggaccaaaaaaccaccgcagtgccctattgcaggctgtcctagggtcctagaaagagggaaggttatctgtgatcccttcctccttattgagatcgaagagctgcgttcatcagagaccgccgctccgaatgccacaaacatagatgactggaccgatctaaatgacgaagacgaggagtga

SEQ ID NO: 24005 - DNA, 312 bp, Zea mays
  Peptide Sequence Number=SeqID_67380
atgtggaacaagaggaagatgaggttgttaggaactgatagcatatgtcccaccgctttgggtcatcaagaaattaagtggccagtgcttcttatgttttggggtggtgttcataagatagcacatgaagggaccaatcttagagctgacatcaatgtttgcattgttggcaacccaagctgcgcaaagtctaagtttctaaaatatattgttgccgttattccaatatttgtttgcacatcagggaaatcatcgactgttggtgtgacaacaactgttgctaaagaacttgaggcggttagcggcttctaa

SEQ ID NO: 24006 - DNA, 729 bp, Zea mays
  Peptide Sequence Number=SeqID_67381
atggcgcactctggctcagccaggtctaggcctcggtcatcccggcgccaaaatgaggcgtcggcgtcagtgcgctccccctcggtgagggccgcaccgaccgaggacctgcgggcggagctcaaccaccggcgtgcgggagaggacgctccagcctccctggagaagtctaacgacctatgggcagaactcaaccgcaggcgtgcgggcgaggatgcatgtgtctctctggagagggcgccccggagcccgcttgtgggttgtggtggctccgggctcggccgctcgccaccccccgtccacgtcttgtcacccttcgggctggtttggaggcgcggccgcggcacgggggaacaggcacagcgctctcgctcgcttggcgcgctgcgcctgcctgtggcccgcctggatgccaatgccatccggtcactgcttacagtttacagcagcgcagagcaggagctcgtgaggcaagcaggtgggtcgaatcggggtgacgacggcgacgcatggagtgctccgcaggccgaggggctcgtaggtcatgagtgcgacgctgaccaaagggacacgcacgccatgagtgagggcggaccaactctttactgcgacttgtccccatctgctactccgtcacgccccgacctcgggctcggtgtctcggagtttatccgagggtgggtgctttctggtagacgactcccttacctcctcacagacgagccatag

SEQ ID NO: 24007 - DNA, 1905 bp, Zea mays
  Peptide Sequence Number=SeqID_67382
atggcggggatcgacctcaacgacaccgtggaggaggacgaggaggaggcggagcccggcaacgcctgctcccagcagagccggaccagctccgcggccacgttcccgccgccgccgccgaaccagccgaggccgagcgccgcggtgtgcctcgagctgtggcacgcctgcgccggccccgtcgcgccgctgccgaggaaagggagcgtcgtggtgtacctcccgcagggacacatcgagcacctcggcgacgccgcggccgccggcggaggcgcgccgccgcccgtcgccctgccgccccacgtcttctgccgcgtcgtcgacgtcactctccatgcggacgcgtccacggacgaggtgtacgcccagctcgccctcgtcgccgagaacgaggatgtcgcgaggcggctgcgcggacggtcggaggacggcagcgccgaggacggcgacgaaggggaaaccgtgaagcagcggttctcgcggatgccgcacatgttctgcaagacgctcacggcctccgacaccagcacgcacggcggcttctccgtgccacgccgcgccgccgaggactgcttcccgcctctggactacagccagcagcgaccgtcgcaggagcttgtggccaaggatttgcacggaaccgagtggaggttccgccacatttatcgagctctttataaccagtgcttaaatcttggttcactacctaatgttgcacatgctgtggccaccaaaagtgtgttccacatctactacaaccccagatgcacagggatcatagcaggaattggtgatgctgaccccatgtggcgtggttcgaaatggaaatgtttgatggttcgatgggatgacgatgtagattttcgtcaaccaaacaggatttctccttgggagattgagctgactagttcagtttcaggatctcacatgtctgcaccaaatgcaaagagactgaaaccatgtcttccccatgttaatccagactacctagttccaaatggaagcggtcgtcctgattttgcggaatctgcccaattccacaaggtcttgcaaggtcaagaattactgggttatagaactcatgacaatgctgctgttgcaacttctcagccatgcgaagcaacgaacatgcagtacattgatgaacgaagttgctccaacgatgcgagtaacattatcccgggggttccaagaattggtgtcagaacaccactcggaagccctaggttttcctaccgttgctcaggctttggggagtctccaagattccaaaaggtcttgcaaggtcaagaagtatttcatccctacagaggaactctggtcgatgcaagcttgagtaatagtggcttccatcagcaagatggttctcatgtgcctactcaggccagcaagtggcacgcacagctacatggatgtgcttttcgtggccaacaagcaccagctgttccatctcaatcctcatccccaccatctgtcctgatgtttcaacgaggtgatccaaagatgtccccatttgaatttgggcatttccacgtgaataagaaagaggatagacgcgcaatgtttgtccatgctggaggcatcggaggaactgagcaaacgacgatgctccaggctcatcatgtttctggaggaacgggaaacagagatgtgaccgttgagaaatctcatcccgctgttgccgctgcttcagacaacagggaagttagcaaaaacagttgcaaaatatttggcatatctttgaccgagaaggttccagcaatgaaagaaaagggctgtggtgacatcaacaccaactatccatcccccttcctgtctttgaagcaacaagtgccgaaatcgctgggcaacagctgtgccaccgtgagtgtcctacaccatgtagcagccttgatgtcattctag

SEQ ID NO: 24008 - DNA, 321 bp, Zea mays
  Peptide Sequence Number=SeqID_67383
atggcgcctcctgttgacgtggccggtctgcgccctaggttgggcgatgtggaggctcctccgaggtcgaggtcgagtccgtcttccatggccgaggccgagtccgagcccctgggtcgggcgaggcggagttcgtcgtcttctagggctgagcccaagtccgagccctgggtcgggcggagcggagttcgccgtcttccggggcttagcccgagtccgagccctgggtcgggcggagcggagttcgccgtcttccggggcttagcccgagtccgagccctgggtcgggcggagcggagttcgccgtcttccggggcttag

SEQ ID NO: 24009 - DNA, 1650 bp, Zea mays
  Peptide Sequence Number=SeqID_67384
atggcgtccccggcacggcccgccgccgcatccgtctccgccgccttcggcctctcgcccgaccccaaacgctgctccttcgaccaggcgctccggcacaaggagaacagactgttgatgtcatttgttaattaccacgatcaagaaaaggtctctaaagaaatcgtaacagacgctatagaaagctgcatgaagaaacaggcagataacttgttgaattcgctggaagttatcagtggtaggctgtcgcaattggagctgtattgctataagctggaaaggtccattggagaattacgaagtgacgtgatggattatcataacgaagcaaatctcaacttccagtgccttgataagcaattgaaagagttatgtccaacatgtggtctcattaactttttgatgacatttttaagactcactcataactggacctacttctatggtcaggttcagaaatctgtgcaggtcgttcaggaaaggcaggagcttgctgaaactcagaaagaaatgaccaaacttcagatagtacatgaggattccgcacaaaagagtgaacgtagtgctccatcagttttcataaatagggaaaatgagattgcccttgtgccattgcaccaagtaaattctgtccagtctcctgctgtgcaattccaaagttgcagtggccttattctacagcaactggtgccagtccaagaccagcagcgctcaaaccaaactgccatgtactgcatgcgaggccaaagtcatctggagcacagacaggcccaaatgttccaagctgctgctcaacctgtgcagacacacactactaggaaaactcaggcacatacagtacttgaggtacctcaggtaaccacccagacagacaccagagttctacgctcaaccgcagcatcaatggcaacatcaaacaggtcagcagcttcagtcccaggtaaggcaaccacaaccacaggtgggttcaacaacagcagcagtacaacaatatccagcaaggtccagcacagatggtccagccgcaaaacatcctctccacatgctcatagcacgccacagatcacactagtatatcctccatacggagctcatcagtctgcatgtggtaacgctgaggcacgcactgggagcattgtcgtgccaccttcgcactctacaatttcctcatcccagcggaagcatcatgaagctgctcctatttatgtacaaagcaacacagtttctgttccattgacggagcagcaccagcaacttcattcacttggcaatggctcatttgtacctcagccaagtaaagttagtccatgcggtgtagcatcatatacggtacaagggaatgcacaggcctacagccctgcttacggaagcccttccagcaatcctgctactattgttgctgtccttaatcaacaagcacattgcagtgctcccatggtgcttcatcacctgggaccatctcagtcagtgcagaaccatccgataggcattgctgataaggttgctcgaatgggttacccaaaggatcaagtagttgatggccttgcgctccgtatggtggatgcaggccagcctgcagaatgtaacaccctgcacgataggttgagctctgtcacccatgcggtggctcctcaggcatggtctggatag

SEQ ID NO: 24010 - DNA, 318 bp, Zea mays
  Peptide Sequence Number=SeqID_67385
atgggcgattctgacttctgcgcgcgcagagcgcgcattaaatgcgcggcagagagccgttggcgcggagacgaccgttgcttcagagtcgcaccggacagtccgcacaatgatattgcgcgcattgctaggaatttcatcatcaagatgaacctcttcgtgaggcagatcaccatcaaggacggtgaccagttctcacggcatgcaagcaacatgggcaacaaatcaaaggactgcatttgcattgctcgtggtgggcagcacgtggagcccggctgcaggcgggagcaggttgccaacagcgctgagggcggctag

SEQ ID NO: 24011 - DNA, 165 bp, Zea mays
  Peptide Sequence Number=SeqID_67386
atgcagacggcatgcaaccgcgccaagtgggcgcaccccttcgactctaacgcgtccagcatggaggcccaggcccacacgtcacacaaccgggaccgggaaagggggataccccgaaaaggatccttctccgtgaaggaaacatgccccgagcctccctactga

SEQ ID NO: 24012 - DNA, 132 bp, Zea mays
  Peptide Sequence Number=SeqID_67387
atggcgagtttgagtctgagtccccctggtgcaccggacatgtccggtggcacaccggacagtccgtcccaaacccggacggagacaccaaagagcaagaaggaggagatcaacctcgacatggaagaatag

SEQ ID NO: 24013 - DNA, 210 bp, Zea mays
  Peptide Sequence Number=SeqID_67388
atggcaccggactgtccggtgtgcaccggacatgtccggtgcgccaacggctctctggccgccaacggtcggcttcgccatttaaggaaggaaatcgggcaccggacactgtccgctgcaatccatagagggaaaaatactgtagaagccgcagccgcagccggattgcagccgcagcaagccgcagcgaacaagctgatagtcttttga

SEQ ID NO: 24014 - DNA, 263 bp, Zea mays
  Peptide Sequence Number=SeqID_67389
atgccgtcgcaccgcctcacctcgaatgcgagagcgggaagccgggaactgtgccggccgtcgctgcgccaccagctggtcatagtcacggacaccaccatgtcaccgcacaagcagcaggtgccgccacgacaccgcgcaggcgagctgtcgccgccagaagtaccaacgcaggcactgtcgcgggcaagcatgcacaccgagcagccaacatcgccgcctcatgggcgtgcgcacgggagcaggcaccgccatacgagcaa

SEQ ID NO: 24015 - DNA, 690 bp, Zea mays
  Peptide Sequence Number=SeqID_67390
atgtctttcgtgcttttcgactacttcgaaagtgggatcccgaaaacgacggagtacactgattccgcggaccgaacaagtcttcacgctcgaaaactcttctgccgaaacgattttttgggccttctcgactacatcgatagcagaatcctacggacgagctcggaccttgtcagagggggagcagcagcaccctcggcatcaactacaccttcggcaaagtccgaccaagcctcggacggcaacgcggtcggaggatctccactccgaaggacgatagcagcgccgcgcccgggccatcgccgccagggtcttctccaggaatttgacctgagcagacggctcggctggccacctcgaagcctcagccagctgtcccccgaggacatcagcccggtttgtggcctcggcgactcgactccggtgctggccccgccagtggacggcccggacaggcttcggccgacgaagtcttcttttcgagccaactccgcctctgtccatgctgacactgctgcctccggcttcggctcatcgaagagcagccgaggattttctttaactaagcaagagaaagcctcaggcggcaaggccgaccgagccgagggactcctacgcctctgggatacggatacctcactcgtcaccttcgcacgaggcaactcacacttggttaagcggtccagttag

SEQ ID NO: 24016 - DNA, 435 bp, Zea mays
  Peptide Sequence Number=SeqID_67391
atgacggggaggttgttgacgcagtcggtgagcaagctacggactcggcgagaggtgcgggagtttgttcccaaggaggcgaatctgacgctggagcccacctggtcagtgactgagaggagcaggcgcgcgtgcacctgcgctcccaggcagacacgtgggagagaacagtgggcccaccgtggggaggaattaggaggggtgttgggccggttcagtaggttttggcccacgcagggctttacaaaggctgccccctcggaggggttcaacagccgcctcaaagcgcttgggctccgtgcccactactggtcagaggttcgaaggccggcccctcggaagggttcaacggccgcctcaggccactcgggctccgcgcccactactgatcaggggttcgtaggctggccctcgaagggttcacagccgccttag

SEQ ID NO: 24017 - DNA, 390 bp, Zea mays
  Peptide Sequence Number=SeqID_67392
atgatggaaaatttcggcagcaaaacagtgcaaatagcaatgaatgctgtggtaacttcacaactacttgtcagtttatatagtgctgcagtggaccgcaaggatcaaacagtaactctgcaaggtgggaccgacacgcgctcggaagtcggatcgtttctccgcaacgagctcagggaaggtgttttttggaccttcggcttcccgaagctgaagaggcttttttcacgggtcaagctcgttacgaagaacgatctagcaccgcgaaaggggctactgttggggtcgtgcttcggtgcgccgaaggtctctcacgaagaagcagcttcggctgaagtcgtctccaagagatggccgaaggtcccttttcatggaacttcggcgttttaa

SEQ ID NO: 24018 - DNA, 344 bp, Zea mays
  Peptide Sequence Number=SeqID_67393
gtcggcctgccgtgcctagacaacacctaggatctcttctccccgacggggtccctcccgggagcgagatccaggcgccgccggcgaccttcgccacccctgctcactcgcagaccgtccggccgtcaggcagggaacctttgcccctgctccaggtcgcggaccgtccgcgcctgtgcagagagcaccgccgccggttcttgttgagtgtttggcgcccgaaaaaggtcatggaattaccactagacgcgcagagcagcggaagacgtctcgatgtagacgaacgcgtcgagcagtgtcgtgcagtcgccggcgtccttcacgtcctcgcacggttcgcctaa

SEQ ID NO: 24019 - DNA, 354 bp, Zea mays
  Peptide Sequence Number=SeqID_67394
atggcggccgagcggcttagggcacggcagcccgcggcgtcggcgcgacctcctgcacctgcgcgcgtggcgcggcagcacggctcggcggcgtggccccggcacccgcagcggcggccgagctctccccctgcgcagccccccatggccatagagagaagaacggggctcgagcggtttctcgagtgcctctccgtaaggacctgttcgttggatgactgcccgagaaaacagtgcaaccatgaggatgatgatgaggaggatggttatgattatgcttatggtaatggtaaagaagaaggcgtcgaggtggatctccaggagttccaggacgtcgacgagttcgaggattag

SEQ ID NO: 24020 - DNA, 1317 bp, Zea mays
  Peptide Sequence Number=SeqID_67395
atggggagcgcccgcgttgccttcgtcttgttgttggaggagcgcaaccttacggaggtgggcacccttcagccattgctcggcttcaaggattttcatcaggcagcccggctgcattccctcaccgatgcttcaaggatcttcatcatccttgatggggaggagggcgaggcgagccggagcctgccttcacgtgggctggcgtcccgcttcttcctccagcatctgggtgtggaaaccatcctccagctctgcggaggaggcgtcctccagccatgcgggggaaggcgagctgctgctgcctggccagggtgcagcattccgtcctctgtccgggcgactgtggccggccgcaccggagggtctcacaacacgtcgtacgccgcgagggcggtggctgccgtcgtcggtgttgaggtggtggtagccagagaaggtttctctgccgacgagatcgtcggcgccacctgcggtgggacctccggctcttcggccttggcggcttgtcctcgcccctcgtgtggggacgtgggcgagggccttgtcgcagcagcgtctgccctgaggtcatcgctgctgctgtttagccgcctggagcggaggtcgttgtcgctgctgctgcagtggtcgacggcgagccaactggagtttgtcgtcccgcaggccctccgatgtggaggttgttcatacccgcgggagtggaaccggagttccatttgtaatggcaccttgagtgccggtaaccctcggctgctctacgatgagccggagccggaggcagcggtgtcagcatggacagaggcggagtcggctcgagaagaagcttcgttggcctgggagcacgtggcctctctggccgaggaggtgcagcagcggcagctggagcttggccaggtcgtccgctggcggggccaaccccggagtcaggctgccgaggccatgagccgggctgatgtcctcgggggacagctggctgaggctacggagcggccggtcgaggtgtctgcctgggccgggacccttgcagagaccttggctatgatggtccgagcttggtgctggcgtcctccttcgaggtggagatccttccgcccgcgtcgccgtccgaggccgggccagattccgccgaaggaggagacgacgccgagggacttgttcgtcggtagcagaatcgtttatccgagcgagagttacttttcacggaaggtgacgagtgaggatcccgctatcgaagcagtcaaaaagcgcgaaagatgttctggcagaaagactttttccgaggaaaattttgacgcagagggggttccccccttctag

SEQ ID NO: 24021 - DNA, 498 bp, Zea mays
  Peptide Sequence Number=SeqID_67396
atggagttcctgacgaaggtggagttaaggttgttagccctatcaagtactgcttcagttcttcgaaggctttttgctgagttggtccccattgaaagtcttcagctgacttcaggacttcgaagaatggaaaacagcgccactcgcccctctccgactactgtgccacccgccagggtgaggctgacagcagctaagtccagcctcaggcgccacaggaagctccgcctcgcccgaccttgggcctcggcctcaggagaagtctccgcctcgcccgaccccagggctcggccctcgcctcagcctcggaaggtggtctctgcctcgcccgaccccaaggctcagcctcaacctcgacctcggaaggtggtctctgcctcgctcgaccccaaggctcgacctcggaaggtggtctccgcctcgcccgaccaagggcccgccctcaacctcgacctcgggaggaatcacgtcctcgcccgaccccggcctcggccttag

SEQ ID NO: 24022 - DNA, 765 bp, Zea mays
  Peptide Sequence Number=SeqID_67397
atgcaggtggcgtgcaactgcaccacggagacgcaccccttcaacttcgacgcatccagcatggaggcccaggcccacacgtcatgtaatcggcgcgccggttactacgtgcgaaaaactgcaccaccacttgcgccaatgccgctccttctcgactgcggaaccggtgccgtgactcgaggcaaccctgcgcatggcccaacagtgccaaccgagcacatcggtcacgggtcagtcagccgcgggaggaggcgcgacggtcgatatgaccaaaagtgggccgacagtaatggcgacagcaggcgagcggaagcagcagtcaaatcgtctacaggctcacgtcccctcctggtgcagcaggggaaccctctcccacggcgtgaagacgacgcgcccgtgttccatccctcaaacggctcgcgcaacgatcgccccgcacgaccacccgtcccgcgcattaactttgcggcaaggcaagcgacacctttggcaggcgaagcggcgtcgttccatctccgccatgatgacagcatcaaaaaagggaccggaaaaggggatatttcgaaagggatccttctccatgaaggaagcgggcctcgagccctcctattgatcaggggttcgaagtctggtccctcgaaagggttcgacagccgccccagagcactcgggcttcaggctttactgatcagaggttcgaaggctggcccctcggaagggttcgacagccgcctcagagaactcgggctccgcgcccactactaa

SEQ ID NO: 24023 - DNA, 138 bp, Zea mays
  Peptide Sequence Number=SeqID_67398
atggccggttatgacttcgtcaaggacatcaacctccttttcaatacattcgagtgccccgggatcgcggatgcatcctataacttcttcgtccaccccaccaaaaaaacatggatcctggctggtaaccgcggttga

SEQ ID NO: 24024 - DNA, 738 bp, Zea mays
  Peptide Sequence Number=SeqID_67399
atggaccaccagatgttcgacgaccccttcgggagcagcggcatctcgtcgctggaggcggacatcttctccgccgccgccggcagccagctgccgtcgccgccgtggccggacttcgacgacgactacgacatccccgacctctccgcgctgcccgccaacgccgccacctcctcgggcggcggctacggctccggcggatccggcggacaccgcaagctcagccacaacgcgtacgagcgtgaccgacggaagcagctcaacgacctctactcctcgctccgctccctcctcccggacgctgaccacaccaagaagctgagcatccccaccaccgtgtcccgagtcctcaagtacatcccggagctgcagaagcaggtggacaacctggagaggaggaagcgggagctgaccaacgccaactgcaagccgggagttctcaacaccagcgagatcgtaactactcccattgtttctgctacttgcctcaacgacacggagatcatggttcaggtcagcctgcacagcaatgtggcagccacggctctccctctctccaagtgcataaaggtgctggaggacgcaggccttcacctcatcagctcatcaacctactccacctttgggaacaagacattctatagcctccatcttcagggaacagaccagccaactggtgtaaactgtgcaaaccaaaacattgttggaggtgggagagtgtatttaaaaatatactag

SEQ ID NO: 24025 - DNA, 93 bp, Zea mays
  Peptide Sequence Number=SeqID_67400
atgaagagaagtcaaagaacgatgaacgaggagtgcccggcattctgcgacgagctggagaagatcgtcaggaagaaagcagggggcgcgtag

SEQ ID NO: 24026 - DNA, 410 bp, Zea mays
  Peptide Sequence Number=SeqID_67401
atgagattacccgcccctctccgcttaccagagcctcctccacagccgcatccactaccggaaacactcgacaaagactttgtcgagtgtaacactcggcaaagaaggctcggcaaacagtacatcggcaaagacttctttgccgagtactttttctcgggcactcggcaaaaatgtttgtcgagtgccagggagcactcggcaaagaaaagcgaccgttacggcgccggcactcggcaaagcgccttctttgccgagtgccagtgggaccactgggcaattttcccgcccagggagggtccccatgtcaggctctttgccgagtgtcccaagtggcactcggcaaagccgacctctttgccgagtgccagcgacataacactcggcaaagaacctaagccggtgcccag

SEQ ID NO: 24027 - DNA, 963 bp, Zea mays
  Peptide Sequence Number=SeqID_67402
atgggcgcaattcaggtcaaggcttcgtctactcaagggacgcaatctcgcctcgcccgagcccagcctcgggcgagaacagtagtcccaggtcgaagtgaccgcagtcacttcgtcctcccactgactgacctgacaggaaaacagtgccactcgccctctccgactgttgtgccacccgccagggtgaggctgacagcagctaagtccagcctcaggcgccacaggaagctccgcctcgcccgaccttgggcctcagcctcaggagaagtctccgcctcgcccgaccccagggctcggcccccgcctcagcttcggaaggtggtctctacctcgcccgaccccaaggctcggcctcaacctcgacctcggaaggtggtctctgcctcgcccgaccccagggctcggcctcaacctcgacctcgagaggaatcgcgtcctcgcccgactccggcctcggccttaggaggagtctccgccttgcccgacctttggctcggaccgaccatgccgcagggggaagggccagggccctcatacgggagggtggtcgcgcgggactccctctgtccctcgcgaacgcttgtaacccctactgcaagcgcacccactctggcgcaggataacacgagccacggttttccccccttcgtgttccgtctcgcgccaacccatctgggctggggcacgcagcgacaattttactcgtcggtccagggaccccccggggtcgaaacgccgacagtatgttacttctctgataacaccggcactcaaaagccttttgtcacttcgtttcgtgcgccttcggctttatcgtcggacatcttcctaagcctctgctttcttggcctaaaggtcagaaatttcaacaaagtcttctcttgttcatcagataattgggatcccaacagtaccttctgctcggctatgtcttcgcacaaaagcatgggctttggttga

SEQ ID NO: 24028 - DNA, 1068 bp, Zea mays
  Peptide Sequence Number=SeqID_67403
atggaccagaaaccccttgatgacacaagatatgaccattgcatcactgtgaggataatccttgagttgaaggtcttcctgggagaagaagttgagccgcctatgattgggagcaccaacttcgtagctgaaggtgccacagcttggttgccttgcgaagccattgtcgcaattgtgaaagtgagttcaccggaggtgggcgctaatgttggtcacttgttctcaaatgccgaagctattgagcttcggcattctgcaacgctgcttacacacaaggccttcgtcttgagaaaccgagccgaggttgatgatagcttcggcaagcttttatattatcttgtcgaaggagggtttcttggaatggttctggggctctgggcagagcagcaaattctcgtttcttttcttgagatacagttggtgaacaggtggagaagaaatccgagagaattcttagagctcggcgggtctaggtacgcggtacgccgcacgcctgccggccccggccgcaccgtcatgcagaccgagttggaggaaaagtcgcggttcgggcggtgcccgtactgccgcgccatgatctaccaggacctcagcgcgaccatcttctactgcagcaggtgccgcacgcccatccgaggcaagaacccgcaacccacggacgagaccgacgcctcgaccgagcgcaactccgactctgacgagggagtagggagactttgctttgtggaccgatgctttgaggctaggggaaatgacaatggtagggggacgaggaatcccccaaccaagaagaggagtaccaacgccaacggcaagcgcacatcctcgctcatgaggccgccctctgccagcagcaggaggagctcgatgccctcgtgcaaaagctcgaccacgtctacgacggtgttgagcagaggcacctcgacggtcagcactaggacaatcacaagtggtttccggtattccggatgctgcaaagggaccagacgatccggtactatacccggattgtctggtcgtgccatgcatcgcaacgagccttttggtgggaagtcgagacatgtataa

SEQ ID NO: 24029 - DNA, 1698 bp, Zea mays
  Peptide Sequence Number=SeqID_67404
atgccattgccatcggccgcccagagcgctctcgtcgtggcggccgtcgccatagccaccgccaccgtcctcctccccttcccacggacgccgccgcgggaccgcttcgccgacatggtgctggccaacggcaccatctacaccgcggaccccgcccgacccttcgccgacgccatgtccgtccgcggcggccgcgtgctccgcgtcgggacctacgagtccgtcaaggagctcaagggccctcgcactcgtgagctgaatctcagtgggaacgtggtgctgccggggttcatcgactcccatgttcacttcatagacggtggattgcagctagcgagggtgccacttcgtggggtcagaagcaaagatgacttggttgccagggtcaaggaagctgtcagagataagcaacctgggcagtggatcttgggcggaggttggaatgatgattttgggggagatggtctcccggctgctgtttggctggatgatatctcacctgataatccagtctggctctctcgcatggatggtcatatgggagtagccaactcattagctatgaagattgctgggattgacaaaaacacaaacgatccaattggtggaactatcatacgaacaactgaaggagagcctactggtcttctagttaatactgctatgaaacccatatttgatgtcattcaaaatgtttctaaccatgaaagaagagaggctcttcttagagcaagtagacatgccctaatgaggggagtgactactgttgttgatgttggaagttacttccctggggcctcagctgagaaaacgtggcaagattttgcagaattagaaggattcacttgtcttgtttttatctatgaccttatttgtactcctggcatactgacacaagatcttattagtgaacatggtcgatcgctaagtcagtggatccatctaggtggtgttaaagctttccttgatgggtctctgggttcttcaagcgcgttgttccatgagccttatgagggtgatccggataattatggtctccaaatgacagatttagacagcctacttaatagaacactagaatctgacaaatctggactccaggttgccatacatgcaattggggataaagctaatgacatactactggatatggttgacaagattgttgatttaaatggagcgaaggaccgtagattccggatcgaacatgcccaacatctggctccaggtgcagcaaaccgctttggcaagcatggtaccattgcatccgtgcagccagatcatctactagatgatgccgaccatgcttggagcaagattggggtggaaaggtctgagcgaagctcctacacatttcgatcactgttagatggcggtgcgcagctagcttttggttctgactggcctatttcagacatcaaccccttgcaagctatccgatccgcagtgttccgcaagcctcctggatgggaggtcccctggatccctgcggagcgcttgaccctggatgaatcactgaaagcgcacacgatgtctgctgcctacgcctgcttcctggaccacgccgtgggcagcctttctgaagggaaatacgccgattttgtggtggtaccttctacatcgtgggacgaattctccagcgatttgccggggcatgtcctggcgacgtacgtgagcggcaggcaagcttatccatga

SEQ ID NO: 24030 - DNA, 138 bp, Zea mays
  Peptide Sequence Number=SeqID_67405
atggggtccaggcacagtgcttgctctgccgaggctgagtgccgaggttgcctttggtgcaacctatgctcaggtaaagaagaaggcgtcgaggcggatctccaggagttccaggacttcgacgagttcgatgattag

SEQ ID NO: 24031 - DNA, 117 bp, Zea mays
  Peptide Sequence Number=SeqID_67406
atggctagtcacctaacttcttcggtccctcggttaccggactccacacttgcacaccacaagccaagagacatactgcaacaacaatctcgcaccccgctggcgttagaacgctaa

SEQ ID NO: 24032 - DNA, 723 bp, Zea mays
  Peptide Sequence Number=SeqID_67407
atgtcgtggctgttggaggtgcggcggagcctgatggagggacagctgttggagcgcccgagccaaggggtcggtcgaggcggaagtcgttcggccgaggccagggcggagtccgagccctggggtcgggcgaggcggagtttcgtcgtcttccgggtcttagcccgagtccgagccctggggtcgggcggagcggagttcgccgtcttccgggtcttagctcgagtccgagccctggggtcgggcggagcggagttcgccgtcttccgggtcttagcccgagtccgagccctggggtcgggcggagcggagttcgccgtcttccgggtcttagcccgagtccgagccctggggtcgggcggagcggagttcgccgtcttccgggtcttagcccgagtccgagccctggggtcgggcggagcggagttcgccgtcttccgggtcttagcccgagtccgagccctggggtcgggcggagcggagttcgccgtcttccgggtcttagcccgagtccgagccctggggttgggcggagcggagttcgccgtcttccgggtcttagcccgagtccgagccctggggtctggcggagcggagttcgccgtggcgcctttgtcgaggcctgactgcctgtcagacttactctgtcgagtggcgctgcagtcggagtggtgcaggcggcgctgtccttctgtcagactggccagtggagcggtggagtga

SEQ ID NO: 24033 - DNA, 498 bp, Zea mays
  Peptide Sequence Number=SeqID_67408
atgatggtcacccggtcagccatcaccgagcggaacaagtggcggcgcaaggggcagggagggcggtttcctcttctctggctaagtctctcgggttgcgaaaacctaagagggaggcaggaggcggagcgaagaaccgtcaccagaccctcccccaggagaagcaggcaacgcttcgccttcgccgtaataaccgcgccaaaaaagggatcgggaaagggggataccccgaaaaggatccttccctgtgaaggaaccaggctccgagccaccctactaatcagaggttcgaaggctggccccccgaaagggttcgacagccgcctcagatcgcgtgggccctacacccactactggtcagaggttcgaaggtcggcccctcggaagggttccacggccgcctcaggctactcgggctccgcgcccattactgatcaggggttcgaaggctggcccccgaagggttcacagccgcctcagacgccgagcgagggatga

SEQ ID NO: 24034 - DNA, 216 bp, Zea mays
  Peptide Sequence Number=SeqID_67409
atgcacactcttggggccagcggagcaggcggcggtccatgctgctgggcgagcggcccgtggcccgtggggacgctggcgaccagttcttcgctggcgcaagctcggctgatgtgcagcagcaagccagcaatccttgttcaggcgcgcgcgcgggagctggcccacggcggcagcggcccactcgagcagcgcgagggcgcgggcctgagatga

SEQ ID NO: 24035 - DNA, 369 bp, Zea mays
  Peptide Sequence Number=SeqID_67410
atggcctttctagaccctcccaagcgcctccagcccgaggtggcactcaacttggtgcgcgacctgctcagatggggtgtgccggcgttcgccggaaagatccatgtcggtgcctctcctcacgacaatctcaccaccggagagtttgtgttcttcgtctccaacctccctggcgggttggcgctgccgatctcgtctttcttcgtgctgctgctggaggagcttggcctccaacctcagcacttcacgccctgcttcatccttcaagcggccatcatcgcctacctccataggatgtccgtgggggcgacgctcctttcagcttcttcctccagcattcggagggaaggatgttcaccagccttgtga

SEQ ID NO: 24036 - DNA, 594 bp, Zea mays
  Peptide Sequence Number=SeqID_67411
atggcccacgtggcgcacctctcgcgcccgcctgcgctcatgccatctctcctcccccctcgctgtcagcctagccccacccgtcagtcgtgcccgccctttccccctcgcgttcgccctctctctggcaagcgggccccgcttgtcagctctctctctcgcccgtcatcggctatcgacacgatcaccgccgcccaccgctccgccacatcccctcaccattactcgcccaccagccgaattggcaccttgcgcctgccccgagccatcccgtcaccaccgtctgcccgagccatcccgtcgccaccactgtgcgccatcatcgtcgccgcggcaagcgtcgccgcttcggccacctctctcacccttccccgagctcaatcgagccagcgcgccgccctcttcctccgctccgcgcaccctttcctttcacctattacacctgtaggcttcgcgggcaacctcaccgccgcgggcccccccaaggacccgggcaccaacgaaaaacctcctcaagctccgggggaaaaacccaccggcaaagcttccagggggcggttcccttctcgggccaaaccccccgtcaccccctaa

SEQ ID NO: 24037 - DNA, 108 bp, Zea mays
  Peptide Sequence Number=SeqID_67412
atggaacgccgaaagaagaggaagagatgcgctgctgctgtcatgtccaagatcaagaaccgcaccgcgcgcccatacagttaccggctagcactatgctttaattaa

SEQ ID NO: 24038 - DNA, 1755 bp, Zea mays
  Peptide Sequence Number=SeqID_67413
atgcaggtggtcgagttggttccttgcgcccgcaacaagtggggcaactggaatgaattttggttttacgttgctgagggtaccgtcgaaggccatgagggactccccgtgttcgagatgtgttctcatttttactcagcgtacccgccctttgaagtggtagaggaggatgtggacgaaggggcccttcggtgcgccgccggcctgagcagtgggcacgatttggttgaagagtttgtcgcgtacggggtatggcccttggcgtatggctgggcgttgggcgaagtgtgccctcgccagatgccttttcacggtggaagggtggtgcgaagtcctgccttcgcactgaatctgcaaaaccgcgacccgaccgcctttgtgcgtgaggcggaggatggggcggtgcggctcgttggacgttacgtgccgaggacagagggccagcgcagctttgatatccgcgggtcgaatgaccgtttgaacagggtttttgaattaaatcaattgccgtatgacggctatcctggtcaagacgacgtggaccgccgtgggaagaagccggtggtggagactggagacgaccctgcgccggcggccgccccatcctctaaaaagagaaaattaggtactgctatgggaggacttggggtttctgatagttttgctagagagttgatgaggacgtgcgcggccccggggggaaggatgtcttcgcccgagctccgggagtcttcggctcggatgctgagggttaccgggggttgctggcctaggaatgttcctatcccctgcgtggctggcgaggacttttttacatctcgcatggttcgtgaatggagagtttttccttacgggcggaatattgctgctgttgtgtcggcagtgatggacaaggaccgccagggagcagcacaaaagcgccaggcagttgtcaggctcgttgaagctaggccgaagaggcagcgagggtctgcgaaggctgcggcccctggcggaggcaagccgccgctggcggcgaagtcgggcgcccctatgtctagcaaagcgccggaggcgacggcaggcgccgggggctcgaaatcgacgaaggcagtgccgccgtccagcagagtgccggaggtcgcgaaggcggcccgagcgctgccgtcggcgggcaagcgtgtcgccgacttcgccaccgatattagtgtggaggactatcttggtggatcggacgaaggccagcttgctatagttgtgcctgccgcggcgacaacgacggctgccgttgcgccgaaggcgaagggcggggctcttagcgccggaggcgaggtggcggccctcgcggctgtcagggatgaggcgggcgctgcgtcccgccggctgaaggaggtggtggagtcgctaagtcaggtggctgacttcgccaaccgcacggcgtcgggggccctcacggcagttgtgtctgtcgaggtcgagagacttcggacacaacatgctgacgccgtccgagagaaatcggccgccgacagcaagtgccgcaagctggcggacaaggtggccgcgctggagggagagaaggctgacctccggcgccaattggcgggggagaggagggagaccaacgaggccctcgccaaggcgcaggcggaggccaatctggcacgggcggagggcaatcttgccagggagcgcgccgagcagctgcaggagcggctcatcgccctgggagagccgcgtggagcgggccgaggccgcgacacgcgcggaggctga

SEQ ID NO: 24039 - DNA, 342 bp, Zea mays
  Peptide Sequence Number=SeqID_67414
atggcgttgatcctcgggcgtatcggcagtatcggcaagctgtactggtttatgccgccaagcgccaacctcgcgctgcgggagctggggatcgtgctgttcctctcggtcgttggttccatgaccgatcctccggcgctggcgtttgctaataatcttcatccaaccagcggtgcggcggcgctctcttacgccactgtctatccgttggtaagtggcactaccgtggcggcggaccaccagcccccacgctaccagcaggtcaatggctttacggatggtcatccgcgataccgcaaactcttccgccagctttttttcaccgggaagaaggctgtttag

SEQ ID NO: 24040 - DNA, 114 bp, Zea mays
  Peptide Sequence Number=SeqID_67415
atgtcgaagcaaagaaattatctaagcatttatttgtatgagtttggtcatggagggataacggaaaagaaatcaactttgggtcatggttcactaaataagaacatggcctag

SEQ ID NO: 24041 - DNA, 1019 bp, Zea mays
  Peptide Sequence Number=SeqID_67416
gctcagacgtcgatggagggggagcagcagcaccctcggcgtcaactccaccttcggcgaagtccgaccgagcctcggacggcaacacggtcggaggatctccgctccaaaggacgacgtcagcaccacgcccggaccatcgccgccagggtctcctccaggaacccggcccgagcagacggctcggccggccgccccgaagcctcagccagctgtcccccgaggacaccagcccggctcatggcctcggcaacccgactccggcgctggtcctgccagtggacggcccggccaggctccgatcaacgaagtcttcttttcgagcgaactctgcctctgtccatgctgacaccactgcctccggctccggctcatcgcagagcaggcgaggggcgagtcctagtgctcgaaatgaggaaaaaacatggctttacgccaaaatacataaatgttcaggccccgacagccacaatgaacagacaccgacactcaaggtgccattacaaatggaactccggttccactcccgcgggtatgaacaacctccgcattggagagcctgcgggacgacgaactccaggcgacccgccaacgacctctgcagtagcagcaatggtcccaggatggacgctgctgccggaaggctctcgttcgcgtccccactcaaggggcacgaactagacattaaagccaaagagccggaggtcagtccgctggtagcgctgacgggcttgtcggcggagaagctttctccagctgccaccacgtcagcaccgacagcggcgtccaccaacaccgcaccaacgagcgccggccgccccaaagcgcaccggcaggtcctcactcctgtcctcgccacgaaagcaaggacagaggacggaatgttgcaccctggctgcgcagcaacagttcgccttccccggcatggctggaggacgcctcatccgcagagctggaggatggtttccacccccagaagctggaagaagaggtggccagccgacccgtgcgggaggtag

SEQ ID NO: 24042 - DNA, 330 bp, Zea mays
  Peptide Sequence Number=SeqID_67417
atgcaggcggcatgcaaccgcaccaagggggcgcagcctttcgacttcgacgcgtccagcatggaggcccaggcccacacgtcatgtaaccggcgcgccggttgctacgtggcaggcggcacctttggcaggcaaagcaggcgacgcttcacctccgccatgatgaccgcgtcaaaaaagggactgggaaaggggatactccgaaagggatccttctccatgaaggaagcgggccccaagccccccctactgatcagaggttcgaaggctggcccctcggaagggttcaacggccgcctcaggccactcgggctccgcgcccactactga

SEQ ID NO: 24043 - DNA, 289 bp, Zea mays
  Peptide Sequence Number=SeqID_67418
accccgtttcgcaagacgcttggagcagactacgtcacatgctaactcgcagcggaagaagaaggccaccgcggcggcggccgccgcctcctccaagcgggagagggagagggagcgggagcggaacaaggaggcgaacgaggtcaccgtggagctccgcacagtggggttcggcaaggaggtggtgctgaagcagcggcggcggatgcgtcggaggcgccgcctgggcgaggaggagcgcgcggccatcctgctcatggcgctctcctccggcgtcgtgtacgcctga

SEQ ID NO: 24044 - DNA, 630 bp, Zea mays
  Peptide Sequence Number=SeqID_67419
atggtgagagaacgaagaacacaaacaaacacagtgagcaagaacacaagagacacaagatttatcccgaggttcggtcacaccaccaaggtgccctacttcctcgttgaggcgcccacaaagagccgggtctctttcaaccctaatcctccctttgccgaccacaaaggccaagcccacacaataatctttgctcaaacgagcggatttctctccaaagatttgaaatgtgagaggaaagaggtgtgtgagagagagtgggaggtgtttctcaggttaggaatgaagttttctgtgtgctctaccgtggggaaaagtgtgggaggtgtatataaaggtgccccaaaagctggtggccgttggggaaatctgactgaaattcggttgaaccggttccaaaaccggttgaaccggattccaccagtcggttttcggttcactggcggactcagtcagagactgaaccagactcaaattcggttgaaccggtttcaaattcggttcaaccggtttcaaattcggttgaaccggttttccaaaaaactgcacatgactttttctgacaggactgactggcatactggcagtgacagaggggaacagtgtagaaaccggttgaaccggttttag

SEQ ID NO: 24045 - DNA, 306 bp, Zea mays
  Peptide Sequence Number=SeqID_67420
gctccgatggtgccgtgccagatctcgttggtcaatcccagccccgacacgccgcatgtgcctcctcccgcgtcggtggtggccgccgtggagaaggacatgatggatgaggacgtgttcctggatgaatccatcctggaggaggacgaggcagcgctgctgatgctccagtgcgacgaggccctcgcgtcccaccttgcgcggtggaagccaaccactatacccaccaatctcgcgcgccagatgttcctgcgctgtcggtacgacccaatttcccttctctcccagcactgtagacaagagtag

SEQ ID NO: 24046 - DNA, 597 bp, Zea mays
  Peptide Sequence Number=SeqID_67421
atggggaagcctgtcccatcgctcctcatgctcctcctctgtcgagtgacagcacttgtacccaccataaccggaatgggagaccacgtctcaggtcgtgtgaggggcaaagtctgcgggcaggttcactcagaggacagcaccgcctgcgccgctccgactgctgtgccactcgacagagtgaggctgacagcagccaagtccggcctcgggcgccataggaaactccgcctcgcccgaccccagggctcggactcggcctcggccccggaagacgacgaactccgcctcgcccgaccccagggctcggactcggcctcggccctggaagacgacgaactccgcctcgcccgaccccagggctcggactcggcctcggccccggaagacgacgaactccgcctcgcccgaccccagggctcggactcagccctggcctcagccgacggtctccgcctcgcccgacccaagggctcagactcgacctcgacctcggaagacagactcgacctcgaccttggaggagcctccgcctcgccctacccagggctcggaccgaccacgacacaggaggggccatcattaccctacccctag

SEQ ID NO: 24047 - DNA, 1212 bp, Zea mays
  Peptide Sequence Number=SeqID_67422
atgggcagttgcgcgcaccgcgcgcggcggtttggcttcttctgccctgcgccagcttgcatgacacccatcgttcggcttcaaggattttcatcagccagcccggccgcgtcccctcgccggtggtcacccaagacggtgaccaccagctcctgggtggggagaagcaagccgggctgcggcctctgcccctccctcagcttcaaggatgttcatcatcagtgctggggaggggagtgcgccgagttggggtcggtctccgcgcgggcagcggctcgctccttccctcagcgatcggggcgaagggtgttcgccgttcgtggcgctggcagctaccgcgcgtccggctctccggtccgagtggcttcggcgctgcttccggtgccaccttccgccgcggcagccggaagaggtttctccgccgacgagatagtcggtgctgcccgcggactgacctccaactctacggccttctgctcgtcctcgcccctcgggtggggacgtgggcgagggccttatggcagcagcatccaccctgaggtcatcgctgctgttgtttggccgcttggagcagaagtcgttgtcgctgctgctggagcgggcggctgcgagccatctgtcggccttctgttgctccgcaggccctccaatcgtggggggttgttcgtacctgcgcagccgctcttccatgagtcgaagccggaggcagcggtgttagcatggacagaggcagagttggctcgaaaagaagacttcgtcggccggagcctggccgggtcgtccactggcgggatcgacgccggaatcgagttgccaaggctacgagccgggccggtgtcctcaggggacagctggctgaggcttcggggcagtcggccgagccgtctgctcgggccggattcctggagaagaccatggcggcgatggcccgggcgcggtgccgacgtcgtccttcgtactggagatcctccgaccgcgttgccgtccgaggctcggtcggacttcgccgaaggtgtagttgacgccgagggtgctgctgctccccctccatcaagatccgagcctgcaggatcggtttatcttgtaaaggtgatgagtgagaaggtgatgagtgaggtatccgtatcccggaggcgtaggagtccctcggctcggtcagccttggctgcttacgtgtactccgttgttttcgggatcccactttcgaagtag

SEQ ID NO: 24048 - DNA, 81 bp, Zea mays
  Peptide Sequence Number=SeqID_67423
atgcccaaattaggagccaccgccctcgggccctataaattaagtgtgccatcagctctgctagacttaggaaattcatag

SEQ ID NO: 24049 - DNA, 174 bp, Zea mays
  Peptide Sequence Number=SeqID_67424
atggagagtcatgatctccgggcagaatgggaatcacggcttgtgggtggctatgagatcgatggttttggttatgactatggtgctggttgtcagcattgcaaccactgctcaggcgaagatgaagctgtggaaggagacttccaggagttccaagactatgacgagttctag

SEQ ID NO: 24050 - DNA, 528 bp, Zea mays
  Peptide Sequence Number=SeqID_67425
atgcaagatgtcgcacggcgtgcgctttcgcactactgctcagtgctcggtggggtagctgacggtctcaacttgaagtattacccccgccgtccatctggcagcacaggaggcgtgattgtctcacctgttggtgaggacaatcctacgttgagcagcatagtcaacctagccgccatgctaaacacagagctggaccatgcattagacgagctgagtagggctcgtgctaagatcgcccagctacatgctgagcgcgcggagcgtcgtcacctggatgatggttcccccgctcccgtcgggactcagcacacatgtcagaaaacaggcgcagaggaggaaaggcgtgctcagcaggagcaggcagctcagcaggatgaggtaccccagcaacagcaactaccgcccccgcccccgatgtccatcaagcagatgttcctaatgcagactcaggtagttcaagccatcggtcagactttggccgccattcagcagcagcagcaacaacagccaccacctcagccttag

SEQ ID NO: 24051 - DNA, 126 bp, Zea mays
  Peptide Sequence Number=SeqID_67426
atggtggtcgccagtgacggatggtggcacggacggttcggctatacgggagcggccgagaagaaggggcacaacgcgactcgaacgagcgcggacggtgagcccatcaagaacaaatggtgctaa

SEQ ID NO: 24052 - DNA, 678 bp, Zea mays
  Peptide Sequence Number=SeqID_67427
atgacaaccgtccccatcgattccccgttcgcgtccaggcctcaccgccttggcatacaatgctccactgaccccggctgccgccgtgcagtgaccgcacttgtacccaccgtagctagcatgggagaccctgtctcaggtcgcatgagggataaagtccgcgcccggcttcactcagtagccgcggcgaagaaaagggcggaggggcttaccggcgacgagactgttccggtgaagtggtcgaggatgaagggaggtcgcggggatcacaacggtcagggaggtccacgggatgccagagaagatatgagcaaaaggaatcgggcggagactcactggatggcttggtccacgcgcggcggcggaagaccgaagtccggtgaggtcgatctcgggcctccggtgaagtccggttgggtccgagggcttggcaagcttcacgggctactggcggagctagccgaagcactggctgggcttgagggtggctggagtgggctggccacggcggccgaagctctggcagcaatggcgggcggaattaagctcgccggagctaaggaaaggtggctggccggtgagggtgagtgcggggcgaagagagagatatggagccaggaaatctggtttgtctccctgcccaaacccgaggcaaatcccaggttttgtcgtgtctag

SEQ ID NO: 24053 - DNA, 186 bp, Zea mays
  Peptide Sequence Number=SeqID_67428
atgacctcagggcagatgctgctgcgacaaggccctcgcccacgtccccactcgaggggcgaggacaagctatcaaagccaaagagctggagggtcctccgcctacgacacgggggctgggtcccacacgtcatgcaagctggcccggaacagaagaagccaaaccgccgcgcgcggagcgtgtaa

SEQ ID NO: 24054 - DNA, 1101 bp, Zea mays
  Peptide Sequence Number=SeqID_67429
atggtgaccaccagttcgatggtggggagaagcaagccgggctacggcctctgccccgccctctgcttcaaggatcttcatcatccttgcggcctagcggagggggcagacttcgacaacgcggggccggcaggccgcaagcgtcgtcggtgcccgcccatccgggaggacttgagtggggatctgccggtgcactttggggcggccggcgctcgctggtgcggtgctggtgggcaggtggctgccgtcgtcggtgctgaggtggtggcagccggagaaggtttctctgccgacgagaccgtcggcgccacccgcggactgacctccagctctttggctttgatagcttgtcctcgcccctcgagtggggacgtgggcgagggccttgtcgcagcagcatctgccctgaggccctccgatgtggagaaccctcggctgctctacgatgagccggagccagaggcagcggtgtcagcatggacagaggcggagtcggctcgagaagaagcttcgttggcccgggagcatgtggcctccctggccgaggaggtgcagcagcggcggctggagcttggccaggacccttgcggagaccttggctatgatggcccgagcttggtgctggcgtcctccttcgaggtggagatccttccgctcgcgtcgccgtccgaggccgggccagattccgccgaaggtggagacgacgccgagggtgctactgctccctctattgatgacttgttcgtcggtagcagaatcgtttatccgagtgagagttacttttcacggaaggtgatgagtgaggagtccctcggctcggtcggccttgctgcttacgtgtactccgtcgttttcaggatcccgctatcgaagcagtcgaaaagcgcgaaagatgttctggcagaaagactttttctgaggaaaattctgacgcagagggggttccccccttctagcccccgagggagggtcgggcttcgccgaggcaaggctgacccttccttgacgccgaagcaccaagtctcccacttggaggtctcggggccgaacccctcgggcgtggtagcgtcgcagagactattgatatcgcgccgagtgtag

SEQ ID NO: 24055 - DNA, 936 bp, Zea mays
  Peptide Sequence Number=SeqID_67430
atgttgcacaagaattcttcttcctgctctggtcaaaaggttaaatggttgaacaagcatctgagcaaactttggccttttgttgtagaattccatcaggcagtgtcagctgtttgcatatccatttttgttaagacatgcctagctgctgcaacagtagtggttaaggaatccgttgaaccactgctagatgattaccggcctccaggaataaaatctttgaagttcagcaaattttctcttggaaatgtgtcaccaaagatagaaggtattcgtattcaaaatcttcaaccaggtcaaatcatcatggatatagatttccgttggggtggtaatccaagcataatcctagctgttgatgctgtagttgcatcactgccaattcagccagagccaaaaattcagtacaccctgaaggccattggaggaagcctaactgcagttcctggactttctgacatgattgatgacactgtcgattcaattgtttctgatatgctcttgtggccacacaggcatgttgttaaacttggtgtcaatgttgatacgagtgacttggagcttaaacctcagggaagactttctgttactgtggtaaaagcaacttctttgagaaataaggagatgatcggtaaatcagacccttatgtgaaactgtatgtgcggccaatgtttaaggtcaaaacaaaagtcatagatgatgacctgaatccggaatggaatgaaacatttgacttgattgtcgaagacaaagaaacccaatctgttatttttgaggataaccattgctcggaagatagccgtgcaaagttggtttggagggagactacattattgggggacatgggattagttcttcatcgccttcttccttggcacattacctccctttatatagagaggattcctgattattacctaaggaaggctcaataa

SEQ ID NO: 24056 - DNA, 1772 bp, Zea mays
  Peptide Sequence Number=SeqID_67431
atggccgaaaggtaccaacttccacgaagttgcgttcctcccaacgacaaggcggaaagaactgcgagtgtccccccatccgggggctcggaaggtggaaagacgcgatgcataaaggggaccgtgaagacatggttgcctttcaagggggtcaccctccttttaaaggcaactctccccacttgcgtcctcagccatcgcgggctaagtcttctccaacacgctccaaggtcctccccttacgacacgggggctgggccccacgcgtcatgcaagctggccagggacagaagaagccaaaccgccacgcgcgcggtacgcgcaactgcccagcagttacgagcaatcctccactttcgccgagaccagcgggtgaaagggcagaccaccatgcaggcggcatgcaaccgcaccaaaggggcgcaccctttcgacttcgacgcgtccagcatggaggcccaggcccacacgtcatataaccggcgcgccggttgctacgtgcaagaaactgcaccgccactcgcaccactaccgtgcctccttgactgcggaaccagtaccgcgactcgaggcaaccctgcgaatgacccaacagtgccaaccaggcacatcagtcacgggtcagtcagccgcgggagaaggcgcgacggtcgatacggccagaagtgggccgacagtaatggcggtggcaggcaagcggaagcagcggtcaagtcatcagccaagctcacggaccgggaaaggggatacgccgaaagggatccttctccgcaaaggaaacgggccccgagccccctactgatcagaggttcgaaggctggcccctcggaggggttcaacagccgtctcagagcgcttgggctccacgcccactactggctggccctcgaagggttcacagccgcctcagacgcagagcaagagatgaccctggggctcggactcgggctcggccccggaagacgacgaactccgcctcgcccgaccctagggctcggactcgggctcggcccaggaagacgacgaactccgcctcgcccgaccccagggctcggactcgggctcggccccggaagacgacgaactccgcctcgcccgatccagggctcggactcggactcagccccggaagacgacgaactccgcctcgcccgaccccagggctcggacacgggctcggccccggaagacgacgaactccgtctcgcccgaccccagggctcggactcagccctggcctcagccgacggtctccgcctcgcccgacccaggggctcggactcgacctcggcctcggaagacagactcgacctcaacctcggaggagcctccgcctcgcccaacccagggctcggaccgaccacaacacaggaggcgccatcattaccctaccccaagctaactcaggctaaggggaacaagatcggcgtcccatctggctcgccctgcgtccctctgacggccacgacaccacacgaacagggtgccaaaacctctccagctgccacgacggcatggaccccctggggtcgaaacgccgacaatattgaagggaagaatggcaagaacctcaacaatgtagtagctgcttgcaagagatacaacctctatgatcatgggttttcactatggctagaacatagagatgactgtcggcactacatgctagactttgccacgtttgctcgggtgttgggcttcgattctgtggatcgaggttttggggagattcatgatgagaggaatatgatagagcgggagatctctttcat

SEQ ID NO: 24057 - DNA, 1035 bp, Zea mays
  Peptide Sequence Number=SeqID_67432
atgcaggaggcatgcaaccgcaccacggttgtgtaccctttcggcttcatcgcatccggcatggaggcccaggcccacacgtcatggaccgggaaaggggatatttcgaaaaggatccttctcagcgaaggaaacgggccccgagccctcctactgatcaggggttcgaaggctggcccctcggaagggctggccctcggaagggttcgacagccgccccagagcactcgggctccatgcccattactgaccaggggttcgaaggctggcccctcggaagggttcgacagccgccccagagcacgcagagtgagggatgaccctgggtgcgtctgttacatggccgaggctcgggctacgctcccgagttcaggtcaaggcctcgtctaccaagggacacaatctcgcctcgcccgagccccacctcgggcgggaacagttgtcccggatgaattcacgcttcgcccgagggcctcctcaggcagtgggcacgccttcggctcgctcgaagcccagctcggtcggcaaggtcgaagtgaccgcagtcacttcgccccttcactgaccgatctgacaggaaaacagcgccgctcgccctgctccgactgctgtgccaaccacctgggtaaggctgacaacagtcgagttcagcctcgggcgcaacaggaagctctgcctcgcccgaccttaggcctcggcctcgggaggaggtctccgcctcgcccgaccccaggacacggccccggcctcggcctcgagaggaatcgcgtcctcgcccgaccctggcctcggcctcaggagaagtctctgcctcgcttgaccttgggctcggaccgaccgcgccacaagggatacatcattaccctacccctagctagctcaggctacgagggaacaagaccggcgtcccatctggctcaccccgggctcaggcacttctccgacgaccacgttatcgcgtacacagggctcaagcacttctccgacagccacgttggcatgtacacagggctcaggcacttctctgccagacac

SEQ ID NO: 24058 - DNA, 1200 bp, Zea mays
  Peptide Sequence Number=SeqID_67433
atgaaaacgacgagagggaccttgagcggcaaggccgaccgagccgagggactcctacgcctccgggatacggatacctcactcatcaccttccgcgaaaaacatcgacagagggagcagcagcaccctcggcgtcgtttccacccccagcggattctggcccggcctcagacggtgacacgggcggaaagatctccacctcgaaggaggacgccaacaccgcgcttgggccctcacgtccaggctctccgcaagggccccggcccgagcggacgcctcggctggccgctccatagcctcagccagctgtcccccgaggacctcgacccggctcacgacctcagcagcgtgactccgggaatggtcccgctcgcggatgacctggacaagctccagccgccgctgctgcatctcggcctgggaagccacctgctcctaggccgacgaagcctctattcgagccgacaccgcctccgtccacgccgacaccgctgcctccggcttcagctcatcgcagagcggccgaagcacgacaacgacctccgtctcgggcggctagacagctgcagcgatggcctcagggcaagcgctgctgcgggaaggccctcgcccacaagggacgtggaccagctattaaagccaaagagccggaggtccggagcgcaggtggcgctgacggtttcgtcggcggaggcagtcgcttgtgcaaaggggaagcctcacctatggcgaccaccacctcagcatcgacgacagcggccacttaaccaccaacactgcaccggcgtacgacggccgtcccaaagcacaccggcaagtcctcactcctgtcctcactcccgtcctcactcccgtcctcaccgcagaacgagaacgggtccgtcccagaacacgaacgccgccctcacggcgtacgacatgttgtgcgaccccccggtacagccggcggcgcagggaggacctggacgttgctggcccgtgtgcggcgcgaccgacacccgtgcggcagatgagcagccacgctccgccccagcggtaggaggtggcactggaagcagcgccagagccgctcaggccagggagccagacacgcggcaggtgccagcgccacggatggcgaatgcccttcttgaaagggaaatgtgcccttgggccatttctaagtattttggtgatttagtgtccaacacaagtgcctaa

SEQ ID NO: 24059 - DNA, 1089 bp, Zea mays
  Peptide Sequence Number=SeqID_67434
atggcctaccaactcagcctgccagaaagcctgtcagtggtgcatgatgttttccaccgggctcgctttgtcaacaccgtcgccctcagccttgcgcgcgccctctccctctgcctcttgggccccgcttgtcggcaccttccctcgcgtgtccacgcgcccgctagcgactccgcacgctcactcccgaaaccgtctccccgcctcgcacgcacgttgaggcgcccgaacccacgtcacagccccgcgcgaaaccgccgccccgacccctttgaagtctatgcgcatgtccattccctcctcgcttcacaaccctcatcccagccgcacccgcccgagcttgtcggagcccccaccaccaagccgcttgcgccccggattccccacggcgaggttgctccgccgtccctgaccatggtctgccaccaccgctcagagttctgccccgaccgagcctcactcaaggggcggatctacgaccggggctgtctgggctgcagccccgatcgcggccacatttttcttaccctaaaccagccgccgccgcccgccaaccgtggaggagccacccaggcacccaccgcctacggcccgccgccgcagcatgtagcgctgctagcctggaggccggagccagaccgccggacggtcgaagccctagagccagcccgccgccacagcacacagcgctgctcgcctggaggccagagccagaccgccgaaccgccggagcctcggagaaccgccgccgcaacacgcaacgctgctcgcttggaggccggagccagaccgccggacagccggagcccggaggcccagagcactgctgcaacaatggctaaactaccaaacatcatcattatacttcatctccattgtgagctgaaggaccttcagaaagagaaggcccccaacaccggccatggcacctacgccatgcacgtgcgggaggtagatggtgaccctgagatccagggcgcactgtcagcctcccaacgtcgccccccataccccctccttgggtcactgataggcggaccccgcctgtccacgcggccttgcgcctcacagcaaccacatgtgtcctag

SEQ ID NO: 24060 - DNA, 1197 bp, Zea mays
  Peptide Sequence Number=SeqID_67435
atggcacgttctccctcgctcctctgcgtacacacagaaacctctcctccctcccctctcgcagctagcgtgccggcctgccgactccagaggaagccgagagggccaatgaggcaaggcatgagctccccttccgccgccgcggcgctcgtgctcctcctggccctgctcgccggaggccagtgccgagaggcccagctcgacgccgcggacgccggcaccggcacggagaactacaccgccagcgacgccgccgtgtactggggcccctggcagagggcccgggccacctggtacggccagcccaacggcgccggccccgacgacaacgcccccaggccgctcctcggagcacagcacaggccgctcatatgtggggccctcttgcatattcggtgcaggaaggacccgtcctgctccgggcggacggagacggtgatcatcaccgacatgaactactacccggtgtccaagtaccacttcgacctcagcggcactgcgttcggcaggctggccaagcccggcctcaacgacaagctccgccactccggcatcatcgacatcgagttcaccagggtgccgtgcgagttcccgggcctgaagatcgggttccacgtggaggagtactcgaaccccgtctacttcgcggtgctggtggagtacgaggacggcgacggcgacgtggtgcaggtggacctgatggagtccaagacggcgcgcggcccgccgacggggcggtggacgccgatgcgcgagtcctggggctccgtctggcgcatggacaccaaccaccgcatgcagccgcccttctccatccgcatccgcaacgagtccggcaagacgctcgtcgccaacaacgtcatcccggccaactggcgccccaacaccttctaccgctccttcgtccaccttgctgtgctgaagccaaacgcaagtaatgtgctgaagccaaacgcaagcattgagaaagcgccaaatcgccgtacggccacagtcaagcagaagggaacagagtcaacagacgaagaggaagagaggccggagcccgtaggcgacctcatttatctgtcccgccgcctcccgcgttgctgcgtgccggcccgagttattgctgggcgtgtgatccttgatccagatctccagcaattgttaagcaatgtttatggcactgcacaaggccggatggtctgcccttag

SEQ ID NO: 24061 - DNA, 684 bp, Zea mays
  Peptide Sequence Number=SeqID_67436
atgcagacgtatagtgagcgtacgacatgggggaggatacattccaatacggcggcaacacagctacggttcacgcgtcgagcgactctccgcttggtagtcactcccgacgagcaattcacgccgcccaaaggactgtcgggcaccaatccctccttccgcctggacccacgcacttggcggaaggtcaccgagcacccaaggccccaccccgaggtcgtattccgggcgtcgcaacgggagaccccacggcagcacccgctttctgtccctctcttctcgatttctctttctgttgtttcaaccagagggttgaaggactgtcgagacataagtaataacgtgccagaggcccgagttcccatctcccctaagataatatcggaacggcctcgtaggagccccgtcggagatagcgtgaccgtcggaactttcttcgtttactgtagtgtacttctgcttgcttcccaacttgtacgctacgcatcgtcgatagactccacaaggatggcgaaaataacagcgccggccgtcatctccttcaaatatgtgctcaaacacttggctaaggggcttggagttgcacttcgatctattgaggcaccgcaagaggaagaatcaaatgagcaacttcaggacgcagaagatgggccacaaggctttgatatcaaatgtcgttcatga

SEQ ID NO: 24062 - DNA, 426 bp, Zea mays
  Peptide Sequence Number=SeqID_67437
atggctcttatgctacaacattctggtgtctcgattcccccggttcagtctgcatcacctcctccgcttcaggctcctgttgtgccagcgattcagtcaggaccccctcttccttctgttggtccttcttcctctccgctccgactggtcaccctggctttcacgtcaccggttcttagctctgtctgccctcagccgccagtgccaccagcttctgctgtcaccactactgctgtggcagtgtctatgaccacttcagttccgacagcttctgcagcgcgacctcagttcgagtcagtaccagctccagcttctacagcagatcctggatccgagagtgactctaacccccagccgacgttcgctctgctgcctcgaccgcgaccggatgcgcccccgccgcctcctcccgtttcagatgtgtag

SEQ ID NO: 24063 - DNA, 921 bp, Zea mays
  Peptide Sequence Number=SeqID_67438
atgagactgaggtgcgacctctggctggagatcccaggttgtttgaccttcagcgtgctacagcggcacggggaccctgctgcagttgacctcttcagcaccaggattcaggaatccttcttcagggcacagatgtctgcacatattgctctgcgagtgcatcggcttttggaccttccagcttttctgctagccgtcggtgctgactctgaggtgcacctctcatatatgcctggccttctgactcttttgactaccagcggcagcttatgctacggcacctctgaccctcctcgtcgccctcacggcggtgtggctccgggtacagctcacgtcgcggctctgttccgaccgcccttctcagatgggtcgcgacgctcaccggcagatttcactacagcagcaaagttcctatttcagcttatgagacggacacttctatcgcggatgggatacagagaggctaccacacatgtgcagctctggctccttggtgccctggtctctcactctgagtttgacgttgtgaatttccttatttgtgagatcgaggacaccgttttggatggcatgcgtgctcgtcgacagttgccatatgctcactacctgtgtcacatttttgcgcagctgattcggcctccacagttccagggcacacttgaggcctcacgcctcgtctttgggtcctaccgtccagtgcttgaggatcctgtgccagcttctgctccagtttttgacactcaggccgaggatgctgctcttcatcagttcgaagctcaggatgcagcagttgatgatgatgattttgggattccacctccgcctccgcctcctatgcctccacgctcacatgatcatgaggctgggagttctagtgctacccctgcgcccctccggctattgaccctgctcttgctttga

SEQ ID NO: 24064 - DNA, 213 bp, Zea mays
  Peptide Sequence Number=SeqID_67439
atgccgcgcacgaagaatgtgtcggcgctagggggaggcgatgatggggatcctcgtcgccccttcaggcaggtcaagggcaagaccgtgtacttggagcagcaggaaggtcgcaagaagcggcgtatggacagagcagcccgagcagcggcagcagcagtagcagctgttggggaccttcggcgtccgaaggtcctcaaaaacaggatttaa

SEQ ID NO: 24065 - DNA, 315 bp, Zea mays
  Peptide Sequence Number=SeqID_67440
atggctacctggaaagctcacacgagaggtgaaaatccaggcaggacaggagacggcacacgggcaggcaaggtcactaaaatgacagaagagggtttcggtgaaaagactatgtggggtgggaaaaccctcccgaaggagctagtaacctgcaaggatactcaagaagcacatagggacacttcctaccagaaggattcacaggaattcacaagaattggaaaatggcacttaaggggaggaagagtgttcactgcccagagaaatggagagagagagagggaagacagaggagggaggtgctcaccagagtag

SEQ ID NO: 24066 - DNA, 786 bp, Zea mays
  Peptide Sequence Number=SeqID_67441
atgtactatactaagtgcatggttcactcttgtaggttgggtatttttgattctacgattgattccagagagctaagacgctgtggacgacagtccacatcgtcgtcttcacagtcgtcccgttcacgatcatccgcccacgacatggagatggcagtgttgcgtcaacaggcagagtaccatcaatcagtcttgagggaacaattggagtaccagaggcaacaatctgagtaccagaggcaacaagccgagtaccagaagaagagggacgagtattatgcaaacctccaggcccaaaatcaagctcttctctcgcaactagcccaacaagcgggcgtcccgatgccgacatatgggatgccgcctccggagtttgcactgccaatgccaatgttggcgcctccaccaccgcctccgcctccgtcacaattccctatgatttttctgcaaattctgaaaaacgttatgtccgacggctttcgtgtaaaccgtcggacatatgctattggcaaggcgctggaaactgcaagcatgggagaacgtgatgctgcctcctttttcttcatgcgtcgtggtcgtggctcactcgtccaccgccaaacggaggcaactagcacgaagcagcacccggaaaacgtgcagcaaaagccgagtttgaccccagaacatgcatgcgccagtcacattgttgtggacaatgtggagcccatagatgtacagaaagcacgaaatatgaaaagtccgatcggaagcacgtttttttggtctggtacgagcctgatctga

SEQ ID NO: 24067 - DNA, 936 bp, Zea mays
  Peptide Sequence Number=SeqID_67442
atggccgccacctcctcctcctcctcctccacggtagttgcacttgcggcgcttctcttcttgctccttgtaacgtgtggctcgtgcgcgagaccggcgagctttaacgcctccgactttaccgccgaccccaactgggaggctgcccgggccacctggtacggtgcgcccaccggcgccggccctgatgacgacggtggtgcctgtggattcaagaacgtgaacctgccgccgttctcggcgatgacatcgtgcggcaacgagcccctcttcaaggacggcaagggctgcggctcctgctaccagatacgatgccaaaaccacccagcctgctccggcaatccggagacggtgatcatcaccgacatgaactactaccccgtggccaagtaccacttcgacctcagcggcacggcgttcggcgccatggccaagcccggccgcaccgacgagctccgccacgccggcatcatcgacatccagttcaagagggtgccctgcaactaccccgggcagaaggtgacgttccacatcgaggaggggtccaacccggtgtacctggcggtgctcgtcgagttcgaggacggcgacggcgacgtggtgcaggtggacctcatggaggccaactccgggtcgtggacgccgatgcgcgagtcgtgggggtccatctggcggctggactccggccaccgcctcgccgcgcccttctccctgcgcatcaccaacgagtccggcaagacgctggtggccaaccagcatgggactgatgagcactgtgcgaggtgcctcagtcgattattactggtagatggtggtggcgtgcgcgcggccttcacggcggagttggagactgggaacgaaatggaggaaggccaagttaatttgcagatgctttcccgcccattgtccatgcatgtaatgtaccagggcgattga

SEQ ID NO: 24068 - DNA, 924 bp, Zea mays
  Peptide Sequence Number=SeqID_67443
atggaaattcttagcatacacaatgatgagctatctactaagctagaaaactttggtagaaccccagtagcatctttagttaaaattcctaaaattattaaaaaagatgcttctacttcttgctttgatttaattgatgattctaacacctgcaaccaagttcttgttgagaatattattgtagaaacatgttcggatgaggttgcaaaggaaaatgaacaattaaggcaagaagtggctcgccttggcaaggctttgtatgacaagaaaggcaaagccaaacaaatccgacctccacaggataacaccactgcgggagtgaacaagcctatggagggagaaactgtgatttgtaggctatgccacatggaaggccataagtctttccaatgcaaggcgatgatcggggataaacaaaggcaaaagctcaagcaaaagccatcaagcaaaatctccaacacctacatcaaaaaggtggacaaaaagactgccacaccatgtttaatcaagaagaaaaagaatggaaaggtgatagcaatcaaggctaacaagcaagccaaaggaaagggggctaaacgcatctgggtgccaaaggagattatttcaaccatgaaaagcaccaagaaggtttggatcccgaaagggaattcacagaatgcaagaattacttggactagggaattgaggaaagcaacacctcaaaagaagacattaagaagatacaagaaaagtccaagaaatggaggcgtgctgccctcgaactgtccgtgcgtggagcaccgaactgtccggtgcccacacgccggaatgtccggtgcaccagggaacagcagcccaacggctacttccaggtggcacccggagagaagaccaccggactgtccggtgtggaaagcctacggcgccaacggtcacctgctctga

SEQ ID NO: 24069 - DNA, 753 bp, Zea mays
  Peptide Sequence Number=SeqID_67444
atggtcgccttccaagggggtcaccctccttttaaaggcgactctccctacttgcgtccccagccgtcgcgggctgagtcttctccaacacgctccaaggtcctcccctgcggcgcgggggctgggtcccacacgtcatgcaagccggctcagaacagaagaagccaaaccgccgtgcgcggtgcgtacaaccgcccagcggttacaagcgactctccacttttgcccagaccagcgggcgaaaggggcgggcagccatgcaggcggcatgcaaccgcgccaagtgggcgcacttctccgactcctaacacgcccagcatggaggcccaggcccacgcgtcatgcaaccggcgcgccgaatgcttcgtgcatgcaactgcaccgccacttgcgccactaccgcgcctcctcgactgcggaaccaataccgcgactcgaggcgacccagcagcgccagcctgggatcgggaaagggggatacccctggtaaggatccttccccgtgaaggaaccaggctccgagcctccctactgatcagaggttcgaaggctggcccctcggaggggttcaacagccgcctcagatcgcgtgggctccacacccactactggtcagaggttcgaaggtcggcccctcggaagggttcaacggccgcctcaggctactcgggctccgcgcccactactgatcaggggttcgaaggctggaccccgaagggttcacagccgcctcagacacagagcgagggatga

SEQ ID NO: 24070 - DNA, 450 bp, Zea mays
  Peptide Sequence Number=SeqID_67445
atgggcaaaaacaacaaacgcaagcgcgagccgactcctccatcagaggactttggcgactcggaatactcagaggaggagttctcctctgagtccgagggatctccggctcctgtctctcccccagcgtcgtccgatgactcggacgactctcaggtgattgccgcggaggtctggacttacatccgggccgtcgagcgctccgggctcgagggctcggatgagtcggagtactcctcggacgaggaggactcggacgacggcggcgaggacgaggacgacgacggcgacgacgacgacgatggcgacggtgacagcggcggcggcggcaggggcagcaacagcggcagcggcggcggcaacggcggcagtaggagcggcaacggcggcagcagcaggggcagcggcggcggcggcagcagcaagggcagcaacaaggccagtggctaa

SEQ ID NO: 24071 - DNA, 429 bp, Zea mays
  Peptide Sequence Number=SeqID_67446
atggcgcctcctgttgacgtggcttgtctgcgccctaggttgggcaatgtggaagctcctccgaagccgaggtcgagtctgtcttccgtggccgaggtcgagtccgagcccctggttcgggcgaggtggagaccgtcggctgagaccagggcggagtccgagccctggggtcgggcgaagcggagttcgtcgtcttctggggctgagcccgagtccgagccctggagcggacccgagtccgagccctgggtcgggcagagcggagttcgccgtctttcggggcttagcccgagtccgagccctaggtcgggcgaagcggagcttcctatgctttatgctgatgggggttaccagctgagaattaggagccttgagggtacccctaattatggtccccgacaacgtgcgagtgaataccagtcagcatga

SEQ ID NO: 24072 - DNA, 426 bp, Zea mays
  Peptide Sequence Number=SeqID_67447
atgaggaacaagctcaagatgatgaggatgaaaatcaagaagatgagccacctcaagaggagggcaatgatcaagggggatatgaagttaatgaagacaaggaagatgatcaagaaattcagggtcaaagaccgccacacccaagagtccaccaagcaattcaacgagatcaccccgtcaactccatccttggtgacattcataaggggggtagaggacacactaagagatccggattgggtgctggcaatgcaagaggagttcaacaacttcacaaggaatgaggtcatggaattaccactagacgcgcagggcagcggaagacgtctcgatgtagacgaacgcgtcgagcaatgtcgtgtagttgccggtgtccttcacgtccttgtgtggttcgtcctagtgctccagatgcagcacctctga

SEQ ID NO: 24073 - DNA, 429 bp, Zea mays
  Peptide Sequence Number=SeqID_67448
atgggcaaaaacaacaaacgcaagcgcgagccgactcctccgtcagaggactttggcgactcagaatactcagaggaggagttctcctctgagtccaagggatctccggctcccgtctctcccccagcgtcgtccgatgactcggacgactctcaggggattgccgtggaggtctggacttacatccgggccgtcgagcgctccgggctcgagggctcggatgagtcggagtactcctcggacgaggaggactcggacgacgacggcgacgacgacgacgatggcgacggtgacagcggcggcggcggcaggggcagcaacagcggcagcggcggcggcaacggcggcagcaggagcggcaacggcggcagcagcaggggcagcggcggcggcggcagcagcaagggcagcaacaaggccagtggctaa

SEQ ID NO: 24074 - DNA, 174 bp, Zea mays
  Peptide Sequence Number=SeqID_67449
atggacggccctacggcgaagccaactactcctctggttcctctaattaatcagctaagggcgtccctttccaccctcatggttgcactgttatcccgggttgtcactccccaaacaggtccttacggagagtttaagaagcataagctaaccatgataaacccaaaaaggtaa

SEQ ID NO: 24075 - DNA, 834 bp, Zea mays
  Peptide Sequence Number=SeqID_67450
atgcccctccagctactgctcgatgctgccctctcgatcccggagtctatcgctgccccctggtttcagccctcaaaccccagcgtcgatctccctgtcttgctgccggttgtgatcataaatataatagttatagaggactttctaagatttctagaaagtcctagtttactatttttggatgcctatttttatcagtacaaagacgatatcaagtatgaagaggacttcttcgtgaattcacgcggaagcaagctcttcacttgtaggtggacaccgaggaaatcggagtgcaaagctttgatctttatctgccacggtagcgacatctccttacactcacttcctcccttggctatggtttgtttgagaactaacgagccgatctttcttccgtggctcaattttgctaggatacagagccgagtgcagcatatccatgggagtgatgaactcatggcatcgattgcatactcacaaacttccataaaaaatacagacacgaccactcgattagtacaccatggatacgttgttcacggaatcgaccacgagggccacgacaaatcttcaggctcgaaaggctacctgtcgagcttcggcgacgtcgtcagagactgctcggaccatttcaagagtgtttgtgagaaacaggagaacaggctgaagaagaggttcctctacggcttctccatgggaggaaccgtggtgcttcagctccacaggaaggatcctctctactgggacggtgccgtgctgcttgccccaatgtgcaagggttattgtatattaacagccaacaatagtgtcgaaggagcacaagatgaggtgtga

SEQ ID NO: 24076 - DNA, 450 bp, Zea mays
  Peptide Sequence Number=SeqID_67451
atgggcaagaacaacaagcgcaagcgtgagccgactcctccatcagaggacttcggtgattcggaatactcagaggaggagttctcctctgagtctgaggggtctccggctcccatccctctgcgtgagtcgtctgatgattcagacgactcccaggggcttgcaacggaggtctggaattacattcgggccatcgagcgctccgggctcgagggctcggatgagtcggagtactcctcggacgaggaggactcgtccgagggcggtggcggcgatggcgacgacgacgacgacgacgaaggcggtggcggcaatgatggtgacggcggcgatgatggtgaaggcggcggcaggggcggcagcggcggcagcaaggatggcgacggcggcagcagcaggggcagcaacaggggcggcagcggcagaggcagcaacagggccagtggctaa

SEQ ID NO: 24077 - DNA, 612 bp, Zea mays
  Peptide Sequence Number=SeqID_67452
atgagctgggcgcgcggaccgctgacttcgaagtgccggacccgagagcccggactttgctgcctcgagtggatacaggaggagttgctggcgctccccgccatcgtggaggggtttatgtcctatgcctccctggtcacttgcgagggggcgatgaacgcgctctctcgcgaagggtgccggcactatgaggtcttcgaccaagctgatgaggatttcgagcgcaatatttacaaggttgaggaccctgtggtgaaggaatccgcgggagccctctacgaccggatgtggggcccccacgatcgggaggtggtcagggagcaggccgagacggcaaggggtcaggcggcgcgtggcgagagggtggatgacttcggggctttgaacagcgcacagcctgactcggagtcgaacccgcaggtggctgtgtccgagaccgccccggagctgcccccggaaaccgtcgaaggcgttcccgatgctcccgcaaccactgcggccggcggaggcccatcgccaacagccgcgccgagggctgaggatcctgtgaagatggcggcggagccggcagcggaggctcccacgacggctgggtcttcgcaggtggcttag

SEQ ID NO: 24078 - DNA, 981 bp, Zea mays
  Peptide Sequence Number=SeqID_67453
atggcgcctcctgttgacgtggtcagtccgtgccctgggttgggcgacgtggaggctcctccgaggtcgaggtcgagtctgtcttccgaggccgaggtcgagtgtgagccccgggtcaggcgaggcggagaccgtcggctgaggccagggctgagtccgagccctggggtcgggcgaagcggagctcgtcgtcttccggggctgagcccgagtccgagccctggggttgggcgaagcggagttcgtcgtctttcggggctgagcccgagtccgagccctggggtcgggcgaagcggagttcgtcgtcttccggggctgagcccgagtccgagccctggggtcgggcaaagcggagttcgtcgtcttccggggctgagcccgagtccgagccctggggtcgggcgaagcggagttcatcgtcttccggggctcatacccgagtccgagccctggggtcgggcgaagcggagttcgtcgtcttccggggctgagcccgagtccgagccctggggtcgggcgaagcggagtttcctatggtgcctgtggccggacttggttgctgtcagcctcactctatcgagtggcacagcagtcggggcggcacaggcggcgctgtcctcttgtcagaccggtcagtggagcggtgaagcctcctttgcattaaatgcccctgcgatttggtcggttggcatggcgatttggccaaggttgcttcttggcgaagactgggcctcgggtgagccgaaactttgtgctgatgggggttaccagctgagaatcaggagtcttgaggatacccctaattatggtccccgacaggtggggttagctccgggaagtccttgcggtcacgtcgaggcgctgcgtgggcacaggtctggcttggcacggcgcggcgcgcacggggccgagcgccagggcgcgtcgaacacgtggctgtgttattctgcccaagttgttgcgcctgctgagcacccaaat

SEQ ID NO: 24079 - DNA, 240 bp, Zea mays
  Peptide Sequence Number=SeqID_67454
atggacggacttgcacgagagggttttccctgcatttttttggaggtgctgcagggagccggctacatgacgcctccccagtacgaggtgcagttgttcgaggaacactgggtaccccgcttgcgaggagaggcaatgtcccaactgatgggcctggtggaggctaccaagatcaccctggataatagggaggaccttgtggtagacctgtccactgagctggtggagaaggacctctag

SEQ ID NO: 24080 - DNA, 270 bp, Zea mays
  Peptide Sequence Number=SeqID_67455
atgatagttcaaaaatgtttaataagaagcaccataggaagaaaaaggggaattttgggagaactagatattgtacatctaaaaccttctaagaatctcatgaaacctaaagatgttattaaagattattgtaatctcgctgacggggagtacatcctcatttcggagcaaggagttgcccaggaggtagtccaggagccagcaccagagcctgccatcgaggatctgcctgccccagctttagaaggcaagccccggttttatgcataa

SEQ ID NO: 24081 - DNA, 669 bp, Zea mays
  Peptide Sequence Number=SeqID_67456
atgcagcccagccggcccaactcggcccagccaggccgcacgcccgcgctgcctgacaggcggaccccgcctgtcagcggcagccctctctcccgcgcggtctccctctctcgctcactgcccaatggggccgacctgtcggcgccagtttcttcacccgcgcgcccctcctctctctctgtctcgcgggcccggccgccagagaccgcgctaggcctccccgagctccgccccaagcgcgccttaagccccttccccgtgaccggaatgcctcgctggagctcctccggtccgcccgagaccttctctccactgttctcccctctgtgctcgtggattcatggcctcttccccgccattgagttcgttgtggcgttctctccctctctgcccaactccagcgaccccggagccaccctagctcgcgccaacctcaactccggcgaccccaccgccgtggagaggaatagcgccaccctcagccgttcgcccctcctcggtctgatcccgtccgttcgatcttcatcgcacgactcagatcgcgagataccgcttcgcgcacgcgcgcctgacgccctggcccgcctgtcagcgcccaagtcccctaccgctgggcctgctcggtcagtgcgccctccccctctaccgctgacgcctctagcccgctga

SEQ ID NO: 24082 - DNA, 573 bp, Zea mays
  Peptide Sequence Number=SeqID_67457
atggcttcgcctacccccgccgatggtggagacacccgcatcagctttgactacctttcccgagagggttttccctctatcttgtgggagctatacgaggagcacagggtgccgcgctgtatggtttggctaaccatggagccccaccctctgcagcctgggtggcgttcgcttgattccgaaactgtcggattcagggcggatgacacctctgaggttgtggcactaaaggccttgacgaccttctgtggataccatccactagagatgatgatgcacccgctcggacttttccctgccgagaagagggaagatctgatgtggtgcgaccgaatgcgccacgccaaggatgtgtggaccatgcatcccgaccaggttgggaggatcaccatccaatgcatgagggcgatgtaccgcctgcaggcctcgcaaagcgatgatatgacgcatctaactgggctcgctcaaaccgcaaagactacccttgatgatagggaggccttcatggttgatctgtcctcagagttggtggagaaggatctccaaattgagcaaatgggcaaccgcacctga

SEQ ID NO: 24083 - DNA, 219 bp, Zea mays
  Peptide Sequence Number=SeqID_67458
atggcggaggtgaagctcctgcttctcggattcaaagagtctcatgtcagggattccaagatatctagggttcaaatctgtgaagcttcaatcaagatttgtggtggtcaagccatggtagtaaggtggcgctatttcatggaagtattgcaggcagactatattaacgaggtcgactgtggaagcagaactcacagcattagataccccttcagttga

SEQ ID NO: 24084 - DNA, 603 bp, Zea mays
  Peptide Sequence Number=SeqID_67459
atgaccgcgtcgaaaaaggccccgagcctcactactgatcagaggttcgaaggctggcccctcggaggggttcaacagccgcctcagagcgcgtgggctccgcacccactactggctggccctcaaagggttcacagccgcctcagacacggagcgagggatgaccctgggtacgttcgatacataaccaaggctcgggctacgctcccgagcgccgcctgcgccgccccgactgctgtgccactcgacagagtgaggctgacagcaaccaagtccggcctcaggcgccataggaaactccgcttcgcccgaccccagggctcggactcgggctcagccccggaagacgacgaactccgcttcgcccgacccgagggctcggactcgggctcagctccggaagacgacgaactccgcttcgcccgaccccagggcttggactcgagctcagccccggaagacgacgaactccgcttcgcccgaccccagggctcggactcgggctcagccccggaagacgacgaactccacttcgcccgaccccagggctcggactcgggctcagccccggaagacgacgagctccgctttgcccgaccctag

SEQ ID NO: 24085 - DNA, 111 bp, Zea mays
  Peptide Sequence Number=SeqID_67460
atggcgatctggccaaggttgcttctccgcgaagcctgcctgagctgggcctcgggcgagtcgaagcctcttatgcagtctgtctcactaactcttttaccctatgactag

SEQ ID NO: 24086 - DNA, 648 bp, Zea mays
  Peptide Sequence Number=SeqID_67461
atgggcgcgattaaggtcaaggctcagtccactcaagggacacgatcttgcctcgcccgagcccagcctcgggcaaaggcagccgaccccgaaggattcacgtcccgcccgagggaaaatagcgtcgcctgccccgctcctactgctgtgccactcgatagagtgaggctgacagcagctaagtctagcctcgggcgcaatgggaagcttcgcctcacccgacccagggctcagactcagcctcagcctcagaagacggtcttcgcctcgcccgacccagggctcggactcagcctcgaccctggaagacggactccgcctcgcccgaccctagggctcggactcagcctcggcctcggaagacggtctccgcctcacccgacccagggcttggactcagcctcgaacctggaagacagactgcgcctcgcccgaccccagggctcggactcagcctcagcctcggaagacggtctctgcctcgcccgacccagggatcggactcagcctcgaccccggaagatgaactccgcctcgcccgaccccagggcccagactcgacctcggaggagcctctgcctcgcccgacctcaggctcggacccgccacgtcacagggaaaggccatcattaccctacccctagctag

SEQ ID NO: 24087 - DNA, 396 bp, Zea mays
  Peptide Sequence Number=SeqID_67462
atgggcaagaccaagaagggcgggagttcgtcgcaccattccgacgacaagcggaagcgcgagccgaccccaccctcagaggacttcggcgattccgagtactcggaggaggagttctcctccgagtccgaagggttgccagggatcgccgctgaggtgtggacatacatccgggccgtcgagcgctccgggctcgagggctcggatgagtcggaggtctcctcggacgaggagaactcctctgactcgtccgaggaggggagcggcggtgacgacgacgacaagggcgacggcgacgacggaggcggcgacgatggtggcggcgacggcggcaagggcgacgacaagggtgacggcaagggcgacggcaagggtggcagcaaggccactggctaa

SEQ ID NO: 24088 - DNA, 303 bp, Zea mays
  Peptide Sequence Number=SeqID_67463
atggatcccaacgctgagattgaagaatgtgtcaccctgatacaatttaatgagctcaaacaaagcatagaagacaagcaagatcggttggcacaagatcttcagacacttatggctgaaatcagaggtcgtcgtagagcaagaaaccatgatgaagacggggaagaaggtgaaggaaattattctagaagggaaagtgaacatgggaggaggaatcaaggtgctgcacgtggtagaggaagagggggaaatcaaagaaatgatgacaatgaagaatctgaatttggggatgatgaggagtag

SEQ ID NO: 24089 - DNA, 489 bp, Zea mays
  Peptide Sequence Number=SeqID_67464
atggctgccccgcctcctcctccgtcggcggggaatgtgacgggacaaacccggatgttgctcttccgccacgtggggaagacgtcgtcgattccgccgccgacgggcgggctgacggccgccattgtcgttgtcgcacggtggaggaaggagtatcatgtcgtagctgccgtcgagggacatgaactcaagactcccgaaacggagcaacgtcccgggctggagaggttgctggagactacccatctggaccttgacgggaagctgttcgtcaacacgcagcaggcccctacctggcgcgccaactgtcggcgtttcgaccccaggggtccctggaccgacgaggcggatgcgcttgcagtagggggttacaagcgttcgcgagggggagagagagagagcctgtgcgtcagcccgtcctcccgcgtggccaccttctcgtacgagggccctggaccttccttttatagatgtaaggagaaggcctag

SEQ ID NO: 24090 - DNA, 246 bp, Zea mays
  Peptide Sequence Number=SeqID_67465
atggaggaagatgacctgcaagaagaagacctggtcaactacggagctacgccagaacacttagaaaatcaggaaaagcaaggtgacgaattggtcaggatcagtatgacgctcgacggtgttgggattgatagttcgattaaagctaaaggggtcacgtccgttgagtcaaccatcgagaccaaggccactgcgtaccatcctaaggagtctaagtcggcctacccgagcctagacaactcctag

SEQ ID NO: 24091 - DNA, 1419 bp, Zea mays
  Peptide Sequence Number=SeqID_67466
atggggcagtgctacgggaaggcaggcggcgcgtcgtcgcggcgggcggaccacgacgaccacgcccacgcggtcgcgccgccgtccccgctgccggccaacggcgcgccgccgccgcagcccgccacgcccgggcgccgcaagtccggatcggccacgccggtgcaccaccaggcggcgacgaccgcctggcccagcccgtaccccgccggcggggccagcccgctccccgcgggcgtgtcgccgtcgcctgccaggtccacgccccgcaggttcttcaagcggcccttcccgccgccctcgcccgccaagcacatcaaggccactctcgccaagcgcctcggcgggggcaagcccaaggagggcaccataccggaggagggcggcgccggcgtcgccgccgactccgccgaggccgagcgcccgttggacaagacgttcggcttcgccaacaacttcggggccaagtacgacctcgggaaggaggtcgggaggggacactttggccacacctgctccgccctggtcaagaagggcgagtacaagggccatgccgtcgccgtcaagatcatctccaaagctaagatgacgacagccatttccattgaagatgttcgtagggaagtcaagattttgaaagctctatcagggcacaataatctcgtcaaattctatgatgcatgtgaggacgccctcaatgtctacattgtcatggaggctgatcccaactttgacgattcaccatggccttcagtatcggctgaagctaaggattttgtgaagagatttctgaacaaggattaccgtaaaagaatgactgctgtccaagcactgactcacccttggttacgagatgaacaaaggcaaattccattggacatactcgttttcagattagttaagcaatatcttcgtgctactcctcttaaacgtttggcattaaaggcactatctaaggctttaagggaggatgaactgttgtatcttagattgcagtttaagctgctcgagcccagagacgggctcgtatcgctcgacaactttcggacggctctgacgagatacgtaactgatgctatgagagaatcaagggttcttgagtttttgcacgcgttggacccgcttgcgtacagaaagatggacttggaagaattctgtgcggcagcaatcagcccgtaccagctggaggctttggaaagctgggaagaaatcgctggaacggcttttcagcacttcgaacaggagggcaaccgagttatatctgtggaggagttggcgcaggaactaagcctcgccccgactcactactccatcgtgcaagactggatcagaaagtccgacggcaagcttaactttcttgggttcaccaaatttttgcacggtgtcacgatacggggctcaaacacgagacgacactaa

SEQ ID NO: 24092 - DNA, 90 bp, Zea mays
  Peptide Sequence Number=SeqID_67467
atgggtgtgctccatctgctgctgatcccaatgggtgtgcttcatctgctgctgatcccaatggggacgaagaagatgaggtccctctga

SEQ ID NO: 24093 - DNA, 387 bp, Zea mays
  Peptide Sequence Number=SeqID_67468
atgggcaagaaacgcaagcgcgagccaactcctccgtctgaggactttggtgactcggagtattcagaggaggagttctcctctgaatccgaggggtctccggctcccatccccctgcgtgagtcgacgactcccaggggctcgcggcggaggtctggacttacatccgggccgtcgagcgctccgggctcgcgggctcggatgagtcggaggactcctcggacgaggaggactcatccgaggaggacgacggcgacggtggcgagggcgacgacgacgacgacgacgacgacgacgacggaggcggtggcggcggcgacgacggtgactgcggctgcggggcggcagcagcggcaggggcagcaacagcggcaggggcggaagtag

SEQ ID NO: 24094 - DNA, 546 bp, Zea mays
  Peptide Sequence Number=SeqID_67469
atgggggttgctcaatgctggcttcgttgcagcgacggacggatgaacatctgcgtatatcagaggacagagacgttgaagacgaagaaaagaccatcgactgatttcatggagacgattcaaaaggatgtcaaccctagcatgagggcaattttgatagactggcttgtgaaagttgctgaagaatatcgtcttgctcctgataccttgtacctgatagtcaactacatcgactgttatctttctggcaacgagatcaaccgccaaaggctgcaattacttggtgttgcttgcatgcttatagcggccgcctacgacaaagtgtttcttgaggtgcttttctgttctgccaccgcgctctggacttgcaccgatgtcgcgcacgtgctcctgcagttcagcctcgcctggtgcggcaagctcatccggtacgcccgcgccgtcgccgcgcactacgtccgcttcgtcaagggcctctgcttcgacctcttcatcattaggggtggaaacagagctttcaatgcatgctggaggtgcgcgatgtga

SEQ ID NO: 24095 - DNA, 1041 bp, Zea mays
  Peptide Sequence Number=SeqID_67470
atgaaccccagactcccgaaacggagcaccgtcccgggttggagaggttgttggagactgcccatctggagcttgacgggaaactgctcgtcaacacgcagcgtgccccctacctggcgcgccaactgtcggcgtctcgagaccggggggtccctcaggccgacgagtgagtgtgccgcgtgccccagcccagatgggtcgagcgcgtgggcgagcgcgaaggggggaagcgaggtggccggagacgggcgtgagagaggtggaaatcccgcggccttcgtgttcgtcccgcgcccaggtcgggtcgggcgacgtggaggctcctccgaagccgaggtcgagtctgtcttccatggccgaggccgagcccgagctcctgggtcgggcgaggcggaggttgttcggcagaggccagggcggagtccgagccctggggtcgggcgaagcggagttcgtcgtcttctggggctgagcccgagtccgagccctgggtcgggcggagcggagttcgccgtcttccggggccttagcctgagtccgagccctgggtcgagcggagcggagttcgccgtcttccggggccttagtccgtgtccgagccctgggtcaggcggagcggagttcgccgtcttccggggccttagcccgagtccgagccctgggtcgggcggagcggagttcgccgtcttctggggccttagcccgagtccgagccctgggtcgggcggagcggagttcgccgtcttccggggctttagcccgagtccgagccctgggtcgggcggaacggagttcgccgtcttccggggctttagcccgagtccgagccctgggtcgggcggagcggagttcgccgtcttccggggctttagcccgagtccgagccctgggtcgggcggagcggagttcgccgtcttccggggctttagcccgagtccgagccctgggtcgggcggagcggatttcgccgtcttccagggctttagcccgagtccgagccctgggtcgggcggagcggagttcgccgtcttccggggctga

SEQ ID NO: 24096 - DNA, 156 bp, Zea mays
  Peptide Sequence Number=SeqID_67471
atggcgtcgacggcggggtacctggctcggcgggcggcgcagaaggagcgggtgcgcctgctctaccgcagggcgctcaaggacacgctcaagtgctcaactgggccatccaccgccacatcttctaccaggaccaatgaacaacaacaattctag

SEQ ID NO: 24097 - DNA, 240 bp, Zea mays
  Peptide Sequence Number=SeqID_67472
atggcgcgcgccggaatcagcagggtcaacgacgtcgaagcagcgaagtcagcagagtcgacgaggtcagaagatcacgagcagtcgcgtgaagacgcttcccaaaaaccttattcgccctctcccggtgcaggatctagaagacaaagggtttcggagacctgctctcctgatcgcagatgcacgtctgcggccgcgacccccgatcttatccgcccacaaaatctcgcgttcagttga

SEQ ID NO: 24098 - DNA, 135 bp, Zea mays
  Peptide Sequence Number=SeqID_67473
atgaaagacgttgtgattgtcggggcgtttacggacacctatcggctgctttcgtggggcagggcagaatccggcaaggcaatcggcttattaaaggtggtcctgcctaataggcgtttctgcaatcactattaa

SEQ ID NO: 24099 - DNA, 204 bp, Zea mays
  Peptide Sequence Number=SeqID_67474
atgaacaagccgtcatctgccgccaaggcgctcgccgcagtcctgctgctcgcggcctgcgtcgccgcgaccgcccagtacggcggaagcagcagcagcagcagcagcgcgccggggacgggcccggctgacggcgccggctacctcctgggcgtgtccgcggccgcggccgcgctcgccgtcgcggcgttcgtttggacctga

SEQ ID NO: 24100 - DNA, 1239 bp, Zea mays
  Peptide Sequence Number=SeqID_67475
atggagtttgatcatcctgatgaggtagatgaagaggaagaagttgagtatgaagaaattgaggaggaggttgagtatgaagaggtagaggtagaggaggaggaggaggaggaggaggaggatgaaattgaaggtgtgcgtgaagttgatgctaatcatgacagtaaaatagtggatgatgatcccaaggatgggaatgaaaaagaaaagcatgctgagcttcttgctcttcctcctcatggagctgaagtttatgttggggggctttcctctgatgtatcttctgaagatctcaaacaactatttgaatctgttggagaagttgcagaagtgcgaatgcgaggaaagggggataacaagacatatgcttttattaatttcagaactaaagagatggctttaaaggccatccaaaagttgagcaataaagacctaaagggaaaaaagataaaagtttcatcctctcaggctaagaataggctttttattgggaatgtaccccatgattggacacctgatgatttcaaaaccgcagtggaagaagttggtcctggagttttaaaagttgatctcatgaaggcaccaggctcaggtcgcaataagggttatggctttattgaatactacaaccaggcatgtgcagagtatgctaagcagaagatgtctactccagaattcaaactagatacaaatgctcctactgtcagctgggcagatcataagaatgctagtgaagctacatctacttcacaggttaaatctctatatgtcaaaaacctccccaagactgttactcaagagcagctgaaaaagctgtttgagcatgttggagaaatcacaaaagaacggtccatggttatgaaggctctgaagaacactgagagatatgaacttgatggtcagctgctggattgttcacctgcgaaacctcctgctgataagaaggatgatactggatcatctcctactgcaaaaggacgtccattacccccaagttatgccccacttggatatggactagcgggagcttataatccacttggaaaaggactggcaggtgcttacaattcccctggaaacggactggcaggtgcttatggcgtgctttctgctcatgccgcacagccaatgttgtatgctccaggtgcttctccaggttcaacaatgatcccaatggtcctaccagacggccgtcttgtatacgtgataaaaacattaatgaagaagagaaaaagataa

SEQ ID NO: 24101 - DNA, 462 bp, Zea mays
  Peptide Sequence Number=SeqID_67476
atggggtggaaggcggcagagaagctcatcaggcactggaaggtcctgcgtggtgacaacgtgatgatcataagaggcaaagacaagggggagtccgggctcatcaagcgggtcattcggtcgcagaatcgcgtcatcgtcgagggcaagaacttggtcaagaaacacattaagcaaggggaagggcacacaggtggtattttctcggtcgaagccccacttcatgtctcaaatgtccaggtggttgatccagtcactgggaaaccatgtaagattggatacaagtatctggaagatgggaccaaagtcaggtacgctagaggaatgtacgcatcgggcgttgtgataccccggccagaaattctgaaggagagaaggaaaccgaggcccacgtcactttttttcctcatgctctttgatggaataagtcttgagcatctagaggacagcagtcgcttttga

SEQ ID NO: 24102 - DNA, 462 bp, Zea mays
  Peptide Sequence Number=SeqID_67477
atgccttcttgggagctccggacctgtacgtataggggtccggtgtccctctgtggaggtccggacccatcgatacaccccgggatgtattatctttccttgccacgtggtgcccttagacctgcccatgtggtggggtctggtgccattctccgtgtggcccggaagtgctgtgcgggtgcagcgtcttcatgctgtagaagagggtacccccgattcagggtaccgacagtggcccccgagcccgcctcaggggaggatacgagcctgcaggtggggccagagtttgatttgtggttggcctgctgctcatgtgcgcccgttggcgcaattaccgccggcccgcctatggtcatgccgactgccacgcctattcccatggctgactggcccgtgaccatcgtacttaatgtcactgttgggccacgcgcggggtgcctcgagtcgctgcactggttctga

SEQ ID NO: 24103 - DNA, 1140 bp, Zea mays
  Peptide Sequence Number=SeqID_67478
atgccccttgtgcggcggttcgccttcctgaccgtcggttgccccgaagatggaggggtgcataactgtggggcagttgcacgctccttcttcgggtcagtctgtgtgacatgtggggcctggcccccgtgtcataaggtgggaaccctggtgcacgtcggggaagacttcgcccgtgacgcttcgggggcgcgagtggggagatctgcctttaaaaaggggtcgatctcccgggtagtagccatgtctcgctcctctagcgaccatcgcgcccttccgccttccgggcctccagatgggaggagtgcaaccctatgggggttggcattcttccgtcatcgttcggcttcaaggattttcatcacgcagcccggtcgcaacctccgaccggtggtcatccacaaggatgactaccagccttgtggtggagagaagcgagccgggctgcggcctcccccctgccctcagcttcaaggatgttcgtcatccgcgctggggaggagggcgagccgagtcggggctccgcctttcgcgcgggctggcggcccgcttcttcctccagcattcggggaagaagggcgttcgccagccttgcgaaggaggcgaacttcggctacgcggggtcggccgtctgaggtcagctaccgcgtgtctggctcctcggcctgggtggctttggtgctgcctcctgccgcttggacggggcgtggctgtccgtccaccgcatgggcgacggtcgcgccgtgcgcaggtcggccacacccacggcttctcctgcgtcgccagccgcaccggagggtcgtacaagacgtcgtacgccgtggggcggcggcggcggcgttcttggatggtcttgtcctcactcccgcagtgaggacgggagcgaggacctcttcgcgcgcgctggggcggccgccgttcgcccggtacggcactggtgcgcaggtggccgctgtcgtcggtgctgaggtggtcgccgccgctggtgaggctccccactgcagaggtggttgcctccgctggcgagaccgtcagtgccacctaccgccgaacctctggctcattggctttaatggcctcgttgtcgccccccgtaggaagacgggggcgaggaccctttcgcagcggtgtacatgctga

SEQ ID NO: 24104 - DNA, 666 bp, Zea mays
  Peptide Sequence Number=SeqID_67479
atggagtctgggatgtctgcgcagtcgtgtgctaccgagcggcgtgcacagcagcagtgcctggcacggggtggttgggaacttgtggcgtggaggaagcatcctaccaggatgtattatctttccttgccacgtggtgccctcagacctgcccatgtggtggggtctggtgccattctccgtgtggctcggaagtgctgtgcgggtgcagcgtcttcatgctgtagaagagggtacccccgattcaggctcccggtattgctcgccgaagtttggggcggttccaactccgacgacaactccggcgagcaattacttccaatccgtgcatcgtctgcggaatccgagggtaccgctgcgttcgtctcgtcgagggcttcgtcgcagcgcgttcggttcgtcgattggatccccgaatctccggcaatcgacggatttcctctcggctccggcaagggtcttcttccccgggggctcgagcggtttctcgagtgcctctccggtggtgacaaggacgatgtttatgactatggtaatggtaagtggtattctttccgtttggaaagggttgcctttggtgcaatctatgctcaaataaagaagaaggagaacggtgtcgaggcggatctccaggagttccaggacatcgacgagttcaaggattag

SEQ ID NO: 24105 - DNA, 294 bp, Zea mays
  Peptide Sequence Number=SeqID_67480
atgacccagttcttcgagttccacgagatcgaagaccctgagcatctgtttggtgaaggcaagaactggggtgtagttcgcttcgccgtcgtgccgttaatggggctcggtgtatgcggctcgctctgccaaggtggtgacaaggacgatgtttatgactatggtaatggtaagtggtattctttccgtttggaaagggttgcctttggtgaaatctatgctcaaataaagaaggagaacggtgtcgaggcggatctccaggagttccaggacatcgacgagttcaaggattag

SEQ ID NO: 24106 - DNA, 1371 bp, Zea mays
  Peptide Sequence Number=SeqID_67481
atggacgtgcaggtgcagcggagcttcgtgatacccgcgccgcagtcggagccgtcggcggaggtgccgctgacggtgttcgacctcgtcgcgcccgcctaccacgtcaccgtgctgttcgcctacgccgcgcccaaccccaccgacgccgccctcctggacgcgctcgccgccacgctcccgcgcttcccgctcctcaccgcgcgcctcgtcgtcgccgacgccgacgagcgccgacgcccgttcttcgtcacggggagaggcggcgcgggcgcgctcgttgtcgaggccaccgtggcgtccgcgctctccgaccacctcccgcttgcgcccgcgccggagctcgcgcgcctgcacgtgccggtcggcggcgacttggctccgccgccaccgcacatgctcatgctcctgatcaaccgcttcgcgtgcgggggcctcgtcatcgcctcgtcctcgtaccaccaggccgcggacggctactccatgtccaccttcttccacgcgtgggccgacgccgtccgcgccaacaacaaacacgacactctactaccggcggcgccgccggcaccggcgccgtacggcccgggcgccatcacgccgcgccggccgccgcggtgcgagttcgagcaccgcggcaccgagttcctgcgcgccgaggacgccgccgccggcaggccggcgccggcccgggtggacccttcggagatcgccaacgtgctgctgcacctcccgagcgacttcgtggcggcgctcaaggcctcagctgcgccgccgcagggacagggccggtggtacacgaccttcgaggccgtgtcggcgcacctgtggcggaagatcacgctggcgcgcgggcgcgccgacgacgcgtcgcgcacggcgctgaacgcggcggtgaacggccgcgcgcgcctcggcgccgacgccctggcgcggggcttcttcggcaacgcggtcctcacggcgagcgccgccacctgcgcccgggacctggcgcggggcgccctggccgacgcggcggcgctgatccgcgcggccgtgcgcgcgcgcgaccgccagtacttccagtccttcgtcgacttcggggagctgcacctgcacggcggcgaggagctgctggagcccacggtcggggacgaggacaacgtgctgctcccggacgtcgcgtccgacagctggctgcacctggagctgcaccgcctggactttgggtgcggcggacggctggccgggatcctgccggcgaaggtcccgctggacggggtggtcgtgctcatacccagcctgcggaaaggaggcggcgtcgacgcgttcgtggcgctgtgggacaagcatgccaaggagcttatggatattgcttacaccatggactag

SEQ ID NO: 24107 - DNA, 417 bp, Zea mays
  Peptide Sequence Number=SeqID_67482
atgggcaagaacaataaacgcaagcgtgagccgactccaccgtcggaggatttcggcgactcggaatactcggaggaggagttctcctccgagtccgagggatctccggttcccgtctctcccccggcgtcgtctgatgattcagacgactcccaggggattgccgcggaggtctggacgtacatccgggccgtcgagcgatccgggctcgagggctcggatgagtctgagttctcctcggacgaggaggactcggacggcggcgaggacgaagatgacgatgacgacgacgacgacgacgatgatggcgacggcgacggcagcaacggcggcgggggcagcggcggcaagggcggcaccagaggcggcagcagcacgggcagcaccagaggcggcagcagcaaggccagtggctaa

SEQ ID NO: 24108 - DNA, 432 bp, Zea mays
  Peptide Sequence Number=SeqID_67483
atggccgcggagagctgccacccgcgcggtctctcgtggttcgcgaggtcgtgcatccccgccgaccccgcccgccacaccgccgtcccggtccccgtcccagtccccttctcagtccccgacgccgaggatcccgagcccgaaccccccatcgcggggctccccgacgagctcctgctggagatcctcgcccgcgtgccccgcgcctcgctcccgccgctccccgccgtctgccgccgcttcgcctcgctcctcgcgtcccaggcattcctccagctccgccgcgcgagcggccgcctccgcccatgcctcctcgccgtctcctcctcctccgcccgcgcgctgctcctccacctccacgcctccgcctccgcctccgcctccgtgtcctcgctcgaggtctcggagatgcccatgccccagcgctgctga

SEQ ID NO: 24109 - DNA, 630 bp, Zea mays
  Peptide Sequence Number=SeqID_67484
atgtcgcccacccctgcaccggccgcccgcgccggcgaggagctgccgtccactgaggtggtggtggtccggcacggcgagaccgcgtggaacgcctcccgcgtcgtccagggccaaatggacccggagctgaacgaggccggcaggcggcaagccgtcgtggtggtgctgacggaggcgctccgcgagaggcacatggggtacctgcagggcctcaggtgggacgccgcggtggacaagagcccggactccttgcacatcgtcaaggtcatcgagggctctgaccccgacagcagaaaccaggagctgcccggcggtggagagagcctgaaccagctgaacgagcgttgcgtctgcttcctgaacaagatcgcgcaagaacacgccggggagcgggtggtggtggtctcccacggcgcagcgatactggagctctgccggcacaccgacccgccgggcagctgcgtccgcaggcacgtccccaacacctcgctcagcgtcttccgcgtctccgccgccaccgggcagtgggcgctcgagaggtgcggggacgtcggccatctcaagggagacggagacggagacagcttcctggagggctcgttcgggggcgacggggcctcggcgtaa

SEQ ID NO: 24110 - DNA, 116 bp, Zea mays
  Peptide Sequence Number=SeqID_67485
atgtcgtacaccagcaccagcccttccacagcgccgcccgcggcagcgtggcccctcacggcggtcacgttgaccaccgccgccacccggtcggcgcccactccggccttctccaa

SEQ ID NO: 24111 - DNA, 492 bp, Zea mays
  Peptide Sequence Number=SeqID_67486
atggctgccggcgaaatccgagctggagctcgcgacaacaaggagcaggacgcgcaggcatctggacaggtacaggcgagtggcgtcaaggacagtacgttgccgcggccatggaaaatattggagcagggagtgcgacagcacgatgacgttgacgaagcatcgacggaagacgggcagagggagcagaggcctcgacgccggcgagcagctgcaggggagatcacagtccgagcgccgagcagggaggaatccgcggcgcgcagggacgcggcgaactggaggagcagggagggcgcggtccgagcagagcctcggcagagagggccagggaggagcgtcggcgagcagaagcttgaaggaacgtgcggcagggcgaacaggccgggcgccatggaagccgtgcgcgtgtgggagatccggctggggctaaagcttggccggcgagaagttcacaggggcggcggctgggcgcagggcgagccatggtga

SEQ ID NO: 24112 - DNA, 1194 bp, Zea mays
  Peptide Sequence Number=SeqID_67487
atggcggtccaccctttcacccgctggcctgggcgaaagtggaggaatgctcgtaaccgctgggcagttgcgcgcgctgcgcgcggcggttttggctccttctgtcctgggccagtttgcatgacgcgtgggacccagcccccgtgtcgtagggggaagaccttggagcgtgttggggaagactcagcccgcgtcagcttaggacgcaagtggggagagttgcctttaaaaggagggaacgcaacttcgcggaagttggtacctttcagccatcgttcggcttcaaggattttcatcaggcagcctggccgcatcccctcgccggtggtcacccaagacggtgaccaccagctcctgggtggggagaagcaagccgggctgcgaccttcgcccctccctcagcttcaaggatcttcatcatcagtgctggggaggggagtgcgccgagttggggcctgtctccgcttgggcagcggcccgctccttcccttagtgatcgggcgaagggcgttcgccgttcgtggcactggcagctgccgcgtgtctggctctctggcccgagcggcttcggcgccgcttccggtgccacctcccgccgcggcagccagaagaggtttctccgccgacgagatagtcggtgccgcccgcggactgacctccaactctatggccttctacttgtcctcgtccctcgagtggggacgtgagcgagggccttgtgacagcagcatccgccctgaggttatcgctgctgctgttcggccgctcggagcagaagtcgttgtcgctgctgctcttcgggcggcggcgagccatccgtcggccttctgttgttccgcaggccctccaatcgtggggggttgttcgtacctgtggaggtggaaccggagttccgtttgtaatggcaccctgagtgtcggtgtctgttcattgtggctgtcggggcctgaacatgggaaccctcggccgctcttcgatgagccgaagccagaggcagcagtgttagcatggacagaggcagagtcggctcgaaaagaaaacttcgtcggccggagcctggccgggccgtccactggcgggaccagcgccggagtcgagttgccgaagccacgagctgggctggtgtcctcggaggacagctggctgaggcttcggggcggccggccgagccgtctgctcgggccggattcctga

SEQ ID NO: 24113 - DNA, 654 bp, Zea mays
  Peptide Sequence Number=SeqID_67488
atggcggtggacgggcgacacctttggcgggcgaagcaggcgacgcttcgcttccgccataatgaccgcgtcaaaaaagggaccgggaaaggggataccccgaaagggatccttctccgcgaaggaaacgggccccgagcccccctactgatcagaggttcgaaggctgtcccctcggaggggttcaacagccgcctcagagcactcgggctccgcgcccactactggtcagaggttcgaaggccggcccctcggaagggttcaacggccgcctcaggccactcgggctccgcgcccactactgatcaggggttcgtaggctggcccccgaagggttcgacagccgcctcagacgcagagcgagggatgaccctggccctggcctcagccgacagtctctgcctcgcccgacccaggggctcggactcggcctcggccccagaagacgacgaactccgcctcgcccaaccccagggctcggactcagccctggcctcagccgatggtctccgcctcgcccgaccctggggctcggactcgacctcgacctcggaagacagactcgacctcgacctcggaggagcctccgcctcgcccaacccagggctcggaccgaccacgccacaggaggggccatcattaccctacccctag

SEQ ID NO: 24114 - DNA, 1032 bp, Zea mays
  Peptide Sequence Number=SeqID_67489
atggcgcaccggacagtccggtgcacaccggacatgtccggtgcccccgccacgtcatcagtgccattggaatctgaccgttggagttctgacttctgggcccgcctcgatgtccggtggcgcaccggacatacactgttcattgtccggtgcgccagcatgggcgactctgacttctgcgcgcgctgcgcgcgcattaaatgcatcgcaggaactaggtgtaagcctaattccctttcaagaagactcagcctgcgatggctgaggacgcaagtggggagagttgcctttaaaaggagggtgacccccttgaaaggcaaccatgtctttgcgctcccctcatgcgtcacgtctttccaccctccgagcccccggatggggaacactcgcagtcctttcgccttgtcgttggaggaacgcaacttcgcggaagttggtacctttcagccattgttcggcttcaaggattttcatcaggcagcccggccgcatcccctcgccggatgggtgaccaccggctcctcggtggggagaagcaagccgggctgcggcctctgcccctccctcagcttcaaggatgttcatcatcagtgctggggaggggagtgcgccgagttggggtcggtctccgcgcgggcagcagcccgctccttccctcagcgatcggggggaagggcattcgccgttcgtggcgctggcagctaccgcgtgtccggctctccggcccgagcggcttcggcgccgcttccggtgccatcttccgccacgacagccggaagaggtttctccgccgacgagatagtcggtgccacccgcggactgaccttcaactctacggccttctgctcgtcctcgcccctcgagtggggacgtgggcatgggcctcatggcagcagcatccgccctgaggtcatcgctgctgctgttcgaccgcttggagcagaagtcgtcggccttctgttgctccgcaggccctccaatcatggggggttgttcgtacctgcggggacggaaccggagttctgtttgtaa

SEQ ID NO: 24115 - DNA, 702 bp, Zea mays
  Peptide Sequence Number=SeqID_67490
atgcgccaaggggtcccttttatagccccaaggcagctaggagccgttgggaacaaatctggaaggccatctttgccttctgtctcgtggcgcaccggacagtccgtcgccggagaaaaacccgagagcggcctcttcagccgaggcagcctggcgcaccgggacactgtccgaacgtctttcgtgcttttcgactacttcgaaagtgggatcctgaaaacgacggagtacacgccaaccgagccgagggactcctacgcctccgggatacggatacctcactcatcaccttccgtgaaaagctcggacctcgacggagggggagcagcagcaccctcggcgtcaactacaccttcagcgaagtccgacctagcctcagacgacaacacggtcggaggatctccactccgaaggacgacatcagcaccgcgcccgggccatcgccgccagggtcttctccaggaatctggctcgagcagacagctcggtcggccaccccgaagcctcagccagctgtcccccgaggacatcagcccggctcgtggcctcggcaactcgactccggcgtcggtcccgccagtggacagcccggccaggctccggccgacgaagtcttcttttcgagccaactctacctctgtccacactgacaccgctgccttcggcttcggctcatcgaagagcgaccgagggatcatttaa

SEQ ID NO: 24116 - DNA, 1527 bp, Zea mays
  Peptide Sequence Number=SeqID_67491
atggcagcggcggtggcgccgccgctctgcacctggctcgtcgccgcctgtctctccgcggcctgcggcgatggcgagaaggagaatgaacgcaggcaccgcggtggcggcgtagggggtttcttcggctcgcgccgccgcctcggctcagggcgccgcggcgtggggcgctctggaatggccatgtctgttgccttgcatcctgaaaggacagctgtggaaaataagaaacctgatatgaaacagaggagagtggttgtcactggcatgggtgtagtgacgccactagggcatgatcctgatgaattctacaataaccttttaaggggtatcagtggaataagcgagatagaggcatttgattgttctcactatcccacgagaatcgcgggagaaatcaaatcattttcgacagatggttgggttgcaccaaagctagctaagcgaatggacaagtttatgcaatatttgataacagctggaaagaaagcattggagaatgctggaatcactgaagaagtcatgaatgagttggaaaaatcaagatgtggagtcctcattgggtctgctatgggtggcatgaaggttttcagtgatgcaattgaagctttgagggtttcatacaagaagatgaacccattctgtgtaccttttgcaactacaaacatgggttctgcgattcttgctatggatctgggttggatgggcccaaattactctatctctactgcttgtgctactagcaacttctgcattctgaatgcagctaatcatatcagaaaaggggaagctgatgttatgctttgtggtggttctgatgcaccaatcatccctattggattgggaggttttgtggcctgcagagctctttcacagagaaacagtgatccagcaaaagcttctcgaccttgggatgtggatcgtgatggatttgttatgggagaagggtctggtgtgcttgttttggaagaacttgagcatgcaaagcaaagaggtgcagaaatatatgctgaatttctaggaggaagtttcacatgcgatgcataccatatgacagaacctcatcctgaagggaaaggggttattctttgtattgaaaacgcattagcagattcaggagtaacaaaggaggacattaactatataaatgcccatgcaacatctacacagatgggtgatttgaaagaatttgaagctctcaaccgttgttttggccagaatcctcagctacgagtgaactcaacaaagtcgatgacaggccatctgctaggagctgctggtggaatagaggctgttgctgctatacaattcaaaaatgaactagccggcgacaaatattcgagaacggaggctataaggacaggttgggtgcatccaaatctcaatttggacaatccagagaaaaccgtggatgtcaggatgctggtgggcccgcagaaggagagatgtgatgtgaaggtggcgctgtcgaactcgtttggatttggcgggcacaactcatcgattttgtttgcaccattcaagtga

SEQ ID NO: 24117 - DNA, 354 bp, Zea mays
  Peptide Sequence Number=SeqID_67492
atgtcgcgcccgcccactcggcctggacctcgtcatggcgtcctggacggcgatttcgagttgctggagaaggtcgtggcgattttcgattgccactcgtcggtgatgaggacgagcacacaagtgcattatcggggacgaggagcaacacgcgtggcagatcaccggcgaggaggaggaccgcgcgaccgccgacgaggaggacaggcgcttagccaccgggacgcagcgcgacagttcatcgggaggaggagaagagcacgcgcggctgccggctggacgagcgcgagcaccagtgaggaggataatagtgcagctgccgaggatgcgggcacgacagctcactggggatga

SEQ ID NO: 24118 - DNA, 2469 bp, Zea mays
  Peptide Sequence Number=SeqID_67493
atgcatgtgcgtgacgggcgcctggacgttggcctggacggcgccttggtgaggccgcggcgcctggacgctagcgtcgcgttgagcgctggtggctggcgtgcgaccggctggacaggttgcagttgtagcctaggcgatggccaatgggggggcgtgccgcagccgccgctggtgccgcgccaggaacagccgccgctggaacagccgccgctggtgccgcgccagggactcaggacagccggacaaggaagacaggactcaggagttagggttggctggattgggaggtttcgatttcgtagtaggctgccaactgggccgtgggctgtggagcttgcgctcggcctggcgcctggcggccttctagtagaatggatatcgggtagaatggggtacttcgggtaccgcggcaccgccactccgtcccccatcttcggcgccgccgtctcccgctcccctggcacgcattcggggttgatgtcctcgtggtgccacgccgacctcgccgccaccaagcgcgccacccatgtcctcaccgacctcgccaaaattctttcctccgcgcctcgggcggccgcggcacaggcgccgccgcgcccgctcgccgcgaagcacaaggacgagccggaccccgacgacggcaggcagagggtcactgtcttcttcggcacgcaaaccggcaccgctgagggctttgccaagatccttgcctatagtgttgggattccatgcaaacttgtcaaagggagcaattatactggtggtgatgacgacgatgctataaacataattaagatggacaatgaaagggagtttttggttgatctgatggctgctcctggtgctcttattccagcagatatcttaagttggaaaggcaattcgttaaattctaatcgaaaactcggcctgaatcgaacagctggatcatcaagtactgttgatgctaatgtggatcctactgtattgccacttgaacctaaaggtggccaactgcctttgttcagcagtggtgattggatgtcagacattgattctggatatgaggcagcagaaattgcagcttctactcaaacctcttcgggtgtcacaccatatctgtgttctgctggaagtgtttttggcagttcatggatgctggttaatcatgaccaatcagatggaccatcaacttctgctggtacatcatcgcagcagaaagttgtacctcaaagcgagcatcagcggaatttaaaccgccttccagatctgcaggaaattccagagtcaaaaaacctttttgctgaccttgttccttctggggataataagtccaagaaaacttcagtaccattcaaaggaccagatcataggaacaatgagttgcaaaagcgcagagagaacattgtccctaatgctggaagaccacatcagcggttagttatgaagaattggtctccttacaatgatgtttccaacaacaaacagtacaattatgtcgaggattcgtttgctcgtagaaatgttggtaataatgctgcaccatcatcatcccagatgccacgaccagccgcaagatctaaccttaattctagattgcataatgatgcatcatatcataattatgatagcattatggctggtacctctgccatgaacattacatctacagctgagaccgggaaggttcctgaaagggttatgcgtggtgatttggacaaaggccaaacaaattatagattggaggatcaacatgtcatagttcaaccaccacagggaagacttccatggggtattcctgcagaaggaagcgttccaatgaatagagttcagagtcaagcaaaacaacacttggaaaacatggatgcaaagcaagaccataagaaattgctccctgatccaaaaaaatctccccttgacaaattcatggacacatcattgccttcaagaaacatggacatgaggtcacagaggcttgacttcgatgatgtctctgagtgcgaaattccttgggaagatcttgtgattggtgaaaggattggcttaggcggcgaccagaatatgcatcaggcgggaggaatggggcggtcgctggagctgctgctgatccagtttttgatgccggataacgacacacgtcggcaggcggaggagcagatccgacggctggcccgtgacccgcaggtggtccctgcgctcgtccaccatctccgtacggccaagacccccaacgtccgccagctcgccgcggtgctactccgcaagaagatcacctcccactggcccaagcttccccctgactccaaggcatcacttaaacaagcccttatcgattcaatcacactcgaccacaggttctttgctaaatacctatcaccaatccttctacgcatgtctgccttagaatctgcacgctttcaattcactcaaattgtgcatttggccatttgcctaaggaacactttgagtgtattctcaacttattag

SEQ ID NO: 24119 - DNA, 636 bp, Zea mays
  Peptide Sequence Number=SeqID_67494
atgtcttctcgctcccttatgtattgcgtctctccaccttccaaaccctcggatgggggatacccgccgtcttttcgcctaatcgttggaggaacgcaactccgtgggagttggtaccttccagccatcgttcggcttcaaggattttcatcatgcagcccggctgcacccctccaccagcggtcacccaagacggtgaccaccagttcctgggtggggagaagcaagccgggctgcgatcttggtcccaccctcagcttcaaggatgttcatcatcctcgctggggtgggggccgggctgagccggcgctctacctcccgcgcgggttcgtgggtcaccctctcccgcggcgttcgagggagagggcgctcactggccctgcgggcggcccggacttcgacaacgcggggctggtcgacggcgggcgtcgtcacctccagcgtgtcgggctcgtcggcttggctcccggcggcccctcctgccggagggcggctgccgcgccgtgtgcacgagagggccaccccagatgccgcgcgctgctagggcggcgttcgtgttctggggtggtcctgcctttgcatcggcgtgacatcttcacgcgggggccggtgccccactcgtccgggaggatttga

SEQ ID NO: 24120 - DNA, 1377 bp, Zea mays
  Peptide Sequence Number=SeqID_67495
atggagagtcatgatctccgggcagaatgggaatcacggcttgtgggtggttatgagattgatggttctggttatgattatggtgctgctagtccactacagccaaacaggatacttgctgagtatgttgatgtgtactcacccttgctctacacaccaaaccccccccaggttgtcagcattgcaaccactgctcaggcgaagatgaagctgtggaaggagacttccaggagttccaagattacgacgagttctaggtgtgggttagcggcaacccccagtcggctgcctgtgaaggccgcgttatctacgtttcttttccgcactttgatttattgtaagaactatatggacgtctcagacatggctcgacttagacacactgcacgaaagtcagtcatccccttcttaccctcccgccttgctgagcgtccgcttcgccgtcccgtggccggacagtccagccacttggagagactacaccaccgcctgcgtgaggagcaggagcgtcgacgacaggagcagcggagctcttccctctcgctccaccaggagatagagtctgtgaggagctgctcccctgtgctttctctggagccgccccctgcaccaccactgggcgccccagcttctggagtagctgctggaggagacccagacgacggaggaggcgacgacagctcgagccacgacaccgacttctctgccaaccctgagccggaaggatgggttgctcgacccatcactcgcgacgctgctcgcgggtgtcacttccatgatgcgctcgacaccctgctacgtcgggcatttgaccggcatacttggtccgtcgagtatcgctgtgtggtctaccagcatagtcgcggggtctacccggaccgctgggaggcgacttgcttggtgcgctgcccggaggacagtctccagggtgcagaggcctgttcagagcactattctatctctgagcgggactcagctgaggcagccatgcaagatgctgcacggcgtgcgctttcgcactactgctcggttttcggtggggcagctgacggtcttgacctgaagtattacccccgccgttcatctggcagcacaggaggcgtgattgtctcacctgtcggtgagggcaatcctaggttgagcagcacagtcaacctagccgccgtgctaaacacggagctggaccatgcattagacgagctgagtagggctcgtgctgagatcgccctgctgcgggctgagcgcgcggaacgtcgttttctggatggtggttcccccgctcccgttgggactcagcacccgtaccgctcacctcagcgtggacaccagtcttatggcaatcccgcctgcaagaccaagataactctagaaccatag

SEQ ID NO: 24121 - DNA, 441 bp, Zea mays
  Peptide Sequence Number=SeqID_67496
atgggcgggggcctcctagcagcagcatccgccctgaggtcagtgctgccgctgttcggccccccggagcagaaggcgtcgtcgtcgctgccgccggagcagcccgggttgtccgtcagcgggaccgacgccggatttgacctgccgaggcctcgggtcgggctggcgcccttggaagatggttggcccgaggtcgagtctgtcttccgtggccgaggccgagtccgagcccctgggtcgggcgaggcagaggtcgttcggcagaggccagggcggagtctgagccctgaggtcgggcgaagcggagttcgtcgtcttctggggctgagcccgagtccgagccctgggtcgggcggagcggagttcgccgtcttccgggacttagcccgagtccgagccctgggttgggcggagcggagttcgccgtcttccgggacttag

SEQ ID NO: 24122 - DNA, 621 bp, Zea mays
  Peptide Sequence Number=SeqID_67497
atgagatgcagagtgtcgccgccgtcggtctccggctcctgcggaagcagctcagcagacccctacggtgtcccagaattcgggtggcgggacattcgccggtacaagcagttccggtcagtcgacacgaacatttctgccggcgatgactccgctcttggccagatagtgaaggcgctgctccggaagctctccttggttgacctagcgggcctctcccaccagcataataggctggcattctggatcaacacctactactcctgcatgatgaacgaatcgctcgccaacgagctcgccactcggatgagtgccatgagcagcgtcaccgataacgccatcgagctcggcaagaacctctccatcgcctacaacctacaattccaggccaagatcactcgtgaggtcctcaggatcgttgctccaatggatacggttttgtcggtgcaatggatacgacttctgtgtgacatccccttccataacgaccgcaatgttgggcttatggatgagggactagtggctgcaatgttacatgggaaaggacatcatccagttattcaaatgcagatgaaagtcaaaactatatggatcttaagtcccatgaaagactacaaatga

SEQ ID NO: 24123 - DNA, 750 bp, Zea mays
  Peptide Sequence Number=SeqID_67498
atggatttgaaacatgatgcagtcgctcagtctgtaccgtcgctgcagtgcagtgcaccacagttggaatccaagatggctccaggagcaaacggtgaagccgtgccactgtgccaggccggccaaaaagaagaatcggagcctcccgccacgccgccgcacgcgtccgtggcgacgtccgccccgacgcctgcctcgcgcaccgtctacagcgaccgcttcatccccagccacaccggttccaacctcgcgctcttcgacctcgccccctcgccctcctccgccgcctcgtcctcgcacgacggcggccccgcggcctcgtccggatctgcgcagcccgccgcgtcgccctactgcacgctcctccgcgccgcgctcttcggccctgacacgcccgactgcgtcgcgtcctcggccgccgcgtgctcctcgtcctcctccccggggccctcgcctgtcggcacccccgccatcgggaacatcttcagattcaaagacggagccggaacgccaagagggcgctttttttcgggagaccaagaggaggacgcactgttccccggcattttcaccaccacgggcgcgggagcaaggaaggtgccaaggtcgccgtacaaggtgctggatgcgcccgctttgcaggacgacttctacctcaaccttgtcgattggtcttcacataacgtccttgctgtcgggttgggcaattgcgtttacttgtggaatgatcaaatgtgtccagttcagtga

SEQ ID NO: 24124 - DNA, 1257 bp, Zea mays
  Peptide Sequence Number=SeqID_67499
atggcggcagtggtatccacagtgttgctcgtcaccggggtgactacattgctgcacatgtttgttggaacgagactgccacttgtgcagggtccatcctttgtatacctggctcctgcgcttgcgatcatcaactcaccagaattatttgggatcaatgataataattttaaacacataatgaagcacctgcagggagctataataattggaggtgcattccaagtgtttttgggatacacaggcctcatgtcactatttcttaggttgataaatccagttgttgtctcgccaacagtggcagctgttgggctttcatttttcagttatggtttcacgaaaattgggacatgtatagagatgggaattctgcagttattgatggtggttatttttgcactttacctccggaaaataaagctatttgggtacagagtgtttcttatttatgcgtggggaactccagttttttcctggaaaatgggccttgtgatgtgtgttgtatcagttattgcttctgttgattctgtcggttcctaccatgcatcgtctttgtttgtggctacccggccaccaacctctggagttgttagcagaggcattggtgttgagggtgtatctacagtcttggctggcctttgggggacaggagttggttctgcaacaataacagagaatgtacacacaattgctgtgactaaaatgggtagtcgacgagcagttggattcggtgctattttacttatactgctttctattgttggaaaagtcggtgcattcattgcttctattcctgatgttatggttgctgctctcctttgcttcatgtgggctatgctctgtgctcttggcttgtccaatcttcgttacagtgctactggaagctccagaaacagtattatagttgggctggctttattcttgtccctatcagttccttcttacttccagcagtacggtgtacatcctagcgcaaactcatcagtgccaacttactttcaaccatacgttgttgcatctcatggacctgttcacactggatcgggcggggtgaactatgtcctcaacacgatactttcactcaacatggccattgcgtttctggttgctctggtacttgacaacacagtccctggtggtcgtcaagagcggggattgtatgtatggtcagaagcagaggcagcgatgagagaatcgactttcatgaaagactatgaacttcctttcaagatcggacgcccgttcagatacgtttga

SEQ ID NO: 24125 - DNA, 781 bp, Zea mays
  Peptide Sequence Number=SeqID_67500
atggccgagccaccgccgtccacctccacctccgaccccgcgctccccaccactgctacaaccacctcgtcggtccccaagtcgtcgtctcgcccctcccccccgcccccggggcctcctcgatccgctcgcagcctccggcgctcccttcctcggcgagatgcctccgtttcagcgaccgcagggcgcgccggatcgccgccctaccagcctcggcctcggccatcgtcctgcacacacccggcaacaacagcaaagcgacccctcatccgtgcgtccggtggctccagttctcggccagggcgcctcggttctggtccggcgaggccgttgtcgccgtcgatgttcatggcgcagctcccgcagatgccctcgcggcagctgcggcggaaggaaatcgaccagccaacattgatacctcatatagctgaagcgaagtcacagaaatactcatatgaagttcttttcagaagcttgcagaaacttcttattgatactgccacttcagactgggcaagtggagcactcgatcctgaaggcgctgctgctcacaatagcttgacatcaatcaagaggggtgtctgggctatgattgcagccttccttgcctactgcacgcttcaggcaccttcaacgatacttattaggccccaccctgctgtctggcacctggtacatggactggctgtcgtttacctcgttgctcttatcttcctccttttccagaatcgtgacgatgctcgccagttcatgaaactccttcaccctgatcttggagttg

SEQ ID NO: 24126 - DNA, 420 bp, Zea mays
  Peptide Sequence Number=SeqID_67501
atggcgataggagcagcgtccggcgggaagggacgagtggctgatttgtggcagccggggaacggggagaacagcatgagctcttcacttctccagcaccgcagctcgaaaatcaaccgcggcagtgctgctactggctatacccagtgcgccgagccgaacgacttggagacttcagaatacgacgatacgataaataaatctctactacttactagtctctctgaagtttatacacatgcaataggaagagtatctacaaagaggcaatcaccaggcatctctactctacaccgtcagaactcaaaagatgataaagggtacatcaaaggagtgcccattaggagcaacctagagaactggtttgtcgcacatatgacgactccacacattatagaagaatgggaatacgttatctaa

SEQ ID NO: 24127 - DNA, 234 bp, Zea mays
  Peptide Sequence Number=SeqID_67502
atggatgccgcaaatgacgaagaagaaagatgggaaggagaaaagtatttttatggtggcaagctactgttggctacgacaaaattacaagatcctggcacctgcaggctttgtggttcaccacgccaatatgagctgcaattgatgtcttctttatctactttctccatgaagctggagacgactcctcaaattatgtacccagcagctggacttggctggctgtcatcatga

SEQ ID NO: 24128 - DNA, 138 bp, Zea mays
  Peptide Sequence Number=SeqID_67503
atggcggggattgcggagcagatgggtaggaggagaggattgcgcgacgagtgggcgggagcggcggttgcggagcggtcgcgcgcggggtttgcggtagttaacataaaaactattccccaacagttctctaaatga

SEQ ID NO: 24129 - DNA, 1587 bp, Zea mays
  Peptide Sequence Number=SeqID_67504
atggggatctgggtttttcagggcgtgtttggatcaccgccgctggcaccacgccacaccacacttcgcgcgccgcagttgtggcggccgaatcggccgcggcaccttaggcggggtgtggcgctggatgtcagcgtccaaacaggccctcagtcagtcattgatgtgcaccattttgatgccataaccaaatttgagttaatgatgattcagaccaccttggttgagcttgagatgatgtctgatgctattgatgaaacacttgacaaagatgaggcagaggaggaaacagaagagcttacaaaccaggcattgttatacaggctatctggggattacaatcctttgcatttagacccagatattgcacagcttgctgggtatgcctcatcagaatgctattctatcattgtatttatagtcatatttgacatcgaggaagtcaaagggccgttggggctggattttgccatcgcaacactgaactactgggtgcacaagggcattgccttcatctgcgagatcaggtgttgttttcaagtgcttcctcataaggaggttagtgagtacaagaagtccatcactgactgctcgaagctagctgtttacgcacatcttttccttccacatcgtgatccgagtcgtggagattttgaagatcttagacatcgccggcgagcgaagcctcatcgacaactttgtctgaagctaacacgagtgcattcaaggtgtctacttaaggatgatggcaaaggtgtcagagagccacttgatgaagtggtctgcatgatggtaccacactactctgcttggcccatctttttcaggtgcttttccttgttaatccctactactctatatgttcctattgtgggcgtccacaaccttcaccatgcctcagccaaccccacgcgcggtgcctccatcccgccatcaccggccaactatgcgcgccgcctacatcccaccatcattggccttccccaagcgccgaccttgcaccaagatgtccgcagtacaaagttcaacaactccgcagacaacaactataatcatcacaggagttgctcaaatcacatgttttggtcactgattcatgctattagtaaaacagaaactgcattaccagtacaaagttcacccacatttagtctgacaaaatcaagaacaaagttctcgcaccttttgggaaacagtcgttggatgcatactggtgctttggataaggttgcagttgttgtagctcatgaattagctcatcaatggtttggaaattttgtcacaatggaatggtggacacatatgtggcttaatgagggctttgcgacttgggtgtcttacttagctgcagatcagttctttcctgaatggaatgtttggactcagtttctagaggaatctacaataggtttcaagttggatgctcttgcaggttcacatccaattgaggcagcaaatattatcactttgtatgatgtttccaatatctggcgcattcctttgttgctacatgaacaaaaggctcatgaggctattcttaaagttctgaatctggaaaggacggacaaaaggctcatgaggctttga

SEQ ID NO: 24130 - DNA, 1002 bp, Zea mays
  Peptide Sequence Number=SeqID_67505
atggacgggaactcgcggtgggcgcgcgcgcgcgggctgccgtccgcagccgggcacgaggccgggcgccgcgcgctggaggaggtggtgcggctctcccgcgcctggggcgtccgcacgctcaccgccttcgccttctcccacgagaactggagccggcccaaggtggaggtggaattcttgatggggcagtttgagcgagcgatccgcgaaagcgtagctgaatttttgagagaaggaattcggctacgcgtaatcggcgactcctcaaggctgccggtttctcttcagaggaccgcgagagaagccgaggaggccacgcggaacaactcgcagctcgacctgacactggcaatcagctacagcgggcggagggacatagtgcaggcgtgccggaccctagcccagaaggtgcgcgacaagctgctcgagccggaggacatcgacgagtcgctgttcgccggtgagctcgagacgagccacgccaacggcaacgagctcccttatcccgacctggtcatcagaaccagcggcgaactgcggctgagcaacttcctgctgtggcagtcggcgtacgcggagctcttcttcacggacacgctgtggcccgacttcggagaggccgattacctccaagcgctggtctcgttccagagcagagacaggcggttcggcgtcggcctgcccgagcctagacaactcctaggatctctcctccccgacggggtccctcccgggagcgagatccaggcgccgccggcgatcttccgccgcccctgcgcacgcgcggaccgtccggccctgtgccgcagaccgtccgcgtctgaccagagagcacctccgcctcacgccaggtcgcggaccgtccggccctgtgccgcggaccgtccgcgtctgaccagagagcacctccgcctcacgccaggccgcggaccgtccggctctgtgccgcggaccgtccgcacctggccagagagcaccgccgctggttcttttgagtga

SEQ ID NO: 24131 - DNA, 453 bp, Zea mays
  Peptide Sequence Number=SeqID_67506
atggaaattccaaatgctagagcggttctccgtgtgagatgcccgaggtgccactgcgttctcgaggaggccggcgcccctgtgtaccagtgcggtggatgcggtgctagccttcaagtcacgcggcgccgccaccatagctccctgtggtcgcaccttcaggactccatcttccaccactccttcgacaccccgctctaccgcttcaacgtcccagaactccgagtcgacaccctcgactcgctccttgcccttagtgacgacctcgtcaagatcaaggacctcaagcacgccgaaggtgtcgagagcaggaccctcaccgtcgacggcgtccccgccgacaccgtcaagcacaatgaaatgcaaggtgcacagtccatgaggaacaatactgagaggcacaattctgcatttcaatttgttatattgataggacttgatcgtcttgcttga

SEQ ID NO: 24132 - DNA, 396 bp, Zea mays
  Peptide Sequence Number=SeqID_67507
atgggaatgggtttgcacgatgggaatgggtttagcctagccgcgacgggaaaaaagagacagaggctgtcacgtgggcccacatgtgcagggcgtgtgttgagtgtgcagatgggaatgggttttcacgagaggaatagctggaaggacgtcgaggggtcgctgtttgttgtcaggaggaactctgagtcccgctttcagtccattgtcatgaacacacacaacactgttttctatagatttacccagcaaaaactcccagcttggaagccagcaatgacacctggatttatagagaaagaaattaaggaactaaagttatggcatgatttcataggcggagttcctcatggacatcgtcaggaacgaagagatggcgctcatcgacaccgctag

SEQ ID NO: 24133 - DNA, 189 bp, Zea mays
  Peptide Sequence Number=SeqID_67508
atggccacccttatgtcccgctgccttctcgaccaccttgagggccaccagcgacttgacccacttgctcgaccacagcggtggagacggaggggatctggcgagcataggaaagaaacacacaatagcatagatcatcatttgaaggcaggtgtcccacaagactacgttccactatggatcaagtag

SEQ ID NO: 24134 - DNA, 675 bp, Zea mays
  Peptide Sequence Number=SeqID_67509
atggcgaaggtgaacctcctcccctcttgggatccggtaccaactctaaaagttctacactcagatgagacaggcgaggttaagcccgatgtaaaccaagaatgtttgcagcccctctcaaaaaggaaggaaagaccttacctgcagcaattaaaacgttacctgataaacctgcaggtgggatatattcttctttttgtgaggggctacaaacattctggtttgcagctggctgcaccaaatttttttctcatatgctcgactgctctctcacacacccagcaacacgggccagaaacaggccaggccgcaccgcacgggccggacgcctgggagaggcccgttctggtgctgggcgccaaccactccacacgtctggcactgaccacagtgcgcgcacgaggctgcagggctcggatcgctgtgcgcaccgtccggcctgacactgccagtgagacaccacggtccggtaggtgtagtgctgtactgtactcctaccagcgtactgctatgcttcacgtgtggaccgtacctgtgaacccgcttggtcggtcctcggtttctcggtggtctggtctggtctggtccctggactaccgactgattcgcggttgtcatttgactgacgcgacggagtctgcactgctgcatacagtaaagaatagctggaaatag

SEQ ID NO: 24135 - DNA, 444 bp, Zea mays
  Peptide Sequence Number=SeqID_67510
atggcctcacaacaatgttctccatgtttctttgaaaatgaatgcagcatgttcagtggttctgctagttctcagttgcttgtctctgtggttatcatcgctgatatggtacttttgcaacatctgaccccaattgaagaggagagatcaggacaccgggtgcaaccatgcagggagcaaagacagaaggcagggcggggcgctgtaggtcgccgccccagatcgaggaggaggagccgatggaggtgcttgtggtggctacggcggcgagttgaggaagtggatgcagttggtgctgcgccggagagccccattctcctacgtcgacggcgtagctgcgccgtctacagccgcaagatcttcggcttcgaccccggtcgtgcccgcacggcgaccacggtgcggtaccggtatagggttctcggcggcggggacgggtggtga

SEQ ID NO: 24136 - DNA, 417 bp, Zea mays
  Peptide Sequence Number=SeqID_67511
gcgactttcaacctcccccagtcccccagacccatcccgcgcaccatcgacgccaccttgttccccaccaccttcgtccaggccgacaccacctcgttcaagcaggtcgtccagatgctcactggcgccgagcagccggccaacaacgacgcgacgacgacagaggtagccgctaccgccaacggggccggcgcccaggcggcctgtgatgaccccaacgaggacgggagcgcagtcgcagcatcgcggtgcgagagcggagaggagcgagatcgagggcgagagtttggggcagcgagagcagaggataggagagggaaggaagagagcagatcctcacaggggagaaggcagcggggagggtcgtcgtcggggctgtgcgccgccgccgtgccggtcgtgtcgtccaggctttga

SEQ ID NO: 24137 - DNA, 163 bp, Zea mays
  Peptide Sequence Number=SeqID_67512
atggcgcaccggacagtccggtgcgccaccggtgcgccaccggtgcgccaacggtcgtttccaacggctagttctgaaagaaagccgttggactcatgggcgtacgggactgtgaacattccactgtccggtgcacccgggaaaatccggtgcgggtgtccag

SEQ ID NO: 24138 - DNA, 1035 bp, Zea mays
  Peptide Sequence Number=SeqID_67513
atgcatcgcgtccttccaccttccgagcccccggatggggagcactcgcgtcactttcctctcgctgtcgttggaggaacgcaacttcgcggaagttggtacctttcggccatcgctcggcttcaaggattttcatcaggcagcccggctgcatcccctcgacagtggtcacccaagacggtgaccactagcctgatggtggggagaagcaaatcgggctgtgacctctgccccgccctcagcttcaaggatcttcatcatcctggctggggcggaggccggacagagccggagctctacctcccgcgcgggttcgtgggtcaccttctccctcagcattcaagggagagggcgctcatcgacctagcgggagcgttggacttcgacaacgtggggccggtcggcggcgagcgtcgtcagcttcagtgcgttgggctcactggctcagctggctcggctcccggtgccccctcccgccgcgagagcggttgtcgcgctgcgtgcaccggaggaccgcccaagacgtcgcgtgctgctagggcggcgttcgtgttcttgggttgtcctgcctttgctccgatggcttccgtcgccggcgctgaggtggtggcggctgaagaagtcctcgtcgccgacgggatccccgccaccatccgcgctccgggcctccggctctttggctttgatagcttgtcctcgcccctcgagtggggacgtgggcgaggggctcattgcagcagcgtccgccctgaggtcatcgctgttgctgtttggccacctagagcggaggtcgttgtcactgctgccggagcgggcgtcggcgagccacctgggatttcgtcgccccgcaggccctccaatgtggggggttgttcatacctgcgggggcggaaccggagttccgtttgtaatggcaccttgagtgccggtgtttgttcattgtggctgtcggggcctgaacatctaggtatttttggtgtaataccatactttttcctcatttcgagcactaggactcgcttgtcggctaactga

SEQ ID NO: 24139 - DNA, 540 bp, Zea mays
  Peptide Sequence Number=SeqID_67514
atggccgccgccggcagctacgcagccctgtcctcctgcctcctggcgctcgccctgctggccgccaccgcgtcggcgcaggagaaggagacgcacctgcgcgtgttctggcacgacgtggtgaccgggggcccgaacgtgtccacgatagtccaggtggccgaggccccctcgtccaacgcctccgccacgggcttcggcaccgtcatcgtcatcgacgacccgctcaccgagggccccaacctgacgacctccaggctggtcggccgcgcgcagggcatgtacgtgagcgccggcagggactcgctgtcgctgatgatggccatgaactttgtcttcgtcgacggcgcctacaacggcagcagcctcgccatcctgggcgccaaccccgccgagcggaccgtccgggagatgcccgtggtcggcggcaccggcgtgttccgcttcgccagagggtattgccaggcgcgcacgcagtggatcgacaacaggaccggcgacgccatcgtcgagtacaacctccacgtccgccacgactga

SEQ ID NO: 24140 - DNA, 543 bp, Zea mays
  Peptide Sequence Number=SeqID_67515
atggcgtaccagccgccgggatactcgcgggcgtgggctgctcccggctcctgcggcgactactcaaccaggagccgcttggggataagaccactcccctgctacctcgcgccaacatattccagtcgccatcgccggtggagaacctccatccattttatccaccgtgttcggtcagtaccgccgccgcgtagtcaagcgaccgtcgagccatcatcgacagtgggtcacccggggatgtcctcgagggccgaggagtctatcgatcgcgctgggaaacaccaggccggtctcaccgatgtccaattcttcgccggacttgggctatcgccaccaagccgccattcgccgtggccagcaacaaccagacaccaatccacggtaaggagtactccatccagttcgccttggtttcccatgcatgctgcgctagtcggggttgggtttggggctcgtatcaccttgcgaccatccctggcggggagcgccgtcgcggcattggtcatcgtggtggtgggcgccgccgtgctcaatccctggtga

SEQ ID NO: 24141 - DNA, 234 bp, Zea mays
  Peptide Sequence Number=SeqID_67516
atgccgagaaatatggtaaattgtggacatatcccctcacgcgacctgagacgtggtctcccattctggttatggtgggtacaagtgcggtcaatgcacgacggccagtcggggtcagtgaggcattgttctttggaggaaatggttgctggagtgacttggctgtccatcttgccaccgggttggactgtcgagtgggaccccgcctcggctgaggaggagcatgaggagtga

SEQ ID NO: 24142 - DNA, 636 bp, Zea mays
  Peptide Sequence Number=SeqID_67517
atgtcttcgcgctcccttatgcatcgtgtccttccaccttccaagcccccggatgggggattcccgccgtcttttcgcttcgtcgttggaggaacgcaactccgcgggagttggtacctttcagccatcgttcggcttcaaggattttcatcagccagcccggctgtacccctccgccggcggtcacccgagacggtgaccaccagcccctgggtggggagaagcaagccgggctgcgatcttggtcccaccctcagcttcaaggatgttcatcatcctcgctggggtggaggccgggctgagccggagctctacctcccgcgcgggtccgtgggtcggcctctcctgcggcgttcgagggagagggcgcccactggctctgcgggcgggtcggacttcgacaacgcggggctggtcgacggcgggcgtcgtcagcctcagcgcgtcggatgcgtcagcttggctcccggtgccccctcctgccggaaggcggctgctgcgtcgtgtgcacgggaggaccgcccaagatgtcgcgcactgctagggcggcgttcgtgttctggggcgatcctccctttgcactggtacggcgcctctgcgcggaggtcggtgccccactcgtccgggaggatctga

SEQ ID NO: 24143 - DNA, 753 bp, Zea mays
  Peptide Sequence Number=SeqID_67518
atgcacaggcagcggcagctccaaagtctgtcaacggcggtggtaaatttcgatccgatcagctggggagcttcactagagattggggatgctgctggtgcaaggaatcaggcggctgtgtactgggttgcgctagccatgttcaccggtgggcgggtgaagtccggcgagtggtggtacgcccctggaggggagtacagagtgagggggctagtcagggagcttcaccgtgacttagggaagtgggcgcaccctcggctcgcccgaagcccagctcgggcaggcttcgctggaagcaaccttggccaaatcgcctcaccaaccgaccgtatcgcaggcgcattcaatgcgaagatcgccttgacaccttatcctgacacgcgcaccgcagtcggcaaggtcaaagtgaccgcagtcacttcaccccctttcactgaccgatctgacaggaaaacagcaccgcttgcccccgctccgactgctgtgccaaccacccgggtaaggctgacaacatccgagttcagcctcgggcgcaacaggaaagctccgcctcgctcgacctttagggctcggcctcgggagaaggtctccgcctcgcccgaccccaggactcggcctaagtcttggcctcgagaggaatcgcgtcctcgctcgaccccggcctcggcattaggagaagtcttcgcctcacccaaccttgggctcggaccgaccgcgccacaggggatacatcattactctaaccctagctag

SEQ ID NO: 24144 - DNA, 627 bp, Zea mays
  Peptide Sequence Number=SeqID_67519
atgcaggggcactccgtccccacacacatcaactgtccccatcgattccccgtcagcagatcagggctcaccgccttggcgtacaatgcctcactgaccccgactggccgtcgtgcagtgaccgcacttgtacccaccataaccggaatgggagaccacgtctcaggtcgcgtgaggggatatgtccactgccaggtcctctggtggaggctctggtgctgggtccggggctacctcctgagcagctccttgctccggcacgaggatgtactctccgtcagcaagggagactctggcggtcacagcgaggtgcggctcgacggcggggatggccggaatcgcccggtccacgagcgcaggcgggtgttctcgtcggcagcgagtgtaccggccaaaccacggcgatctggttcaatccgagggcacggtgagctttacgggagggttggattgggctggggcaagctggactggccggtctacggcggcagtggctcgggtggccgcggacacgctgcgcacgggcaaacggcggtgaactggactccggtgaggcttgagcgtgcgcggaagagtgacataggtggatttgatgccagcttcgaggtgaacacaactgatctttag

SEQ ID NO: 24145 - DNA, 324 bp, Zea mays
  Peptide Sequence Number=SeqID_67520
atgtcctataccaaaaatgtggcataccacccaaggcacccactggaaaaagctgagcccgagacatggacatttgacatgccttggcatggtttttgtcgcgaggtgggcagtgtgacacacccgatttggctaccagagatctccctgcctaggccatatctgccatggcgtctcacagactgtaaccttgctgacggaaagtacgtcctcgtgccggagcaaggagctgctcaggaggtagccccggacccagcaccagagcctgcaccagaggacctgcctgccactgctttggaaggcaagccccggttttatgcataa

SEQ ID NO: 24146 - DNA, 666 bp, Zea mays
  Peptide Sequence Number=SeqID_67521
atggggtcgggcgaggcggaagtcgttcggccgaggccagggcggagtccgagccctggggtcgggcgaggcggaagtcgttcggccgaggccagggcggagtccgagccctggggtcgggcgaggcggagttcgttcggccgaggccagggcggagtggagttcgccgtcttccgggtcttagcccgagtccgagccctggggtcgggcggagcggagttcgccatcttccgggtcttagcccgagtccgagccctggggtcgggcggagcggagttcgccgtcttccgggtcttagcccgagtccgagccctggggtcgggcggagcggagttcgccgtcttccgggtcttagcccgagtccgagccctggggtcgggcggagcggagttcgccgtcttccgggtcttagcccgagtccgagccctggggtcgggcggagcggagttcgccgtggcgcctttggcaaggcctgactgcctgtcagactcactctgtcgagtggcaccgcagtcggagtggcgcaggcggcgctgtccttctgtcagactgctttatgctgatgggggttaccagctgagaattaggcgtcttgagggtacccctaattatggtccccgacagttatcaaatgggatcaagattagaaagtttctttctaattag

SEQ ID NO: 24147 - DNA, 165 bp, Zea mays
  Peptide Sequence Number=SeqID_67522
atggcggcgggcctggcctgccgctacgactctgcgagacgtcggagacgggtggggcccatcattccggggggcccggggcgaccgccccgcgcaccccccctcagggccgtcgctggctgcaccggcggccaagaagagtcgccgccgcccgcgctcccatag

SEQ ID NO: 24148 - DNA, 222 bp, Zea mays
  Peptide Sequence Number=SeqID_67523
atggcgagagtagcttgtaccctccgtggcaagagactggaaggtggggtgctgtactctcggaaacatggcgggtaccatggcgagagtaacgtgtaccaaccaggccaacgactggaaggtggggtgttgtactctcggaaacatggcgggcaccatggttataattttgttctgttgtggatggtgctaagtgccggtgggctcggtcttcttatataa

SEQ ID NO: 24149 - DNA, 570 bp, Zea mays
  Peptide Sequence Number=SeqID_67524
atgggtgttgggtcacaaccttatcctgctgctgctccctatgtgccagtacctggatctcttgctgttcctcctggctcacacccagcagcagcattccccaatccaactcaactcagtgctcagcccaggatggggtcccaccgggttcagcaatttattcaacaactcaagaaacagcggacgacagcatgcgaggtattcatattagagctgacattgaggtcatggatgcacacagaggagaacaagcgccggaccttgcagaagaacgacattgcagctgccatcaccaggactgatatatatgacttcctggtggacataatcccgagggatgaaatgaaagaggaggggctcggacataatcccatagttggcctgccgcctgctatgggggctccagctgatcatggttctcatccatattactatgtgccagctcagcaggtgcaaggagcaggtatgatgtatggtggccagcagggtcacccagtgacttatatgtggcagacgccgcaagggcaagcggcagagccccccgaagaggagcagcagcagtctgcctga

SEQ ID NO: 24150 - DNA, 492 bp, Zea mays
  Peptide Sequence Number=SeqID_67525
atggattacccagcaaaaggagacaaacactccaaaccgaggcaaggaagcgctgcggactgccgtctcgattgctccgtcctcaagagagaacgagaaggagcgcaccgctgcacccacacctttcttcccagacatcctcttcattcaagggagacaggaatcgtcacctatctccgacgacgaaccaattgtgctggggaagagcctcccagcgcgatgcacgacgacggcgaaacaggcgtcaaaatgtacgacgacaccacgaggctggagagtgagatctggctcagcccgtctctcgggacgaagcttcgaaaatgggggagacccctgacgaaagaacgcatcgataacgacgcaactcccaccgccgcgattgtcgccaagctcaagagcgcaagcgggtgcaagcagaacaagacgccagtctccggcgagagaacccgatcctcacccagaacctataccctgactttgctcgggcactaa

SEQ ID NO: 24151 - DNA, 561 bp, Zea mays
  Peptide Sequence Number=SeqID_67526
atgtctgggaagaaaggtgtgggtgcagcggtgcgctccttctcgttctctcttgaggacggagcaatcgagacggcagtccgcagcgcttccttgcctcggtttggagtgtttgtctccttttgctgggtaatccatgtccactccttagtggacgaggtggacaatggagttcatcgagttggggaggccatgattgaccgaccttctaccctctgggggatcctgagcttagcctcgcgcgggaccatgcttcgtcgcgccattggcggggtttttgttggcgcggttcatggtttcgctgcagctccttttggcgaccccaagggagatttcctctcgggtgaagttgctatgcgatgcagagtcccctcgacatctgccatgcaggagatggtcccgaaacagaagactactcctgggctaaaggtgatcatgcttttgaaaacgacggccatggagccagcgttgatcgacgacgcacctcctacctggcgcgccagctgtcggtgttttgtgttcgacagcacccggggttaccctcgtgatgcttttgggtag

SEQ ID NO: 24152 - DNA, 285 bp, Zea mays
  Peptide Sequence Number=SeqID_67527
atggccatcaactctattgatatcatcaagttcgcttcaggaaagataatccactttggatctatctcgttcacggcgatctccgttgactggctgcgcaacgtgggggacacagctgttgcatgtgaatcaagagcaaaaggtgcaacgtgttgtgcctgtgagataaaaccagatcgggacaaacaagtggtgactcgccgttcaagattggcaatcgaaatcagggattacaaggatcgaggccagcgccacaagatttttccatctacagcaagagtctga

SEQ ID NO: 24153 - DNA, 456 bp, Zea mays
  Peptide Sequence Number=SeqID_67528
atgggcaagagcaagaaaggtagcggttcttcacaccgttctggcgacaaacgcaagcgcgagccgactcctccctcagaggactttggcgattcggagtactcagaggaggagttctcctccaagtccgagggctctccggctcccgcctctcccccagcgtcgtctgatgattcagacgactctcaggggattgccgcggaggtctggacttacattcgggccgtcgagcgctccgggcttgagggctcggatgagtcggagtattcctcggacgaggaggactcctcggactcgtccgaagagggcagcggcgatggtggagacagcgacgacgacgaaggcgacggtgacggcggcgacgacagcggcaggggcggtgacggcggcgacgagggtggcagtggcggcagcagcaagggcagcagcaagggcagcaacaaggccagtggctag

SEQ ID NO: 24154 - DNA, 264 bp, Zea mays
  Peptide Sequence Number=SeqID_67529
atgcagtacaaggaatcaagcagtctcattagctacgagaagcagacgattcgaatcgagtttttaaaccttgcaaggcctcaccgccttggcatacaatgctccactgaccccgactgccgtcgtgcagtggtcgcacttgtacccaccatagctagcatgggagaccctgtctcaggtcgcatgagggataaagtccacgcccggcttcactcagggcagaaggggtactttgaactacaactattatttaatagtgggtaa

SEQ ID NO: 24155 - DNA, 318 bp, Zea mays
  Peptide Sequence Number=SeqID_67530
atgtcgaaatcacaattggatgctcatcaaacgcctggctcgacagcgcactggctggcagtcctggcactagtgctcgcctccgatgacctcttgcgcttgccagctgcgccatggccagcggccgacgtcgaggcaggcgggtctatccgccggatcttctatgtggcagaacctcccaagttattgggtccacatgcacctatccttgttttaaggatctcaggctatgcatgtgcaccaaacaacttaacaggatctgtccgaatgtcccaaggacctcggataaaccacttaccgccaagatcgcaggattaa

SEQ ID NO: 24156 - DNA, 507 bp, Zea mays
  Peptide Sequence Number=SeqID_67531
atggcgctccacgagctctatgacgacggcggcccccagctctcttacggcagcaggacaacgctccgccgcaccaccgatagccacgacatcacgccagcaggatgcccagatctctccggctgccacatcggcatggccttctcagagaaggttggccgcgcgggaccgaggacgggacaggcgctctcttggggccgctcgcttccctcacccgcgtggacgcttgtaacccccctactgcaagcgcacctgacctgggcgcgggacgaacacgaaggccgcgggacttccacctctctcacgctcggctccggccgcctcgcctctcccccctccgcgctcgcccacgcgctcgacccatctgggctggggcacgcagcacactcactcgtcggcttagggacccccctgtctcgaaacgccgacaagtctagtttaggtttagcctctcgatccccaaattctccgcctctcctcgacactacgtcgattagaggagtctag

SEQ ID NO: 24157 - DNA, 510 bp, Zea mays
  Peptide Sequence Number=SeqID_67532
atggcgtgttcggtccgagcccaaggtcgggcgaggcgaagactcctcctgaggtcgaggccggggtcgggtgaggacgcgattccctccgaggtcgaggttgaggccgagccctggggtcgggcgatgcggagaccatcttccgaggccgaggttgaggccgagccctggggttgggcgaggcggagaccaccttctgaggccgaggcaggggccgagccctggggtcgggcgaggcgaagacctcctcctgagaccgaggcccaaggtcgggcgaggcggagcttcctgttgcgcctgaggctaaacttagccgttgtcaggctcaccctagcgggtggcatagcagtcggagaggggcgagcgacgctgttttcctgtcagatatcgctggtcatttgtgagaatgaagttgttattatgcttgtgatatacaagtatgcctatgttgttttcaccatgtttttcatggttgagttttattacaataatattattatatatgcttga

SEQ ID NO: 24158 - DNA, 303 bp, Zea mays
  Peptide Sequence Number=SeqID_67533
atggacccttaccttggcgtagtcattattggcgccgaggttacacgtcttgacgccaatataaatggcgctgaagtacctgctcaccgtgcagatgtggcgcttacgtggccagagctcggcgccatgagcattggtgccgacctcgtttttatgccaacacaacgaccgacatgcatacaagcaataaaaaggatcaagcaaggctccacatttttcgccccaatggtggcatatgctgatatgcgtgcaagcatatgcatctataggctacggcgggctcgaattataaaggttcagtag

SEQ ID NO: 24159 - DNA, 459 bp, Zea mays
  Peptide Sequence Number=SeqID_67534
atggagaccagcgacgggcgctcaacgccactgcgccgcctgcgaacccatggtgagaagtgtggtctcaatctagagccgaaggacttccccaacaccccttcctccattggcgcgacctcggccagctcatctgcgacgacgaggtatcttcgaccgacttctcgacaccccatcctccatcaatgcggctccagtaccccttcctccatcggcgcggcagcatccagttcatctgcgacgacaaggcgtcttcgaccaaccacgccctactacaagtggtgtcagtccatctcagataagtggaatgtcgttggcattgagaagcacatacatagtggcttacgctgcatgtactcgtgcaaatctggtggcaatagtcgggcagaagaggatggtcaggatgaatttgagaaggatgacttcatagtggacgacgaggaagaagtggaagaatag

SEQ ID NO: 24160 - DNA, 591 bp, Zea mays
  Peptide Sequence Number=SeqID_67535
atggctatttgtaggtcaggccgtgtgtatgtcgtcgacacagcgacagacccaagggcgccatccttgcataaggtggttgagtccgaggacattgctgagaatactgggcttgggttccctcacacgtctcattgccttgcgtctggcgacattatgatttcttgccttggggacaaggaggggaatgcagctggcaatggcttcctgctgttggattcagagtttaatgtcaaaggacgaggcggcagcgaccccgacgcgtacgctgtggtgctcaagaggaagctcgacctgtactatgccgtcgtcgccaaatttggctcagtggtgacatcagctgaggcacaaaagcggttgcggctgtcataccctttccctgagctcgcttcgtttgggagactggaggggcagcagcaagagaatgaggagattggcacgcttgtctggggtgatacagatttatctgacccgcagatgtttgtctcactcatcaccccaccatttccgaccatgtgtcatctgttcttgactggtggacatgagttgcaaaagtgcacatcaatgtacaatttcatacttgagccttga

SEQ ID NO: 24161 - DNA, 444 bp, Zea mays
  Peptide Sequence Number=SeqID_67536
atggcccgcgcccgcgcttataaaaccctcccagacttagattgtacccttccgcgcaccctcaagcctcaccggagtctagctcgtcgccgtttgcccgtgcgcagcgagtccgcggccgcccaatccctctgccaccgtagaccggccagtggagccattctcaactccggccagccctcggagaagactgtgcacacctccgtgaggctccccgagcgaggaatcggagtttgcttcgccggagaggccagtccgcgctcgccggagctctcaacccccgccggagtacgtggaccggactgtaatcttgctgacggagagtgcatcctcgtgccggagcaaggagctgctcaggaggtagccccagacccagcacccgagcctgcaccagaggacctaccagccactgctttggaaggcaagccccggttttatgcataa

SEQ ID NO: 24162 - DNA, 513 bp, Zea mays
  Peptide Sequence Number=SeqID_67537
atggaagaaacacacctccacgtgttcgacgccttctgcccgcgccagagcacgctcacgcgcgcccccgcatgcccagcgccgcgcccgagccaagccagcgccatggcccgcgcccgcgcttataaaaccctcccagacttagattgtacccttccgcgcaccctcaagcctcaccggagtctagctcgtcgccgtttgcccgtgcgcagcgagtccgcggccgcccaatccctctgccaccgtagaccggccagtggagccattcccaactccggccagccctcggagaagactgtgcacacctccgtgaggctccccgagcgaggaatcggagtttgcttcgccggagaggccagtccgcgctcgccggagctctcaacccccgccggagtacgtggaccgggttctctggaggaaatggttgctggaataacttggtcgtccaccttgccaccgggttggactgtcgagtgggaccctgcctcggctgaggaggagcatgaggagtga

SEQ ID NO: 24163 - DNA, 150 bp, Zea mays
  Peptide Sequence Number=SeqID_67538
atgggagaccacgtctcaggtcgcgtgaggggtaaagtctgcgggcaggttcactcagacaaccaatccccatggattgttgcccacaaccaacatcagtacgatatgaaagtgggtacaatcaatgtcctgacctcgcgcgagtgctag

SEQ ID NO: 24164 - DNA, 411 bp, Zea mays
  Peptide Sequence Number=SeqID_67539
atgacggcgcctcctgttgacgtgactggtctgcgccctaggttgggcgatgtggaagctcctccgaagccgaggtcgaatctgtcttccgtggccgaggtcgagtccgagcccctggttcgggcgaggcggagtccgagccctggggtcaggcgaagcggagttcgtcgtcttttgggggctgagcccgagttcgagccctggggtcgggcgaagcggagttcgtcgtcttctggggctgagctcgagtccgagccctgggtcgggcggagcggagttcgccgtcttccggggcttagcccgagtccgagccctgggtcgggcggagtggagttcgccgtcttctggggcttagcccgagtccgagccctgggtcgggcggagcggagttcgccgtcttctggggcttag

SEQ ID NO: 24165 - DNA, 351 bp, Zea mays
  Peptide Sequence Number=SeqID_67540
atggagaggagcagggccggcggaggtacgacccaagctcgagcagagggggagctcggcctagagctgggcggcatcaatggagaagaaactcatgcgcacagctgtggtcgagcagaagaggggcgctggcttcttgctagccgagcagaggcatcggggcctgggcgttccctggccacgggctgggaagagcagggggaggcggtcgctgtgcagatgaggttggccatgggcaacggtgagctcactgctcgagctaggggccggtccggccatggcagggcccctgccggcaaccccgcgcacaagcagagaaagccgcggccaaggggagtgaaagagaattag

SEQ ID NO: 24166 - DNA, 315 bp, Zea mays
  Peptide Sequence Number=SeqID_67541
atggtggatgctcgacacccgtgctccattccccctgcttgcgtgctgcggcgcagtgccccgtggtgctgctgggtgctcgacaaaatgcgcagcaagccacgcgctacagcagcatcgattaggtttgtttgtgcatttgagaacaagtccccaacattggcgcccacctccggtgaactcacttccactgttgagctaatggcttcgttcaacaatcaagctgaagttgcttcggctacgatgctggtgatcctgataacatgtggttcatgctcagaacaggccaacaagaagcagaagaaggaggcttag

SEQ ID NO: 24167 - DNA, 726 bp, Zea mays
  Peptide Sequence Number=SeqID_67542
atgtccctcgtgagggagatttgttgccgttcctgtggcgcccgcggcgagccagcagcagcagtcaacctcgacagtatgctggtctcctgtgctaactacatcactgggctggcgaccttcggagaccacttcagcagcgagcacaaggcgaaattcctgtcagcgatggcggtcgtgctgagcagcggctccggtttctgcgtctccaacctcttcccgtcgatgcggttcctggacgtcgccaccgagatgcgacgccgcctgcaggtggcgcatgagcagctcgaccaggtgctggaccatatcatcgaggcgtgcgaggcgaggcagaaggtcaagaatgctgaggcggcggaagacgacgatattctgagcaccatgcttagaatcaaagatgaggaggagttcgacttcccgctcaacataacacacatcaaggcagtcatcattgatttattcataggaggcaccgagacgacttcgtctgtggctgagtgggtcatgtccgagttcatgaggaacccggaagccatggccaagccccaagcagaggttcagcgagcactcgacagcaagaacccaggcgactacgagtcgctcatgggctgcctgagctacaccggcatggtgatcaaggagacgatgaggctgcacccgtcgctcccgctcctgcttccccgcctctgcagctatagccatgtggggggaatgatagtcaaatga

SEQ ID NO: 24168 - DNA, 237 bp, Zea mays
  Peptide Sequence Number=SeqID_67543
atggctcaccggagttactccggctcgcccgaggctttctcaccgccgttcttccctctctgcccgtggattcgtggcctcttccccgccattgagttcgctgtggcaccctcttcctctctgcccaactccggcgaccccggagcaaccctagctcgcgccagcctcaactccggcgacttcaccgccgtggagaggagcggcgccgcccgcagccgtttgtttcccatggtctga

SEQ ID NO: 24169 - DNA, 297 bp, Zea mays
  Peptide Sequence Number=SeqID_67544
atggctcaccggagttactccggcccgcccaatgctttctcgtcgccgttctcccctctctgcctgtggattcgtggcctcttccccgccattgagttcgccatggcgccctcttcctctctgcccaactctggcgaccccagagccaccctagctcatgtcagcctcaactctggcgacttcaccaccgcggagaggagcggcgccgcccgcagccgtctgtttcccatgtgctcaggaggtgatgctggcaacatggacaactttgaggagttccaggaatatgacgagttctag

SEQ ID NO: 24170 - DNA, 696 bp, Zea mays
  Peptide Sequence Number=SeqID_67545
atgtccgtagtgcatacagtattgatatcctgcgctgcttcctcggcggcgcgtctcatccacaataaatgcaaagaccgcgcggcccagaggccttacgtcaggctccacccgctggcttacatcacgggcagcgtgccacatgtcagcatcggggctccgcctgagcggggagcagaagcgtacgcggtatggctcgaacacatgtcagctccggacccccgcctggccttgattaaggcctgggtattctttgtaccagaatcccgggacctgctgagggtggcctggaccccccacacagagaggtccgggacccgtcccgggggtccggtcagtacccgtggaggtcctgggccctgcccggaggtctggtccgtatatgcaggggtctggcactttcctatggggctctggactcctgccgacaccttggagtgtatcatcttcttcggccacgtggcggccccggagccgtccgcgtggtggggtcgggtgttgttcgccatgcgactagagacagccacgtggacaccacgccttcatgctgtgaattatgaatatggagcacagccaggacgaagcctgaaccagacgaaggtcgagtgtagccgaagctgtgcgcaggaaagcttcggcgcgatggcagaagggggaaccgacttaaagatgaaaagacttcggggtcctcaatag

SEQ ID NO: 24171 - DNA, 528 bp, Zea mays
  Peptide Sequence Number=SeqID_67546
atggctgaaaggtaccaactcccgtggagttgcgttcctccaacgacgaggcggaaagacggcgggtatcccccatccggaggcttggaaggtggaaagacacgatgcataggggagcgcgaagacatggtcgccttccaagagggtcaccctccttttaaaggcgactctccctacttgcgtccccagctgtcgtgggctgagtcttctccaacacgctccaaggtcctcccctacggcgcgggggctgggtcccacacgtcatgcaagccggcccagagcagaagaagccaaactgccggaccgggaaagggggataccccgaaaaggatccttccccgtgaaggaaccaggctccgagcctccctactgatcagaggttcgaaggctggcccctcggaagggtccaacagccgcctcagagcatgtgggctcacacacccactactggtcagaggttcgaaggccggcccctcggaagggttcaacggccgcctcaggctactcgggctccgcgcccactactga

SEQ ID NO: 24172 - DNA, 261 bp, Zea mays
  Peptide Sequence Number=SeqID_67547
atggccatgatgggttcaacatctggaaaagacgtacctctgccagaagagagtctcggtgtagtgtctctgtctgagtcgattaaggaccatgtcgatataggcctgctgatcgaggaccctttaactggtcacatgcctcgtcatggaataaaggtaagtttatgtaaccgcttccgcattttcgtatctccgatgatctgtaatgtctgcgtgacgggtgaaacgctcttgggaaaggttttggtgcatggtagttga

SEQ ID NO: 24173 - DNA, 243 bp, Zea mays
  Peptide Sequence Number=SeqID_67548
atggcggatacattgagcatgcaaatgatactatcatttgtatcaaatattacttggaaagagctgcatttgaagctaagtttgtatttgtatgaattattgtcaggcttaaaaattaatttcatgagaagcgatattttcgtgatcaatgggacttgcgacaccgctgctcaatatgctgatttatttgactgccgaattggcgttttccccatgaaatatcttagttcatgcgagacctag

SEQ ID NO: 24174 - DNA, 2817 bp, Zea mays
  Peptide Sequence Number=SeqID_67549
atgggccccccactcgtcatattctttgggctgatgatagacatggtgtctgctgttgaagagcttagtgggttaagctctaaagaacttaatgagatgctgaaggagtcagacaactttgttttgcagtccaaggcagaaggcggaggtccaaagcagacacttgtggacatggaaaaactcgtgtcctcgcttcctcttcatctcattgctgtatgtttggagcttcggcaaggccccgatttgacatatgtgcttcgtggcatgcgctttttgcatagtttgtctgacctagcatcccgccatactagactggagcaggttcttcttgatgatgtcaaattatctgaacaagtcatggatctgatattcttcttactttctattcttgctgaacagaagaaggagaataatgttggcgcttctccgcttgtgcatgcgtcacttgtagcagctagtcttcatctgctaacaagttacttctcttcccagtggcatgaacttgtccatattctgcttgcacatccaaaggttgatatctttgtggatgtggcctttgatagtttgcatgaagatgtgaggctgttaaatatcagattatcatcaatggacttcggtatctttcctgttggttctttggaatctcgtcttgctcacttcatctgccaacagtgtgaagcatcattgcaatttctcttgttgttgtgccagcaaaagctgtttcgagatcggattttaagaaataaggaactctctagaaatggaggcatactgtcactttctcacactatactgaagttagctgtccctgaatgtttgaagcaatcaaccgatcttgttgcttctatttccaggctcaaggcaaagatactttctattctgctgcaactttgtgaggctgaaagtgtctcttacctcgatgaagttgccactaattcaaacagcatgcggctagggcaaaccttggctctagaggttcttaatttgctgaagattgcatttggaaagaaaaaatacattacttctgattctcatgataaggttaagatttaccccatgggatctatgcttatcagtgcattgcgtcttgttgacgtcttctctgatgattcaaacttcagatcatcctttttgactaacactgttccgtttttaacccagattctagcaactcctcacggtgaatttgtttctagttggtgctctgtcaacttaccagcaattgaggaagatgcaagtctagattatgatccttttgttgcatctgaggtggcactgttagcttctaataatgtgttgactgaagctaaagctgactattcatgcccttttcgccctagcctgccttcagtggcatatgcacagacaagaacatcatgcgtagtgaaaataatagcaaatttgcatgtttttattccaaacatatgtgaagagcaagaaagggatctttttcttcagaactttcaaaagtacttggtgtctgggagttctaaactgtcagcagaccagccagcttctagtgattttgatgccactaaagtctgtagaaacttaggatctttgtctgattatgctaaaacattggttcctaatttgttaaatggggaagacttgttgttattaagtgatttttctgataagctacaatcttggtgtaaatcacaagttgcagtaaaggtggtacaaaatgatattccaccagaaagcatggaggacatgcacccaatgcagcagcccttgccaacacgggcaagcactccggactccaaaatgaataactttccaaaggatgtgcagaacatggaagtgtctgcaccaatacccccaataaatcgggaaggaaatgataaggatgagactccaaagaacacagtctctagaaatggtggtttcctacagaatgcagttggtcaagacctagtccatcttggcgttgcaagaacagccagtggtggctcttcggccgtcacttccgttgttagcactggacaccagcgcagcaaaatggatcttgatccagcttccggtagcgtggacaatttcaaaacaccagaactcacaaaagaaaatggtctccagggggatgacaaaggagaaagtagtgtgtatgatgagaggcaacctaagagaaggaagcggaacattatgaatagtgagcaaatagatgaattagagaaggctctagtagatgagcctgagatgcacaggaaccctgttctattgcagggttggtcagagaagctaagtctgcagggcccagagatcacatcatcacaacttaaaaactggctgaacaatcggaaagctaagcttgctcgcattgcaaaagaaagagggacatttgagggagataatgctgataagccatctacccctcatcccggcgagtcttccgaaagtgctggggaggacaactatataccccctgcaagggtgatgactgctccatccaaaggcagactggtgagcccggacggcaatgagaaaacatcgcaggcagagctatcccccaacacgatgctgatccgcccattcacgagatccttctcactggagcccggtcggctcgtttcactagttgacagcgacgggaaggaggttggcaggggcaagatattccaagcgccagggaagagcccagccccagtggagagccgcatctgcacggttgatgtcaccgagctcaggaccgagaagtggagggagctcccacacccttctgaggcatctgggaggaccttccaggaggcggaggcgaggaatggtggaatcatgagggtctcttgggactccggcaggctgttgcctgtagtgtag

SEQ ID NO: 24175 - DNA, 1533 bp, Zea mays
  Peptide Sequence Number=SeqID_67550
atggggctgggggctgcgatggcgctggcgctgggcgacccgccagcggactacgcctccatcgcggcggtggggctgttcgtggcgctcatgtgcgtctgcatcgtcgtcgggcacctcctcgaggagaaccgctggatgaacgagtccatcaccgcgctcttcatcgggctgggaactggagcggtcatcctgttcgcgtcgagcgggaagcattcgcgcgtgctggtgttcagcgaggacctcttctttatttacctgctgccgccgatcatattcaatgcagggttccaagtgaagaagaaacagttctttcgaaacttcattactattacactgtttggtgcagttggcaccttgatctcttttactgtaatatcccttggcgctctaggactaatatcaaggcttaatatcggcgcacttgaactgggagactatcttgcacttggggcaatattctcggccacagactcggtttgcaccttgcaggtgttaagccaagatgagacaccattcttgtacagcctcgtgtttggtgaaggtgttgtcaatgacgcaacttctgttgtgttgttcaatgcaatccagaactttgatcctggaaatatcagcagtgccaaattactgaacttcattggcagtttcctttatctgttcggctccagcaccattcttggagtagcttctggacttcttagtgcttataccattaagaagttgtacttcggcaggcattcaaccgatcgtgaagtttccattatgatgctaatggcttatttatcttacatgctagctgaattgctcgatttgagtggcattctcactgtgtttttctgcggtatcgtaatgtcacactatacttggcacaatgtaacagaaagttcgagggtcacaaccaacccggtaaagtctatcgctttgagcagcaccattttagccttggtgctggtttcaagagctgcttttgttttcccactatcctttgtatcaaatttgaccaaaaaaactccaaatggaaagatatcttttaggcagcaggttattgtttggtgggcgggtctcatgagaggtgctgtgtctattgcgttggcttacaataagttcacaagatcaggccatactcaacaacctagcaatgctatcatgatcacaagcacaatcagcgttgttcttttcagcacaattgtctttgggctgctgacgaagccactgatcaggctcttgatcccgtcaaggcacctatccagggaaccaagcgccctttctgaaccttccagcccgaagtctttctttgagcagctggccgccaacagccctggacacccggatcttgagaatggcataagcctacgacgcccggcgagcctccgttttctcctagtaagcccggcacggtccgtccaccattactggcgcaagttcgatgacagtttcatgcggccggtgtttggtggccgtggcttcgttcccttcgtccctggttcacccactgagagcagcttgccattgcttcctggcaatgagaactga

SEQ ID NO: 24176 - DNA, 1917 bp, Zea mays
  Peptide Sequence Number=SeqID_67551
atggaggggcatgtgccattgccattgccattgctcccggacggagaaactgcggtgggctacagcaaggacgacgcctcctcgcctctgcaagaggagatttcgagcctgcggtcaaggcagcggcgtgttgacaggagacggcgggaggcgctcgacaggctcgttgaactgaaaggaagcgttagggtcttctgccgggtccggccgctggctcacacgaacagcttgcatgcccagtcatcacctgttaccgtcgagcaggagaggatcacggtcaaggcagccgggatcaagagggagttcggcgctgatagggttttcggccaggagtccacgcaagaggatgtgttcgaagaagtgaaaccgatcctcaggtctgcactcgacggccacaacgtctgcatcctcgcgtacggccagaccgggacggggaagacctacacaatggaaggaaccggcggtaataagctcggcgtcgtgcctcgggctatccaggagctgttctctcgcgcttcggaggacggctcatgcgcctactctttctccatgagcatgcttgaggtctacctggggagtctcagggacttgctggcagcaccgaggcagcctctcttcaggcgaacagagtgcaaagcagcggcgtgtagtagtagcctcagcatactggcaacgaaaggtggcgccgtggaagtggaggggctgacggacgtctcgacgccggacctcaagaacgccagccagtggtaccgcagagggcggcgagcccggtcgacggcctggacgaacgtcaacgacgcctccagccggtcgcactgcctgacgaggatcaccataaggagaaggatgaggcatggaggaggaggaggagtcagcaagctctggctcgtcgacctcggcggcagcgagcggctgctcaagaccggcgcgtccgggctcaccatggacgagggcaaggccatcaacctctccctgtcggcgctcggagacgtcattgctgcgctcaggaggaagaggccccatgttccttatagaaacagcaagcttacccagattctcagcgactcgctcggcgatggttcgaaagttgtaatggtggtgcacgtcagcctatccgaggacgacgtcggcgagacggtctgctcgctgaacctggcgaaacgagccagatcgatcgagccgaacagagaaatcccacaggatctgaaaacgctgaagcagaagagggtcgcagagctggacagggagatccgcgccgccgaggaagagctgaagcgtctcgacgagcagataaggagagcggaggagaaggagatctcactcgaggaggaggaggaggaggaggaggagaagaagctcttcgcctcgtcggtctgccaggctctcagcgacgacgagaaggggtcgccgaggagcactctggtggtggtggggcacaccgatgccgcggagagcccgcgcgcgacgacggagaaggcgaagggcaggaggccgccgccggctcgtggccatggtggctcagcagctccccacttcatgtcctccacggtgtgcagccggcagagacggtgcgcgggaggctaccattctgtcggtaacggtaagccgaggctgacggcggtgtcggtgaacaggtacccgccgccggctgctgagctgagtgggagccagaacgcggcggccagggctagcaggtcggcgtcagtggcactctcgtccggtgtgcacaagttgaggtgcttgcgtgtcaacaagtccgatcaggtcaacgtaataagcaacagcagcgtcgactcgaccgctgcgtcggcaccgccgccgcggcggagggaaagctgcttcggctccaggccggttctacaaagagcggcagcgcccctgcatctgcacaggaggaggatgtctagcctgacatga

SEQ ID NO: 24177 - DNA, 612 bp, Zea mays
  Peptide Sequence Number=SeqID_67552
atggcaaatccgccaagagcagagctccctcgggggaaggaccccgatggacacgaggtggagaagttcgggctcagagatgacagacatgtggttacctgcgaaaggcaactgactgttggggtcgatttggaagaaatcaccgcggcagatgaactcgaggccttcctcttgggcgccatctcgattctaccggcgagcagagtgagaaggcgaattgtagagaggattcggaagcaagaaaagcaagaactagggcacggaaaagcagaggcggctaaaaagcgcagcactttatgggatattcccgagccagataccgtttcaaaaaagcgcccagtcagcacccggcggttatttccaaaacaccggcgtgacacgtcatcacccggcagttatttccaaaaacaccggcgtgccacgtcatcacccggcagctatttccaaaaacactggtgcgccacatcatcactcggctattatcctcaaagtggcccacgcagcacgctatcgctcggcgttacctctaaaacgccgacgtcgccctcaagtcgctcggcagttgactctaaaactccgacatcgtgttcagtcactcggcgtcacctctaa

SEQ ID NO: 24178 - DNA, 705 bp, Zea mays
  Peptide Sequence Number=SeqID_67553
atggctccgttgtatgggggctccagcgcgggaaagtcagatctctgttgtggtcgcttgctcaacgttgtgggccgtccgggcttgcaccaatccggcctcatgtcaacctgctttgctgattgtccctccccaggcccacgaaagaatgaccttacgatttattgggcccttgggcctttcgtgaggtcttttactcttccagtggacccgggggatatctgtcccccacaagcccccaatctttgggttgattttgaggtaatcagcccaaagatcccaggtccagcttgcaggaccctaaacttcattgggtgcaccggaggtattcattgcatgccctgcacagatgtgacagttttcaaaaatatactgataattcctgggcgtcctccccaatgggtgtgggcaagggacggcttggggcttgcggcggaggtctggacttacatccgggccgtcgagcgctccgggctcgagggctcggatgagtcggagtactcctcggacgaggaggactcgtccgaggaggacggcggcggcgatggcgaggacgacgatgacgacgacgaaggcggtggcggcggcgacggtgacggcggcggcaggggcggcagcagcggcggcaaggatggcgacggcggcagcagcaggagcggcagcggcggcggcagcggcagaggcagcaacagggccagtggctag

SEQ ID NO: 24179 - DNA, 87 bp, Zea mays
  Peptide Sequence Number=SeqID_67554
atggctcgacggtgcgctgacttcgaggagagcttgactctgaaaaggaagaaaaacatatcctcgctgcttcccgcgacaatctag

SEQ ID NO: 24180 - DNA, 2679 bp, Zea mays
  Peptide Sequence Number=SeqID_67555
atggccggtgacgagcgccaccaggcagctccttggccggcgtctttggacgcggggggattcaaggtcctctcgcttgctaaccgggtttttcgattcacggtttcttccaaggatgttgggttccacatttacaattctagatgcattgtccgtccggaattcaaagccttcttcaacttgtggaactctggtggaccaaattggaattatgatctcagattattccttcaagaggagaatgccaactggtggtttgttaagggcaggaaaaaaatctcgttcgctgatatggttaggcgtccgccgttgaccggtgcaaacgctgtcccaattcgtcgtcataatcctccttcccgcttcgctggaaatttgaatgcaccgaggatttctgtcttcaatagattggggtcctcctcaggtgcgcggggctcgaggtttcttgtcacaactccggccttgggagtctcgtcgcatgctcttcatcgcaggctttttccttctgtgggtcttcctaggcttaacagatgcatgattggacgcgggcgtcagggccgtgatgattgctcctcttcaatttcaaattcagctgctgggctccccaggattcgtaggcttcattggcggcccattcttcgtaatgggcctctcaggcctgggccgggcccttcggcccaccctaaccttggaaggacggatttgtctggttcggtttcctcagcgtttctctgccaattttgtaaagccagggggcatttggaattgttctgcaatcgtaagaaatcggaatttggattccccctctcctcgttcccttccttcgaaagtaattgccttttggaggggtcgtctcgcctcttggacttcgggtcctggttccgcccttcacccgggtccctgacgggtgggacacctcctacctttgcctgcttcggtgaattcgccagggcggtcttattaaaaatatacgaacaggcgcctgaaacgtccttggagctctcgctgggtgtcacttcaccaaaaccccaaaccgctcctttgctcttggctctccggcgaccctctaagaatctgtcaatggcgtaccggcgagtggacccggagccgttcctaccaccaggcttcagcgccgcggtggtccagcaccgtgggatcatggtcaggtcagtctcgcagcgtttgccgccaatgcatgaggactgggcgattatcaatattcatcctttacctgagcacgaggttttgttccctgcggtcaaagatgtggtcagggagtatcttgttgagcatcgtcgggtcggtgttcgtgccattcagcgctcgcacttggggcaggtgatagtgcagtttcgtagtgttctggagtgggataatttggttctgctgggcccccagcaatatctggatgctactttcaccgcggctgagggctttgctggtgactcttggactgttcaatgtgaaattattcagcaactcatgcttggcggtcaagcacaggatgaggaccccatccccccggcccccgaggatggccaccagctccccctggtcttcttcgggctgggccagcccgtgcctccggcagggtttgacctaaatttccctccggagcctgcgggtagagagctgccggctcagcaggatgactttggccagggagattgggaccagtggattgtgaatgaccagcccaatcagcaggctccgctgcccatattgccagaagagcaacacattcagcaggatgaaatacaactcagtaaccagcactctggcttatcgtctgatagctccattggtgctggtcagcttgcacctcttccgaatgggcattttgtggagaatggacatgtgttgcttggggatgccccactctttgggcctcaggaggttgatggaccggtgcatcaggtggaccatgttcatgatttggaggacttgcctcatcaggcccatgttggtgagcctaacaataaccaccctcagaatttggagatgaacttcatgttctctcaggaatggctgcctgaccccgttttccatatgtttgaggaaagaaaaagagctgcccagttctctagactctgggccaaatactttgctcctgctgggtcggctgaccactcggtggacatccctaagaagtgggcaccctttttcctttcgaatctgcttcagcctgatgctttcaattggtccaagacctttctgctgtcagatattccctcaactttgcaggagcagggaatgaaatccatcccttttgtggtccctaaggaatgtccgaatgattcctccctggcggatgtcatttctgggatctccaaggattctggcggttgtggtgggccgtcaccaatcattgtggagtcggagctcagaagaagcaaacgtttgaaagaatcacgtgttgggctcaggcagggggcctgcccaaaaagggactgcatcatgtgccaacataacttcgatgccccccccccgctatcctccaaggtgctgcggaatctgggctccaggttttgtaacctgtctgaggatgacctttctgagcataggttaaagcaaaagaaatcagatgtgggacctgttggtcagcggagggttggcaggaaggatctggaggatgacaagactgatgattcatccgatgaagatatgcaagacaaacaataa

SEQ ID NO: 24181 - DNA, 651 bp, Zea mays
  Peptide Sequence Number=SeqID_67556
atggaatcccaccggagggaggcatcgagcccctcggaccctgtcgagaaggggccgggtccagcgaatcacctgcagcgtcaacaaaccagctcaaaaactcggaacctgatcaagcgcccgggctatggccaggccgcatgggggaacaacaggaccggccgaggcatcatgaaaagcgttaagacctcagaggagtcacaccactcctccgaggcctcgggggctacacccggcgggtgcgctcgcgcgcacccgtcggaacaaagtataaccaagaaaggccggtcccctcaccaagaatgcggcagagcctcaaagcgagcatcaccactcccctcgaggctcgagggctactgtcgggtaccgaaattaggggaaaacagcgtcgcccgccccgctccggctgctatgccaaccacccgggcgaaaccgacaacggtcaagttaagcctcgggcgcaacaggaagctccgcctcgcccgaccccggggctcagcctcggcctcgacctcggcctcgggaagagtcacatcctcgcccgaccctgggcctcggccccagcctcggcctcggaggagccgccgcctcgtccgacctcaggctcggatcaaccacgccacgggggatgcatcattaccctactcctag

SEQ ID NO: 24182 - DNA, 666 bp, Zea mays
  Peptide Sequence Number=SeqID_67557
atggccacgtccaggtcctactcgcaccgtcagctgcaccgggggtcgctcaacacgtcgtacgccgcgagggcggtactcgtgttctgggacggcctcggcgaggacgggagtgaggagacctgccggcgcgctttggggcggccgctgttcgccggtgcggtgtcggtgggttcgatcccatggacgacgccctccgactcatcggccttaacgacttgtgctcgcccctcgtgtggggacgtgggcgagggccctttcacagcagcgtctgtcctgaggtcatcgctgctgctgttcagccgcccgaggtggaggtcgttgtcgctgctaccgcagaggtcgtcggcgagccgcttgaagttcgttatcccgcggggccctagtgtggaggttgttcatacccgcggaaatggaaccggagtcccgtttaacctttggccgctctgcgatgagccaaagccaaaggtagcggtggcgtggacagaggcgatgtcagctcgaacagaggctttctcgatgcgggggcagatggcttcccaggccgaggaggaccaatcccggagccaagccaccaaagccgtgagccagtttgagatcttcgggggacagctagctggggcttcggagcggccggccgaggcgcctgctcgcttcaccgtctga

SEQ ID NO: 24183 - DNA, 1014 bp, Zea mays
  Peptide Sequence Number=SeqID_67558
atggcagaccagccggaggagatgccggcggcgccggccatccgcctggggcctccgcacccgtacctgaagacccacgggggcaaggtcgcgaggctgcaccggctggactgggccgtgctgctgctcatcgccgccgccgacgtcgggctcaacctcgtcgagccgttccaccgcttcgtcggcgaggacatgctcgcggacctccggtacccgctgaagagcaacaccgtgcccgtctgggccgtgccggtgtacgcggtgatcggcccgatcgtcgtgttcgtcgggttatacctgaagcggaggaacgtgtacgacatgcaccacgccattctaggcaagcttcctgtttgccttctcttctccgtgctcatcaccggcgtcctcaccgacgccatcaaggacggcgttggccggccgcgccccaacttcttctggcgctgcttccctgacggagtgccgaagtacgacaacatcacaagaggagtcctgtgcgacggcgtcgcgagcgtgatcaaagaagggcacaagagcttcccaagcggccattcttcgtggtccttcgctggcctaggcttcctgtcgtggtacctggcgggcaaggtcaaggcgttcgaccggcgcggccacgtggccaagctctgcgtcgtgctcctgccgctgctgctcgcggccatggtggcggtgtcgcgggtggacgactactggcaccactggcaggacgtgtttgccggtgggattcttggtaggcacttccctgatacttcaagtttcaactgcctcacctgcactccatctgcttacaggcttagttccctgctgcagggttggtggttgcgtctttctgctaccttcagtttttcccaccgccatctggtgaacaaggattctggccccatgcgtactccgagcacattctcaaccctgagcgcgagggccaagcgcagtcaacagcgagctccaaccaccaccgacgcctgtccagcagaggccacgtggcagtggagatga

SEQ ID NO: 24184 - DNA, 1191 bp, Zea mays
  Peptide Sequence Number=SeqID_67559
atgtggagacgactggatcgtggtactgcattgaccttgaccgactccacggtcggctacgagaacaaacagcattcggagaacctgaaaggacggcacgggtttggtcagctgacgccctctcatgtgaaaactggatcgtgtgatctgattgcaaaagggtcaccgggggcggagcggcggcgggtggcgctgcgtgccctcctcgcgtcgggtggcgcggaggcggaggccgcgaggacgtcgagcaagggcctgctacgcggccttcggtgcacgtccgcggccgcatcgcaggctatcgcgccggagatcccgcggcctccggcggactggcgcggactcggttgcgccgcggcggcccaggcgcacgcgccggctgccgcggtggaagcggcccggcccacggcggactggcgcaggcttgggtgcgcggctggagcggcaccggcggtccaggctcaagcgccccggcgttccgaggagtggcgcgtgaggcggcggaggaacgagagggagaggcggaaggcgagggctggcggcgtcagtggtggtggtggggccagtgccgggatgggcgtcggcggggacgtctggtgcacgccgggcataccgttcgccgccgaggcctcttcggtggactgcgtggtggcgccgcaccatacggtggccgcgcgccgccgcgccgaggccgacaggccgcggagagagaggcctggcgcacctccggccaggagggtcaccatgcgggagcacatgtcctcgtcccctctgagttcaccgccgcaccatgtcatgccgttcgttgatgtcgaccgtgcaccttccggacgcatccgacatgtgagtggccgccggcactcccacgcacgggttgaggaagagatgatgttccagacaaggatgttattgggaagaatgggtatttatgatcagtatcaggattggcgcctcgatgtcgacaacatgacatatgaggagttgctcgatcttgaggaccggattggatatgtaagtacagggcttcgtgaggacgagatcattcaaagccttaggatggaagagttcgaagtacacgaggaaactgggaagctgagctgtggccacagctatcacgtgcactgcataaagcagtggctttctcggaagaacgcttgtccggtttgcaagaccactgtctcgaagacctga

SEQ ID NO: 24185 - DNA, 933 bp, Zea mays
  Peptide Sequence Number=SeqID_67560
atggggctcggtgtatgcggctcgctctgccaagtttggggttcgccccttggggaggagtgcggtggcaatgagattgatggttctggttatgattatggtattggtaagtgccacttggagagactacaccaccgcctgcgtgaggagcaggaacgtcgacgacaggagcagcagagctcttccttctcgctccaccaggagatagagtctgtgaggagctgctctcctgtgcttcctctggaggcgccccctgcaccaccactgggcgtcccagcttctggagtagctgctggaggagacccagacgacggaggtggcgacgacagctcgagccacgacaccgacttctctgctaaccctgagccggaaggatgggttgctcgacccatcactcgcgacgctgctcgcgggtgtcacttccacgatgcgctcgacaccctgctacgtcgggcatttgaccgacatacttggtccgtcgaggggtggaggcttgctcagagcactattctatctctgagcgggactcagctgaggcagccatgcaagatgctgcacggcgtgcgcttttcgcactactgctcggttttcggtggggcagctgacggccttgacctgaagtattacccccgccgttcatctggcagcacaggaggcgtgattgtctcacctgtcggtgagggcaatcctaggttgagcagcacagtcaacctagccgccgtgctaaacacggagctggaccatgcattagacgagctgagtagggctcgtgctgagatcgccctgctgcgggctgagcgcgcggaacgtcgtcacctggacggtggttcccccgctcccgttgggactcagcacccgtaccgctcacctcagcgtggacaccagtcttatggcaatcccgcctgcaagaccaagataaacctagaaccatag

SEQ ID NO: 24186 - DNA, 936 bp, Zea mays
  Peptide Sequence Number=SeqID_67561
atggcgccgatcgaacacggcacgcggcgcgggtgtgtcaggcgatggccaaaagtgaggttcggtggatcggccaagataagccatgcagtggcaacggcactcgcctctcagctatatcgcatcacgctgacaggtcttcaggcccaagaagcatctggtcctacagacgaatataatccctgggctgtcggaacaccttctgctgaagcaatccttgccccccacattcgttcatccctctgtacgatgtctaaagccaagcttcctcacgtcgagacggattcttccggcgacgacgatgggccgaagccaaggctagtgttccgtagacgcatgcgcacaccagttaagctgctcggtggccggaaagtctcggacgtcctgctatggaggaacaggaacctgtcagcggggatcctcgcgggggcgacgctggtctggttcctgttcgacgtggcggagtacaacgtggtgacgctcctttgccacgtcgcgctgctcgggatggtcctgctcttcgtctggtccaacgccgcgcctctccttgacaggccgcctccacagatcccggaggtgatcgtttctgaacacgcgttcagagaagctgcgcggaccacccattacagactggctcactttgtatccgtcctctacgacgttgcgtgcgggaaggatctcaagaagttcctcatggatgcagaaaatccatggaccgtgtgtactcgtatatttctgacggtttgccatggcttccctggctggctagggcttttgtgtgctctgactttaccggcgctgtacgagagatacgaagccgaggtggaccatcttgtggccaagggacgcgaagacctcaagaaattctacaggaaggttgactccaacgtgctcaacaagataccaagaggccctgtcaagacaaaggctctctga

SEQ ID NO: 24187 - DNA, 849 bp, Zea mays
  Peptide Sequence Number=SeqID_67562
atgcgtcttttctccggcgtcctcgattcttcgtccgcgcttgcctccgccgtcctgggctccgtgtccgaccgcctcggattctcgcgcatagttttcggtcgagcgagcccttcgaacatgccggctctcgcttgttctgccgcttcctcgtcttctgccgctaccggcgcccagaaaccgtggctcttcgtcggtctggggaaccccgggcggatgtacaaaggcactcggcataacgttgggtttgagatgattgatgctattgcggaagctgagggcatatcagtcagcagtaagcaatttaaggcaattgtcggaaaagaatcaagcctcattggtgatgtccctgtaatgcttgccaagccacagacttttatgaatgcaagtggtgagtctgtcggacagctggtttcatacttcaagataccactcaatcaattagttgtggtaattgttgtccttgagctgatctacgatgatcttgatctaccctttgcgaaattgcgtctgctaccaaaggggggacatggtggccacaatgggatgaggagtattgttgaccatttgaatcagagccgtgattttggacgcctaaggattggtattggtgtcaaatatgaaatatgcccccctccccaaaaatgttttgtaggcattggacggccacctgaggagctgggtgctatcaattttgttctgcggtcattcaccaagcaggaaaaggaagagcttgaagtcacgttccaaaggagcttgcaagctgtaagaattatggtacgggaaggattcaacaaaagtgcacagtttgtgaatactccacagccaccagaaatgctgaatagatga

SEQ ID NO: 24188 - DNA, 372 bp, Zea mays
  Peptide Sequence Number=SeqID_67563
atggcagggacgtgtttgggagcctggagacggtggtgtagccgctgcgccgcgtactctcccgctgtcggcggaagagggcggggaaggaagaggagatcccactccaaagctgtttggtggcagaggctacagagaaagagaagagatttctctgctggtctttcttcctcgcggggtaacgccgcggtccttgcccaggcgcttgacctgggactgaactgggagggattcggcattgaggacgacatgttctgcggcgtgttcgaccgggcaccagccgacgcgggcaaatggccagcaagctggcgaagggactattcttcccttcatgatcccagagccagtggactcggggtcccaacccgatag

SEQ ID NO: 24189 - DNA, 2487 bp, Zea mays
  Peptide Sequence Number=SeqID_67564
atggggaaggggagcgcgcgggcgctggccctggcgctcgccgtgattctcgcctgctccgacgtcgccgtcgtcacggctcaggaaaccgagcggatcgaaggaagcgctggtgatgtgttagaagatgaccctgttgggaggctcaaggtctatgtctatgatctccccagcaaatacaacaagaagctgctcaagaaggatcctaggtgcctgaaccatatgtttgccgctgagatcttcatgcaccggttcctgttgtcaagcgctgtccgaacttttaatcctgaggaagcagattggttctacacacccgtatacacgacgtgtgatctgacccctaagggtcttcccttgcctttcaagtctcctcggatgatgcgtagcgcaatccagctgattgctacgaactggccttactggaatagatcagagggcgcagatcatttctttgtcacaccccatgactttggtgcttgctttcattatcagacctttggacagaagaaccatgtctgcctgaaggatgggtccatcacgatcccgccatatgcgcctcctcagaaaatgcagactcaccttatccccccggacacccctcgatccatctttgtgtacttccgaggtctgttctatgacaccggcaatgaccccgagggcggatactacgcaagaggtgctcgtgcatcggtctgggagaacttcaagaacaacccgctgtttgacatctcgaccgatcacccaccaacatactacgaagacatgcagcgctcggtgttctgcctctgcccgttgggctgggcaccgtggagtcccaggctagtcgaagccgtggtctttggctgcatcccggtgatcatcgcagacgacatcgtcctccccttcgcggacgccatcccgtgggaggagatcggcgtcttcgttgcagaggatgatgtcccgcagctggacagcatcctgacatccatccccacagacgtcgtgctgaggaagcagcggctccttgcgaacccgtcgatgaagcaggccatgctgttcccccagcctgctcagccaggagatgcgttccaccagatcctgaacggcctagcgcgcaagctcccgcacggcagcaatgtcttcctgaagcctggacgcaaccactgccggagtgctgactccgcgttcctcctgactcctgagcagctgccgcctgcccgagagtggagggggaggcaggcgcccaggccaatgggtgggacggggagcgcgacggcggcgcaggccctggcgctcgccgccttgctcctcgcctgctccggcgtcgccgtcgtcacggcgcaggacatcgagcggatccaaggaagtgccggcgacgtgctggaggacgaccccgtcgggcggctcaaggtgtacgtgtacgagctgccccccaagtacaacaagaacgtggtggcgaaggactcgcggtgcctgagccacatgttcgccacggagatcttcatgcaccgcttcctgctggcgagcgcggtccggaccctgaacccggacgaggcggactggttctacaccccggtctacaccacgtgcgacctcacgccgtggggccatcccctcaccgtcaagtccccgcggatgatgaggagcgccatccagtacgtctccaagcgctggccctactggaacaggacggagggggccgaccatttcttcgtcactccacatgactttggagcgtgcttctacttccaggaagagaaggccatccagcgaggtgtcctcccggtgctgcgccgcgctacgctggtccagacgtttgggcagaagaaccatgtctgcctcagggaaggctccatcaccatcccgccatacgctccgcctcacaagataagagctcatatcgtcccgccagagacgcctcggtcgatcttcgtctacttccgcggcctgttctacgacaccgcgaacgaccccgagggtggttactatgcaaggggcgcccgtgcgtcggtgtgggagaacttcaagaacaacgcgctgttcgacatctcgacggagcacccgccgacgtactacgaggacatgcagcgcgccatcttctgcctgtgcccgctgggctgggcgccgtggagcccgcgcctggtggaggccgtggtgttcggctgcatccccgtcatcatcgccgacgacatcgtgctgcccttcgcggacgccatcccgtgggaggagatcgccgtgttcgtgcccgaggacgacgtcctgaggctggacaccatcctcacgtccatccccatggacgagatcctccgcaagcagaggctgctggccaacccgtccatgaagcaggcgatgctgttcccgcagcccgcggagccgagggacgccttccaccaggtcctcaacgggctggcgcgcaagctgccccaccccaaggacgtcttcctcaagcccggccagaaggtgctcaactggacagagggcgcccaggatgacctcaagccgtggtag

SEQ ID NO: 24190 - DNA, 219 bp, Zea mays
  Peptide Sequence Number=SeqID_67565
atggcttgtgtgtacagcagggaggtcctgccgccgaccgacctggacctggcttttccaggtgctcaggcgaccctagctcgtcgactggtgtggtggctgtcaaagccggatggagtgcagtgcaagagagggacgcattggcatgtatggcagctttgcagagcagactggcagggcatgatggatggagacgaaggtgcagcaccgatagaatag

SEQ ID NO: 24191 - DNA, 1221 bp, Zea mays
  Peptide Sequence Number=SeqID_67566
atggacagcacgagctgcctggtggacgacgcgagcagcggcgcgtccacgggcaagaaaccggcgccggctccggctgcggcgaccggcaagccgctacagcgcgtgggcagcggcaccagcgcggtgatggacgcggcggagccgggcgccgaggcagactcgggcggcgcggggcgggcccccggcggggtcagcgggaagctgccgtcgtccaagtacaagggcgtggtgccacagcccaacgggcggtggggcgcgcagatctacgagcggcaccagcgcgtgtggctcggcacgttcacgggcgaggccgaggccgcgcgcgcctacgacgtggccgcgcagcggttccggggccgcgacgccgtcaccaacttccgcccgctggcggagtcggagccggaggccgccgtcgagctccggttcctcgcgtcccggtccaaggccgaggtcgtcgacatgctccgcaagcacacctacggcgaggagctcgcgcacaacaggcgcgccttcgccgcggcgtccccggccgcctcgccgccgcccgagaataaccgccgtccgcccgccgcctcgtcgtcgtcgtcgcccgcggcggcgcgcgagcacctcttcgacaagacggtgacgccgagcgacgtggggaagctgaaccggctggtgataccgaagcagcacgcggagaagcacttcccgctgcagctcccggcggcggcggcggcgggcgtcggtagtggcggcgagtgcaagggcgtgctcctcaacttcgaggacgccgccgggaaggcgtggaggttccggtactcgtactggaacagcagccagagctacgtgctgaccaaggggtggagccgcttcgtcaaggagaaggggctccacgccggcgacgccgtcgggttctaccgttccgccggcggcaagcagcagctcttcatcgactgcaagctccggcctaacaagacgacgaccacggcagcagccttcgtcaacgtcaacgcgatgaccaccacggccgcaccacccctcgccgcggtgaaggcggtgaggcttttcggcgtggacttgctcacgacaccgaggcccgcagcggtggcgccggagcaggaggaggtgaccgtggcaaacaagagagctagggacgccatggccaccgcggcttctactccagctccagtacacatggttttcaagaagcaatgcatagacttcgcgcgctga

SEQ ID NO: 24192 - DNA, 534 bp, Zea mays
  Peptide Sequence Number=SeqID_67567
atggcggagagcaaggcgcgtgtcgcgctgttcctggcggcgctcgcggcggcgagcctgctggcgctggccccggccggcgccgcgacgacgtgcgcgccgacgcagctgaccccgtgcgcgcccgccatcgtcgggaacgcggcgcccaccgcggcgtgctgcgccaggctcaaggcgcacccggcgacctgcttctgccagtacaagaggaaccccagcatgcagcgctacgtcaactcccccaacggcaagaaggtcttcgccgcctgtaagatggcgtccggcggtccggcgctcgagccgctcgtcgaccaggtcatctccgtcatcaccaacgatggccgcaacatcgtgggtacgctcaggggattcgatcaggccaccaacattatactcgacgagtcccatgagagggtctattctagaaagttctatgtcaagtctgaaaagacggatcaacgtttaaatgctaaaaaggtggttcataacggtttaacgttttatcgctttaataaccatgcactgaactag

SEQ ID NO: 24193 - DNA, 2970 bp, Zea mays
  Peptide Sequence Number=SeqID_67568
atggcgacgccgctggccgggaagggcccgatcgcggcggcgatcccgcggtccccacccccactggccgagggcggcgcgggagggtcggcggccgaggcgcccgtgctcatcttcgtctacttccacaaggcgatccgcgcggagctggagcggatgcacgccgcggcggtgcgcctcgccatggggcgcgcgggcggggacgtggccacgctcgaggcgcgctgccggttcctcttcaccgtctacaggcaccactgcgacgccgaggacgcggttatttttccagcacttgacattcgagtgaaaaatgtcgcagggacatattctcttgaacataaaggagaaaatgatcttttcgcacatctattcactctgctacagttggatgtgcagaatgataatgctattaggagggaacttgcatcctgtactggagcaattcggacgtttgtatcccaacacatgtccaaggaagaagaacaggtcttcccgttactcatcaagaagttttcacacgaagagcaagcagatttagtatggcagttcttatgtagcatccctgtaaacatgatggcaaaatttcttccatggatttctgcttctgtttctacagatgagaatcaagatattcttgactgcctaagtaaaatagttcctgaagaaaaactcctccaagaggttgttttcacgtggtttggagggaaatcagaaagcagttctacatgtgagtctagctctggccaaacagataaacatgcacattcacttgaacacaccaaaattggaaagaggaagtctatagaatcaagtcagcttgtcactcatccaattgatgagattctgtattggcacaatgctgttctgagagaactgagtgatatagcagaggagactaaaaggatacatcagtctggagatttttctgacatagcaggatttaatatgaggctgcaatttattgcagatgtgtgcattttccacagtattgccgaggatcaagttatattccctgcagtggatggtgaattgtcctttgtgcaggagcatgctgaagaagaacggcgattgaataaatttaggagtttaattgaacaaattcaactagcaggagccaagtcaactgtagttgattttcattcagagttatgctcacaagctgatcaaataatgcagaaaattgagagtcacttcaatgatgaggaaataaaggtcgtctggaggacacatccaaccctggaaagttcgtatgcatggcatcaggagcggtcacttgtgcgtcagatgggaatggtttcaaaacatgccagtcactctgtccatgttatagcctgttacattcccaggttaagagtagaaagtagctaccttggtgttcattcatctacccctacaaaatcctttcgccctctgtctttcaattatgttgcaccttcattatattcaagccttttctcatgggacacagatacactagtatccggcccagataacatttctaagccaattgataccatattcaaattccacaaggcaattcgcaaggatttagagtttttggatttggaatctggaaagcttattgacgggaacgagtcttgccttagccaattcattggaaggtttcgtttactgtggggtctatatagagcacacagcaatgctgaagatgagattgtatttcctgctcttgaatcgaaggaggcattgcacaatgttagtcattcatacactcttgatcacaagcaggaagaaaaattgttccaagatatatccactgtactatctgaactttctcaactacatgatggtttgagctatcctcttgatgttgaagctggaacaaatgatatttcaagtaatgagattgattgggctagaaagcgtaatgaacttttgacaaagcttcaaggattatgcaaatctatccgggtcacgttgtcaaatcatgttcatagagaagaacttgagttgtggccattgttcgataaacatttttctgtagacgagcaggataagattatcggtcatataattggaactactggtgctgaggttctgcagtcaatgttaccttgggttacatcagcacttagtttagaggaacagaacatgatgctggatacatggaagcaagcaaccaaaaacaccatgtttgatgaatggctaaatgaatggtggaagggaccttcaacttcatctgacccatcagacaaggcttctactccttcagaagaaagtcattttcaggagaatcttgaacaaaatgaccagatgtttaggcctggttggaaggacattttccgaatgaatcagagtgagctcgaggctgagattcgaaaggtctctcgagattctactcttgatccaaggaggaaggcctatctgatccaaaatctcatgaccagccgttggatagctgctcagcagaaatcaccacaaccaagcgtcgaaggacataatggatgtacacgacgacctggatgtgttgcttcgtaccgagacccagggaaacaaatatttggctgtgagcattacaaaagaaactgcaagcttgttgctgcatgctgcgataagttattcacttgcagattctgtcacgataaagttagtgaccatacaatggacaggaaatcagtgatggagatgatgtgcatgcaatgtctgaatgttcaacctgttggtccaaattgtcaatccccttcttgcaatggactgtccatggccaagtattattgtagcatatgcaagttcttcgatgatgaaaggtatggcagtctagttgcattctggtttgctattatggacggggtgtattttggcatgcttgatggtttgctggctgcagaacagcttcctgaggaataccaggaccggtgccagctgtttcctgggaacatctcggtttgtatcagcgatacagttggagaccttctgaacactgtccccaactcaagccgactcagttga

SEQ ID NO: 24194 - DNA, 54 bp, Zea mays
  Peptide Sequence Number=SeqID_67569
atgtggtttttaaaagaaaaaggagatcaggtagctgagttggttctgttctag

SEQ ID NO: 24195 - DNA, 369 bp, Zea mays
  Peptide Sequence Number=SeqID_67570
atggcgcaccggacactgtccggtgtacaccggacagtccgggtgtatatggcagttatcaggaagctgcaaacggtaggctacagctcccacacgaccagtgaccagatatggtccgacgtacttgaagctcagtttatgatctgtgctgatctgcctgcttcttcatgtgggcttgagcgcgcaccaggtgttgatgtacaagctcttgcatcaaggatcgctcttgcaaccaatcagagagctgagctggaaggcttgagctacagaccgagctgtgtaagggtgactgagaggaaggaagtggccatactttgtgaatttgtccaccacaaccaaaatgcagtccacatgctgcgaccggggtaa

SEQ ID NO: 24196 - DNA, 1050 bp, Zea mays
  Peptide Sequence Number=SeqID_67571
atgggggggctcggagcccggctccttcgcggagaaggatccctttcggggtatcccctttcccggtccctgttgcaagagatagagaaagaggaaaacggaaaaggagttaatgcgacggggcgagtggttggcgaggcggtcgttgcgatccgttcgaggaacgggtcacgggtgcaccgtctccacgccgtgagaggaggctctcttgctgtctcaagatgggaccaactgacgcaccggttgctcgacgcgtgggcctgggttcccaagctggcgtgtcagaagtcggagaagcgcgtccatctggcgcgtttgcatgccgcctccggcttgcatgacatgcgggacccagcccccgagtcgcaggggagggccttggagcgtgttggagaagactcagcccgcggcgtctgggggccccggatggggggtatccgccgcctttccgcctcctcgttggaggaacgcaactccatgggagttggtacctttcagccatcgttcggcttcaaggattttcatcatgctgcccggctgcttccctccgccggcgggctggggaggggagtgcgccgagatggggtcggcccctgcgtgggcggtggcccgctccttcactcagtgatggggggagaagcgggcattgcccgtggcgtccggcagctgcagcgtgcctggtcttcagccgcgagtggcttcggggccacttgcggcgccggcgtctgccacggcagctggaagaggttcttccgccggcgcggcggccgggaccggccacgggctgacctccaacttctacggccttctgcccgtccttgcctcacgagttttggcatgggcgggggcttcctggcagcggcatccaccctgaggtcagcgttgccgctgttcggccccccggagcagaagtcgtcgtcgtcgccgctgctggagcaggaatccctcggcccgttcggccttgttgtctggggctcctctagcttagttgacgagacccctcgaccgcccttcggtggaccgaggccaggggtagcgatatcagtatga

SEQ ID NO: 24197 - DNA, 198 bp, Zea mays
  Peptide Sequence Number=SeqID_67572
atggccgtgatgggttcaacatcggaaaagatgtacctctgccaggtgaggaaacaacagacttttgttgtttctattcaaaggtggtacccaaggatgagccccagcagtgaagtccgtcgcgggaggatgttggcctcccacattgaaaacaatactcttttatgcgggagggtcttttgcctcccgggtttgtaa

SEQ ID NO: 24198 - DNA, 582 bp, Zea mays
  Peptide Sequence Number=SeqID_67573
atggaaaggatgttgaatgaacgtctgcccacgacaggaggtcgaaggctacgccatcatgatcctgaaggatttaaccctgaagaatccagagatgagaattctggtttcagccatgaattcgatcccttcggcgatggccgtagaggttatggtgatggtcgtcgcgctgattttgataatccgtgtggaaggtgtcgtgcacacggacgtcaagtaagatttgaagatgaggagtatgaagaccgtaatcgtgatgaaggatctgatgagaatccctttgcaaatgaaggaatgtttggtcggcgacgtcatcaccgacatgctgattttgaaaatagagaccattatcatgggcgtcgtcatagaaatgatctagaccatattggccgagtcaagttggatattcctaaatttactgggaaagaaagtgcagatgaatatcttaattgggctgagcaacgtgatcaatttttcagagttcacaatttttcagatcaacaccgagtgaacttggcctcagtcgagtttttctggctatgctcttacttggtggaatcaactgcaagaacatcaacttag

SEQ ID NO: 24199 - DNA, 237 bp, Zea mays
  Peptide Sequence Number=SeqID_67574
atggaaacaccggtgaccgccgccctccggccttgtgccgcgtgtttaccctttccaccgcatcgccacaacttacccctactcaccgttgatcgccggagcaaatgccacgcctctggacacaacgtgaagaagaagtggaagtcaccgaagaaaggacaccaccaccctcggattctcaggcaggcaactgcttctactttgatatttgtggatccgagccagactcacctgtga

SEQ ID NO: 24200 - DNA, 1086 bp, Zea mays
  Peptide Sequence Number=SeqID_67575
atgaacgaaaatggagatttgcaggatagaattgggattcagatgggtcaagttaagatggtagaaatcaaggaggccgcggaaaaagggagaaatgggaagaccgaggccgcggagaaggaaaggagcataaatcacgggctcatgggtatcctcagttgggacagtaaccccatggcaaatccgccaagaacagagttccctcggaggaagaaccccgatggacacgaggtggagaagttcaggctcagagatgacggacatgtggaatcaccacggcagacgaactcgaggccttcctcttgggcgccatctcgattctaccggcgagcagagtgggaggcgaattgcagagaggatttggaagcaagaaagcaagaactagggcacggaaagcagaggcggctaaaagcgcagcacttatgggatattcccgagccagataccgtttcaaaaagcgcccagtcagcacccgacggttatttccaaaacaccggcgtgccacgtgatcacccggcagttatttccagaacaccggaccagtggcatctagccactggccctgttgttgccgccgccgctgccgcccctgttgctgcccctgctgctgccgccaccgccgctgccgcccctactgccgccgccgtcaccgtcaccgccgccaccgccttcgtcgtcgtcgtcgtcgttgtcgtcgccgtcctcgtcctcaccgccaccgtccaagtccacctcatccgaggagtactccgactcatccgagccctcgagcccggagcgctcgacggcccggatgtacgtccagacctccgccgcgagccgggagccggagacccctcagactcagaggagaactcctcctctgagtactccgagtcaccaaaatcctccgatggaggagttggctcacgcttgcgcttgttgttcttgcccatggtggaagcgaaagggagagaagaaaagcaagcaacagagaacagcaagagatgtgaaaaagccggagagacaacgacattatttatagaaggagaaggcaaccgctcacctccaaccacggtcactgaacagtcgcaaagcattcaataa

SEQ ID NO: 24201 - DNA, 444 bp, Zea mays
  Peptide Sequence Number=SeqID_67576
atggcccgcgcccgcgcctataaaaccctcccagacttcgattgtacccttccacgcaccctcaaacctcaccggagttccgctcgtcgccgtttgcccgtgcgcagcgagtccgcggccgcccaatccctctgccaccgtagaccggctcgtagagccattcccaaccccatccaaccctcggagaagactgtgcacacctccgtgaagctccccgagcaaggaatcggagtttgcttcgccagagaggccagtccacgctcgccggagctctcaaccccgccggagtacgtggaccggcactgtaatcttgctgacggagagtacatcctcgtgccggagcaaggagctgctcaggaggtagccccagatccagcacccgagcctgcaccagaggacctgcctgccactgctttggaaggcaagccccggttttatgcataa

SEQ ID NO: 24202 - DNA, 666 bp, Zea mays
  Peptide Sequence Number=SeqID_67577
atgcgcctcatcctgcggtacctgttcttgacctgtggggggtgcgagacagcaagagtgagcccacatacgttcatcgctcaacaagttgtggggaataatgtgcatgaactcgccaaaggacatcagtgggtaaaagacgtgatcaagggcacaacttgcctgggacttgagattccagccgaagaggtatcagagaagatcagtcgctggatccgcaaccattggcacagattagatcttcactttatcgaaccggggcggcggtcgggttttataagcagtcccgcgaggatcgagtccagggggccgcgagttccatggcaaggaggtcggcaggaggcagttgtgttgcaccaagctcgcagggttgttacgagcagcggccatatccttgactgtggagaagagaagtccgacgcttgggccccacatgtcattgtcgtggattttgggtgggttgttggcaaagttactgccagatgggacccggccgggttgttggaacggccagtgacatccacgcggatccctgggttcagttcatgcgaacgcgagggggaagggacgattccgaccgctgggccccacgcagcagtggccgaaccagtgcgtggaagtggagccaggccgtggaggctaaggaagcaagtggtcgtggattga

SEQ ID NO: 24203 - DNA, 207 bp, Zea mays
  Peptide Sequence Number=SeqID_67578
atggaattactcagcaagtcttacccgactaaagaaaagactctcaagggtatgctggttatatgggagtcaagagcaatactaagcatagtaaaacctttttgtaaaaacagggtttcaaggaagcaagcaagtgagaaagattttaaaaacatcaagggaggtggcaaatgcaccggggtttgccttcgttcacagggaaaataa

SEQ ID NO: 24204 - DNA, 798 bp, Zea mays
  Peptide Sequence Number=SeqID_67579
atggaagaaacacacctccacgtgttcgacgctttctgcccgcgccagagcacgctcgcgcgcgcccccacatgcccagcgccgcgcccgagccaagccagcgccgtggcccgcacccgcgcctataaaacccgcccagacttcgattgtacccttccgcgcaccctcaaacctcaccggagttccgctcgtcgccgtttgcccgtgcgcagcgagtccgcggccgcccaatccctctgccaccgtagaccggctcgtagagccattcccaaccccatccagccctcggagaagactgtgcacacctccgtgaagctccccgagcaaggaatcggagtttgcttcgccggagaggccagtccacgctcgccggagctctcaaccccgccggagtacgtggaccgggtaaaccactccaccatccttcgattccttgtgcacacggtcgctacgttaccccgtgaagctcaccatgccctcggattgaaccagttcgccgtggtttggccggtatactcgccgccgacgaggacacccgcctgcacgcgtggaccgggcgattccggccatccccgacgtcaagccgtacctcgacgtgaccgccagagtctcctcgagccaaccccacccttcgccggacctccctcgccgccgcactgtaatcttgctgacggagagtacatcctcgtgccggagcaaggagctgctcaggaggtagccccagatctagcacccgagcctgcaccagaggacctgcctgccactgctttggaaggcaagccccggttttatgcataa

SEQ ID NO: 24205 - DNA, 624 bp, Zea mays
  Peptide Sequence Number=SeqID_67580
atggctgagaggtaccaactcccatgggagttgcgttcctccaacgaggaggcgaaaaggcggcggatacccccccatcccgggggcttggaagacgggaagacccgacgcttaagggaggaagaagacatggttgccttacgaaaggagccccctccttttaaaggcaactccccctacgtgcgcccccaggcgccgcgggccgagtcttctccaacacgctccaaggccctcccctgcgactcgggggctgggtcccgcatgtcatgcaagccggctcagggcagaagaagccaaaccgccgcgcatgggaccgggaaagggggataccccgaaagggatccttctccgcgaaggaaccgggctccgagccccccattactgatcaggggttcgaaggctggccccccgagggttcaacagtcgcctcagatcgcgtgggcccgacacccactactggtcaggggttcgaaggccagccccccgaagggctccatggccgcctcaggctactcgggctccgcgcccattactgatcaggggttcgaaggctggcccccgaaagggttcacagtcgcctcagacaccgagcgagggatgaccaggggtacgttcgatacataa

SEQ ID NO: 24206 - DNA, 188 bp, Zea mays
  Peptide Sequence Number=SeqID_67581
atggctgcatcaaagatcgaggtggcaggctatgatatcgatgataaaaacctcaaaagcaccgccaggaagaaggtgacggccgggagcgagctgtctgccgcagatgccaccgttgcagtggtgaacttgaggctcacgtggtataggttcacccctaccgtaatcctgaaaggcaatttccacag

SEQ ID NO: 24207 - DNA, 258 bp, Zea mays
  Peptide Sequence Number=SeqID_67582
atggagagagtgaagctgaggagcgcttcaggcatagccaaggtcgccggcgtagcgctctgcctggcgggagtcttcaccatcgccttgtacaccggcccgtccgtgagccctatcaaccaccaccgtgccttcgcctctcaagacccagcaccgaaacctgttgtagttcccagggggtatggatcaaacggacgttgctcatggtggtcaatgatgctgcttgagacttccatgttattgtgttctgatacttga

SEQ ID NO: 24208 - DNA, 720 bp, Zea mays
  Peptide Sequence Number=SeqID_67583
atggcgttcctctctccctctgcgcacggcgctcgcttctccctggcgcccggccagaatttcttgcggcgcgaagcttgctccctgcgcccgtcccacatggcgctcggccgcccagctgtttcttcctccttgcgctcggatttcctctactccctggcgaactcgccccagccccagctcgaatttcttctctgccgtgcgcgctcctctgctctgaccgcgcgtctcgcccatggccgccgttcgccgtcgagtccatacgcgcgcacctctgctcggatttcatcaggcctgcgagctcccctacgcgctctgctcctccagctgcgcgcagccgtaattctcctagccccacgccgactgctcgcctctgcgcagcgctctgccttctggtgctcgccctgcctgctcaagcgcgagctcagccgagtccctctgtcacgtgcgctggtcgtgctccactttgcccatcgcggcgctttagctccagccctctcgactcggctcggctttaattcccaatcatgtcctctatatacgtcaccctcctgtgtcgtcgtcgttccacgtgtcgccaaaaaatttcaagagtcgagtgaagatggagccagcaacatggtgttcaccaagtgcgcgacaaaaagctcggacatcttgtgcgactcaagttcgattcgccaaacttattcagtcgaggaaaagatcttcagcaattga

SEQ ID NO: 24209 - DNA, 120 bp, Zea mays
  Peptide Sequence Number=SeqID_67584
atggttggtttgcaggtggtgatgaggatgatggtttttgattatgattatggtaatggtaaacaaggcgtcgaggcggatcttcttgagttccaggacgtcgacgagttcgaggattag

SEQ ID NO: 24210 - DNA, 261 bp, Zea mays
  Peptide Sequence Number=SeqID_67585
atggaagttttgacattaattggactgaactctccgaggtcagtgctgttggttgttattgcaacattccttagttattgcttattagctgccaaatcttcagtgacatatttgttactacctgctagactccaagaaagggttggttctttcagtgtggtttccaatggagaaaaaggggcctcagccctcacagcaactgagctgaatgctgccgtgtacagatacctccaggaatcgggtttcagaaccataatataa

SEQ ID NO: 24211 - DNA, 789 bp, Zea mays
  Peptide Sequence Number=SeqID_67586
atggacttggagcgtatggacgagacgtcgtcggtgaacgatcagagcgcggaacggcggcccacggtggccggcggcggcggcggcgccatgccgtggctcgacctcacgctggccgtgaccgcccctcgcgacgagttcccggcgacaacgacggggactcctcgtccgccgcctcagacggcgagccgcgccccaagcccgtgcccgtgccgtcctctcctcctcctcctcctccctccgcgcccgcgccgcacaaggtgttctcgtgcaacttctgcatgcgcaagttcttcagctcgcaggcgctgggcgggcaccagaacgcgcacaagcgggagcgcagcgcggccaagcgctcctccgcgccgtcgcccgcctaccagtaccagtaccaccacctccacgcggcgcagcggatggtcatggccggcctgccgctcgaggcgcacgccgccctggtgcgcgccgcgctgcgggtcagccccggccagcgcggtcatccaaaaagggcgccgccagccaggagctcgccgcccgcggcgcggaaggctgccggtgccggggccccccggcgcccacgagcacggccccccaggttccacgacggcaacagcgccgcccgccacctcgtgggcgccggcgctgctctacgagatcgaggagccggtcagctcgacgtggccggggagcttccgcatgaggacgcagcctgagccgccgagctcggaggagcaggcgtcggcgtcggagcagagtaagaagatagacttggatctcaggctgtga

SEQ ID NO: 24212 - DNA, 213 bp, Zea mays
  Peptide Sequence Number=SeqID_67587
atggcatggccaacctccttgtcaggtgggctcaggtacgtgaccgatccctcggccctagcctcgactctcaatagaaatctggcgtctccaccgggcataagtcaacaacaagtacaagacccatgctccaagccataccgtctactagggttcggcttcgcctactcaccatacgtggccagctccggtactcatagcagccctatttga

SEQ ID NO: 24213 - DNA, 1149 bp, Zea mays
  Peptide Sequence Number=SeqID_67588
atggagaactctgccgccgccgccgccgaacggccgcgcctcacccgcgcagccgccaagcgctcagccgtcgtcacggctgtggccgtcgccgccaagcgcaagcgcgtcgcgctcagccagctgcccacgctccccaacgccgtgctcggcgcgcacgacgacgacgacgacaagcccgtcaggaagcagcgcctcctccccgccgccaagcccaagcccaagcccaaggcagcgcccgcgcctgccgcgcccgccgccgcggatgacacggatgacgacattcagctctgcaagccctacgcttccgacatctactcctacctccgctccatggagtcgcaggccaagcgccgcctcgctgttgactacatcgcggcggtgcagatcgacgtcacgcccaacatgcgtggcatcctcatcgactggctcgtcgaggtcgccgaggagtacaagctcgtctccgacacgctctacctcaccgtctcctacatcgaccgcttcctctctgccaaagttctcaacaggcagaagctgcagctcctcggcgtctccgccatgctcatcgcatccaagtatgaggagatcagcccgcccaacgtggaggatttctgctacatcaccgataacacctacaccaagcaggaggtagttaagatggagagtgatatactgaatgtcctcaagtttgaggtgggcagtcctaccgccaagacgttcctgaggatgttcatcagatctgcccaagaagacaacaagaagtatcctagcctccagttggagttcctggggagctacctttctgagctgagcttgctggattatggcttgattcgctccttgccgtcacttgttgcagcctcagccgtctttgttgcaaggctgaccctggatccacacacccatccctggagcaagaaggtgcaaacgctaacaggctataagccatctgagttgaaggactgtgttgctgccatacataatttgcagctcaaccggacatgtcaatccatggtggcgatccgggagaaatacaggcaacaccgatgtactaactgtggaaaaatctttgaacagttcaagggtgtatcagctttgctacctcctgttgagatccctgcatcatacttcaatacactgaaggagtag

SEQ ID NO: 24214 - DNA, 76 bp, Zea mays
  Peptide Sequence Number=SeqID_67589
gaaaaatcaagttgaaattaaagatggccggtgcgccaacggctccaaagtgccaacggtcggcttcgccaaataa

SEQ ID NO: 24215 - DNA, 1296 bp, Zea mays
  Peptide Sequence Number=SeqID_67590
atgcaagctggcccaggacagaaggagccaaaactgccacgcgcggtgcgtgcaacttcccagcagttacaagccttcctccactattgcccggaccagcgggtgaaagggcggactgccatgcaggcggcatgcaaccgcaccaagggggcacaccctttggacttcgacgcgttcaacatggaggcccaggcccacacgtcatgtaatcggcacgccggttactacgtgcaagaaactgcaccgccactcgcgccagtaccgcgccttctcgactgcggaaccggtgccgcgactcgaggcgggcggaagcagcagtcaagtcgtcagcaagctcacgccccctcctgggacagcgagagaaccctctcccacggcgtgaagacgacgcgtccatgttccgttcctcgaacggctcgcgcacgcacaacggctgccccgcgaaccactcgtcccgtcgcattaactctacgacaggacatgcgacacctttggcaggcgaagcaggcgacgcttcacctccgccataatgacctcgtcaaaaaagggactgggaaaggggatactccgaaagggatccttctccgcgaaggaagcgggccccgagcccccctactaatcagaggttcgaaggctggcccctcggaagggttcaacagccgcctcagagcactcaggctccgtgcccactattggtcagaggttcgaaggctggcccctcggaagggttcaacggccgcctcaggccactcgggctccgcgcccactactgatcaggggttcgtaggctggcccccgaagggttctgacagccgcctcagagcacacagagcgagggatgaccctgggtacgttcgatacataaccaaggctcgggctacgctcccgagcctcgggcgccataggaagctccgcctcgcccgaccccagggctcggactcaacctcgacgctggacgacggactccgcctcgcccgaccccagggctcggacacaacctcgacgctggacgacggactccgcctcgcccgaccacagggctcggacacaacctcgacgctggacgacagactccgcctcgcccgacccagggctcggacacaacctcggcctcggaagacggtctccgcctcgcccgacctagggctcagactcaacctcgacctcggaagacgatctccgcctcgcccgacccagggctcggactcagcctcgacctcggaagacagactcgacctcgacctcggaggagcctccgcctcgcccgacctagggctcggaccgaccacgtcatag

SEQ ID NO: 24216 - DNA, 885 bp, Zea mays
  Peptide Sequence Number=SeqID_67591
atggggagcactcgcgtcgctttcatcttgctgtcgttggaggaacgcaacttcgcggaagttggtacctttcagccatcgttcggcttcaaggattttcatcaggcagcccggctgcatccccttcgccggtggtcacccaagacggtgaccaccagtttgatgggggggggaagcaagccgggctgcgacctctgccccgccctcagcttcaaggatgttcatcatcctggctggggcgaaggccggactgagtcagagctctacctcccgcgtggattcgtgggtcaccttctccctcagcattcaggggagagggcgctcaccggcctagccggagggtcggacttcgacaacgtggggctggtcggcggcgagcgtcgtcagcttcagcgcattgggctcgctggctcagctggctcagctggctctggctcggctcccggtgccccctcccgccgcgagagcggttgtcgcgccgcatgcaccggaggaccgccaaagacgtcgcgcgctgctagggtggcgttcgtgttcttgggctatcctgcctttgctccgatggcttccgtcgtcggtgctgaggtggtggcggctgaagaagtcctcgtcgccgacgggatcaccgccaccatccgcgctccgagcctccggctcttgggctttgatagcttgtcttcgcccctcgagtggggaccagcgtccgccctgaggccgtcgctgctgctgtttggccacctggagcggaggtcgttgtcgctgctgccggagcaggtggcggagtccctcggctcggtcggccttgccgcccgaggcttctcttgcttagttaaaggaaccctcggccgctctgcggtgagccggggccgagggcagcggtgttag

SEQ ID NO: 24217 - DNA, 159 bp, Zea mays
  Peptide Sequence Number=SeqID_67592
atggcgccgtcacaccgtccagctcatcatcacatgaagctcaacctggcacgacgccatcgtcccagcaagccgctctctcctttagctgctgcatcgccgacggtacccctcgccagtgcccatggcaccgtcgctggtcgcgcttgcctcgcctag

SEQ ID NO: 24218 - DNA, 1707 bp, Zea mays
  Peptide Sequence Number=SeqID_67593
atggcggcagcaggcgggcggaagcagcggtcaagtcgtctgcaggctcacgtccactcctgggacagcgagagaaccctctcccacggcgtgaagacgacgcgcccatgttccgttcctcgaacggctcgcgcacgcacaacggctgccccgcaaaccactcgtcccgtcgcattaactctacggcagggcaggcggcacctttggcaggcgaagcaagcgacgcttcacctccgccatgatgaccgcgtcaaaaaagggaccgggaaaggggatactccgaaagggatccttctccgcgaaggaagcgggccccgagccctcctactgatcagaggttcgaaggctggcccctcggaagggttcgacagccgcctcagagcactcgggctccacgcccactactggtcagaggttcgaaggctggcccctcggaagggttcgatagccgcctcaggccactcgggcttcgcgcccactactgatcaggggttcgtaggctggcccccgaagggttcgacagccgcctcagagcacgcagagcgagggatgactctgggtacgtccaatacatggccgaggctcgggctacgctcccgaggctcgagggctgctctcgcaaacccggctccggccaaaccgttgacagcgtcaacataccagcccgagaactcggaacctgactatgcacccgggctacggccactggtaacccccatcagcacaaagctgcaaaggcctgatgggcacgactccggtcaaggctccgtccacacaagggacacgatctcgtctcacccgagcccaacctcgggcaggaacagtagaccaaggcagattcacgcctcgcccgagggtctcctcaaacaacggacgcaccttcgactcgcccgaggcctagctcaggcaggcttcacggagaagcaaccttggccagatcgccacaccaaccgaccgtatcgcaggagcattcaatgcaaggatcgcctgacaccttatcctgacgcacgctcctcagttgacaaggccgcagaaaacaacaccgcctgcgctgctccgactgctgtgccacccgtcagggtgaggctgacagccgccaagaccggcctcaggcgccataggaagctccgcctcgcccgaccccagggctcggactcaacctcgacctcggaagacggtctccgcctcgcccgaccccagggctcggactcaacctcgacctcggaagacggtctccgcctcgcccgacccctgagctcggactcagccttgacctcgaaaggcggtctccacctcgcccgaccccagggctcggactcaacctcgacctcggacgacggtctctgcctcgcccgacccctggggctcggactcaacctcgacctcggacgacgaactccgcctcgcccgacccctgggactcggactcaacctcgacctcggacgacggtctccgcctcgcctgacctctggggctcggactcaacctcgacctcggacgacggtctccgcctcgcccgacccctgggcccggactcagcctcgatctcggaggagcctccgcctcgcccaacctcgggctcggaccgaccacgtcacagggagccccttacggaagcaaggagacatcagcaaggatccgacagccccgacagctgtgcttccacagggctcaagcgctcctccgacggccacgacatcacatga

SEQ ID NO: 24219 - DNA, 573 bp, Zea mays
  Peptide Sequence Number=SeqID_67594
atgccggaagacggtctccgcctcgcccggccccagggctcggactcaacctcgacctcggaagacggtctccgcctcgcccgaccccaggactcggactcaacttcgacctcggaagacggtctccgcctcgcccgaccccagggctcggactcaacctcgacctcggaagacggtctccgcctcgcccgacccctgagctcggactcagcctcgacctcggaaggcggtctccacctcgcccgaccccagggctcggactcaacctcgacctcggacgacggtctccgcctcgcccgacccctggggctcggactcaacctcgacctcggacgacggactccgccacgcccgacccctgggactcggactcaacctcgacctcgaatgacagtctccgcctcgcccgacctctgggggctcggactcaacctcgacctcggacgacggtctccgcctcgctcgacccccgggcccggacttagcctcgacctcggaggatcctccgcctcgcccgacctcgggctcggaccgaccacgtcacagggagggccattattaccctacccctag

SEQ ID NO: 24220 - DNA, 264 bp, Zea mays
  Peptide Sequence Number=SeqID_67595
atgacgcagaaattcgagatgtcgatgatgggcgagttgaactacttcccttgggttccaagtgaagcaactcaaggacggcaccttcatctcccaaacaaagtacacgcaagatctgctaaagcggtttgggatgaaggacgccaagcccgcaaagactccgatgggaaccgacggacacaccgacctcaacaaaggagtctcgaaggtggattgaaagggaaagattttggtgaggcaatggggttaaagggccaagattga

SEQ ID NO: 24221 - DNA, 375 bp, Zea mays
  Peptide Sequence Number=SeqID_67596
atggagcagtacaccaagcattcactaagcatcctaagactcccagacttcgcctccacgcatttgatcgattacgatcacctattcaccccctctaggtgctctcacttatcgcctgagacgggctcgggcgagatggatttggcggccctaaggcgaggtagccttgggcgaggcgaagatgggggacctgagtcgtgtcaggctcacgcgaggcggaggcctgcccgagtatatgactacttcgggatcgagcttgggcgatttggagattttgaaggaccctccgggaggaggcttggtcggaatggtgcttttatggggaagacccccgaagtggacctcgggcgaggcggagacctggttcccctatga

SEQ ID NO: 24222 - DNA, 1665 bp, Zea mays
  Peptide Sequence Number=SeqID_67597
atggcgggctatgggatccagtcgatgctcaaggaaggccaccgccacctctccgggctcgaggaggccgtgctcaagaacatcgacgcctgccgcgagctctccgccatcacgcgcacatccctgggccccaacggaatgaacaagatggttatcaatcacttggacaagctgtttgtcacaaacgatgctgccaccatcgtgaatgagcttgaggttcagcacccggctgctaaaatcctggtactggctgccaaggctcaacaggaggagattggggatggagccaatctcaccatatcgtttgctggtgaactgcttgagaaggctgaggagctcatcaggatgggcttgcatccgagtgagatcatcattggctacaccaaagccatcaacaagacaattgaaattttagaggatcttgttgagaaaggctcagagaacatggacgtaagaaacaaggaggatgttgtgttgaggatgagatctgctgtcgcaagcaagcagtttggccaggaggatatgctgtgccctcttgtggctgatgcctgcattcaagtttgccccaaaaatcctgcaaactttaatgttgacaatgttagagtggctaagctacttggaggtggtttgcacaattcttctgtggtccgtgggatggttctgaaaaatgatgctgttggtagcatcaaaagggcggagaaggcaaagattgtcgtatttgctggtggtgtcgacacctcggcaactgaaacaaagggaaccgtgttgatccattccgctgagcagctagaaaattatgctaagactgaggaagctaaggtggaggagcttatcaaagctgtcgctgactctggtgccaaggttattgtcagtggagctgcagtgggtgacatggcacttcatttctgtgaacgttataagctgatggttctgaaaatcagctcgaagtttgaactaagaaggttctgccgtactactggggctgttgcaattttgaaacttagccaacccaatgcggacgaactaggatacgcagattctgtttctgtagaagaaattggtggtactcgggttactgtcgtcaagaacgaagatggtggaaattcagtggctactgttgtcctgagaggcagtactgacagtatactagatgatcttgaaagagctgttgatgatggcgtcaatacatacaggtcaatgtgcagggacagtaggataattcctggtgctgctgcaacagaagttgagctggcaaagagattgaaggagttctctttgaaggaaacagggttggaccagtatgccattgcgaaatttgctgaaagctttgaaatggttccaagaaccctggcagaaaatgctggacttagcgcaatggagataatatcctctctttatgctgagcatgctagtggcaatgcgaaagttggcattgatctggaggaaggcgcctgcaaggacatctcgactttaaaaatatgggacctctatgtcacaaagttttttgccctaaaatactctgccgatgctgcttgcacggtgctgcgggttgaccaggtttcagagcagagatcatactttatcttggcttttggttctgtagaaggtttgggtgcctggagttcacttttggaaggtctgcacggttgcgcggatatcacatag

SEQ ID NO: 24223 - DNA, 725 bp, Zea mays
  Peptide Sequence Number=SeqID_67598
atggctagcccatcttctggcaacaatggcaactatgatccaaagacagaaaaaacaaggaaggctagctcaaatgattcaggttggaagtatggttattgggcaaatttgaaaaatagggatcaagtgacatgcaacctttgtgacaccacagtttctagagggataaaaaggctaaagcagcatctagaaggtggctatgaagatacaaagatatgttcaaagaccactactgcaattataaaggagatgagggattattggaaatccaatagaaggaaaagagctattttcctagatgataatgagcagcaagaggaggaggaggatgtaatggtggtggatgcaacagctgaatctgttcaagttcaacaagatgcgcctatagaatcccaaggctctaaggtacaaccaagtccagggactgcagccaatcaaagacgtgcaacatatctgtataagactccaacatcaatcaagaccaaggcaaatcaagcaagcaagcaaaactcaattgtggagatgcttcggaaatcacctaaagatgtagttgatgaaaggcgtaaagggtgttctcaacccacaattccagccaagatgaagtccaaagaggagaaggattatgtggatatgcaatgggctttgtggttttatgaatgcggtgtgccatttaatgcagcagcagcaacacaatttcatgttgctgttgaggctgaaagggaaat

SEQ ID NO: 24224 - DNA, 1346 bp, Zea mays
  Peptide Sequence Number=SeqID_67599
atgcagtcggcatgcgaccgcgccaagtgggcgcaccccttcgactccaacgcgcccagcatggaggcccaggcccacacgtcatgcaaccggagaagcgagcgacgcctcgccttcgccataatgaccgcgtcaaaaaagggaccgggaaagggggataccccgaaagggatccttccccgtgaaggaaacaggccccgagcctccttactgatcagaggttcaaagactggcccctcggaggggtttaacagccgcctcagagcgcttgggctccgcgcccactactggtcagaggttcgaaggccggcccctcggaaggattcaacggccgcctcaggccactcgggctccgcgcccactactgatcaggggttcgtaggctggccctcgaagggttcacagccgcctcaaacacagagcgagggatggccctgggtacgttcgatacataaccaaggctcgggctacgctcccgaggggacttcgcgcagaactcctcagcctcgggaattttcagagtcggcgcgctataattcaccggactgtccggtgtacaccggacagtgtccggtgctccaagaggacgcggctctggaacttggcagcctcgggaattcgcagcggctgctccactataattcaccggacatgtccggtgtacaccggactgttcggtgtaactgcggggcaacggctacttcgcgccaacggtcacctgcaacggcatttaatgcgcgccagagcgcgcagaagtcagacacgcgcgtagtggcgcaccggacactctacatgaaatctgccagtcagactggcaaacaggtcgccaggagctgtcaggggcggttcaaccgccccctgggcggttcaaccggtgttggtcaacttgaccagtctgcagatgttgatcctagggcaatagatcttgccatgagaatcgccgaaaggattttcctcaaaatgaaggaagatgaggcgaagaacaagattgaagaagaaaatgatcgatggagaccaaacgacgaatccacctcttcacaaggttcgtctttcaaatccacttctcatatgtgctttatcgctaatgggagtgacagtgaaagcgaaagtgaggatgaggaggagcaagaaagtgatagtgaagatgaggatgatcttcaacaattcttcgctcagctaagcaagaaaaatcggatgagcttgctcaaactcatggaaagagcggaagaacaaaaagaaacacttcataagcaagaagacttcctcattagaaaaatcgaagacttagagaagttgaccaaagagcatgagaagctaaagtgctctcatgatgatttggtccaaag

SEQ ID NO: 24225 - DNA, 585 bp, Zea mays
  Peptide Sequence Number=SeqID_67600
atggcgcctcctgttgacgtggtcgatccatgccctgggttgggcgaggtggaggctcctccgaggtcgaggtcgagtctgtcttccaaggccgaggtcgagtccgagcccctggatcgggcgaggcggagaccgtcggctgataccagggctgagtccgagccctggggtcgggcgaagcggagttcgtcgtccttcggggctgaccccgagtccgagccgtggggtcgggcgaagcggagttcgtcgtcttccggggctgagcccgagtccgagccctggggtcgggcgaagcggagttcgtcgtcttccggggctgagcccgagtccgagccctggggtcgggcgaagcggagttcgtcgtcttccggggctgagctcgagtctgagccctggggtcgggcaaagcggagtttcccatggcgcctagggccggacttggctgctatcagcctcactctgtcgagtggcacagcagtcagagcggcgcaggcggcgctgtcctcttgtcaggccggtcagtggagcggcgaagtgactacggtcacttcggctctgtcacccggagggcgcgcgtcaggataa

SEQ ID NO: 24226 - DNA, 345 bp, Zea mays
  Peptide Sequence Number=SeqID_67601
atggatccggtgctggttgctttgggtaattgggctcacgtgaacttcggcccgagtttctacagagcccaggcggaggtaggcccagtagagtattctgggcaattggagatcaaaacagcccaaccacatcactgcctggtgcggtggtgcctgcactggaactctgggactggaagcttccgcagtaccgccccactcaaatctctcgacacctgtcctctcggcgtgatctcgctcactcgtgggctcgtggcgacaactgggcgaccgacgccgatgccaattgccaagtgccctggtcttgatcggtctcttcgccaggtcttcgcctccaggccttag

SEQ ID NO: 24227 - DNA, 3210 bp, Zea mays
  Peptide Sequence Number=SeqID_67602
atgatcagttgcaacagggaacaggcgttgagggccagggaaattgctctaaagaagatagaaagcaaagatttttttggtgcccagaagactgtgcttaaagctcaaaagctttttccagagctggagaatgtgtctcagctgttaaccatctgcagtgtgcactgtgcagcagagttaagggtgaatggagagatggacttctatggagtccttcaagtggaggaaggtgctgatgaagccttgataaaaaagcagtaccgcaagctcgcagtttcacttcaccctgataaaaattgttttgtgggtgctgaggcagctttcaagttgattgctgaagcttattctgtactatgtgatcctgcaaagcgaaatgattatgacctgaaaaggagcaatgtatttagaaatgtgccaaagctagccaaacagcaaccatcaaagtggactaattcacatagacagagcatgcctggatttagagaaacattttggactgtatgcccaaattgtcggatccaataccagtactacagcagtatcctgaacatcatggtccactgtctgaactgtaaaaggagttttattgcatacaggctgaatcaacagcccatggccacttcatcaagtgtacccaacaactcccaagttcctgcaaacatgtttgtgaataaacagcgcgacactcccaatcaacaaggtcactctgtgaagccttcatgtgtcggtagaggcaccaatgtcaagccaaatggttaccaagaccttgttcacatgtttcgaaatcaacaacatcgcgttcacagtcaaaatggtcatcctgtgaagccttctgcaggaagagacacagatgcaaagctgagaatgaatgtggcccaccgtgatgaatacatgaaagggaaaggtaatgacccggagatgtcgagggggaaatttcaattttcaacgctgaatgaagataaattttctgtcccaatgggaaatggggacatgcaaggaaggtcatcaatttcagctcttgctgatccaaacattattgacacacagaaatcagttcaggaagatgcgtctgcagtgccagatgctatggatctgcttggctctgcaaggccttctgcaggttggaaaacatatggagattcaaggataaatgttgcaggtaaaaaattgatgctagatcatgttgatctaagtattattggcagaagaaacttgcaaagacaagatgcatctacagtgccttctagtgccggatcctctggtacccaacagtcagttaagaggaaaacatatgctgatggcaatatttgcctaaacacggataccaacaagagaccaatgaagaataaatgtccatctgatgttaacatgagttgtaaacaagtatgtgatgatggtgtcaccaatgctggcatacaattagatccacttcatttgtccagcaatgtagacacccaccacaagccaaaagttactgatcatcatgcaaatatcaaggaaaaagctactgaaactgatagtgataaggacaatatcatggaagaagctcctcaaactgttagtgaaaagaagccttcctactctgagtgtgtcaccttacctgatctagatttcttcaattttgagaaggttaaggatatcaatgtgtttgaagttggtcagatatgggccctctatgataaccttgatggcatgccaagatattatgctcgtataaagcattttgatgcctcgaacttcgaaatacattcaacttggctggagtatgttgcaatggatgaagatgagaagtggactgatgaagaactgcctactgcttgtggaaactttcgccttggaaaaggaaccgatatattagaaaaggaaatgttttctcacattgctacttggacgaaaggtaaaaagaggaagtcgtatgtcatatatcctaacaagggtgaggtatgggctctttacaaggggtggagcatggaatggtgctcagatgcagataatcatagatcatatgagtatgaggttgtggaagtcgtgtcaagtatgtcagccaatggtggcgcgaccgttgtcccactggtcaggattaacggatttgttagtttatttgcaacagctaaggacaaaccttcatttgtgataccatcaagtgagctgctccggttttctcacagcattcctttttataggactaaaggaaatgaaaaggttggtgttccaagaggatttctggaactggacaatgcatgtctccctgctgacctggatgcagcattcccttctcttactcttgattcttacatgtctctcggcaagaacgaaagcagcacatttgttgatgtgaccactgacaatacaagttgtaggatggatctgggagatgatcaaattgctcaaaaagagaatgaccacccaatatctacagacaatcccaaagatatgtgcccggaacaaaatacacccttaaaggaaaccactaattatgccaaagagtctggtgattgctctcttcaaagcagcctctcccccatcatatacacatatcctgattctgatttccacagatttgaagaaaatcgctcctgcgagaagtttgaacgtggacaagtatgggccctgtacaacaacattgataaactccccaagttctatgcctgggtaagaaaagtcagggaagagccgtttagagtcgaggtgatctggctcgaggcctgccccgaacaggaccaggagaaacagtggctggagcaggacatacccatcagctgcgggacattcaagatccgaaaatggagagccgagtacggcacaaacgacaccttctctcatcaagtaaatgccagagaaaccggcgcaaagtgggcgctcgaaatcctcccgcaggtcggcgacatctgggccgtctacatgaactgggcacctgactgggtcccgtgcggtgctgacgcctgcgagttcgctatctgcgaggtcgtcgagcgcaccgctgaagctagcacaaagctcgccttcctggcccaagtcggcggctaccggtccgtgttcaggcctgacgagcagaggggagtgttggaggtgcctgccacggagaggacgaggttctcccaccagataccttatttccggctggcgggagagggaggtggtgggctccgtggcttctacgagcttgaccctgcttccgtccccgacgccttcctgtatggggacacctga

SEQ ID NO: 24228 - DNA, 702 bp, Zea mays
  Peptide Sequence Number=SeqID_67603
atgctaactggcgagccgtggacgctcggccagctctgctggccgactaaggagggcgtcgtgggcctcaccgccggcgagtgcgtccctgcgggtgggcacactgccgtcggttgtccagcacagctacaagttgaggtacaaagccagcacatgcttgggcagcctgcaactcagttagccatgactttcttcgtcatagtttctttagctgaattattttgcacatattacatggatgtgcactacccatgttgttcaatatcccacatcaatatcgaattgagtgtgatgactgatgacaactaccagttattgtttcttgaattggcaacaacttggtcttgtttgctgtactatgtctaccgctggctttttaatataaaagcacttatacgctctgcaaaaattccagttaagtatgtcaatcctgtaacgaagctctgcattgtccgcgtgtctcgcgaagaccaccagaaagtttgggctgctatgacgatggtgcggtgcattgggaagatccccgtttcgttcaacttgctcgacatgagtggaagcatcagggcttgcaagaaagctgcattggagtgcgatgaagcgaaatttgagcaatacaagctggttgcaggtgattgtatcacggcagagatcacccagtctgtagagaagtgctttgagaagatcagaggactagagagctaa

SEQ ID NO: 24229 - DNA, 633 bp, Zea mays
  Peptide Sequence Number=SeqID_67604
atggaatctgccgcggcgatttgtgcccagaagttgtccttggcagttgttgcagcccatgacacactgaatgcttctgctgccgctagtatagttgctggtgattattgcgccacattttccataggtaacgatgtggtttcaactcttgatgttcttgaatccgctgttgcggcggaaaaaagtgctatgcattcttacaaacaggcaagtgcagctgtcgattgtgctaaggagacagtggccaagtattctgaggtgaaccaaaaactagcgcaagcactcaaatatgccatgtctcaaatgagtgatacggctaagaaactacaagatactgcctctttgtgctacacagacgaagatgttgtagacggtttcaagcttacccaagtagctcgttcaatggacgagttagctgaaatgcttgaaggaactgcaattgactgccaagtctccatgatggatccaacaactatgttagaagctggctatgctagtgaagacagtgcggtgtgggaggacgtattccgtgaccgagaaataatgaatcagccagtagaagcggagacacttgctgagcactgtgctaagtgggggcttaattacaatgagatctgggatagatcagtgtaa

SEQ ID NO: 24230 - DNA, 204 bp, Zea mays
  Peptide Sequence Number=SeqID_67605
atggccggccggctcgtcgtctgctttatagagggatggaggcgaaacgggcaaacggccggccagctcttcgcctgcctgggggcgctcgaggcgagtggtccccgttcaccaggcttaccagtcagaacgcagggtcaaggtgctgaaaaggatctgctgccggccaactattgtgatccacgatacaccaagagcaagtaa

SEQ ID NO: 24231 - DNA, 1476 bp, Zea mays
  Peptide Sequence Number=SeqID_67606
atggagacccaagcgccggagaaggagaactacctccctgaaaagtgtttctttctttctcttgctttgtgtgtgggcaaccaagatcagcacaagactgtgtcagctaacagcggcaatggcgggaaaccaaacaaaaacaaaaacttgcaggatgcgaggagcgcacgggagaaggccatcgacgagtggctcccgatcacctcgtcgcggaacgccaagtggtggtactccgccttccacaatgtcaccgccatggtcggcgccggcgtgctcagccttccctacgccttgtccgagctcggctggggccctggcatcgccgtgctggtggtgtcgtgggtgatcacgctgtacacgctgtggcagatggtggagatgcacgagatggtgcccggaaagcggttcgaccggtaccacgagctggggcagcacgcgttcggcgagaagctgggcctgtggatcgtggtgccgcagcagctggtcgtcgaggtgggcgtgaacatcgtgtacatggtgaccggcggcaggtcgctgaagaagttccacgacgtgctggtgtgcggcgacggcggggcgtcgtgcgaggggaaggacaacatcaagaccacctacttcatcatgatcttcgcctccgtccacttcgtcctctcccagctccccaacttcaactccatctccggcgtgtcgctggccgccgccgtcatgtcgctcagctactccaccatcgcgtggggcgcgtcggtggacaagggcaggatggcgggcgtggactaccacctgcgcgcgaccacgacccccggcaaggtgttcggcttcttcggcgcgctgggcgacgtggcgttcgcgtacgccgggcacaacgtggtgctggagatccaggccaccatcccgtcgactcccgagaagccgtccaagaagcccatgtggaagggcgtcgtcgtcgcctacgtcgtcgtcgcgctctgctacttccccgtcgcgctcatcggctactgggcgttcggcaacagcgtccaggacaacatcctcatcacgctcagcaagcccaggtggctcatcgcgctcgccaacatgatggtcgtcatccacgtcattggcagctaccagatctacgccatgccagtgtttgacatgatagagacggtgctggtgaagaagctgcgcttccctcccggtctgacactgcgtctcatctctcggaccgcctatgttgcgttcacaatgttcatcgccatcaccttccccttcttcggcggactgctcggcttcttcggcggattcgcctttgcaccgacgacctatttccttccctgcgtcatgtggctcgcgatctacaagcccaagaggttcagcctctcgtggttcaccaactggatctgcatcattctcggggtgatcctgatgattctgtcgccaatcggagggcttcggcagatcataatggacgcgaaaacgtaccagttctactcgtaa

SEQ ID NO: 24232 - DNA, 1830 bp, Zea mays
  Peptide Sequence Number=SeqID_67607
atggcgatatcggcgaaggagaggaagctgagcaggctcgggagttgtaagggcggtgcggcggctggaagtggcagcggcggcggcggcggttcgcctgctgccagggcccaccggtcggtggcggcggcgccgcagcggcgtgtcttcgctgcgctctttcgcgttcctgtgcgccggcgtagtcgtcctcggcggcgtgcacgtcattggagacgaggtgctcatgttcttgtctctgatgcagcaacgttccggccagtgctcaggacggcgtggccggcggcaaccctgaacgccatttcctccgatgccagagcgcggcgaggtggcagcagcgccgacaccaccgtgctgccgtcagtccaaatccggcacgcggtcgccatgccggaccgtgtactcctgatcctcaaggacgggccgttgctgccatctcccgagcggttccagtgcctgtactcccccgccaactcctcggaactgcgccgccaccgacccctcttggccgcctcctcacccgatggacccagcctcgtccactgccctgccgagccatcgtgtgtggacgtctctctgtccctgtccctgtcccctccggtggcgccgctgcagtgggacaggcttgtgtacgctgcgctcgttgacagcagggacaactccaccgtcgtgttcgccaaggggatgaacctccggccaggccggttgggtgtggcgtcgaggtaccagtgcgtctttggccgtgatctgtggaagccaaagcagcgtgtgctcacgtcccctgtgatttctgccgcacaagaggttttccggtgcgtgactccagctcgcgttcgccggcacctcaggatgacaactgatcccaacggcaatggcaatggcaatgacaagccgatgttggtctccatcagaacgaaggggcagagggactccacgctgccctcgatcgctgaacctgagccacttcctcctcggcacaactacaggcatcatcgacgacggccaaaggcgcactcaatgtgcgtgtgcaccatgctccgcaaccaggcgaggttcctcagggaatggatcatctaccactcgcgcatcggcgtggagcggtggttcatctacgacaacaacagcgacgacggcatcgagcaggtcctcggcaccatggacccgtcgacgcacaacgtgacgcgccacctgtggccgtggacgaagtcccaggaggctggcttcgcgcactgcgctctgagggcccgggagagctgcgagtgggtggggttcatcgacgtcgacgagttcctccacttccccggcaaccagacgaccctgccagacatcctgcggagctactcgaacaggccgcgggtgggcgagctgaggacagcctgccacagcttcgggccctcggggcggaccagaatccccaagcaaggcgtgacgacgggctacacctgccggctcgccgcgccggagcgccacaagtcgatcgtgaggcccgacgcgctgaacccgtcgctcgtcaacgtggtgcaccacttccacctgagggaaggcgcgaggtacgtgaacgtcgggcagggcgccatgctcgtcaaccactacaagtaccaggtctgggaggtgttcaaggacaagttctccgggcgcgtcgcgacctacgtcgccgactggcgggacgaggagaacgtcgggtccagggacagggcgccggggctggggactaggccggtggagccggaggactggccgcgccggttctgcgaagtgtacgacaccgggcttaaggatttcgtgcagaaggcgttcgcagacccggccactggaagccttccatggtag

SEQ ID NO: 24233 - DNA, 393 bp, Zea mays
  Peptide Sequence Number=SeqID_67608
atggccagcctcggggcgagattagatgagttggaggagcaggagaagtacacgatagagtggggcgcgggaaagaaggtgggagggccggagcaggacgacttggcgcacatcgactgccttgtcctcgctagactgtggccagcccagcgtcgccgccgtctgcctcctcgacgaggcacggaccctaaactgagtgtccaccgcgagtacgtcaatctcattgatagctcttctccattcccttccccttcgcctacctcctccctttcaccgcctacggatagccctcaaggtgcaccgggcatgctggacgagctgaaggcgttcggcgaaatgcctcaccccaagagcccgttgtctatcaaagcctcttggttccatgagaactga

SEQ ID NO: 24234 - DNA, 267 bp, Zea mays
  Peptide Sequence Number=SeqID_67609
atggctccgaaagaggtgagcgtggctacagatctgagctgcagcttggtaggctgggcgctttcgcctggttggaggcttggagccttggaaggttctcgcgttggacagctccaaaatgttggatcttgtcacatgcccactagtttcgctttggtgtccaacaaggccacgttcgatgcggccatcgaagaggaagacaatgaaagaatctcaatcaatcactttgtctttttttgtacacgtaattccgaaaaggcactgtaa

SEQ ID NO: 24235 - DNA, 474 bp, Zea mays
  Peptide Sequence Number=SeqID_67610
atgtcaacgatacatttttatgccaatgatatttcaggatttctgtcgaaggccggtgtcaaaagtccagtcagcttcaccccatgcatgtggtgggacatcagggaagaggcgcagatggtcctgggcggtggacgaggaggtggtgcgggtctggagacttggtttccaccaacgctcaccttcagcttccaaattcttcagacagtggcggctaccgatagtggcaatgaagataagatgttggagaaaaccgagacggagctgaagacaacagggcagagttcagttttctaccacccttgccttcagagcttagctaatagatgtttgggttgccaatttgccatgctcccagctttgatggtgctgcccttttatacacacacacgcagccaggcagccaggcacccagctcaaccagaaaaatcatgtgctactctgctctgttttgatactctctgtcatgagtag

SEQ ID NO: 24236 - DNA, 513 bp, Zea mays
  Peptide Sequence Number=SeqID_67611
atggaggggtccttcacggcggtgctaagaacagggaggaggggatttgtggaatttgggtgttacacgccccctgcaccaccactgagcaccccagccgctggagtagctactggaggagacccagacgacggaggcagtgacggcagctcgagcttcagcaccgacctttcagttgaccaggaaccggaaggatgggtagatcgacccatcactcacgacgccgctcgcgggtgtcacttccacgacgcgctcgacaccctactgcgccaggcactcgaccggcgcacttggtccatcgagtatcgctgtgttgtcttccagcacagtcgcggggtttacccggaccgttgggaggcgactgtggcagaacctcccaagttattgggcccacttgcacctgtccttgtctcgaagacctcagactgctatgcatgtgcaccagataacttaacaggatccgtccgagtgccccaaggaccccggataaaccacgaacaaccaggatcgtaa

SEQ ID NO: 24237 - DNA, 1740 bp, Zea mays
  Peptide Sequence Number=SeqID_67612
atggcgctgggtggcacttggccgagcggcctggcggcctgggcggatagcacccatgcgacctgggctgggcgcgcgcgctcctgcggggagagcaacggtcgagtcgtcgaacccgtcatcccctgctcgacccccacctcaccagctcgctctagacttcaatcgaaggtcgtcatcgttccgtgcgtcatcaagaaatcccaagcgtcgggtgaagacgaagccagcagtgtgtcgcccgctctctgcgcccccgacgccccgccatcgccatccccgcgcggctgctccaaggaaggaaggtccgcgtgtggagatggaaggtccgaccccgccagagcatccccgcccccgacgccccgccatcgcccatccccgcgcgggatgctcccaaggaaggaaggtccacgtgtgggagatggaaaggtcccgaccccgcccagagcatccccgcccccgctctcctctctcggccgccatcatggaaggtccgaccccgccatcgccatccccgcgcggctgctccaaggaaggaaggtccgcgtgaggagatggaagccacaccccggtcaccagccgcgcaaatcgcccactagccgcaaatcgcccccttccatccatggcagtcgtgccctctctgctggatctcttgccgcccacaaatcgcaccgtcgcgccaagacgcaagctggagcttcatggcagccgcgcccctaccgcccccaaatctcgccagagacccgcatgcctctgttagccgcaaatcgcccaccagccgcgcccctaccaccccttccatccatggcagccgcacccctaccgtcaaagatctcggccaccaagtatcgcggctgcctgcattgctccccctcctctctccctacttacgcacaccacacctgccccttcctctctccaaatttgccacactccgcgtccacaaccgtcaacggtgctctctccaagtgtggcgccactgtgccgctgccggcgacgaagaaggagccccgctcccacccaccggtgtgccgccactccgcatccttgcgcgctgccgcttttagatcggaagctaacgtcgtttgtctattggctgttgaaggttgtgctgctcttggtaaattgttggagccacaagattttgtagctcccatactttcagatattgtcaatttctcccagacgttcacaacacgatggcgcacggttctgcctcccactcccactcgcgacaccctccacgcagcaccagccgccatccccgcctgccatctgcgcgcttctagcgtctccctcgcccccactctcctctctgctatccacgccgtttgcactggtctcccagccacccgcgagcagagcctccgcccccggatcccacgtcctttgtgctggatccgctccttccggaatctccaaatctcgccgccatcccagccctggccactcgctctcttcgaggatgttcgtgccccagattcgctttgctttggatctgttgccattagttttttgggtgtggaggcaatagacaagttggacgagaggtttagcaaggccatggtggtggtggcgcgatcgggcatctcagtgcggcagcgaaggatgaacgaccgccggcagggcactgggcggaagagcgtcaccatcagcccagagctgacgcagagccggaaccgcgtccacctccgtagcatcttcagcaaggacctcctcactcacaagcaggtcatctag

SEQ ID NO: 24238 - DNA, 669 bp, Zea mays
  Peptide Sequence Number=SeqID_67613
atgcgcgaggttataatccaatttattcttcagcacgctgtttcgacgacgaaatcgcccgtagctttcttctccaaatatcctgacgccgcccagccgccccctattctctttatatgcgcgcgctcatctcctcatgtccccaacgcgcgtcttcttcctcaggctcccttcctgctcctctgccggcgccccaaacctcttcttcctggcgcccagccggatctcctccaccgcgccctccgtgctcctccagctctattgccgcgcccagccgttcctccctgctcagatttcgtcaggcccgcgagctcccctacgtgctctgctcctccagccacacgcagctgcgttcctcccagcctccctgcgctagcgcgcgtcgatctccatgcgctcggtcgcgcctcgctccctacgcacgcgcgcgccctgcatcccctcgacaccggagctctctggcttgcccctctgcgcgccgagtttctcctctgcgcggcgcgcctgggatgcttgtcgacgctcagctccaccgcatgtcatgaagtccctgcgcgcaagctatctgttggccgcgcgcgaagctctctgttcgccgtcgaatcgtcggctcgctgtccttgccgtcgaagttccctcgccgtgcactctggcgtcggctgccgctga

SEQ ID NO: 24239 - DNA, 717 bp, Zea mays
  Peptide Sequence Number=SeqID_67614
atggcacaaactttttcagtggatattggaggatgcgacatccaaaagcaagaaatacgggaggcggttgagttacccttgactcatcatgagttgtacaagcagattggtattgatcctccaagaggggtgcttctgtatggtcctccgggtactggcaagaccatgcttgccaaagcagtcgcacatcataccaccgctgcttttatcagagtcgttggttcggagtttgtacagaagtacttgggcgagggccctagaatggtgcgtgatgtgttccgtttggctaaggagaatgctccagcaatcattttcattgatgaggttgatgctatagccactgctcgctttgatgctcagactggtgctgaccgagaagttcaacgcattcttatggagctactcaatcagatggatgggtttgatcaaacagtgaatgtgaaggttataatggcaactaatcgggcagacactctagatcctgctctgttgcgtcctggtagacttgacaggaaaattgagttccctttgccagaccggcgtcagaagaggcttgttttccaagtctgcactgccaaaatgaacctgagtgacgaggttgatttggaagactatgtttccagaccggataagatcagtgctgctgatactctgacacattttgtgcaacaacagattttttttcttgaatacacattatgggctcttcttggatag

SEQ ID NO: 24240 - DNA, 459 bp, Zea mays
  Peptide Sequence Number=SeqID_67615
gccacctttgcattaaatgcccctgcgatttggtcggttggcgtggcgatttggccaaggttgcttcttggtgaagactgggcctcgggcgagccggagctttgtgctgatgggggttaccagctgagatttaggagccttgaggctggtctggttgttccctcatgcgagctggccgtagcccaggtgcctggtcgggtcccaagttctcgggctggtatgttgacgctgtcaacggtttggccggagccgggtttgcgagagcagcccccgagcctccgcacagggcgagaggacggtcaaggacagactcgacttttttacatatgcccctgcgtcgcctttccgcaaggaggaggggggaaaagcgccatgttgcccgtggagggcgccgaacatggtgtctccagtgagctgctgacgggtaatccgagtggacgcccgtgccccatttgttag

SEQ ID NO: 24241 - DNA, 510 bp, Zea mays
  Peptide Sequence Number=SeqID_67616
atgctctacttccgcattgaactggtgctgcttgactgttctgttgggttgctggggcaggaagacgaggtgcctgctgattctgcctctggaactgacctcctcctgattgattgttctggtgattctgctgctggtgctgagggtactgcttctgaaactgctgctactgaggcggacgctagggtcccttttatagccccaaggcagctaggagccgttgagagcaatccaggaaggcaattcttgccttctgtcgggtggcgcaccggacagtccggtgtgccaccggacaggcactgttcagtgtccggtgcatattgctttcctaaattggcgcagccgaccgttgaaggtttggagccgttggcgcaccaagcactgtccggtgcacaccggacagtccggtgcacccatcagaccgttggctcggccaagcgtcacgtgcggattgcacggccgaccgttggctcaccggacagtccggtgcaccaccggacagtccggtga

SEQ ID NO: 24242 - DNA, 279 bp, Zea mays
  Peptide Sequence Number=SeqID_67617
atgtcgggagcatccgccaagagggagatggaaaccggtgagaaggccataagccacgggaaggctccatcaagggagttcggcgccaaaggcaaggaggaatatgaaagggaaaatcagagaaaagacaattggaaaagacttggctcgagcagccaagactctgctcagtctgggtgcactagactgtctggtggtgcaccggacagtgtccgggtgcgccaggctggctctggtgaaaaggccgctctcgggatttcatcggcggcgtacgactaa

SEQ ID NO: 24243 - DNA, 643 bp, Zea mays
  Peptide Sequence Number=SeqID_67618
atggaagaaggaagggaggggtggggggagaggtggaggacagtatacctgcgttcggggtggtgtgataggaggcgccggagtcagccacccagtcagaaactgtggtgggtggggctagcatcatcatggagaaggagctggcgagagactgctcgtcccacccattggtccaggccccccacacgggctgggccgaaggccccgggaggggaaggagccactgctgaggctggggaggggccgaaggcgcaaccggcggtggagcggcaaacaagacatgcggaggtgtggtggggcgaggagccgaggcacccgtggatggcccgggccacatgtggatggtgccagtccacgggttgtagagggatggccactgagagccacccggagagctgccccggccgcccgacgtgccaccgcgaccgcgacccccccggaaccagtaggctgccgataagctccagggggcagtggggccaaagtgcggtgaagaggaacccccctggagtcagagggggcagtctgaggtgcgctgtagagcgccgtggcgggagcggaggtcgaagtggcagagaggcgaagctcctcgagaagcagattgttcttggcctctgcaaaggtgggaaatggcttcatgcgg

SEQ ID NO: 24244 - DNA, 333 bp, Zea mays
  Peptide Sequence Number=SeqID_67619
atggctcaaggtgatgacggcgggcccagcagtggtagcggcggtggttctggggagctaaactcgcgcgaggaggtagaggaaggggagaacggacctagggtcgcgcatggggactgcggggagccccagtccaggcggcggagtcaatatgtaccacagagaggggaggagaaggctgacttgagctccaacaacccggcagcttgtctctgggcacttgtggcatctaaacttgcactggaggctgtggtgggggtggctgctgctgcacctgctgcatcgctgctaaagtcggaccaattgtctgaactgcctgagtttgcatcatga

SEQ ID NO: 24245 - DNA, 468 bp, Zea mays
  Peptide Sequence Number=SeqID_67620
atggatctccagctacgcaagaaacgctctggtgagcgcagaccagatgaactagagggggagagggtgaaccaaggggtgttccaggtggcgggtgataaggcggagcttaccagggcaagagacaccgcggggggttggatggcaaccgtagaacggcagcgaaaccacggcgagcggcagaacttcctgggcgtgcgcgcagagcctcggatgggttgccaaataaaaataggagaaaatcaagcttcaaatcggtctgtcaggccaactgaatgtcattcgccatggtacagtgctttgagtggatcagaccgccagcacagcaacctcgccgctgacgatctctacgccgtgattcacgccgccgcctggattcgtgttcactggcgggtggataactacggcaaagaaaagatctcacggtggggaatggataggatcgcgaattgcagtttatcgccgtga

SEQ ID NO: 24246 - DNA, 294 bp, Zea mays
  Peptide Sequence Number=SeqID_67621
atgaggaaaaacttcgaagaaagaggaaattttcatgcttcgttgtgtacgaaaagaagggaagcttcgtcatacttcagcttcgtcaaacttcagcttcgtcatcctgcacatattaaagaacaacataagaaaaggtgcaaatgtcaagaagaagccagccttcagaaaagcggtagctgtgcctcgagaagctaccagggcgcagaagtcggcatgcccaccaataacttcgtcaagagcatcaacttcgccttcaatatgttccaaggtgctgggcaggttttcggctga

SEQ ID NO: 24247 - DNA, 480 bp, Zea mays
  Peptide Sequence Number=SeqID_67622
atggctgtgtacaaccaaaaggctgctcggtctgggtgcaccggactgtccggtggtgcaccggacagtgtccggtgcgccaggctggctctggtgaaaaggccgctctcgggacttcgtcggcggtgtacggctataaatcaccggactgtccggtggtgcaccggactgtccggtggtgcaccggactgtccggtgctctcagatcccctcgccgctggcgagccgtgcgttcggattcgcgctcgtcgtggtgattcgctctcggatcagttggatagcaccagggaaaacgaggaggaaatagaagttgaagaagcgaggacttcaccaccaccaccaccacctgaagaacctcaggcaggaaactatttttactttgatatctgtggagcagagcctgattcacctatcacacaaggcaagccccagtgcatttgccacctccttgctattttaaaatctttctcacttacttga

SEQ ID NO: 24248 - DNA, 366 bp, Zea mays
  Peptide Sequence Number=SeqID_67623
atggcgcccgaagccggacttggctgctgtcagcctcactctgtcgagtggcacagcagtcggagcggcgcaggcggcgctgtcctctcgtcaggccggtcagtggagcggcgaagtgactgtggtcacttcagctctgtcgactggagggtgcacgtcaggataaggtgtcaggccatccttgcattaaatgcttctgcgacgcggtcggtcggtgtggcgatctggccaaggttgcttcttagcgaagactgggcctcgggcgagccgaagaaaagcacagaatttacttactacctaacaatattccgagctattaggctctggtgctcaatttataatggtgacagtggtatcctccattag

SEQ ID NO: 24249 - DNA, 1752 bp, Zea mays
  Peptide Sequence Number=SeqID_67624
atgacgtggaacaggtccccggccggtggcggcagcgccgtgaccgtcgaccacagtgacgacaccggcctggcgcgcttgcgggagctcgggtacaggcaggagctgaagcgcgacctctcggtgctgtccaacttcgcattctccttctccatcatctcggtgctgacgggggtcacgacgctctacaacacggggctcaacttcggcggccccgccaccatgaccttcggctggttcgtcgccggcgccttcaccatggccgtcggcgcgtccatggccgagatttgctcctccttccccacctccggcggcctctactactggagcgctcgcctatccggcaagcgctgggcgcccttcgcctcatggatcaccggatggtacggtgaaacaccattttcccgaaccccgttttctttttcctgcaaagtgactgctttctcgctagctgagcctgagccgatcgaggtcctcactctcacagtctcactcctgcgtgctgctgtgcagtgggcggtgaccaccagcgtggactactccctggcgcagctgatccaggtgatcatcctgctggccaccggcggcaagaccggcggcggctacgtggcgtccaagtacatggtgctcggcttccacgccgccatcttgctcagccacgccgtcatcaacagcctccccatcagctgcctctccttcctcggccagttcgccgcggcctggaacgtgctaggtagcctccctcccattctcgatctctctgcatgcacaggcatcatcctcctgctcgtggctgcaggcgtctttgtcctgatgattgccgtgccgaccgttgccaccgagagggcgagcgccgagttcgtcttcacccacttcaacaccgacaacgacggcgccgggatccggagcagcctgtacatctttgtcctggggctgctcatgagccagtacacgttcacaggatacgacgcctctgcgcatatgactgaggagacgaagaacgcggataagaacggccccatcggcatcatcagcgcgatcggcatctccatcctggtgggctggggctacatcctcggcatcaccttcgcggtgaaggacataccctacctgctgagccccgacaacgacgccggcggctacgccatcgccgaggtgttctacctcgccttcaagagccgctacgggagcggcgtcggcgggatcgtctgcctggggatcgtcgccgtcgccatctacctgtgcggcatgagctcggtcaccagcaactccaggatggcctacgcgttctcgagggacggcgccatgcccttctcctccgtctggcacaaggtcaacaggcaggacgtgcccatcaacgccgtctggctctcggctttcatcgcgctctgcatggcgctcccgtctctgggcagcctggtggcgttccaggcgatggtgtccatcgccacggtggggctgtacatctcgtacgcgctgccggtcctgttccgggtgactctggcgcgcaagtgcttcgtgccggggcccttcagcctgggccgctacggcgtcatggtcggctgggtcgctgtgctctgggtggccaccatctccgtgctcttctcgctgccggtcgcgtacccggtcaccaaggacacgctcaactacacacccgtcgccgtcggcggcctcttcttcctcgtcatcgcgtcctgggtgctcagcgccaggcactggttcacgggccccatcaccaatctggatggatga

SEQ ID NO: 24250 - DNA, 585 bp, Zea mays
  Peptide Sequence Number=SeqID_67625
atggagaggacgaagggcgaccgtgccagtcgtcacgcgtttgtgatgcgggactggcggacttcgtcggggtctggccttcgtcttgcaatggagaggacgaagggtgaccgcgccagctatcacggaccagttcgactgagtcatctggtgccgaagacgtcgctagatggtggagacgctgccctcactcgaagtggtcccgcggggatttttgagcccaacatcgcgcgcccgcgcccacccccgacaccccgcccccacccgtcagtccgcgctcccctccctcgcgaccgcctcctctctggcaggccggccccgcctgtcagccccttctcccccctcgcccgtgaccaggccaccggcgcgttcaccgtcgaccaccgttcaccccatctcctcggcattaacgcgctcaccagctcggttggcaccatgcgcccccgctcactgtgtccgagccgtcccttcaccccctcgcctgcccgagccgtcccgtcgccattttgcgccatcaccaccgtcatggcgagctcgccggtgctcgccacccctcctcccttcgccctccccggccacctataa

SEQ ID NO: 24251 - DNA, 147 bp, Zea mays
  Peptide Sequence Number=SeqID_67626
atggaggtccttgggagtaaggatgggttcttgacgaagaggattaagagttatagcacaagccagagtgatcctacaaagccacatgcattgcaatgcctttcaccactgatagcaggtcatgtgggtaatggaattgtttgttga

SEQ ID NO: 24252 - DNA, 90 bp, Zea mays
  Peptide Sequence Number=SeqID_67627
atgcggcggctgctgctgctgacatttgtgatgccaacgtcgaggactgaggagaaaatctctgggttcaagttttttcattggtcttag

SEQ ID NO: 24253 - DNA, 249 bp, Zea mays
  Peptide Sequence Number=SeqID_67628
atgacaggaccggttgaaccgccccctagaacggtcgaacagccccttgacaaccctggtgacctgactgccagtctgactggcagactgcagctgaagaagctcaactcagctgaagttaagttcagctggaaagctcagctgcagttgaagaagttcagctgctttcagcaagaacactctaggtttctcaaacctccccatggtcaaccaaagaatgttaaagtgatttttggttttcaaaaatag

SEQ ID NO: 24254 - DNA, 513 bp, Zea mays
  Peptide Sequence Number=SeqID_67629
atgctggacgaggccgcatggtgggatgacctcgtcacaggtcttcgttcgatgtcgtatggggcgaagggtgtccctgtccgttgtcttgtctccgttggaccaatgactacgacgaaggcctcgagcgaagggtggcgtcttcgccttcgccccaacatagcggtccgtttcgagaagggtagagagagactaggggagggcggaatcggtgccgctgaatacctgagagagagggaggccccatcaccagtttgccacggggaaggcgccatcattgcctatctggcggagcaagccagatgggacgccggtcttgttccctgcggcccgagtcagctcgggcccaagtccgagccctgggtcgggcggagcggagttcgccgtcttccggaacttagcccgagtctgagccctgggtcgggcggagcggagttcaccgtcttccgggacttagcccgagtccgagccctgggtcgggcggagcggagttcgccgtcttccgggacttag

SEQ ID NO: 24255 - DNA, 252 bp, Zea mays
  Peptide Sequence Number=SeqID_67630
atgaccgcggtgggccgcgcattgccgtgggcagggcacctcactgcttgtatcatggctggtgctcgggaatcagctggtcgagaaggactgcgggacgctgggacctgggcggggtttcttgtggcgcagcggtggactgagctcaccggaatccaactccacagtggagccacacctcaccgagttctggctttatcacggcgtggatccaggggttctcggcggtactcggcgctggagtttttgtaa

SEQ ID NO: 24256 - DNA, 615 bp, Zea mays
  Peptide Sequence Number=SeqID_67631
atgcagtacaaggggtcaagcagtctcattagctgcgagaagcggacttcgaatggagtttttatccttgcaaggcctcaccgccttggcacacaatgctccactgaccccggctgccgccgtgcagtgaccgcacttgtacccaccatagctagcatgggagacccagtctcaggtcgcatgagggataaagtccgcgcccggcttcactcagtacccgcggcggaagaaagggcggaggggcttaccggcggcgagattgctccggcgggggagctcgtcagcggcgaggagtccggcctatccagcgcgaaattgaccaatcaaacgggtcagagagcttcaccagggatcaaggaaggcgggcgactgaagtccggtgaggtcgatcttcgccttccggtgaagttctgccaggtccgagggcttggaaagcttcacgggcctatggcggagctaatcgaagcgctggcgcgacttgggggtgactggagtgggctggccacggtggccgaagctctggcgggcggaaaggagctcgccggagctaaggaggggtgtctggccggcgtggggatcaaggtgaacacgcttgatctttggctcaaggtctga

SEQ ID NO: 24257 - DNA, 1617 bp, Zea mays
  Peptide Sequence Number=SeqID_67632
atggaggtagttgagttggttccttgcgcccgcaacaagtggggcaattggcatgagttttggttctacatcgcggagggtacagtcgaagaccatccggggctccccgtgtccgagatgtgctcgcatttttactcagcatacccgccttttgaagtggcggaggaggatgcggacagaggggcccttcggtgcgccgccggcctgagcagcgggcgcgatttggttgaggaatttgtggcgtacggggtatggcctttggcgcatggctgggcattgggcgaagtgtgccctcgccagatgccttcccatggtgggaagctggtgcgaagtcctgccttcgcgctggatctgcataaccgcgatccggccgcctttgtgcgtgaggcggaggatggggcggtgcggattgttggtcggtacgtgccgaggacagagggccagcgtagctgggatattcgcgggtcgaatgaccgcttgaacagggtttttgagttgaatcgtctgccgtatggcggttatcccggccaagacgatgtggatcgtcgcgggaagaaaccggtggtagagtctggagacgaccccgcgccggcggccgccctgtcctctaagaagaggaaactaggtactgctatgggaggacttagggtttccgatggttttgctagagaattgatgaggacatgcgcggccccggggggaaggatgtcttcgcccgagctccgggagtcttcggcgcggatgctgagggttaccgggggttggtggcctaagaatgttcctatcccccgcgcggccggcgaatacttttttacatctcgcatggttcgtgaatggaaagtgtttccttacgggtggaatattgctgctgttgtgtcggcagtgatggacaaggatcgccagggagctgcacagaagcgccaggcggtcgtcaggcttcatgaagccaggccgaagaggcagcggggggctgcgaaggctactgcccccggcggaggccagccgccgctggctgcgaagtcggccgtccctgcatccagcagggcgccggaggctgcgactgccgccggtggttccaagtctgcaaaggctgcacctgcgtccggcagggtgccggagaccgcgaaggcggcccgagagttgccgccgccgggcaagcgcgtcgccgacttcgccaccgacattagtgtggacgactatcttgttgggtcggacgaaggccaacttgttgttccgcctgccgctgcgaccacggcggctgccgtagtgccaaaggcgaagggcggtgctcttagtgccggcggcgagatgccggcactcactgctgtctgggacgaggcgggtgctgtgtcccgccggctgaaggagatgaaggaggcactaagtcagggtgagaagactgtcctccggcgccaactggcggaggagaggaatgaggccaatgaggccctcgccaaggcgcagtctgtgcaggcggaggccaatctggcgcgggcggagggcagtcttgctaagcagcgcgccgagcagttggaggagcggctcagcgctctgcaggctcgcgtggagagggtcgaggcctcgacgcgcgcggaggctgagcggacacgcaaatag

SEQ ID NO: 24258 - DNA, 354 bp, Zea mays
  Peptide Sequence Number=SeqID_67633
atggtcccaacgaccaccgtctccggcggggttgggaaacaacgacgaactgccactgcagtgggtggaggaggcggtggtgcctccatatctacgtccatcagtgcggttgccgacgactctgtgtctcccatcgacaccggtggtgacagggatgacgttcaccggtggaattgcagcgtcttgcccgggggcgaacgcctccaacagcgcgtcatcgacaatatggagaacttcatgcatacgacgaatgcgaaggaaaatgctctgggggacaaccgcaacctcccccaggcttcgccccaccggagggcggggacgccactgaggacggcgaagtcatcggcattttag

SEQ ID NO: 24259 - DNA, 716 bp, Zea mays
  Peptide Sequence Number=SeqID_67634
cgccggcgttgttcgacgtgaactatgtgaaggactgggggcgcctggtcgatcatgggactgaggttaacctcatcttggatcagagctccgccgctcgtggtggtgggttcaagtctaagtccacgtacgggtcagggttcttccacttgaggatgaagctgccgtccggctacacggccggcgtcgtcacaaccttctacccggaagacggcacccgtgacgaggtggacttcgagttcctgggcgacaaggacggcgtgcccgtcaccctccaaaccaacttcttcgtcaacggcaagggcggcagggagcagcggctgcacctctggttcgaccctgccgccggcttccacgattacaagatcttgtggaacccctaccagctcgtcgtgccggggtacgagttcccgacgaagccgatgctgatcgcggggagcatctggacggctcacctgggccacgacggcggctgggaccaaaggtggactggtccagggcacctttcacggctgggtaccagggggttcgacgtcagcggctgcgccacggccagcgcgacgccgcggtgtggctcgccgggcctgtggtggaacggcgtcggataccggaacatcaccgcggcgcagcgggcggcctacgagggcgtcgtcaagaagtacatgacctacgactactgcaagagctcccgcaaaatcgagtgcgcgtatatttga

SEQ ID NO: 24260 - DNA, 321 bp, Zea mays
  Peptide Sequence Number=SeqID_67635
atgggcaagaacaacaagcgcaaggcgtctggacgtacatccgggcccgtcgagcgcgccgggctcgaaggctcggatgagtcggagtgctcctcggatgaggaggactcggacggcggcgacgagggtgaagacgacgacgacgacggcgacgacggtggcggtagtggcagtggcaggggcggcggcgacggcagcagggacagcaccaagggcgacagcaggggcagcaccaagggcgacagcaggggcagcaccaagggcagcagcaggggcagcaccaagggcggcggcggcggcaggggcagggccagtggctag

SEQ ID NO: 24261 - DNA, 468 bp, Zea mays
  Peptide Sequence Number=SeqID_67636
atgggcaagaacaacaagcgcaagcgtgagccgactcctccatcggaggagtttggtgactcggaatactcggaggaggagttctcctccgagtccgaggggtctccggctcccgtctctcccccggcgtcgtccgatgactcggacgactcccaggggatagccgcggaggtctggacgtacatccgggccgtcgagcgcgccgggctcgaaggctcggatgagtcggagtgctcctcggatgaggaggactcggacggcggcgacgagggtgaagacgacgacgacgacgacgacggcgacggtggcggcagtggcagtggcaggggcggcggcgacggcagcagggacaacaccaagggcgacagcaggggcagcaccaagggcgacagcaggggcagcaccaagggcagcagcaggggcagcaccaagggcggcggcggcggcaggggcagggccagtggctag

SEQ ID NO: 24262 - DNA, 933 bp, Zea mays
  Peptide Sequence Number=SeqID_67637
atgttggcttgcaaggcgagcccgagccggccgtgcgtcgtcccccttgtttgcctgctggtggtggcggccgcagtcgtcgtcgtcgctgcctcggcgccgccggcggaggcggcgttcgacgacaactacgtggcgcagtggggtagagatggttatcaccttgtcgtccggggcacggaggcgaatgtcaccatggaccagagctctggtgccgggttccggtccaagtccacgtacggctcagggttctttccacatgaggatgaagctgccctccgggtcactatctccgagatcacggaatctgcatcatcttcgacgtctctcttccagctcatctcgcagccggaggatgggagccgcgacgaggtggacttggagttcctgggcgacaaggccggcgtgcccatcaccctccagaccaacgtcttcgtcgacggccgcggcgacagggagcagcggacgcgcctctggttcgaccccgccgccgacttccacgactacaagatcctctggaacccataccagctcgtgatgttcgtggacgacacgccggtccgggtgctgaggaacctgacgggcgccgtgccggggtacccgttcccggggaagcagacgatgctgatccgcgcgagcgtgtgggacggctccgactgggccacggacggcggccggaccaaggtggactggtccaggggccccttcaccgccggctaccggggcttcgacgtcgacggctgcgccaacaacgggagcgacgcgtgccaatcgcccgacctatggtggaacgccgccgagtaccggaacatcaccgcggagcagcgggcggcgtacgaggacgtgaagaggagttacatgaactacgattactgcgccgataaggccaggttcaacagcaccaccgtacccattgaatgcaactacgcttga

SEQ ID NO: 24263 - DNA, 861 bp, Zea mays
  Peptide Sequence Number=SeqID_67638
atggcatcgtctcctcagaccgtgatccagatgtcttcgccgcgggccaacgccgccacagcaccgcagacgacgcccaataaggtcgtcggagccgacgccgacaaccgtgtgccggcgatggcggcaacagcaggctccggcgggacaatggcggacaaggtgatgacgagcgcggcgaacctggcgcagctgctgccgacgggcacggtgctggcgtaccaggcgctgtcgccgtccttcacgaggcacggcgtggactgcacggcgtcgaaccagtggctgacggcggcgctggtgggcgtcctggcggggctctccctcctgctctccttcacggacagcgtcgtggggaccgacggcaggctgtactacggcgtggccacgccgcgcgggttcaacgtgttcaacctgtccggccaggaggagggtctgcagtgggcgcccggccagctccggaggctgcggctccgcccgctcgactacgtgcacgccatcttcgccgccgtcgtcttcctcaccgtggcgttcagcgacgtcggcctgcagcgctgcttcttcccccacgccggcgccaacaccagcgagctcctcaagaacctcccgctcgggaccgcgttcctgtccagcttcgtgttcttgatcttccctaccaccaggaagggcatcgggtacagcgacaccaccccgcaccaaaaggcatcggatgacgacgatgcaacgacaccagttcgcgcaatccaatgcccaacgtcggcatcatatcgatcggttccgctgactaggagcctgccgggctcccgggatccaacctatggcgccgaggtaccacagctcggcgccataggctatggcgccgag

SEQ ID NO: 24264 - DNA, 165 bp, Zea mays
  Peptide Sequence Number=SeqID_67639
atgggcgggggcctcctggcagcagcatccgccctaaggtcagtgctgccgctgttcggccccccggagcagaagtcgtcgtcgtcgctgctgctggagcgggcccacccctatcgagtggggttgttcgtacctgcggagggggaaccggagttccatttgtaa

SEQ ID NO: 24265 - DNA, 890 bp, Zea mays
  Peptide Sequence Number=SeqID_67640
atggctgaaaggtacccaacttccacgaagttgcgttcctccaacgacaagtcgggaggattgcgggtgttcccccatccgggggctcggaagccgtcgtgggctgagtcttctccaacacgctccaagatcctccccctacggcgcgggggctgggtcccacgcgtcatgcaagctggcccagagcagaagaagccaaaccgccgcgcgcggtgcatgcaactgcccaacggttacgagcattcctccactttcgcccagaccagcgggcccacgcgtcatgcaaccggcgcgccggttgctacgtgcgagcaactgcaccgccactcgcaccactaccacgcctcctcgactgcggaaccagtaccgcgactcgaggcaaccctgcgtatgacccagcagtgccagccaggcgcgacggtcaatatggccaaaaatgggccggcagtaatggcggtggcaggcgggcaggagcagcggtcacgtcgtcagccaagcttatgtcccatccaggggcagcgagagaaccctctctcacggcatgaagacggcgcgcctgtgttccgttccttgaacggctcgcgcacgcgcaacggccgccccgcgaaccactcgccccgtcgcattaactccgcggcgggacaggcggcgcctcagggaccgggaaagggggataccccgaaaaggatccttctccgtgaaggaaacaggcctcgagcctccctactgatcagaggttcaaaggctggcccctcggaggggttcaacagccgcctcagagcacttgggttccgcgcccactactggtcagaggttcgaaggccggcccctcggaagggttcaacggccgcctcaggccactcgggctccgcgcccactactgatcaggg

SEQ ID NO: 24266 - DNA, 210 bp, Zea mays
  Peptide Sequence Number=SeqID_67641
atggcgctgaaatcggaaccggaccggccgccgcgctataaatctaggaccgcccctggccaattccacagcggtttgtcatgggtggagcatctacaccgtgagccatggcgacaagcagagaagttgagagagaaaaaggggtgccaccatgcgtcgtggccggcctccttcgaccccctatttccggttaattctgatgggacctaa

SEQ ID NO: 24267 - DNA, 369 bp, Zea mays
  Peptide Sequence Number=SeqID_67642
atgggctcagtcgcgccactcctccaactcggtccctgttgtgcggacgtgtgggtccgtcgcgttggtgctcccttcaacctccggacaccagaccggctgcgcggattccgcgggtcgcgcacaccccgcgctcctccaatcgatttctcccccaaatcggcgctgaaattggaaccagaccggccgccgcgctataaatctaggaccgcccctggccaattccacagcggtttgtcatgggtggagcatctacaccgtgagccatggcgacaagcagagaagttgagagagaaaaaggggtcccgccatgcgtcgtggccggcctccttcgaccccctatttccggttaattttgatgggacctaa

SEQ ID NO: 24268 - DNA, 1811 bp, Zea mays
  Peptide Sequence Number=SeqID_67643
atggcgcctcctgttgacgtggtcggtccgtgccctaggttgggcgaggtggaggctccttcgaggtcgaggtcgagtctgtcttccgaggacgaggtcgagtccgagcccctgggtcgggcgaggcggagaccgtcggctgaggccagggctgagtccgagccctggggttgggcgaagcggagttcgtcatcttccggggctgagcccgagtccgagccctggggtcgggcgaagcggagttcgtcgtcttctggggctgagcccgagtccgagccctgggatcgggtgaagcggagttcgtcgtcttccggggctgagcccaagtccgagccctggggtcgggcgaagcggagttcgtcgtcttccggggctcagcccgagtccgagccctggggtcgggcgaagcggagttcgtcgtcttccggggctgagcccaagtccgagacctggggtcgggcgaagtggagttcgtcatcttccggggctgagcccgagtccgagccctggggtcgggcgaagcggagtttcctatggcgcctgaggccggacttggctgctgtcagcctcactctgtcgagtggcacagcagtcggagcggcgcaggcggcactgtcctcttgtcagaccggtcagtggagcggcgaagccacatttgcattaaatgcccctgcgatttggtcggttggcgtggcgagttggccaaggttgcttcttggtgaagactgggtctcgggcgagccaaggctttgtgctgatgggggttaccagctgagatttaggagtcttgaggcgcctacaagcagacgcctaggcatcttctccagcaacgccaaccctattctggtgcaggagatctcgtgctaccttgggctggagctaaggcagatcaagattcagcgctggaaagagagcgtgcacggctgcgacgtgttccaggtgcagcccacctgcccctcccctcccaacgagaacctcatggagctcctcatcatgatcgatgcctgccgaagggcctcccgcccaagaacatcaacgctgggcatcccctacttcggctacgccagagccgataagaaggtgcagggggcgcggctccatcgccgccaagctggtggccaacctcatcatggaggtcggcgcccaccgcgtgctggcctgcgaactccactcgggtcagtccatcgactacttcgacatccccgtggaccacgtgtccacagccagcccatcatcctcgactacctagccagcaagaccatctgccccgaggacgtggtggtggtgtcgccggacatgggaggggtggccaggccgcgcgccttcgccaagaagctctctgacgcgccgctggcgatcgtcgacaagaggcgaccgggccacaaccaggccgaggtggtgcacctcatcgatgatgtcaggggaaaggtcgtcgtcatgctctccgacgcgccgttggcgatcgtcgacaagaggcgaccaggccacaaccaggccgaggtggtgcacctcatccatgatgtcaggggaaaggtcgtcgtcatggtggacggcatgatcaacacgaccgagaacatctccaagggcgccgagctgctgcacaaagggagcgcgagttgtgtacacctgcagcacccacgcggtcctcaacagcccacccgcgctccagaggctctccagcgacctcttccaggaggtgatcatcaccaacaccgtgccggtgcacagctcaccgtgctctccgtcgctaacctcctcggtgagaccatctggcgtgtgcacgacgactgctccgtcagcagcatcttcca

SEQ ID NO: 24269 - DNA, 378 bp, Zea mays
  Peptide Sequence Number=SeqID_67644
atggcagaagtacaccacgaaccccggagcacatggcgtgacctcgtcaccaacgatcctatatgttgtgccgcattccttcctttccctcttgcattcgccagcgtgcaaatacctacgtccagacccgacctccccagacgccgtgaaaagaaaaacagaagtccaccgccgccgtcgctgcgaggattgagattaggggcgactttgcccctgaaccgtgtcttgggggcctcgccggaggttggcgaagctggggacggaagcaatcgtgctatggataagcggttgcggttgaattcctcgccgaagtacaagcgccgtcgtggttccgctctcctttgtgggcaggctcgcaacctcttcaatcgccggtga

SEQ ID NO: 24270 - DNA, 603 bp, Zea mays
  Peptide Sequence Number=SeqID_67645
atgaccgcgtcaaaaaagggaccgggaaagggggataccccgaaaaggatccttctccgtgaaggaaacaggccccgagcctccctactgatcagaggttcaaaggctggcccctcgaaggggttcaacagccgcctcagagcgcctgggttccacgcccactactggtcagagaggctcgggggctactctcgcgaacccggctccggccaaaccgttgacagcgtcaacataccagcccgagaacttgggacccgaccgtacacccgagctacggccagctcgcatgagggaacaaccagaccagccgaagtgttgcgaaatgcattaagacctcaaaggagtcaaaccactcctccgaggcctcgggggctacacccggtgggtgcgctcgcgcgcacccaccggaacaaaacgcaaccgagaaaggctggtccccttgcaaaaaagtgcgacaaaagcctccaagcgagtattaacactcccttcgaggctcgggggctactgtcggggaccataattaggggtaccctcaagactcctaaatctcagctggtaacccccatcagcacaaagctgcaaaggcctgatgggtgcgattaa

SEQ ID NO: 24271 - DNA, 420 bp, Zea mays
  Peptide Sequence Number=SeqID_67646
atgtacaacaaacaacttgtgttcaacaatcgatttagagcagcaagtaaaggatcatcaaggcccacgatttgttcaatggactggaaacttaatataggagaatttgatgcaatggtggctttttcttcctgtgagcttatgcgagtgtttgggtgtaagggggagaagtggaaaatgctgatgaacaaaaaaccttctagtttgagaaaaataaatgccttgaagtggtgtcctgatgatcgttcacgcatagcagtcgctgccggcgatgggcaccttgtgaccattgacttcttagattttaaaggtcgacactttaaaagagtcgagaggtaccccaagcaggtagtgtttcctgcatatcatggagctgttgtggaaatcaaagatactgttgtattccgtggaagtctgtag

SEQ ID NO: 24272 - DNA, 279 bp, Zea mays
  Peptide Sequence Number=SeqID_67647
atgacagtggaggagcaaggtggcagtggtcggggcagctcagtgatgatggaacccaagtttgcagcactgctttggatactgtggatcatttacaagaggcggacattatctaatagagctgagcaaatatacgagcaggtatgtgaaatccttgaagataatgctgtaaacgccgagattgacaactccaattctgaggtttgggtggttacctcctggctcagggatcacctgttggttcctcaagagagaaagaatgctttcctgtggaagaag

SEQ ID NO: 24273 - DNA, 408 bp, Zea mays
  Peptide Sequence Number=SeqID_67648
atggtgggcgtgctaattgagattcaaaggtttgctaggcgtattgttggtctttgtgcttcatcatcgggttgtgagagaaactggagtagatttgagtttcctcaaggtgctcgtgggtgtgattgtggtgaggatgagaatggccttacatgggaacttgttgatcaagctgtgggtgcatcaagctcgctgcgaggccgaaatcttccaaggaatgccaacaagcgtgcaagagtttcacactcaaggtttgactttgaagaagattttggttcagccaatgaagaagaggaggaccaagatccacatgatgatgttgatgtgactgattctgaagatgcacatgatgatgttggtggagaaaacactgaggctgctccagatgagttcgaagatggatattga

SEQ ID NO: 24274 - DNA, 273 bp, Zea mays
  Peptide Sequence Number=SeqID_67649
tcggcccgaccccccctcccgaccgccgccgagccccctcccggcctcttcccggccagggaggacctcgtccgcttgctcgccgtcatattcatcgcagcggccgccgccgcggcctgtagcgtcctcaaccgccgccctgagcccttctgcgactctccccagtggcccgatgactacgccgacggagagctgctagtcatttcattaagaggagaaaacaaaaacaaacggcgcgactggaaagataacgccgtgtacaaggcaggttag

SEQ ID NO: 24275 - DNA, 523 bp, Zea mays
  Peptide Sequence Number=SeqID_67650
atggcggcgcaaggggcaggaagggcggttttctcttctctggctaagtctctcgggttccgaaaacctaagagggaggcaggaagcggagcaaagaaccgtcaccagaccctctcccgggagaagcgggtgacgcttcgccttcgccgtaataaccgcgccaaaaaaggctggccccccgaagggttcgacagccgcctcagatcgcgtgggccctacacccactactggtcagaggttcgaaggccggccccccgaagggttccacggccgcctcaggctactcgggctccgcgcccattactgatcaggggttcgaaggctggcccccgaagggttcacagccgcctcagacgccgagcgagggatgaccatgggtacgttcgatacataaccaaggctcgggctgcgctcccgaggtaccctaggacatattccgagaccagcgggaacgatcttgtaaccggaatctcatcagagagagaggcatcgagccctcgggaccccgtcgccaggggaccag

SEQ ID NO: 24276 - DNA, 303 bp, Zea mays
  Peptide Sequence Number=SeqID_67651
atggaggagctcggatctaggtcatacaaggcgcacaagaacaacatcaagaaacccacgcgcgctgccagacctccaccaagggggttcttaacaaagctcatgatgatgctcggagccgtgctcagaatagcggaatctgaaagcaacaatttgaaggctatggctcactgcattcccaatccacattgggtcttactggattgggaatgcacatgcgcagtataccactcgacacatcagtcaagagcatcactagctacattctctggactttcccagtcaaaggtcctcaaaaactga

SEQ ID NO: 24277 - DNA, 570 bp, Zea mays
  Peptide Sequence Number=SeqID_67652
atggtgaggtgcgcgggtagcagcagcacacgagcagcttcctccggcgcgcaaggacgggcagtggtgacaacgaagtcggggtcgggctcgtgcttcaactttcagcagcacacacgcccgtgccttccgcgcgtcacctggccacggtcttcagcccgattcgggcctgtcaagggaggtccgggcagacaactctaccgctctggtggtcttcgacaatgcaatgtgctactaatggttggaaagcggaacgaaacaatcaaacataaggacagagctctaaatttgtattgtcttttatggattggagataaagagatagagttttacagtcagttccacatagttgtccgtggtctggattcaattgctcactgcattgagtatgctcacttgatcaaatgggacgaggttcatcctggaaaaccttttgatggtgatgatgcagagcatatgcaatggatttattcaaagattggcaatgatgcttctcaatttgttggtccacttgtattgaacctgttgataaagaggttggttgtttatcatatcacctttgttacatag

SEQ ID NO: 24278 - DNA, 378 bp, Zea mays
  Peptide Sequence Number=SeqID_67653
atgggcctaataggctttacaattgtgcaagcttacttattaaatctttttacaaggggaatagatattcaagctgtgaatgttgttatcaattttgatttccccaagaactctgaaacatatctccacaggattatcctatatttaggagttgaatctatctattgcattctacttgtggcatccatctctggcaattttaacgtccttttttggattgtcagatttttctactgcaactttgttgaccttttctattcccacattgttctgactgaatactgtttctgggaacagctcatcaggttttatggtgttgatctcatttggtgcatcggagacaattctaagttggtggattacgtatatgcttgctag

SEQ ID NO: 24279 - DNA, 474 bp, Zea mays
  Peptide Sequence Number=SeqID_67654
atgccctacagatggctgcgccccatagaggctaagacacagctgcgccgccgggccaagcaagtggcaaccccggccgtctcccaggggcagtcgggtggggctactgcgccgaccagggaggggtggccgtacgaggcaattggaccccctgctggtgttgaaggacgtttcataagattacaaggctacctttggaatgctcgaagatggcctgaagacgtttatgcctttcaacttcggatattgagcgatccgagggtgggtgcatatgcgaacgatgaaaaaggtctgaaaaacaccttccacgagagcgttgtcaaaaacagatattctcaaatatgctttgtagccaccctagctactggagccaaagcgataacccaggtcaaagaaggaaatgttgaatatattgtagttgatcttgacgaagatgagtcagatgaagaaagtggcaaagaacttgaagtttaa

SEQ ID NO: 24280 - DNA, 873 bp, Zea mays
  Peptide Sequence Number=SeqID_67655
atgaggaggaggaacatcgggcctgggcgacacgagcaccttgtggcccgggtgcgcgacgacgagggacccgctctgctccaaccagttcaatatgaccagcagctccagcagggtgagaaagatcgtcatcaggttctaaaggatttctcaaagttgcttgatgatcagatatttgccctgaattgtttctctaggacagcagtggctacctgtaaaaaaaacagggcgctgctccggaagctctccttggttgacctagcgggcgtctccttggtcggtgcaatggatacggcttctgtgtatgtggggatcccgtgtgacatccccttcaacagcggctgcaatgttgggcttatggatgagggaatagtggctgcaatggcttatcctattattcatgcgacttgtgaacaagatattgctaaaggaggtgctcgcacggaggaggacctcaatgtgtcggatgagatgatcttcgaggccacggtgcgatccgagcagttctttgattttaatggttacccatgtcctatgagaaggaacccttcagatcacttcttgatgatgataaataaatatttcgaggaagttgggccactggccacatctattaatgttccaattgtgaaactgaaaaagtgtaatgggataaaagaagagtggaagccagaaatccttggctacaggaggcatatcagccctggtcctgtacttcgtccacacttaactccctttctaccgatctggattctttcacatgacatcgtcgttgattcaactcacgtatttgacttatttgatacaaaacacaatggaattcttagatttgaagactttgcccaggtgttgtcagcatggcacaaggattag

SEQ ID NO: 24281 - DNA, 497 bp, Zea mays
  Peptide Sequence Number=SeqID_67656
ccgcgcggccacaagagcacccacccgtgctgacgcgagggacccacgggtcaattcatactccctgtgttagccgcgttctcttcacttacgtgcgggacccgcacgtcatcaactacttccgccagaaacggatccacgccgccgtgatcttcacaacaatccgggccgagttgccagctacgccgcggattgcacgatctcctgggctcccatggataagcatcgagccccatggtcccttctccccgccgacccggcgtctccccactcgctacgagctccatcttcgcctcgagtccgcgcctgagctccgtattcgccgggattcagttacgataggacctattctcgcgggggaagcactattcggtttaggacctgtggcttgggggtggcgcgttgctcttctccggtgggaactccgccgcgttatgatggcggcgccgcctcggcccgacctgggaaggaagaagatgggcgcgccgttgatctag

SEQ ID NO: 24282 - DNA, 300 bp, Zea mays
  Peptide Sequence Number=SeqID_67657
atggcttcgttcaacattcaagttggagctgcttcagctccgaagctcgccttcggctcaaaagagaagtttcgtccacagcaaagcagactgtatgcggataaggaagacagaatatattacaagcttcgtcatcctgtgtataccaaacagcagagtaagaaaggtgcaattttcaaaggagaagccagccttcaaaaaagcagtagttgtgccccgagaagctaccagggcgcagaagtcggcgtgcccaccaataacttcgtcaagggcatcaacttcgccttcaatatattctaa

SEQ ID NO: 24283 - DNA, 423 bp, Zea mays
  Peptide Sequence Number=SeqID_67658
atgggacatctaatacgacaggcaaagcagatcggccctcgaccgcaaacctccgcctcgcccgacgccgagcctaaccctcgggcgcaatctccgtctcgcctgaggctcgggcttcgggcgatttctccgcctcacccaacgctgaggtcggcctcggatggattctccgcctcgcccgagctcggcctcgaccacctactccaccacgaatcccgtgggaggccactccgccggctgtggcacacgtcacgggatggctcatccaacagctcgggaagagttccgcctcgcccgagcagggctctaaccttgataaacgcgacagagaatctcaacgtcatcccgcgcaaggacgttgacggaccccgtaatcaggcctttagcccatgccccggcgctgttacaacaactacggtatga

SEQ ID NO: 24284 - DNA, 522 bp, Zea mays
  Peptide Sequence Number=SeqID_67659
atgaggttgcgaaaacaaaagcagaaggcaagcacaagtgacagggtaaagaaccaccgccggcccctcttccggggatcgggaaaggggatatttcgaaaggatccttctcagcgaaggaaacaggccccgagccctcctactgatcaagggttcgaaggttgcgccctgcggggttcagcaaccgccttagagcactcgggctctaagcctttactgatcagggggtcaaaggctggcccctcggaagggttcgacagtcgccccaaagcatgcagagtcagggatgaccctgggtatgtctgttacttggccgaggctcgggctacgctcccgaggtaccctaggacatttctgagaccagcgggaacaatttgtaatggaatcccaccggagggaggcaccaagccctcggaccctatcaaatgggtccgggtccagcgaatcacttgcagaggctcggaggctgctctcgcactaggctacgaccaaattgttgaccacgtcgacaaaccagcttaa

SEQ ID NO: 24285 - DNA, 153 bp, Zea mays
  Peptide Sequence Number=SeqID_67660
atgaaggtgaatgaagtattatttgaggtttgtattgtatctgaagatggtgtggttttatactctaagaggtacttgattcatgttgggaatgagggaagtagcagcacgtccaccttcactcataataacgctgtccaggcacaaccatga

SEQ ID NO: 24286 - DNA, 198 bp, Zea mays
  Peptide Sequence Number=SeqID_67661
atgccgggcatactgagggaggtcgctgggcactcctttgacatctgcgcaatctccagactagtgagacaacacctacgtagattcgacgaggatggagagcattcctgtcccaattatgcatgcatagagaggttgggagagcagagtaggcctctagaaccattgaccatgggagacaccttctcggtgttgtga

SEQ ID NO: 24287 - DNA, 225 bp, Zea mays
  Peptide Sequence Number=SeqID_67662
atggggaagctttgcatgaaagtgatgggttttgttgctcgtccttctacgaccattgttgagcaaatccgtgatgttaactttatctatgggactaagcttcaattcggcatccgcccattcttcagtcttaatgtcattgccgccgagtacaacagtgactcaccagtgcatgcacaccaaggatgtcgtcaccaccaataccatcaacgactacaacggtga

SEQ ID NO: 24288 - DNA, 273 bp, Zea mays
  Peptide Sequence Number=SeqID_67663
atgtcgggcatactgagggaggtcgctgggcactcctttgacatctgcgcaatctccagactagtgagacaacacctacatagattcgacgaggatggatgtcggaggaagctgctgaaaaaggttaactttatctctggggctaagcttcaattcgacatccgcccattcttcagtcttaatgtcgttgctgccgaatacaatagtgattccccggtgcatgcacagcaaggatttcatcaccaccagcaccatcaacgactacaatggtga

SEQ ID NO: 24289 - DNA, 399 bp, Zea mays
  Peptide Sequence Number=SeqID_67664
atgccgggcatactgagggaggtcgctgggcactcctttgacatctgcgcaatctccagactagtgagacaacacctacgtagattcgacgaggatgggttaactttatctatgggactaagcttcaattcggcatccgcccattcttcagtcttaatgtcgttgccgccgagtacaacagtgactcaccagtgcatgcacaccaaggatgtcgtcaccaccaataccatcaacgactacaacggtgaagagtttgtcttctactctccatgggagtacggtgccaaaaaaaactcaataatagactaccacaccaaccaaaatggctcattgttgccaccagagagaatgtatagcctattatgtctggcacttagggaatcaatagctttaaggtga

SEQ ID NO: 24290 - DNA, 1389 bp, Zea mays
  Peptide Sequence Number=SeqID_67665
atggcgtccaccacggcctccctcgcccccgcggccgcgctggagcggctgggcctcctcgccgcgcccaccgacgccgacgacccgtccccgccgctgcccgcgccgctcccggggctcctccccctgcgctgcgccgtgcagcactacgagtggggccggcgcggcgccgactccctcgtcgcgcgcctcgccggcgacggagacggccggccctgcgccgagctctggatgggcacgcaccccgccgcgccctcctcgctggcgcccgacgtctcgctccgcgactgggtcgcgcgcaacccggccgcgctcggccgcgccgtcgccgcgcgctggggcggcgacctcccgttcctcttcaaggtgctgtcggtggccaaggcgctgtccatccaggcgcacccggaccgggagctcgccgcggcgctgcacgcgctgcgcccggccacgtaccgcgacgccaaccacaagcccgagatggccgtcgccgtcaccgagttccacgcgctctgcggcttcgccgccacgcaggagctcaaggaagttttgaggactgtccctgaggttcaagaattagttgacaaagaagaatctaggaagcttttgagtgtcaaagagcaagatgggggaatcggagtgaggtcatatttgaaatcagctttcaccaagttaatgacagcgtgtgatgaagcagtttctgaagcaattacaaaccttaagagtcgcttaaaaagtgagagtaaggctagaagtttaacgaagaaggagcaacttgttctgtcattggagaagcagtacccaggagatgttggtgttctggcagcattcttccttaattttgttaagctcaatcctggtgaagcactttatgttagtgcaaacgaacctcatgcatatctctcaggggagtgcatcgaatgtatggccacttcagacaatgttgtccgtgcaggtctaactcctaaatacagagatgtgcaaactctctgctcgatgttgacttataatcaggccttccctgaaattctgcaaggaatgcctgtacagccatacgtgactcgttacaccccatcaactgatgaattcgaagttgaccgctacttgctacctcctggaaaatcagtcaccatgtctccggtgcctggtccatccatattcatcgtcttgacaggagaaggagaaatccaggcaggtttcatgactggcagtgcaaaggcgaaggaaggtgacgttttctttgtgccggctaacaccaagggctggaaacgagccgagctcagtttggcttggtgcggtagcttggatgggctcggcttgtctactcaacaaggtacaaaagagctacaaaaggaggctcgcttgttatcagctcaccttgtctactga

SEQ ID NO: 24291 - DNA, 477 bp, Zea mays
  Peptide Sequence Number=SeqID_67666
atggatctatacctccaggtgacatacgaagcagttggagctgaaacggtggtgagcccgttggcgatgtggatctggtcggtggaggggaggccaagtcgtcgcagacacagcggttggcacgcgaggggcgtcctcacaggggacgatgcggttgacgtcgcctggagagtcaaagtcgagcgcgttcctgcgatcgtcgattttgctgtcgcgccgcagaacaccaccaccgctaggaacaacagtcgtgcagtcgcgttagagagtgggtccgcacggagcaggggcagtctgggatgtagcaccggcgctgtgaggaagatgaagatggggaagaagaaactggtggcggctacgtgccttcgggagataaagatgggagcagttagggtaaaaaaatgtgtgggtaaaatgggccatcaaataaaagctcacgtggggactagtatggatgcccagactgcgggagcataa

SEQ ID NO: 24292 - DNA, 282 bp, Zea mays
  Peptide Sequence Number=SeqID_67667
atggcgcttgtgatcaagcacttcaagaacgccttgaagggacgcaagtactactccaacaagagcaaatcaaggggaaagtgtacgtggttcaagtgcgggcttatgggcaacatgggcctggtccataacaagggctttaggctaggagaccgaagacctcgaggactttgctcccaacgtccccattccttcgaagatgggaaaacatggcggcctcaaggaccacaagatgaaggcctcgaggacttggcacaagaagactacaagcaaatagcatag

SEQ ID NO: 24293 - DNA, 309 bp, Zea mays
  Peptide Sequence Number=SeqID_67668
atggacatgggttttgaagaggataacacaatcattcgctctatgaagcctagccatgtgaactttggaaaatccaaaatcaaagaagggcacatcgagatacttaaccgctttggctatattgactgggtgcagttaggggtggaaactccatcgacagccatagaagccgaagacaagggttcctctaatcctactctggaagaggagaaggggaaatggcctgctgaaattgaagaagctaagaaggctattgaagatgacacatcactcgaggaagggcccttcgaccaattccttagtggctga

SEQ ID NO: 24294 - DNA, 321 bp, Zea mays
  Peptide Sequence Number=SeqID_67669
atggttcagattgtcgagcaccgcgacatgactcctgcggacttcctgatggaggaagaagctgcatcatccatgccacgggcctccaactgccctgcgcctggtgcagctgctgtgcacgctgcgcggcagcacactcccgcacagtcgtcccgggctccatcaagggctgctctcggagcgctgtccgcagccagggagttgttgcgcgaccctccaagtttcacggcctcaccgggggccatgaagcagtggcgtgacgatgttgaccgactcctcagcatggcgcattctagctcagccagacccaagcctcggtaa

SEQ ID NO: 24295 - DNA, 330 bp, Zea mays
  Peptide Sequence Number=SeqID_67670
atggcgcagcagcagcctcgtcgcgagctcgcctcgccgtccgccgtcgtcgcaatttattctcgtctgtcgcgggtgctgttccgcgcagtggcgtgctgcttcgcgcgtcgttcacgtgttgtctgcgcgttgttcgtgcgtggtgggctcgtggtcgcgtgctggttcgtgccgatcacgatttgttcccgcgcttcgaagaatcgacgatcaagcttcgacgaccaagtgatcaagctctccgagttctatgaggttgaagatcctgagcatctgtttggtgaaggcaagtgtcctctgacccattatgtcccatttactttataa

SEQ ID NO: 24296 - DNA, 396 bp, Zea mays
  Peptide Sequence Number=SeqID_67671
atgcgggcttgtgctgttttgacaaagtgggatgagagtgacagtgaaagttttgaagggtttcatattggcaatggatttaaatgggatacaacaagacacatgtttgaacaatttggggatatattcattgctgcaatgtttgatccaatgggtattggttttgtatctttttatgctttcactaatgtattatgtctaagtgctggaaacaggaaaaatcaagttggaattaaagatggctttgttcagccgaagtcagctcagtctgggtgcaccggacagtgtccggtgcgccaggctgactcaggcgaacttgctgctctcgggaaatcgtcggcgacgtacggctataaatcaccggactgtccggtggtgcaccggactgtccggtga

SEQ ID NO: 24297 - DNA, 174 bp, Zea mays
  Peptide Sequence Number=SeqID_67672
atggagagtcatgatcttcgggcagaatgggaatcacggcttgtgggtggttatgagatcgatgattctggttatggctatggtgctggttgtcagcattgcaaccactgctcaggcgaagatgaagctgtggaaggagacttccaggagttccaagactacgacgagttctag

SEQ ID NO: 24298 - DNA, 462 bp, Zea mays
  Peptide Sequence Number=SeqID_67673
atgaggttcgggtcggctggaaggggagggaccctcgatgtcctcacaaccccatgcgtggggggcgtcgaaaaggttggcgcctcccgcccccgccgaagcacctcctccgcaggatacactccttgtcaggaggaggatggagctttcgacgacgaggtcgatcctccatcgtccgacgctctcctcatcaccggtctccacatgcatccgatgaccgtgtcccagggacctcatgaacctctggtcgacttctcttcgaagggagttgactcccttcaacgcttaaggttcacgaatcccaccctcacacctagacatcctggtgtccaggaccctcggttctggaaccttttccatgctgattttcataatctgtcatcatgtccaagaagcacccaatcgttcgacatcgtttcattgactgggaggggtgtgagagtatgggggatgctgacatga

SEQ ID NO: 24299 - DNA, 795 bp, Zea mays
  Peptide Sequence Number=SeqID_67674
atggacgtgccgcctgccaatggaatagacatgcatgtcgcctgccagcagaatggacaggtctcattaaatgctgaggcggcacactgcttgccagtggaatggacaggtcaccgcctgacagcagaacagataggcctcattaaatgccgaggtggcacatcgcttgttaggcggcgtgccttatccgcaataaatgcaggggccacgcgccgcacccgtgcaacgcctcaaaaccacgtggagaatggcgcccaatgggcaggtccaggagcgccgcatgacaaggaaagggagtacatcccggtgttcgtcgctaggaccggtcccccgcaggaagacaccggacccctatacatactagtccgggaccccaagaaggtatgccggatcccctggaaggcctcagcattagcagggtcccgggacgaagaggaccccggcgaaggcggcgtcaggatcatccagcaggcagcgcgtctgaccggtcagctgacaaacagtgcgcccgtgccgagcggtgcaccatactcatcatcccttctacaagaagcctcccctgcacgccgaagatatgaagatctcgggtgtcagagcgctagaagatcgcctcagcagcacacattcgtggctccaagtacaatattcgttaagcccctgggcccacatgtcggggctcagtacctttgtgcatgccctccttcggctataaaaggggaggcatgcgacgttacaagacaggttcactcacacccaatcttaggcagacactcacaagttcatacaagctcctga

SEQ ID NO: 24300 - DNA, 303 bp, Zea mays
  Peptide Sequence Number=SeqID_67675
atgcccctcataaaagttttccacaatgactcagacccctatgggctaaaaggaccttcggcgacgaagcatggtcccaacatataccatacatggggtgtgggtttgagtgcttcctttgcactctttttgcgtggtgtggtagctgtgtgggtggagtcagcagaagtagaagttgatgacagtgaagatgttgataggatggaccagatgcttgaggatctacaacctgaattggccccagatcatcatgattcatctacattggaggttctgaagttcttcgacctcctcaaagcctaa

SEQ ID NO: 24301 - DNA, 210 bp, Zea mays
  Peptide Sequence Number=SeqID_67676
atgtcgttgatggctggccagccaatcagggtggttaatttcgcggatgaacccggcagcaaggagcttgtcgacctcttccccaatggccttgcgtttttctttgccaaagcggcgcaaccgctgtctcaccgaggtgaacccaagattgattcacaaggaatgcttggtgacttccctcggggtgctcttcatgtcggaggtttctag

SEQ ID NO: 24302 - DNA, 432 bp, Zea mays
  Peptide Sequence Number=SeqID_67677
atggtattagaattcctagattccaaatccgagacggatgttgatgttggctataacagcttgtactcaaagcagaactttctacagggtgaggtttgcaagatctcgcacggtgaagtatggagtagaaataactctacagcgactgggtgtcagcggcgggccctctccgtcgccgccttcggcagcacaaaatctcggatcaacggtggggccctcatcagtttgtcgttggtactagagttcaagctgtgtggggtgaagatggagaatgcgtataaagcaacagttggagctacaacacaaaatggatactatgtagcctatgatggctggggaaatagggaagattgtgcgacagtgcgtgggcacgcaggtgagcgaatgcgtggtgctgcaggagttgaagttgcagtccttcatcagatataa

SEQ ID NO: 24303 - DNA, 435 bp, Zea mays
  Peptide Sequence Number=SeqID_67678
atgtatgcggctcgctctgccaaggtggtgacgaagatgatgtttatgagtatgcttaaggtaatggaggtagagtctgtgaggagctgctctcatgtgcccccgctggaggcgccccctgcagcaccactgggcgtcccgaccactggagtagttgttggaggagaccccgacgacggaggtgacaacagcagctcgagccacaacaccgacctttcagaggagcagaagctggagggatgggttgctcgacccatcactcgtgacgccactagcgggtgtcactttcacgatgcgctcgacaccttgctatgtcaggcacttgaccggcgtacctggtctatcgagtatcgttgtgttgtcttccagcaccgtcgcgaggtttacctggacccactgggaggcgacttgcttggtgcgtcgtccggagaatag

SEQ ID NO: 24304 - DNA, 237 bp, Zea mays
  Peptide Sequence Number=SeqID_67679
atggaagtaggggcacaaccatggtatcttcggactcaagtcggtatcacaacaaaccagaataatacgaaggttgatacagcgccgaaggtgaacagtacccccgtactgttcacgctgatctggcatttgcttttgcgtcacacctgtactttcatatacttccaagctgaagcatttgagaacaagtccccaacattggcgcccacctccggtgaactcacttccactctttga

SEQ ID NO: 24305 - DNA, 411 bp, Zea mays
  Peptide Sequence Number=SeqID_67680
atgctcaaggttaagaaaaatagaaaatgtgatttaaataatgaaccagagggcaccgctatttttgttaggatacttattcaagactgtaaccttgctgacggagaatacgtcctcgtaccggagcaaggagctgctcaggaggtagccccggatccagcaccagagcctgcaccagaggacctgcctgccactgctttggaaagcaagccccgtggactttacccctcacgcgacctgagacgtggtctcccattccggttatggtgggtacaagtgcggtcactgcacgacggcagtcggggttctctggaggacatggttgctggagtgacttggccgtccatcttgccaccgggttggactgtcgagtgggaccctacctcggctgatgaggagcatgaggagtga

SEQ ID NO: 24306 - DNA, 1419 bp, Zea mays
  Peptide Sequence Number=SeqID_67681
atggcggcggctcccgcgccgcagcaaaggacggggggcatcgcgcggaggctggccaggctgctccgccgcaagagctccccggcaggtgcggggatggcgtactccgtcgccggggacgagttcgacgactcgcttgacagctcaatcaactcgctcagcaagctcaagctgtccggcaacctggctgctgcctacacgctggacgccatcttcaagaatgccacggagaagaaggcagcggcggcggcgccgcagacgcagaagcagccgtcgccggcgaaggacgccgcgaagcacgcgttcttggcgaccctattcgcgagggcgtccgcggtgaaggcggcctacgcgcagctgcagctctcgctgcatccctacgacgccgagtccatccaggccgcggacgccggcctggtggcagagcttaccaagctgacgagcctcaagcggcggtacacaagggacccggccgccgcggccaggggcgccggtgccctcgcggcgcacgccgacgagcagctccacctcctgcggacctacgagatcacggcgcgcaagctggaggcggagctccgtgcgcgggacgccgaggccgagcgcgcacgcgccgcgctggccgacgagctccgcgccgtgcggggcctggaggagcgcgaccacccgggccgccgcaccctggacggcctccacctctccggcctcaacgccacccacttcctcaccgcgctgcaacacgccgtgaagtccgtccgcgccttcgccagggcaatggtcgacgcgatgcggccggccggttgggatcccgcggcggcggcggcggcggccgtgcacccgggcgccaggctgtgggaccccgcaggcgacgccaggttcgcgctcgagtcctacgtggcgctgaggatgttcgcgggcttccaccgcaaggacttgggcctgagctccctgcacgggcggggctcccacgaccggcgccgcttcttccaggagttcgcggaggcgagggccgcggctgcggcggatcagctccaggacgcgagcgacgcgcggtgggatgcgctccgggagttcctgcgggacaggtacgtgtccgtggtgcacgagagcatggaggcggccttcttcgggcgcggcggggacgcgctgccgcgcgccgcgtggctccgcgagttcgcggagatggcgcgccgcgtgtggctgctgcactgcctgttctgggcgttcgacggcgccgcgtccgtcttccaggcgcgccctggggagcggttctcggaggtgttcatggtgagcgtccgcgacgcggacgccggcaggagcgggcacgtctccgtcgggttcaccgtggtgccggggttcaagctcggcgcgacggtgatacaatgccgggtatacctttcacacccggagcgccgtccctga

SEQ ID NO: 24307 - DNA, 162 bp, Zea mays
  Peptide Sequence Number=SeqID_67682
atggcggtggcaggcgggcaggagcagcggtcacgtcgtcagccaagcctacgtcccatccaggggagacgagagaaccctttctcacgggaccgggaaagggggataccccgaaaaggatccttccccgtgaaggaaccaggctccgagcctccctactga

SEQ ID NO: 24308 - DNA, 228 bp, Zea mays
  Peptide Sequence Number=SeqID_67683
atgaagaaggattctttggaaggacttgttggtagatatctagatctgaaatcaaaacaagttgaggatgaggttacacaaatggtgaaaggaaaagaatctgctcaagatgagaagataaaagcagatgaggtgtttgacataccaaacaacagagagatctttatcaattttagggttgatgagccagaaactgccctcctatgggttaagacggaacatggataa

SEQ ID NO: 24309 - DNA, 177 bp, Zea mays
  Peptide Sequence Number=SeqID_67684
atgacgcctttcttcaatcatctgcaagcagctagaaagcacgccgactatacggagcggaggcccgtcaccgagaggcttgagccggtgcgtagcgacgccaactggcccatcggccagcagtcctgcacgtcaggggatgtgcagtcagctggagggcttgtctacaacccataa

SEQ ID NO: 24310 - DNA, 147 bp, Zea mays
  Peptide Sequence Number=SeqID_67685
atggcgttggcgttttgtttgtgcccggccggtgcccacgcgtccggaccggacccggggcggctgtctctgtctgaggttgacgtccacacaaatcagctggcccctgccctggccgggtggtattcacggccacaaatgggctaa

SEQ ID NO: 24311 - DNA, 321 bp, Zea mays
  Peptide Sequence Number=SeqID_67686
atggccgcacctcagcggtggccacctaagacgcgcgacggcggtggctccccaaggtcgcgccgcagcggcaaccacctaagtgtccggtgcgccaacggctccaaagcgccaacggtcggcttcgccaaagaaggaaagaaatccgcaccggacagtccggtgtgccaggcgacagaaggcaagaattgccttcttgaaatgctctcaatggctcctagctgccttggggctataaaagggacccctaagcgcatggaggagaacaccaagcattccttgagcattgttgatcactcacacttcattcttgcgcactag

SEQ ID NO: 24312 - DNA, 894 bp, Zea mays
  Peptide Sequence Number=SeqID_67687
atgtcctgccataaattcttgctacgccacataacaataaaacttctgccagcatcaaaatcttttatgctggctgtctggagggaagcggaaaatgctgttaatcaggaactagttgctttggagaaagaactctcaacacaccgaagaactggctctattgattcgtttggactttacttgtatggcattgtcctacatgataaaggatgtgaaggtctaactcgaaagatcttggtagaacctgtcaatagctatccttggaactggagtgcttggtcagagctacaaactttatgcaccagcagtgacattttaaacaaattaaatctgaagaatcgctggatgaaagacttctttcttgctagtgcatatctggaactagagacgcatgaagaagacttctttcttgctagtgcagattctttctttggcttgtcttgcacaatagatgctggaccgcagaccgtcttgctaaaagaggactttcccatcccagtgcgtgtcccctttgtgaccaagaagaggaaacaatacaacatcttttcatctcttgcgtctttgcaagacagttctgataagttggaacattggacagtaagtgtcaaggtaacattgcttccttactatgtccatcgtgcattgcatacaaggaggaatttcagctttcaagaaaacatctgtagggctcacagcgtgatgcttattgtttgtatcctcgtcacgagactccatgctgctggatacgatgacctaccgcgcatgatgctggctcgtagttcctggagcttggcaacaaggagaaccaggcgcctacatggcgcgaagatgagcgtcattggaatgagccagacccctaatgcaagtatcaacatagctgtcttctgtgagtag

SEQ ID NO: 24313 - DNA, 339 bp, Zea mays
  Peptide Sequence Number=SeqID_67688
atgcactcatgcagaaggcgtagcatcgcaggaacacagccttacgaccgacctggttctgcagcacgtgctcggcgcggcggtactcccggcagtcgaaataggtcttggccagcaggttatgacattaccccatccgccaaaacttgcttgtcttcaagcaaggtcaagaggaaaacgagtttgcacagcatagaaatcctttcgagtagagaactccggcaacatgcccgatccgtggaacaaaaccagaataataggtgccttgccctttgttaccaatctgaggttcatgagttcccttggcgtgtcaccttcttgggtctcatcaggaaatag

SEQ ID NO: 24314 - DNA, 459 bp, Zea mays
  Peptide Sequence Number=SeqID_67689
atggcggacctcagcggctgcgcagcgaacggcggaaaagagaaagaggggattgggaagagtgtgaaaagagaagtaacacctgaatttgtgaatatgagcaaagaaattttatacccccaaattcagggtgttacaaacctatcccccttaagagaatctcgccccgagattcaaggttgcttcttcctcagagtggtggccccatctgactttgcacattctgatggtgtttcttcgggtgactctgtctgcaaactccagaatctgtgttggcttctctacgtatgtcagatcctcttggacttccaagtcctccactggcaactgtttcttctggtactcgcagacacttcttcaatttgccgacatgtggaacacatttgtgcactgctgacaaacttttctggtaggtttgagctgataggccactttctccacgctttgcttgaaatctga

SEQ ID NO: 24315 - DNA, 429 bp, Zea mays
  Peptide Sequence Number=SeqID_67690
atggctttgaaggaagagcaacccagcaagggccaaccatttcttccactttttgggtgtactgaatactacacaacgaagatacatcgatctcaaggcactggtctacgcagcttgatcgttgcacgtgtcgttggaaaacccgacgcggctcttgataccgattgtgataccccggggccgcgatgcgcgccaccaccaaaagtgttagcagaagtgatctgtggactacagctatgggcaacctgtgctgtcgtgttcaagttgactgactgtggccatcaggtagcagtttggcagtgtgaccactctaacaactttgttcacatcgctggagcccgcactgaagccggacgatgtagtggcactgccgctgcgcatgcagccatccacctacagcaagctggccgcgtcgaagaggtcggttag

SEQ ID NO: 24316 - DNA, 273 bp, Zea mays
  Peptide Sequence Number=SeqID_67691
atgagggtgaaatgtgatgcccttagccaattaattagaggaactagaggtgtagttgcttcgccgtcgcgccgtcaaaggggtccaggcacaatgcttgctctgccgaggctgagtgccgagccaaacgggacatttgctgagtacgttgatgtgtactcatccttgctttaccacaaaacaccaggttgtccacgttacaaccactgctcaggagaagacgaagccgtggaaggagacttccaggagttccaagactacgacgagttttag

SEQ ID NO: 24317 - DNA, 264 bp, Zea mays
  Peptide Sequence Number=SeqID_67692
atggccggagtcggtcggtccacgcacgcaggcggggatgctcgtcggcggcgaggagtccggcctggtcacggcgagataaagcaattgaatgggtcagagaggttcatgggatgccagagaagatatgggtgcaaggaatcgagatatggagccaggaaatacggtctgtctccctgctcaaacccgaggcaaatccagggttttgtcgtgtctagggctcgcatcccaatgccatcttctggcacacgacagaggggttag

SEQ ID NO: 24318 - DNA, 1000 bp, Zea mays
  Peptide Sequence Number=SeqID_67693
aggattggggacgcttcaggtggtatcggagctgttaggttggccgcaggacatggaggtccgttgccaaaccagcttttgccagaatgaagatggtttccccaagttgttgagagcatgcacagtccgcctcggaatcaggagccagccagagtatgatggtcatgaatttgtcgagcatggcacagagaagtgtgtcgtgactgtatacattggatccagtccgcaccatgtggaatggagtgtcactactgctgggcacaaattcaaagacacctgccaagtcgtcgctcgcaaggcattgaggaccctgtgtcaactttatgaagaagaagtggccgacaccccgctcagattctttccgccctttcagagagaccgtccagtttggatggctagaatgcgtgcattggaagggaagcagctgcttgaggacgaccccacagtcgtgtacctcactgcatacctactcaccctagatgcacaatatgatttcttggctcggcaccaccgtcagatgattgcccgagcagaagatgcagagaagcgcaaccgtcagctccatgtggatctcacctcagctcaagcccatgtagctgccttggaaagtcatgaagccattgctgttgaagccctgaagcaagccaaggatgagcatatccagaagttgatggaggcctacttggtaacccataaccaacgtagagccctgcggatccaagagcccgcttcatccaacccatttcaccccaggagagctgaagatccccagattcttgaggctatggataagcaagagcaccctgagtcctcccaagatcccccgccagagttgtttgagcccctcaccatgaagaagattccagcaccatcccttgaagtcaaggaagaagctgcaagcaccccgccagcaccgccgccctctgaagagctacaagagccagtcccgcttgaagaagagttcgaccctgtgttgccatctcagtcgccgccagaagaa

SEQ ID NO: 24319 - DNA, 1908 bp, Zea mays
  Peptide Sequence Number=SeqID_67694
atggagttgcagccgggccacacggtggaattcggcacctcaaggatttcttcggttcgtgtgcaggagatgcagcagctgggatactttggtgacggtgttgggcgcgtcccgggcactggggagattcctgagcctgagggcgaattagttgtgttcgaggcattcttcatcgctggccttcgcctactggcgcatcgtttcgtggcgaaggtcttgcagaggttcgacgtcctggtccaccagttgacacctaacgccgtggttgccctggttgaggagttcattggttatggagtatggcccttggcgcatggctgggtacttggcgaagtgttccctcgccagatgcctaccttgggcgagcagttggtgcgaagtccaaccttcgctttggatttgcgcggccggaacccagccgcgtttgtgcgtgaagtagaggatggagcagtgagaattgtgaggcgatatgtgccaaggatggaggctttgtggagttgggatattcacagttccaatgttcgtttgaaccgtgttttcgagttgaaccgtctgccgtatggcggttacctaggagacgacgctgctactactgtcgatcgccggggaaaaaaggcagcggctgcggttgaggaaggcccttcacggggagctgtgccggccactaaacggagaaaactaggtacttcaactgaggggttgggggtctccaatcattttgctgtggatttaatgggaacttgtgcggcccctgggggaaggatgtcttcgcttgagctccgggaatcttcggcgcgaatgctggaggttaccgggggtcgctggccgaggaatgttccgaccccccgagcggccggcgaggacatgtttacgtctcgcttagcccatgagatggagatttttccttatggacggaatattgctgctgttgtatcggtagtgatggataaggatcgccaagatgcgactcggaagcgccgagcgttcactagggtcggggaacctagccgtgaggtcaagaaggcgcggggggtcgcgaagtccgccgcccccggcagcagcaaaccaccgccggctgcgaagcctgccgcccccggccccagcaaaccttcatcgggtgcaagggtcgtcgctcctggcctaagcaaaccgccttctgctgaaaccatgaaggagcgagggccaccgtctcctctgcgtactgccgaggtggcggctagtggagccgacctctccatggacatctatgtggatgattaccgcgtgggtgggtcggatgccgggcaactggctgttgtcctggctctggtggcgaccgcgccggccgcggcggcggccgaggcgaagggtgcttcgcaggacccatggtccaagttttgcgccagcggcaagattacttcggctgccaccgctaaagacgtaggcgggttctgttgcgcagcagctgaagcatgcaacgcagtagctgaagcatgtggctccctttgccgatcatgttgcgtcaggcgctctgacctcgaagtttgctgtcgagaggcaatgactcgagggttgatggagaagttggcggttgcagagctcgagaaggaggacctcaaccgtcagctggcggcggagaagaaggatgccaacagggcctgcgctgaggcgcaggctgcacgtgccgaggccaaacttgctcgtgctgaggccaatctctcttgccaacgcgctgaggcggaaacgagccacaacagcctacgcgactacctggacaaaacggaggcctctacccacgcagaggtcgaccggacgcatgcacagctcgcggacgcgtaccggcagcttggtgcgcggaccgctccctttgacgcatccggtaaggaggtgggcctccacttcctcggatggctgcaggaagagttgtag

SEQ ID NO: 24320 - DNA, 84 bp, Zea mays
  Peptide Sequence Number=SeqID_67695
atggagagcctcatgaggcctcgtggtcgtgggaggaggacggaggacctaaggaaagttaatcgggatgggaggtgtgcataa

SEQ ID NO: 24321 - DNA, 294 bp, Zea mays
  Peptide Sequence Number=SeqID_67696
atgggaagaggcggagccgatgcactgggggctggccacggccagggctggaagctgtgtgaggctgctggccgctcgccgacgacccaccagccggcggcacacgcgcacacaggacgtgcagggaggcacgagtgcacgactgctcgggctcggccatggccaccaggggcgctcctcggcagtcactacttgctggctgtagggcgcgccgggatccacaaccagggggcgagccgtccatgggcacggccatgggaaggctcggccaagaggggaataactactctctaa

SEQ ID NO: 24322 - DNA, 246 bp, Zea mays
  Peptide Sequence Number=SeqID_67697
atgacggcggcggctctcagcctccttacggaagcaaggagacgtcagcaaggactcgacagccccgacagctgtcctttcgcaaggctccagcgctcctccgacggccacgacatcacacgaacagggtgccaaaacctctccggctgccacaacggcatgtgtgaagcacaaggacagttgtcgatggtggtgaaggtcatgcgggctcatgctgatggatcaagagaggtgaaggacgagtga

SEQ ID NO: 24323 - DNA, 459 bp, Zea mays
  Peptide Sequence Number=SeqID_67698
atgggcagaggcaagagaggcaagggatggcctcgccgtgctgattggaagcacaagtgtccttcaagtccaccctcggaggactttggtgactcggagtactcggaggaggtttcctccgagtatgatcgatcgcccgctccagcgtcccccatggcatcgtccaaggactcggacaactccatggggctgtccgttgcatcgcaagcgtactggcgatccatcgagcgcgccaggctcaatgggtcagatgactcggaggaggcctcctcggaggaggtggaagactccttcgactccgaggagtggagcgacggcaagggcgacggtggcgaggacgacggcaagggcagcagcgacagcgacagcggcgatagcaaaggcgatggaaaaggcgacgacgacagcaagggtgacggtggcgacggcaaggccggcggcataatgctgctggcataa

SEQ ID NO: 24324 - DNA, 612 bp, Zea mays
  Peptide Sequence Number=SeqID_67699
atgaacagacaccggcactcaaggtgccattacaaatgggaactccggttccacctccgcagcggcgacaacgacttctgctccgagcggccgaacagcagcagcgatgacctcagggcggatgctgctgccataaagccctcgcccacgtccccactcgaggggcgaggacgagcagaaggccgtagagttggaggtcagtccgcgggcggcaccgactatctcgtcggcggagaaacctcttccagctgccgtggcggaagatggcacagggagcagcgccgaagccgctcggaccggagagccggacacgcggcagctgctagcgccacgaacggcgaacgcccttccccccgatctctgagggaaggagcgggccgttgcccgcgcggagaccgaccccaactcggcgcactcccctccctagcactgatgatgaacatccttgaagctgagggaggggcagaggccgcagcccggcttgcttctccccacccaggagctggtggtcaccgtcttggccatcgcgggctgagtcttctccaacacgctccaaggttctccccctacaacatgggggctgggtcccacgcgtcatgcaagctggcctag

SEQ ID NO: 24325 - DNA, 723 bp, Zea mays
  Peptide Sequence Number=SeqID_67700
atgcaggcggcatgcgaccgcaccaagggggcgcaccctttcgacttcaacgcgtccagcatggtggcccaggcccacacgtcatgtaactggcgggcagaagcagcggtcaagtcgtcagccaagctcacgtcccctcctgggacagcgagagaaccctctcccacggacatgcggcacctttggcaggcgaagcaggcgacgcttcacctccgccataatgaccgcgtcaaaaaagggaccgggaaaggggataccccgaaagggacccttctccgcgaaggaaacgggccccgagcccccctactgatcagaggttcgaaggctagcccctcggaggggttcaacagccgcctcagagcgctcaggctccgcgcccactactggctggccctcgaagggttcgacagccgcctcagacgcagagcgagggatgaccctgggtacgttcgatacataaccaaggctcgggctacgttcccgagagtgaggctggcagcagccaagtccggcctcgggcgccataggaagctccgcctcgcccgacctcagggctcggactcggcctcggccccggaagacgacgaactccgcctcgcccgaccccagggctcggacttagccttggccccggaagacgacgaactccgcctcgcccgaccccagggctcagactcggcctcggccccggaagacaacgaactccgcctcgcccgaccctag

SEQ ID NO: 24326 - DNA, 600 bp, Zea mays
  Peptide Sequence Number=SeqID_67701
atgttttcttggttcaagtccatcgtgaacaagatgcatgccaacaaggcacagttaccctatgatgatcatgagagagcgctcaagctacttcttgctctggatcagagggtttcggagatcaaggtcttggcgaccattgagtcgcccaactacgagaccctcaccttggatgagctattcagcaagctcaagtccaacgagattgaccaccacactcaggccaagattgagaaccctggcaaatccaagagcttgaagataagctccaagattcagctttccatctctatggctttggaggatagcagaagcataatagaacatgccctaaatgtggatccaagcaccaggtcatgcaaggaaaagcttcgtaaaatgttcaaagacaaggccaaaggtgcaaaggctaaagttaaaagattgcttagtgctagtgatgtagctgaggtgcccgatctttcggcgagtagagataattccgatttggcggaagatgacccttgcgatccgactatgacgagcaagcccgaggcgccaatgcaatcgctgaaccaactccctgtggttaccgaccttgctgatgcgagatcggcctga

SEQ ID NO: 24327 - DNA, 492 bp, Zea mays
  Peptide Sequence Number=SeqID_67702
atggcccttcttattctcattgcccttagtttccgaagtcccaataaaagtgcttcgtacttagcaatattatttgtgcaactgaaatccagtttgactgcgaaacatgttttgacttttgaagcttctcctgtacaagtgccgcactcactgcagagtgcgaagctgccacatacaacagcagaggagcccctggcgtgggtggggttagcatcgttagatctatcaggtactgcttcagctcttcgaaggctttctgctgaactgatccccattgaaagacttcggccgacttcagcacttcaaagaatggccagcttgccaaaaattagcaaatgtttcctgcagatcagtgttggaacttgctctccggtgcaagttgatccaacgggggagtgtagcgacgtagacagggtttttgcacgagatggcaatagctctgttaatctcgcctctcaagggcactgtgcgggggtatttataggtatctga

SEQ ID NO: 24328 - DNA, 1491 bp, Zea mays
  Peptide Sequence Number=SeqID_67703
atggacaaggatcgtcagggagctacgcagaagcgccaggcggtcgttaggctgcctgaggctaggccgaagaggtcgcgggggactgcgaaggctgctgcccccggcggcagccagccgacgctggcggcgaagtctgccgcccctgggtccagcagggtgccggaggccgcgaaggcggccggcaccggcgaaaccaagtccgccccggtcggagccgcgaaggcccgagaattgcctccgccgggcaagcgcgttgccgacttcgtcaccgatactagcgtggacgattatctcgttgggtcgggcgaggggcaacttgttgttgttccgcctgcggtcgcgaccgcggcggctgccgtggtgcctagggcgaagggtagcgctctcagcgccgggagcgagattccggcgctcactgtcgtcaaggacgaggcgggcgctgtgtcccgccgggtgaaggaggcattaagtcaggcggttgacttcgctgaccgcgtggcgtcgggggcccttacggcggttgtgtctgctgaagtcgagagacttcgggcgcaacatgctgacgccgtccgggaaaagttggccgccgacagcaagtgtcgcaagctggcggagaaggtggccgcgctggagggcgagaggactgacctccggcgccaactggcggaggagagaagggaggctaatgaggccctcgccaaggcgcagtctgcgcaggcggaggccaatttggcgcgggtggatggtagccttgccagacagcgcgccgaggaatgggaggagcggttcaacgctctgcagacccgtgtggagagggtcgaggcttcgacgcgctcggaggctgagtggacgcgcaaacagcttatggactcatacaacgagctgggcgcgcggaccgctgactttgaagtgccggaccaagagcccggacttcgctgcctcgagtggctgcaggaggagctgctggcgctccccgccattgtggaggggtttatgtcctatgcctccctggtcacctgcgaaggggtgatgaacgcgctgtcccgcgaagggtgccgtcactatgaggtcttcgaccgatctgatgaggatttcgagcgcgagatttacaaggttgaggaccctgtggtgaaggaatccgcgggtgccctcttcgaccggatgtggggcccccacggtcgggaggtggtcagggagcggtccgacacggcgaggggtcaagcggcgcgtaacgagaaagtggaggacttcggggctttgaacagcgcgcagcctgaggcggagtcgaacccggtggcggctgggtcagaggtcgccctggtgccgcccccagaaaccgttgaaggctccctcgctgcccccgcggccaccgcggccggtggtggtacatcgccaaccgctctaccgagggctgaggatcccccgaagacggcgacggagctggcagcggaggatcccacggctgctgggtcttcgcaggtggcttag

SEQ ID NO: 24329 - DNA, 141 bp, Zea mays
  Peptide Sequence Number=SeqID_67704
atggagccacgcgtcttcgtgggcgggtcacggcgctacgtgaattacagtatggtttcctcccctgtgttcgcgcttatccctatcgtgtatagcacctctcaggtgggattttggggcgctgtgcgggggttcctatga

SEQ ID NO: 24330 - DNA, 834 bp, Zea mays
  Peptide Sequence Number=SeqID_67705
atgtctgccattgaccatgcactagaggaaattattcctgaagaccttttattggagcctcctgagactgaaagttctgtcgtccatacaaaagttccggatgacgtccctttggctggtaatcttgtcatgcaagaactaacctggacaatttctcatgcttcttcaaccatggagggcggtctagctcgtggggacacactggctcttgacgttgcaggccagggtcacttggctcttgtaggtacgaccgagggtgcttcagcttccgaaggtgccactgaggacaacctagtccccgagggtggtgctaaggatgacctagcccccaagggtgccgagcttggttcctcttcggctgcctccatggatgttcatgtcggatcgccactggttcaatctaaggaacctgtggtgatgagttcgcctactgatcttgtcggtccggtcaccttagtggctagtgacccggatgctgggaatctgcctcccgctgttggagccaatgtctccctaagtgatgctctcatcattgtctctgtcaacactccatcatcagacagggcaccgatgccttctgctctgggattccccttattcctttctaacctccagattccagtttcagtgaacgtcgcagccggtgaacttgcaccgcgattcacgccggccgccacgattcgtgccagtgtgaagtggataactgtggcgggtgaaaagatcttaggtgaggagaacttaggcctgagctggatcatcgccgtacccacttgccgcgcggttagtgaaatatcgccgctggtgctcgccgtggtcatagtgaaaggcacgtag

SEQ ID NO: 24331 - DNA, 309 bp, Zea mays
  Peptide Sequence Number=SeqID_67706
atgtgcggcgaggtcgttgaggatggacctgatgcccggggcccatttatgctgaggcgtggggacacgctgtcagcggaaggtccaccagtgccaggcacgcgcgcgaaagagtctgatccctgggtcccacctgtcggcgcgccatttgagaacaagtccccaacattggcgcccacctccagtgaactcacttccacttttgagctgatggcttcgtttaacaaccaacccgaagctccttcgactacgaagctgggacccttcatcaagtcaaaatggtcccacatcccaatcaccttctcctag

SEQ ID NO: 24332 - DNA, 297 bp, Zea mays
  Peptide Sequence Number=SeqID_67707
atggcgagagtagcgtgtaccctccgtggcaagaggctggacggtggtgtatctgtgctctcgccgtctgaggtctttgagacaaggacaggtgcatgtgggcccaataacttgggaggttctgccacaccttcggcttgctcgaagatttggcgctcattccctttggttgcaaacaattccttcatcctaaggaccttcggcagagaaggggacccccaacaacatctgctatttctctatgtggttttgggtgttattataaatatgattcatgatcatgctttattattgtga

SEQ ID NO: 24333 - DNA, 435 bp, Zea mays
  Peptide Sequence Number=SeqID_67708
atggcgtccctgttttttcttcttccctgcgcgcagctcgttctttctctgtttgccgcgtgcgtctctctctgcgcgcttctctctcccgccccttctctcccatggtgcgccctggtccttgcttctttctctctctgctcatccccaagctgcgtcctggagtttgagttcgtcatcttcaaccttggtccaagccactcgctctctgccacgcgccatggaactctctgcgtcgcgcgtggtcctgctcttctcaccgcgctcggattccgtctccctgcgcgcactctcggattccgtctccctcacgcaccccttgccgaacccgtggtcacggtctcgccttgctgccacagccgcgcctactaccgcgaccgacctgctcccttgtgcgcgctctgcttccttgccgagctcatccctgtgcactga

SEQ ID NO: 24334 - DNA, 297 bp, Zea mays
  Peptide Sequence Number=SeqID_67709
atgggcttcgctctgataccagctgtgacagaacctcccaagtcattaggcccacctacagttgtccttgtccaacagacctcggacaaccctgtagatgcacctgaccacttgacaagttcgatctcggcagttgacggaattaagccgaacacctggccggagccatggtttcacggcggtggcgacccggacaaaggtggcggaatggccctggagatcgcgttctggacaactaacaggattgacgctataattgaagcttggggaaagcttcacgggttcaccaggaactag

SEQ ID NO: 24335 - DNA, 579 bp, Zea mays
  Peptide Sequence Number=SeqID_67710
atgccgccgcgcatgaggaaaaccgcgcgtaagtccactagaccgattggcgtgcctcggcatcagctggcaccaaggcatgaggagagcagcagcggcagcaatgaccccattggagatctagaaacccaggtggagcagcttcgaacggtgctacgtcacagaaacagggtgtgggttgaggatggtcagcttataaatgagttaataactgacatccgacatctacaagacgagcttgtcgaacgggatttggcactcgattgggctgtcaactcacgttccattgcttgggaccgggaagctaaagctcgagcccgtgtggaggagcttagcacggccgttgacaacttgcaggtgtactacaatacattacatgaggaagttcatgaattgtatttgcgactgcaccccgacgtacctgccgaccctattggaatgggagccgaaccttctcgaacagctggtgcagcacttggtggggaattggaccttttcaagccccctccttctatgaacctcgctgatgaacggtcccctacaaccgacagcgaagctactaaagatgacaaatattag

SEQ ID NO: 24336 - DNA, 96 bp, Zea mays
  Peptide Sequence Number=SeqID_67711
atggcgcccaagagaaaaactgcgaactcgtctgctgcagtgatccccgcaatcgaccccaacagccagttacccttcgcagccgctgaaagatag

SEQ ID NO: 24337 - DNA, 1245 bp, Zea mays
  Peptide Sequence Number=SeqID_67712
atgtggcccccagagtccctcctgcgggccccagttcctcggacaagggcaagtggcctacatgcagctcctccactccggacgctgccgggaggatgggcagaggggcgtgagccctccgccgccacctccttcggattcgacaccaccaccaccgccgcctatgtcaggtcgaccgccgtcaccacgggggcagcggcagcaacagcagcagggacggcagcagcagcatcaacgacaacgggcgccccgcttccaaggccactggaaggttcatggtcccaatggctaccgcagcctcatcagcgtcggtgccaagccctccattggcagcggccgaagaggttcccgttgcgtttgcctccaccatgccgggtgacgctggtgctgaggtggcaccgtcggacccccaggatccgcctatcaccgccgaggcgatgcctttgggttcccaagctccagctagggggtccagcggtggcaatgttgccaacagctgttgcagacctagaggcggcgataccgtcggatgcaccatcggtggtaggcatgggaggcgcatccagctctgtcccgtcaccaactccggaggctccggaggctatccttaggcgaccgctccgatctggcatcgaacctgaagcaacattgactcccctccctcaggtgctgtcccgcgcccaccaggctctccgagaaactgaggcagctatccggcgggagtgggaggcactcgagaccgagcaccagcgccttggcgactggtgcacccaactggaggagtgcactaagacggtgtcctgccaattcgcctcagaacgagccgagtttgagcaggagcgcgaggacttcaaggaggacatccagaaggtgtttgatcgagaggaagaggtgaccaagaaggagaaaagcttggccaggaaggaggtatggttagaccaaagggagggggccgtcacagcgctccatgataagctgaaagcttataatacggtgctggagaaacagcgggacaagcaggctgcagctgaggcgaagctacagaagctgcagcaggaactcgccgagaaggccaacgacattgctcgcgccgaggaaagcctcaaggcgagggaagcttccctggcgaaacgagcaactgatctcacctggcaggaggaggacctcgccttcagagaggagatgtggtcaaggcggaacaagctgttggatgagcttgagctcgaggcagaggagaaaaggtaa

SEQ ID NO: 24338 - DNA, 735 bp, Zea mays
  Peptide Sequence Number=SeqID_67713
atgcgtggggccacgtgccagtctgccgcgaagacgggcacgactgttgaagtgactagtagcaaactgacaacatgcacgcgctgggttagcacggcgcgcgctaaaaagatgccccgatccccggtcacgcggagcttacacaggatgcaggttatgggccccacctgcaggcttgcgtcctcccttgaggtgggcccgggggccactattggtaccttgaaacaggggtaccccttgttacaaggtgaagatgatgtgccgacggtaaagtctctggttgcgcggcaagcagttcgccgtcagacaacatcagccgccttggggtcgccacgtggccaaggcgaaggacgtgctccggatacatgcagtgggtccggacctactacgtggaaagcaccggaccccgtgcatgacgggcggacctccaagaaagatcccagacccttccaagtggggtccggacagatcaccaccgggtcccgggatgctggggcagggaatacccggaccctgccctggaaggggtccggtgctggcatgtgtccagggcttgcaccgcgctccccgcacaggcaagggcccgttgctgccgcgtggcatgtggttcatgacataaggcaacaggcggagtctgatgtcgggccgctaaaaccgccggtctctgcatttattgcagagaggacgcgccgcctgccactaggccagcgaacgatgtgccctctcggtatttaa

SEQ ID NO: 24339 - DNA, 972 bp, Zea mays
  Peptide Sequence Number=SeqID_67714
atggctgaaaggtaccaactcctacggagttgcgttcctccaacgacaaggcggaaggaccgcagacatcccccatccgggggctcggaaggtggaaagacacgatgcataagggagcacgaagacatggtcgcctttcaagggggtcgccctctttttaaaggcgactctccctactcgcgtccccaaccgtcgtgggctgagtcttctccaacacgctccaaggtcctccccctacggcgcgggggctgggtcccacacgtcatgcaagccggcccagagcagaagaagccaaaccgccgcgcgcggtgcatgcaaccgcccagcggttacaagcggccctccactttttcccagaccagcgggcgagaaggcgggcagccatgcaggcggcatgcagccgcgccaagtgggcacacctctccgacttccagcgcgcccagcatggaggcccaggcccacgcgtcatacaatcggcgcgccggatgctacgtgcgagcaactgcactgccactcgcgccactgccacgcctcctcgactgcggaaccagtaccgcgactcgaggcaaccctacgcacgacccaacagcgccagcctggcgtgacggtcaatgcgaccaaaaatgggccagcagtaatggcggtggcaggcgggcaggagcagcggtcacgtccgcctctggcaggggaagcaagcgacgtttcgccttcgccataatgaccgcgtcaaaaaaggctccgagcctccctactgatcagagattcgaaggctggcccctcgaagggttcaacagccgcctcagagcgcgtgggctccacacccactactggtcagaggttcgaaggccggcccctcagaagggttcaacgaccgcctcaggctactcgggctccgcgcccactactgatcaggggttcgaaggctggccctcgaagggttcacagccgcctcagacacagagcgagggatga

SEQ ID NO: 24340 - DNA, 1122 bp, Zea mays
  Peptide Sequence Number=SeqID_67715
atggctatggcgacggcgaagctgagctccccggcgaccagcttgctggctggcggccgcgcgcgccggtccgcgcccgcccgccgcgcgacggtgatccgcgccgcggcaggctcctactccgacgagctcgtctccaccgcgaaatcggttgcttcccctggacgtggtattctggcaattgatgagtcaaatgcaacatgtggaaagaggctatcgtcaattggtttggacaacacagaacctaaccgccaggcttacaggcagcttttgctgacaactgctggtcttggtgaatacatttctggtgctattctttttgaggagactctttatcaatcaactacagatggcaggaagtttgttgactgcttgaaggatcagaatatcatgcctggcatcaaggttgacaagggcttagttccattgcctggatccaacaatgaatcgtggtgccaaggtcttgatggtttggcttcaaggaggactgttgttagcatcccttgtggtccatctgcattagcagcgaaggaagcagcatggggacttgctcgatatgctgctattgctcaggataatggcttagtgccaattgtggagccagagatccttcttgatggagaccatgggatcgaaagaactcttgaggtggcagagaaagtgtggtctgaggtgttcttctacttggcccagaacaatgttctgtttgagggtatcctgctgaagcccagcatggtcactcctggagccgaccacaaggagaaggcttctccagaagccatcgcaaagtacacgctaacaatgctcaggcggagagtgccacccgctgttcctggaatcatgttcctttctggtgggcagtccgaggtggaggcgactctgaacctgaatgcgatgaaccagtctccgaacccatggcacgtatcattctcctacgcccgggctctgcagaactcggtgctgaagacatggcaagggcgccccgagaacgtcgaggcggcgcagaaggccctgctggtgcgcgcaaaggccaactcgctggcacagctaggtcgctacactggtgagggtgagagcgacgaggcgaagaaaggcatgttccagaagggctacacctactaa

SEQ ID NO: 24341 - DNA, 513 bp, Zea mays
  Peptide Sequence Number=SeqID_67716
atggccaagcgaagtcatggcgtcggcggcggcgcgggtgtagagcaagagagcgcgaacgcaaaggggcgcagagagctcggaggcaaaagggcgcagcgattgggagagaatgcgaaagcgcttgcatcctcccctgaggtgggcccaggggccactgtcagtaccctgaaactagggtaccccctgctactgtacaaagacgcagaacccacacggctatcccttagtcacgtggtagaaatgctgtgtgtgggaccaagccacgactcgcctcaatctcagatggttattctgggtccacagcagcgcccgaccccaccacatgggtgggtccaaagccgccacgtgtccagagaaggtggcatactccaaagcatcaacagtgagtccagacccccatgggagagtgccggaccctcggatatacagttcggaccccaaggttggtcccggacccccggatatacagtccggacccccaaggttggtcccggacctccacgtgtgtaa

SEQ ID NO: 24342 - DNA, 54 bp, Zea mays
  Peptide Sequence Number=SeqID_67717
atgccagcatggaatgacatcttcaaggagatttggtcagcttggagtgcttga

SEQ ID NO: 24343 - DNA, 1035 bp, Zea mays
  Peptide Sequence Number=SeqID_67718
atgggggcaaatggtcatcatgaacctcgcagaggatgtaatggcaccgtctgcaatggtagtataagaccactcgattactttggtgatgtagatccatggacggcttgggcatacaagcctcgaacgatctcgctcttgctgacgggaacatgccttttaatttgggcaagtggtgctctcgatccagaaaggagctcatctgctgatcgtgtttggtcagtcaagaggcaccttcaacgtgagttacagagctcttttcctgactctgattattgttttatatcaccacaatcaaaaggtagacttatgcgtagaggtgtccccagggcttttggactcattagaccacatcctgccatttggaggcttgttcatgggatgacagttgtttaccttgtcgccctcactttcttgctttttcagactcgtgatgatgctaggcaattcatgaagtatcttcatcctgatcttggtgtcggtatttgggctggaatgaaaaccgtgcagtacttcgatgggaggacatacgaatgggttggtttgagccgccaacccaacattatcagtaaggtaaaaaggatgctgggacagttcacaccagcacagtgggacaaggacgagtggcaacctacgctgggtccttggagattcatccaggtgctgagcctttgtgttgttttcatggctgtcgaactgaacacgttcttcctcaagttctgcctgtggattcctccgcggaaccctttggtcgtgtatcggttggtcctttggtggttaatcgcgataccgaccatccgggagtacaatacctacttgcaagacagcaaaccatttaaaaaggtgggatccttctgctggctttccctggctatatgcattgtagagctcctgatctgcatcaagtttgggcatggtctgtttccgaggtcaatgccttcgtggttggttacgttctggtcagcagtcgccttgcttcttgcgctctttgtgtggacatggaaataccgaacagtgaaaaggaaaagggtataa

SEQ ID NO: 24344 - DNA, 741 bp, Zea mays
  Peptide Sequence Number=SeqID_67719
atgactgagagttttcctgcgtgtctctttgccccttggaaggactacactgccctatttatacatgtgggggatgtatgctgtgaagcctggggtcatcatattccaaggggagatgtcttggcgtcctgtaagcctgtgtgcgcattaaatgcgagtgttccccaccagttttcgggcgcctgtgtcttatcttcttgggatcagctcgggcgagacgaacagagcagtggtgactacgggcgaggcagagatttgcctgaggttgtagactcttggggagaggccttaggtgaggcggtgtgggattgggatgttgtctcaaataaggaggttgtagacatagtagcatcagtcccatctcgtgtgatgacaaccaatgcccttgttgactatgctgttagatcatggaggttgaagatcccaacatccaagagtgatgattgtgctgttgtatgcttattattggatcacgagaagtcgactgactcgattcaagggagtgaacccaacatggagacaacaaaacccaccaggaaggagatttgcacacaagatgccaatgcaggggttgacaaagacattgcagatgctggtgtgcatgtatccaatgcaaagcacatttttgaggccacacagcaacacaccaccacattaaaggaggtcgacaagattgtaccgatcaacgaaccgacaaactcaaagaagcctagaaggtgcaggtctgctcgatgctcgtag

SEQ ID NO: 24345 - DNA, 300 bp, Zea mays
  Peptide Sequence Number=SeqID_67720
atgggcgggtccgaagccgccacatgtccagagaaggtggcatactccaaagcatcaacagtgagttcggacccccatgggagagcgtcggaccctcagatatacagtttggacccccaaggttggtcctggaccccccgatatatagtctggacccccaaggtagcacgcccatactaccgcgtgcactatgcccatcattgctcgtacgtaccaaggaagcagccgtcgcgtatcaatactgcgcgggttgcggacatcatggcgccaggcgatagcacaggcgttacttgcatttag

SEQ ID NO: 24346 - DNA, 258 bp, Zea mays
  Peptide Sequence Number=SeqID_67721
atggttaggatactcactatcttcaaagccgggaggttgctcaacatagacctcttccttgataggtccattgaggaaggcactcttcacgtccatttgataaagcttaaagccatgaacaaacaattgctgaagcagaaggagaagatgctgaggaaactgaccccgaagatgattatcaccttgctacgccaagcaaaccccagccatttggacttcgggaaatctactgtttcgaaggctgatttgtccaagatg

SEQ ID NO: 24347 - DNA, 1863 bp, Zea mays
  Peptide Sequence Number=SeqID_67722
atgcacgtggttggcgatttcctgaagcaccaggtcatgccgctgcagaggaggccgcgtctgtgctgctggttcactagcccaaatgacattggcaggatccagcgtgggccgaggaccgatctgtcctgggaggagctggaacttctggtgaaggggattactggtgagtcttttatccctgaatccttgatacccccccaggacatcccggcgctctgtgatgatccagggctgcgaatggcagtgctggcctcgctgccgaccctcaatgagagaggcgtggcgcccaccggtgcgggctctagagctcccactgtggcccccagccccttagacaagggtaaaggggctgcaagtagctcctccgccccgggtggcaccgggggtcggaggaagagaggcgacaccggctgcgtcgcgcgcgatgagtcgcttgtctcgaacccccccatgttttggatccccccaaaagcgtcagaggatagctggtggggccgaggaggccggctcccaggcccagggcgcgcagaggcgcgtcagtcccccggtgccgccgtcaccaccacaaccacagcaacaacaacagcagcagcaaccgtcgccagcacagccacaacagcaacagcagcggatgtcccgcttctagggtcgctggaaggtccagagccccaaggcttcctccccctctgctcccaaggttgtgtctcctccgccgggtgctatgcccgctggtgggtctggctctcagaagcaggcatctgctgggagtggtgccggcgaaccgccgatggctaccacagccacaacaacggcgacgctgtcgagtacaccgtcgacattggtagaggaggtcccagctgcgcccacccccgccatgggggtgacgcgggggacgcgtccagctctatctcgccgcccactctggaggagacggaggtggtttttgggtggcggctccgatccggcgccgagctagaagcggcgcctgttcccctcccctgggtgttgtctcgtgcccatcaggctcttcaagagaccgaggtggcgatccagcgggaatgggaggtgctggaatctgagcaccagcgcctcagcgactggcacacccagttggaggagcgcaccaaggcggcatcccaccagttcgcctttgagcggtctgaactggcgcgggaccgcaaagactacaagaaggacctccagaaggtgtatgccagggagctagaggcgagccggaaggagaagaggctagccaagagggaggaggccttgaaccagagggagaagaccgtggctgtggagaggatccaaaaatggaagcgggagctggaggacaaggccagcgacattgcgctcgccgaggagaacctcaaggcaaaggatgcatccctagacaggtgggcggcggcgcaggctacaccgagcccccaagcggtgcaggcgacgaagaaagcacttgaagatctccaggcagagcatcgcgccagggtccaatgcatcgctgcatgggccggcgaggcgagcacgacgctggtgccgctagggatgagtcccatcctggtgtcagagctaccgacgtccatctccgacgtgctcccggtgttggactctaccgcggaccgcctccgacgcctggaccagattcttggtgcccgcctagaggctgaaggcggcaggctctgccaggcggtgatcgagtacatcctgacgtgcttctggagccacaacccggccatctccttggagccagtgatcgctggtccggtggccgacactaaagacgccgctcgggagggcgtacaagatactgtagaggtggtggccgagcgcttccagcgggatcctgccgatgatgagtag

SEQ ID NO: 24348 - DNA, 330 bp, Zea mays
  Peptide Sequence Number=SeqID_67723
atggccggcaccgccgccgccacaaccacggtctgctccatgtgcggcgacgtcggcttccccgagaagctctttcggtactgcaccaactactacggcgacagcgcacccgcctcggccgactccgacatgtgcgactggtgcctcagcgtcgtggccggtaaggcgaggtctcccgccgggaagcagaacgccaccgggagccaggagtcgtccaccaccacgggctccggaggcagcggcaggggcgccgccggcaaggccgaggctgggcggcgagcgaccaccaggccggccggccgcaggtacaagctgctcaaggacgtctag

SEQ ID NO: 24349 - DNA, 468 bp, Zea mays
  Peptide Sequence Number=SeqID_67724
atgggcaagatcaagaagggtggtagttcttcgcatcaccccgacgacaaacggaagcgtgagccgactcctccctcggaggtcttcggcgactcggagtactcggaggaggagttatcctccgagtccgagggctcaccggtccctgcctctcccccggcgtcgtatgatgactcagacgactcccaggggctcgctgcagaggtgtggacctacatccgggccgtcaagcgcgccgggctcgagggctcggatgagtcggagtactcctcggacgaggagaactcctcggactcgtccgaggagggcggtggcagcgatggcggtgacggcgacgacgacggaggcgatggtgatggcggtgaaggcgacgacaagggcggtgacggtggtggcaaaggtggcagcggcgacggcggcggcggcagcaaggacagcagcaggggcaacaacaatgccagtggctag

SEQ ID NO: 24350 - DNA, 594 bp, Zea mays
  Peptide Sequence Number=SeqID_67725
atgaggagggtcctaagcgtcttgcttgttacgaggttggtggatgaacacacgagagcacacgagggtttagagtggttcgggctgtcggggcgtaacaccctactcaactgtgtaatgtattgtgagtctgagcttggatctgacagacagcgcgacctcagcggcctgacgttagactccgtcggtcggcttatgtcacgagccacaagccacgcggcagcagcgggtctctgcccgagcggggagcgtggtgcaatccccggacacgtgccagcaccggaccccttccagggcgaggcccgggtatcccctgccccagaatcctgggacccggtggtgatctgtccgaccccacacggaagggtctgggatctttctcggaggtccgcccgttatgcacggggtccggtgcttcccacgtggcaggcccggacctactgcatgtatccggagcatgcttttgtcccttggccgcgtggcgaccctaggcggctgatgttgcacgacggtgagcccgcttaccgcgcaactagaggctttaccgccggcacggcgtctataccttgtaaccaggggtacccctatttcaag

SEQ ID NO: 24351 - DNA, 246 bp, Zea mays
  Peptide Sequence Number=SeqID_67726
atggcgctccctgttgacatggcgggcccgcgcccgaggtcgggcgacgtgggggctcctccgaagccggggttgagtctgtcttccgtggccgaggccgagcccgagcccctgggtcgggcgaggcggaggcggaggtcgttcggcagaggccagggcggagtggagttcgccgtcttccggggcttagcccgagtccgagccctgggttgggcggagcggagttcgccgtcttccggggcttag

SEQ ID NO: 24352 - DNA, 618 bp, Zea mays
  Peptide Sequence Number=SeqID_67727
atggagggaatacatatagaagtatccaacgcaagtgtcgcccaggagatctccgagcgccataatgtccgtagtgcatatagtattaatatctcgcagctgcttcctagtggagtggacagggctcatttaataccgaggcggcacatcgcctgccagtggaatggacaggcggcgcgccttatccgcaataaatgcagagaccgcgcggctcagaggccttacgtcaggctccgcccgctggcttacgtcatggacagtaggccacgtggcagcatctgggctccgcctgagcggggagcagaggcgtacgtggtatggtccggacacgtgtcagctccggacccccgcctagccttgattaaggtctgggtattttttgtctcagaatcccgggaccctgctgtgagtggtccggaccccacacagaggggtccgggacccgtcccaggggtccggtttgtacccctggaggtcctggaccttgcctggaggccagatactttcctatgggggttcgaacccactgttggtaccttggaggatattgtcttctctggccacatggcggccccggagctgtccatgtggtggggtcgggtgctattcaccacgtga

SEQ ID NO: 24353 - DNA, 1338 bp, Zea mays
  Peptide Sequence Number=SeqID_67728
atgggaaggaagcctgacgcggtagccaaatcgtatcattccggtggcggcggcgctgccgcctcctcgccgagggcagcgaggaaggcgtcgccttctccggtgttcctgggaaccgcgctgttcgttctagggtttgtgtccctctttacgggacacgtggtcaccgacgctgactgggcgcggatccgcagtcgatggcgacctaaacagataacagatgctgttgtagttgcctggattttgaatgccacacttgttgtacctgagttagaccaccactcgttctggaaagacgacagtgacttctctgacatttttgacgtggagtggttcatttcccacctatcgaaggatgtaactattgtcaaaaggatcccttatgaagtaatgttgtcaatggataaactaccatggactatgcgcgcacctaggaaatcggtgcctgagttttatattgatgaagttctgccaatactcatgcgaaggcgagctttgcaattaacaaagtttgattataggctcactagcgatcttgatgaagatttgcaaaagttacgttgccgagtaaattttcatgctttaaaatttacgagttctatacacgccatgggtcagaaacttgttcaaaagctgagactaatgaacacacgatatgtcgccattcatttgaggtttgaacctgacatgcttgcattttctggctgttactacggtggcggtgaaaaagaaagaaaggaattgggtgaaattaggaaacgatgggatacattacctgagttgagtgctgaagatgaacgcagcagaggaaaatgtccactgactcctcatgaagtcgggttaatgctccgagctcttggttttggcaacgatacacttctgtatgttgcttctggagaaatatatggtggagatagtactctccaacctcttaggggactcttcccaaatttctatactaaggagaagcttgctggggatgatttaaatcccttccttcctttttcttcacggctggctgcaattgacttcattgtttgtgatgagagtgatgtctttgttacgaataataatgggaacatggccaaagttttagctggacggaggcgatacatgggccacaagagaactattcgcccaaatgcaaagaaactcaatgtactatttcaaacacggaatcaattgagctgggataccttttcacggaaggtacagagagttcagaggggtcttatgggggagccggacgatatcagaccaaaacaggatgacttccatgaatttccatcatcttgcatctgctcaagaaaacctgggaacatatcggccacaacatga

SEQ ID NO: 24354 - DNA, 1047 bp, Zea mays
  Peptide Sequence Number=SeqID_67729
atgctgccaagttctctcctccagaggctggcaagttggtgcccgtggttgctgagagatgagccgaagcagcctgttaaggttctcgtcaccggcgctgcggggcagattgggtacgccatagtcgccatgatcgcgaggggtctgatgcttgggccagaccagccggtggttctccacatgctagacctccctaagtcgacggacgccctgagcggcgtcaggatggagctgatcgatgccgcgttgcctcttctcagaggtgtcgtggcaacgagcgacgaggccgaagcgttccgaggcgtcagcttcgccgtcctgatcggcggatggccgaggaaagaggggatgcagaggaaagacctcatcgccaataacgtccccatataccagtcccaggcctttgcgctgcagcagcacgctgccccaaactgcaaggttcttgtcgtggcaaaccctgcgaacacgaacgcgctcgtgctgaaggagttggcgcccgcggtgcccgccaagaacatcacctgcctcacgcgtctcgaccacaaccgcgccctgggccagatctccgagaagctgggcgtgcacgtcggcgacgtcaggaacgccatagtgtgggggaaccactcctctacgcagttccccgacgccagccacgctatcgccaggacgcagcacggggagaagcccgtcagggagctcatcgccgacgagaaatggtttaaggaggagtttgtcaccgtcgtacagcagcgcggcgaggcggtgatcaaggcgcgcaagcagtccagttcgctgtccgccgccagcgcagcctgtaatcacatgagagactggatccttggcaccccgaagggcacgtgggtgtctatgggtgtgtgctctgacgggagctatggcgttcccaagggcatcttctactcatttccggtgacatgcgagaagggagagtggtctatcgtgcagggtcttgaggttgatgacttcgcacgatccaagatggagctttcggcgaatgaactcgatgaagagaggtccatggcgtattag

SEQ ID NO: 24355 - DNA, 306 bp, Zea mays
  Peptide Sequence Number=SeqID_67730
atggcgctccctgttgacgtggcgggcccgcgcccgaggtcgggcgacgtgggggctcctccgaagccggggttgagtctgtcttccgtggccgaggccgagcccgagcccctgggtcgggcgaggcggaggtcgttcggcagaggccagggcggagtggagcggagcggagttcgccgtcttccggggcttagcccgagtccgagccctgggtcgggcggagcggagttcgccgtcttccggggcttagccccagtccgagccctgggtcgggcggagcggagttcgccgtcttccggggcttag

SEQ ID NO: 24356 - DNA, 591 bp, Zea mays
  Peptide Sequence Number=SeqID_67731
atggacgacgctcaggagcctccctcccctccctccccctcgcagtcatcctcctcctcttcctcgtcgtcctccgtggccccgaacccgaagaagcgggcgcgcaaggacggcagccggcacccgacgtaccgcggcgtgcgcatgcggagctggggcaagtgggtgtcggagatcagggagccccgcaagaagtctcgcatctggctgggcaccttcgccaccgcggagatggcggcgcgcgcgcacgacgtggccgcgctcgccatcaagggcgcgcgcgacgcgcacctcaacttcccgggcctcgcgcacctgctcccgcgcccggccaccgcgccccaaggacgtgcaggccgcgcccgctcgccgggtactttccctctgccgccgtcccccggccgccaatgccaagagccccgagagcagcagctccggctccgctccgcctccgcctccgacgacgccagcgccgcctcgccgggccgcaggacgcgagcccaacccggacgacgcgctgttcgacctcccggacctgcttctggacctgagatgctgcggccggtcttcgcgggacatcgacgagactga

SEQ ID NO: 24357 - DNA, 96 bp, Zea mays
  Peptide Sequence Number=SeqID_67732
atggcgcatgcagatgcagggggtcaccggcggagccacgaaaatggcagtgtgacaaggcggcggcaggtccaggaaaattcgtgccacagttga

SEQ ID NO: 24358 - DNA, 421 bp, Zea mays
  Peptide Sequence Number=SeqID_67733
atgatgattgtcatgcatgctggtgatcgtcagtgccgccgctgtacgtgcgacccctgtgcgtgctacgacaatgcatgcatggggcatatgcctcgggtctgccggatcggagcctttcctggcgggagatatctccccctctcgtctcagcacctcacgccgccggtgatcgccggtgaccacgggagcattacagcatcgccgagctcctccccggcgccacgttcagacgtccgtcgagcggtctgtgccgccgcgccgaggccgagtgttggatcctgggcggcgagtcgggcttctgggcgcggtcagcgtagtggagcgagcgccgccagagaaaaaccccagaatccctacgcctcccttcagatcgggagccaatgtttacagactttccagacgcctgaggctctttatg

SEQ ID NO: 24359 - DNA, 207 bp, Zea mays
  Peptide Sequence Number=SeqID_67734
atggacaacattgatgagttgaccggtgaccggcaagaggatgctgactctgagaaagatcgtagtcgcctaggcttacaacaagaagctcttccaaaaggcaaggatcatgtgttgaaaacatatgttccacctgatgaggccgcgaatggtccgcctgaaagggaaatgtgcccttgggccatttctaagtattttggtgattaa

SEQ ID NO: 24360 - DNA, 1005 bp, Zea mays
  Peptide Sequence Number=SeqID_67735
atggcctcccctgtgacgtggtcggtccgagcccgaggtcgggcgaggcgaagctcctccgaggtcgaggctgagtccgggcccgtgggtcgggcgagcggagaccgtcgtctgaggtcgaggttgagtccgagcccaggggtcggggcgaggcggagactgccttccgaggtcgaggctgagtccgaactcaggggtcgggcgaggcggagaccgtcttccgaggtcgaggctgagtccgagctcaggggtcgggtgaggcggagtccgtcttccaaggtcgaggctgagtccgtgccctggggtcgggcgaggcggagtccgtcgtccgaggtcgaggttgagtccgagccctggggtcgggcgaggcggagcttcctatggcgcctgaggccggtcttggcggctgtcagcctcaccctgacgggtggcacaacagttggagcagcgcaggcggtgttgttttcctgtcaggcgatccttgcattgaatgctcctgcgatacagtcggttggcgtagcgatccggccaaggttgcttctccacgaagcctgcccgagctgggcctcgggcgagtcgaagctttgtgccgatgggggttaccagctgagattaggagtcttgggggtgaataaggccgctaaggaagccgaagcaagtaaggaagcgcagaggttaaaaaactcgatgcggggggacgccggtgtattgctcggtcctcctccctggttgcccgaggcagccgtgacggaggcggaggtagcgggggggaccatgtacagatcggcgggggtcgcgatggcgtggaacgtgttccggttctgcacggctctccgtgggctgggttccatcatgatcctactcgtcctcgccatcgtcggcgttacctactacgctgtcgtcctctgcaactacggccccgccctcctcaccggcggcggcaccactctcgccgcgctcgctgtcctgctcctcttccactttctggtgcgtagcctcacgtag

SEQ ID NO: 24361 - DNA, 1067 bp, Zea mays
  Peptide Sequence Number=SeqID_67736
gcgtccacatggtgcatggttctgtcgtgccctcctccgtgcatgcccctgccccacccccgaccgtgatcccaccggcaaacccgaccgtcatcctcctcccccgcctcccttccatcctcgcccgccccttcaatacttctcccgtgccccttccatccccatccgtgctccaccattccacacacgcgccccttccatcctcgtccgtgctcctcccacgacctatgcggcagcggatccgaagcacaacatccacgacgaggtcttctctgtgctgcacgagggtggccaccgccgccgacgcgggcggggccaccaccacggtcgtggcgcagcacgcgtcgtcgctaatcaacagcctcggcaactctcgcgagggcaaccctgaccgcgacggcagcctgtctatgctcttctccaagaagctcctagcgcagaccggctgggcaaccggtcccgtggtggcggtggctcgacgaggcggtcccctccctcgggcgaggatggaagggaggcggggtgcgtctgccgccaatgaacgcgctgcagatcctgcgggagacagtgcgggtgctgcgcggagacccgcacgcgttcacatccatcttcctgctgctctgcccggtgtccggttgcctcctcctgtccgcggccgcactcttttgtgctctcgactccccgccatcaacgcccgccatcgaacccatacgcgatatcaacaccgcccgtcatggaaggttcccgaggatcccccaccctcctcccccactgctgtcgccttcccgctcgcggggtcgctcactccactctgtgtcaccttctccggcggacctcggctctccgctactcctcccacgaagcacaaggaggtcctgcgcatgttccttgaggagaggcaactgcacggcgatttcgtcaccaagatctctgacatgctcaaggatgaattgctgctcttgaccacagggattggagcagcatgtagtttatactgtctcctgggtttctccccgtcgtcgtgcgatgtcgtgcatagctgctcagccaccgcccccctccgctga

SEQ ID NO: 24362 - DNA, 630 bp, Zea mays
  Peptide Sequence Number=SeqID_67737
atgtgtcaggtgtcactcttgattgatgtttcaaacaaaaaagatgtcattcttggttatgtagtagtgatcatgcagcagcatataaagcacatgtgttccagacgccccgaatcgacgcacgatctgcgctctccagggaacagacctcgtcgatcatatgaattgaaaggaaccaaacatgtaggagattttgtcattaagcttgagatgatgtctgatgttattgatgaaacacttgacaaagatgaggcggaggaggaaacagaagagcttacaaaccagtcgacatttgtttactggagactagagttcagttgctctatgtgggacttctgcatcatcaggcaggagtggactgtcgtccacatccagtccgccttccatgcattcctggcgctggtgcgcggctgccgcgtgcgcaagcagctcgcaatcatgcaaaagtgcatgaacacgctcctcaaggtgcaacctgtatggaaatcacccggcctcagaaaggccaacagaaatcacatgcttctttacctctggtgtccgtgctactggcccaagccgagggcagtcttggctccaaaaccaagtgggaaagaaaccttcacctcaaatggttctcatggcccctag

SEQ ID NO: 24363 - DNA, 387 bp, Zea mays
  Peptide Sequence Number=SeqID_67738
atggacgagaaccagccattaaagccaaagagctggaggtccggagcacaggtggcgctgacggtctcgtcagcggaggcaaccgcttctgcaaggggaagcctcacctatggcgaccaccacctcagcaccaatgacagcagccacctgcgcgccaacgccacatcggtgaacggcggccaccccaatgcgcaccggcaggtcctcactcccgtccttgtcgaggctgtcccagaacacgagcaccgccctcgcggcgtacgacatgttgtgcgacccccccggtgcatccgacggcgcagggaggacctggacgtggccggcccgcgcacggcgcgaccgacacctgtgcggcggacgggtagccacgctctgccccagcggtag

SEQ ID NO: 24364 - DNA, 468 bp, Zea mays
  Peptide Sequence Number=SeqID_67739
atggctctgacttgtgggacccacaccgcagatgtccccctcgtgccgcgccgcgctcactgctggtgggtctcttgcgtcagtcggtaccgctgcgctcgcgctgcccggttcggcttacaggtgggcccctttgaccagggcctccctcaacaaccgtgccggtctttctgcacggaccgcgcccgcctcgcgctgacgctcgccggtgatctcggcgtccgtgcaacgatcgcggggcgttactggaggataagtacgtggcctctgactccctcctcacctttcccctcgactcttccctctgcgccgtcaccagaaagcctacacgcggcgcaagatccagccactgctcgaaatcggcgttcctcggccccattcgcctcgtggaagctccgggtggtcgcggaagctatagcgggcgtggtgagcaaaggagttgcgtctgtgggcgttcggcgcgggtga

SEQ ID NO: 24365 - DNA, 645 bp, Zea mays
  Peptide Sequence Number=SeqID_67740
atggacagaaggtccatgacacctggtatcagctccaggttatcctcaccaccaccagccgcccatccctcaccaccaccagtcgccgcgcaatcagccgccgcaacgccctcccacccgccctctccaactccagatgcattcactcggctcgaagagagttttggtcatctcgcagagaagtgggatcagttcgttgtgatgttccaccgctacaaggagaagacagagaaggaactccaagcagcggtgcgacttcaggcggcagcgcaagggttcctggcatgccgccaggtacagtcccttcgtggggagaagcaccttgctgtggcctccagggccaccccatggccgtcatcacatgagcaggccgtggtgcgcctgcaagccgcagtgcgcggcttccttgttaggcgggcggtgcggaagctgcacttgctgatcagctcatcgctgcaccaactcgcagcctgtgcgcccaaccaccaggtctcgtctatactttttgaaccccctgcagaagtcgagatctgggtaagtctatggcagctcgaggacgagctggtcctcaagggagggggagatgtcatgggcataatagggagcgagaggcaacaaccaggctgggataaggctagagaataa

SEQ ID NO: 24366 - DNA, 537 bp, Zea mays
  Peptide Sequence Number=SeqID_67741
atgccagccccgacctcgcgcccatggcatccgcgcctggctgttgcgggcggtgtcgtcctcgccgacccctcagatataaagccgagcatctcaacagccgggccgttccacgcgctgctctgcgtgaggcagttcttctcccccgagggtgctgcagagggctcaccggaggacgtcaccgactacctcgaggggcacgcttccgtgcccatcccgacctacttcaccgacgactacggcccagccgcgccgcgattgctatcgaaggccgccgctggtgctcgcgggtttgcacccggcggcatcgaggacggagggcaattcacacagttaggattatcacattgcccccaaaggcccagacatcatcaagtgttcattctttggaacctgcccactgtaagaccacaccacacattcagacttcatattgaagaaaagacaactcccataatgttaattgatgtagatgaaattcatggacttgaggttgggcgaaacattgtgaagaacctgcacttagctgctaaatga

SEQ ID NO: 24367 - DNA, 507 bp, Zea mays
  Peptide Sequence Number=SeqID_67742
atggctagaatacaatggttcagcttaatccatgaaatgtacggggatggattgttctcagctattctctactacaccttaaggctggagcgagggcgtccaccaccctcatcgtgcccctgctccagcccccgcccgcaccgtcccttcctccctgcaatcccgcccccgcccgcgccgtcccttccctgcaatcccgcccccgccagcgccgtgtccccgcccccatctcccgaagccgtccgcgaccgctgcccagctttcctctccccgtgccgaagccgtccgcgaccgctgccctgcttccctcgccccgcgccgaagccgtccgcgatcgctgccctgcgccgcgtccgccgtgacagggatccgggattcgaggcctccctccccctgtcttgccccgaaacacagccgtcaacgccgccccagaccacagcagcgcggcgcaaccccaatcagagccggagccagcgaagcgagcgcctcgcttccacaagtcgctag

SEQ ID NO: 24368 - DNA, 258 bp, Zea mays
  Peptide Sequence Number=SeqID_67743
atgaaggccatagatgaacttaccgcgtttaaagaaaaaccttctgaaaatgttcagtcaagagtttcttggcggaaagaagaggttgtcaaagagccatctgttggttccttcagaaacttgttactttaccacccagcatgtgtatcagttgatgaagatggggatcgcatttttatctctgacagtaaccatcataggatcatcattagcaacagcaatgggatgattttagattataagaatcatgctgtctga

SEQ ID NO: 24369 - DNA, 423 bp, Zea mays
  Peptide Sequence Number=SeqID_67744
atgtcccagagcccatgttatgacttgtccaagattgtatctcctttctccatctccaatcagcatgactgcaaggcagtggccatgatgagtgcacaagcccccatggacacaataggggccaagatgagtgatgagcagatggccctagctcgctcgctactcttcacatccaggagtgtgcaggaggggtgtccaggaggtcccgaggagtggtgggctgatgacaacaatcggcacgctagcctctgcagtcgcacagtcaatttcagggccagtggacatctcccttgtttggaccacctagacaacaggcatgcaggcagccaaagtattagaaggaaaaagaatggcaccacagaatgtcttttggggctagtagaaggaaaaagaatggcaccacataatttgtcattttcttga

SEQ ID NO: 24370 - DNA, 147 bp, Zea mays
  Peptide Sequence Number=SeqID_67745
atgacgtcggttgctctcaaccccatacggaagcaaggaaacgtcagcaggatccatgccgcaccgccagctatgcttctacagggctcaaggcacttctccgacggccagttagcacatgagatggggttcgaacccatgttgtga

SEQ ID NO: 24371 - DNA, 1731 bp, Zea mays
  Peptide Sequence Number=SeqID_67746
atgggaaactgttgccgctcgccggccgccgcggcgcgggaagacgtcaagtcgtcgcacttcccggcctccgccggcgggaagaagaagccccaccaggcgcggaacggcggcgggggcggcgccggggagaagaagcggctgtctgtgctcggggaggaggggtgcgacgttggcgccgggatcgaagagaagtacgcgctggaccgggagctcgggcgcggcgagttcggcgtgacgtacctgtgcatggaccgtggcacgcgggagctgctggcctgcaagtcgatctccaagcggaagctgcggacgcccgtcgacgtggaggacgtgcggcgggaggtggccatcatgcggcacctgcccaagagccccaccatcgtgtccctgcgggaggcgtgcgaggacgacggcgccgtgcacctcgtcatggagctctgcgagggaggggagctgttcgaccgcatcgtcgccaggggccattacacggaacgcgcggcggccgcggtcacgcgcaccatcctcgaggtcgtgcagctctgccatcgccacggcgtcatccaccgggacctcaagcccgagaacttcctcttcgccaacaagaaggagaactcgccgctcaaggccatcgacttcggcctctccatcttcttcaagcccggtgagctccggacaccgagatctattcctgatttgggcgaaccgctggccgcaattttggactttttcgtcgattcaggctggatccgtggggtgctactgaggtcaggcgttttgggaaactcagattatgtacagaagtattttgaaataaaatttgcgtataggagtatgtttcaagcaacttccattaagactttagctgtcttaactgcactcacgggcgaaaagttttcggaaattgtgggaagcccatactacatggctcctgaagtcttgaagaggaactatggacctgaaatagacatatggagcgctggtgttatcttgtatattttgttatgtggtgttcctccattttgggctgataatgctaaagatcttgttcggcagatgcttcaacctgatccaaagctcaggctaacagcaaagcaagttcttgagcatccctggcttcaaaatgctaagaaagctccaaacgttcctcttggagacattgtaaagtcaaggctgaaacagttttcaaggatgaacagattcaaaagaagagctctaagggacataaaggagatgttcaaggtgatggatactgataatgatggtatagtttcttatgaagagttaaagagcgggatcgcaaattttggttctcatcttgcagaatcagaagtgcaaatgcttatcgaagctgtggatacaaatggtagaggagcactagattacggtgaatttttggctgtctcgctccatttacaaaggatggcaaatgacgagcaccttcggcgggccttcctatttttcgacaaggatggcaacggtttcatcgagcccgaggagcttcaggaagccctgatggaggacgggggagctgataccatggacgtggtcaatgacatattgcaagaagttgacacagacaaggatgggaaaattagctacgacgaatttgtagcgatgatgaaaactggcacggactggaggaaggcatcgcggcactattcaagagggcgcttcaatagccttagcataaagctgataaaagacgggtctgtaaagctgggtagcgggtga

SEQ ID NO: 24372 - DNA, 141 bp, Zea mays
  Peptide Sequence Number=SeqID_67747
atggctcgggataggtccgctgtgatgcccaccgctcgggagcgtcgatcttggccccctccggccgtggaaataagaaattttagggtatttaaagtggttaaaagtaatagttatggatttttagaaaataaaaggtga

SEQ ID NO: 24373 - DNA, 1025 bp, Zea mays
  Peptide Sequence Number=SeqID_67748
atactggacttgaagatgacttgagagggaatatcaacctagatgtctgtatggtaacaaacgagaaaaatgctgatggcaaagaatttctaaaagatacttactgcctacattctttacctgagagtgcaatcccttttgatgtttatggtgtggaagacttcaaggtagaagatacatatgttcaaaaccctactactcacaaatttcaggaagatccaaaaactgatcctgcagtctctaagtttcagcaggagtatgaggtatttgacctgaaaattttccaccggaagagcaggacaggctttgaggaaaacaaagaattcgctattgtcatggattcagttgtagctggaagatatcgtatcactgagtatcttggttctgctgcattcagcaaggttgtccgggcacacgacctccacactggagttgatagtttggatgagataaagctcctcaagtttgtcaataaatatgatccagatgatgatcatcatatactgcgtctctatgattatttttattatcagaaatataatcagcagtctggtgatgaggtgtacttttcactgcccagaatacaggctatagctcaacaatgtttggaggctttggtgtacttgcatcatctaaacatagttcactgtgatctgaaaccagagaatatccttctgaagagctacagcagatgtgaaatcaaagtcattgatcttggaagcagctgcttcttgtcagacaacttaaacttatatgttcagtcacgttcttatcgatctcctgaggtcatcctgggtttgccatatgatcagaaaattgacatttggtctcttggctgcatcttagctgaactgtacactggggaagtgctctttcctaatgaatcagtaccaatcattcttgctcgtatgattgggacaattggtccaattgatatggaaatgcttgcctcaggacaggagacccagaagtacttcacagatgactatgaccttttccacaaggacgaggtaattattggatga

SEQ ID NO: 24374 - DNA, 513 bp, Zea mays
  Peptide Sequence Number=SeqID_67749
atggcgcttcctgttgacgtggctggcctgcgccctaggttgggcgacgtggaggctcctccgaagccgaggtcgaaggctagggcggagtccgagccctggggtcgggcgaagcggagttcgtcgtcttctggggctgagcccgagtccgagccctggggtcgggcggagtggagttcgtcgtcttctagggctgagcccgagtccgagccctgggtcgggcggagcggagttcgccgtcttccgggacttagcccgagtccgagccctgggtcgggcggagcggagttcgccgtcttccgggacctagcccgagtccgagccccgggtcgggcggagcggatcggagtggcgcaggcggcgctgtccttctgtcaggccgagacaaccgatcaagccaaggatggaggcaagaagagcttcgaggtatcgagtgcacgggagaaggtcaaggagaccagaaacccaaagccaggggtgaagaagaagacttgcaaagtcaaggttgattga

SEQ ID NO: 24375 - DNA, 435 bp, Zea mays
  Peptide Sequence Number=SeqID_67750
atggtgagggccctcgaccgctactcctccggcaaggatgtcgcctacagctgtggatactgcggcttcgcgttgaacttgagctcctccacgcggaacacggccaacattgggtccaagtacggcaagcacatcaggaaaggcgtcgtctccttcttcgcgatcgacgagagccgcttcacgcaggccgacgaggtgagctgcacgccgtacttccgctccagccgttcgtggggcttcttcaggaacaggacgcggctgctctgccggaagtgcggtggccacactggtcatgcctacgaagacgaggggccagcagatgacctggacatgagctccaggggaagcagcacgtcccctcggaagaagtatgttatcaagatcagtgcgctgcggccgtcatcagacgactctggtgctctcctctccccgtga

SEQ ID NO: 24376 - DNA, 801 bp, Zea mays
  Peptide Sequence Number=SeqID_67751
atggggggcaccaagatgggtgcattagtaagaagtgcctttaagtttctgagggcttcttcggcctcgggattccaagtgaagcgctcggcctttcttaagagacggtacaagggcaatcctttctcgccaaggcgcgagatgaagcggctcagagccgcaaggcatcccatgaccctttgtactccttttaaatctttgatgggtcccatgttggtgatggccgcgattttttccgggttggcctcgatgcctcgttcggagacgatgaaccctaggagcatgcatcgggggactccgaagacacacttctctggattgagttttacgctcttcgcttataggcacctaaatgtcacttcaaggtcagagaggaggtcggaggctttccttgttttgacaacgatgttgtcggggaccataattaggggtacccccaagactcctaatctcaactgtcacttcgcccctccactggctgacctgacaggaaaacagcgtcgtcttcactactccgactgctgtgccacccgtcaggggctcggactcaacctcgaccttagacgacggtctccgcctcgcccgaccccagggctcggactcaacctcgacctcggacgacggactccgcctctcccgaccccagggctcggactcaacctcgacctcggacgacggtcttcgcctcgcccgaccctagggctcggactcagcctcaacctcggaggagcctccgcctcgcccgaccttaggctcagaccgaccacgtcgcaggggggcacatcattaccctacccctag

SEQ ID NO: 24377 - DNA, 258 bp, Zea mays
  Peptide Sequence Number=SeqID_67752
atgacactctatcgcagtgtcatgggagtactacgtcgggctactgtccgagtacctacgacggcctcccacaccgtggccaacaagctggccccgccgagcgcacgtcacgcggagtgtattgcttacacaaagtgggtgaagtcgactgaagatagcaccaactggtgttgccctcccttcggctttggcacatcgggccacctatggagcgcctgggcgcccacaccacggccaccgtcgcaggcgcagcggtga

SEQ ID NO: 24378 - DNA, 372 bp, Zea mays
  Peptide Sequence Number=SeqID_67753
atgaaggcactgaggaagaatctctttggacacaagagaatgccaacaaatatattaccattaaaagctaaaaggaatggcgaagacaccgctgcccccatcatcagatcaccaacaaagaacaacaaaaacgcaaaaccatcacgacattttcggatcggagcgcaacgacatggtaggaagcgaggtggccaaccgcgaggcggcggaggcaggtttggattcgaggtgacgctggcgaggcggcggaggcaggtttggattcgaggtgacgctggcgaggcggcggttatatacggcggaggctactcggctagaatgcggctgtttccagctggacggttggatcgttttgagtgggctggtacgtag

SEQ ID NO: 24379 - DNA, 667 bp, Zea mays
  Peptide Sequence Number=SeqID_67754
atggcgctgacggcgagcgctgccctctccgtctccgcgctcgtgcaggccggtggtgtttggtgttcatggcgtctgtgtgaagagtcggtgggtcttcttcttcaatccttcatcggtggttcagcgaagcttttcaggatttcttctcagtcggatcgggcttcttttgctgatattgttcgaaagccagctttgtctggcgctaatttggttcctctgggtggccaggtcagggccgggtttttgccttcaagtatgcagcatagatcctcggtgttcaatcggatttctttccctgttcgtcatcgcgttgatcagtcggccattcattcaacttcccaggcgcagtttgcaagacgtgctaattttcaaaatctttcaaaatttagcaacgaccgtcttgagaggcctaactcttggtcttctctgaggggctcccgggcgtgcccttgggcttcgcggaacttaatttggccgcctaagaagatatcgaagcaacaccaggagatctctaagaataagtctgtcctcagcattaatggcgcctcagatcatgggtcggatgattctcgttccctcagggataattcattttcaggcaataactgtcaactatttggatttcctgggcagaattgtaaaagagattttctttctttcccca

SEQ ID NO: 24380 - DNA, 2790 bp, Zea mays
  Peptide Sequence Number=SeqID_67755
atgcagtccagggatgttccttttggcgagcaagtgcatggaaagatcattaatcttggcctggatgtcaatctctatgttggcactgcactcgtcaacctatatgcgaaggttgcctgcatggatgcggccatgcgtgtgttccatgctctcccaacaaagaatccggttacttggacagcaatcatcactggttactctcggattggccatggagaactagccctgggcttgtttcaaacgatggtcgctcaaggcgtccagcctgacaggtttgtgttagcaagtgctgtcagtgcctgctctgcacttgcctttctacagggaggcaggcaaatacatggctacgcttatcgaagtgcagcagaagtggatgcttccgtgatcaacgcgctcatagatttgtattgcaagtgctccagaccgttagtggctcgtaagctatttgatcgaatgaagaatcataatctcgtgtcttggactacaatgattgctggttatatgcagaattcacttgatgctgaagccatacagatgttctggcagatgtgtcaggctggatggcagccagatgcttttgcctgtacaagtatcttgaattcgtgtggttcaatggaagctatttcacaaggaacacagatacatgcccatgccataaaggttaatctggagaatgatgagtatgtcaagaatgctctcattgacatgtacgctaaatgtgcccatttaactgctgcaagagtggcatttgatgccttggcgcatgatgacgtagtctcttacaatgcgatgatcgaaggctatgcaaggcaaggtgatcttacagaagcagttcatatattccgtaaaatgaaatattactccataaggccaaacctactaacctttgtttcactccttgggatgtcatcacttctatcatctattgaatggagtaagcagattcatggtctcatcatcaaatcaggaacttcagtcgacctctatgtgggaagtgctctaatcgatgcatattcaaaatcttcccttgtggatgatgccaaggctgtgttttttatgatgcaaaacagggacatggccatctggaatgctatgatatttggccacacacagaatgagcaaggggaagaggcagtaaaactcttcaaccaggttcgtgtctctgggatgacacccaatgagttcacgtttgtagcactagtaactgtggcgagcaacttggcaagcatgtttcatgggcagcagtttcatgcccagatcatcaaagcaggttgtgacattaatcctcatgtttcaaatgctcttgtagacatgtatgcaaaatgtggcttcattaaagaaggatggatgctgtttgagtcaacatgtgggaaggatgttatttgttggaactccatgattactatgtatgcacaacatggtcatgctgaagaagccctttgtgctttccagctgatgagagaggccaaagtagaaccaaactatgtgacttttgttggtgtgctatcagcatgtgctcatgcaggccttgtggatgaaggcttacaccattttaactctatgaaatcaaaatatggtattgacccgggcactgagcattatgcttcagtggtcaatctcctcggtcgttcagggaaattacattctgctcaggagttcattgaaaagatgccaatcaaaccagcggcagctgtttggaggagcttgctgagtgcctgccgtctctttggtaatgttcaaattgggaggtatgccgctgaaatggcactcttggaagatccgtcagacagtggcccttatgtattactatccaatatttatgcctccaaagggctatgggtggatgtgcagcagctaagactgaggatggattatgctggggcggtgaaggagccaggttatagttggattgaggtgatgaaggaggttcatatgttcattgcaagagggacagaacacccacaggcagaattgatatatgcagtattggatgaactgacgggtctactaaaggattttggctatcaccctgatatctctgaacttgcattgcttggtgagactggtcctcagctcgtgaatgattccagaagcaaggggatggttctgacaaatttcggtcccattgagcttcttactggtatggtgccttatactcatctgagagcagaagcacagcgttgctgggatccttatcctgaaaagagaccatcatttgaagacataattggtgagctaaatatagctcaaaagcctttagtttcaaatgcttccgttccatcatttcctgtgagcaagagtcaaaatggcaccaaagaagtgcaccgttatcaagaagcatcgaactgtttcaaccaaggggagctttttgttaagagatcatgtagatcagatcttaagaatctttggtctggttgttttgatcagtcctcagagtatcatccaacattaaattggggctcttttgcaacaagtggtcgaagggaaactatagaagatacccattttgtgcctccctttatgagcgaagaaaaggaagttttttcctttggcattttttatggccacagagcagatgctgaattttctgtccgagcagtccctggatttcacaagcaatttggtcatggagcaagcccaacctacgctctttcagaagcatttgtaaggactgacatagcgtttcgagaagaactaattgttcaccggaagtcaaaaatgataatccaaaaaagactggcatcaaggttgcacggcagtaacagccctgatagtgatggtctatggtaa

SEQ ID NO: 24381 - DNA, 324 bp, Zea mays
  Peptide Sequence Number=SeqID_67756
atgagctctgttgctgcccccaggcagcagccgccgccagcatcagacggccccccagcatcagacggccccagcaacgtccagcgcgttggtcgcagccccctgcttcgtcggggagccatgatgcttcgcagatactcccccaaatacccaacctccttgccgggcagccccactaagggcatggcggccccgcagccaatgaaggatgataagcccttctttctgatcactatgacagttgacaataatacatctgtgttctggagaggaatcaatcaaatgtacaatctggtcccttaccttgctaactacaaaatataa

SEQ ID NO: 24382 - DNA, 342 bp, Zea mays
  Peptide Sequence Number=SeqID_67757
atggactcgaaggccatggcagtacatggccacctcaaggcggtggacggccggggcggagcaggcgtcgaggacggcgtcgacgaagtccaggaacgtcgcccccggctgctcgtcgcatgtgccgaggcggagctcgggcaggcgggcccagacgtggcgccagcggcgggagagcacgctgttgatattgagataatgtcgtcgagcaaccacaatcagggcgataatgtcaatgaatcgcagtcacaacaaggttctataccatctgttaatggttccgaagcaataggaggaaatgaggaagtggaagagattgaagtatctaatgatgaagactag

SEQ ID NO: 24383 - DNA, 2367 bp, Zea mays
  Peptide Sequence Number=SeqID_67758
atgtccaccgatgacgtccctccatcctccgaagctggggacgacgagaccgacggcggcggcggcgtcgacgccaccccggtcttcgtctggggcaccaacataagcgtgcaggacgtcaacgccgccattctccggttcttgcgccacttccgggacccgcgcgacgctggccgcgtcgacccggtcatggacgagggcaagtacatgcgcgccatccaccgcatcctcgagctcgagggcggggagtcgctcgacgtcgatgcgcacgacgtgtttgaccacgacccagacctctacagcaagatggttcgctatccgctcgaggtgctcgccatcttcgacatcgtgctcatggacctcgtcgcgcgcatcgagccgctcttcgagaagcacatccagaccaggatctacaacctcaagtcgtccatttgcttgaggaatctcaacccatctgatattgagaagatggtatccatcaagggtatgataattagatgcagctcggtcataccggagctcaaggaggctgtgttccgctgcctggtttgtggtttctactcagagcccgtcatggttgatagaggaagagtaactgaaccacacatttgtcagaaagaacaatgtaaagccacaaattctatgaccctagtgcacaacagatgcagattttcagacaagcagatcataaagttgcaggaaacaccagacgagataccagaaggtggcactccacatacagttagtgtcttgatgcatgataagcttgttgatgctggaaagcctggagatagggttgagataactggaatatacagagctatgagtattcgaattggaccaactcaaaggacagtgaagtctatattcaagacatatattgattgccttcacataaagaagacagacaagtctaggcttcatgtggaggacaccatggatattgataattctaacgctagcaaatctactgaagaggattttcttagtgataaggttgagaaactaaaagagctttcgaagttgcctgatatctatgaaagattgactagatcattagctccaaacatatgggagttggatgatgtcaaaagaggtctcctttgccagcttttcggcggcaatcccttgaagcttccttctggagctagtttccggggtgacatcaatattttacttgtgggggaccctggaacaagtaaatcccagcttctccagtacatgcataaactgtctcctcgtggtatctatacgagtggtagaggaagttctgctgttggtcttactgcttatgttaccaaagaccctgagactggcgaaactgttctagaaagtggagcacttgttttgagtgacaaaggtgtttgttgcatagatgagtttgataagatgtctgataatgcccgaagcatgttacacgaggtctggtttgctgaaaattttatgcattatttgcacgccaaaaatatggttttccatgtgatggaacagcagacagtatccattgcgaaggctggaataattgcatctttaaacgctaggacatctgtcctggcatgtgccaatcctactgaatcacgttacaatccaaggctctctgtaattgacaacatccacttagcgccaacgctactttcaagattcgacctgatttatcttatcttggacaaggcggatgagcaaactgataggcgcctggcaaagcatattgtttcgttgcattttgagaatccaaatttagaggagctcgaggtcttggacttgcagacactagtttcctacataagctatgcaaggaagtatattcagccacagttatctgatgaagctgcagaagagttaactcgtggctatgtcgagatgagaaaaagagggaatagccctgggagcagaaagaaggtcataacagcaaccgctagacaaatagagagtttgatccgtctcagcgaagcattagcccgaatgcggttctctgaagtggtcgaggtgcgggatgttgtggaggcattcaggcttcttgaagtcgccatgcagcagtctgcgacggatcatgcaactggtacgattgatatggatctgatcatgacggggatatccgcaagcgaaaggcagaggcgggagaacctcgttgccgcaacccgtaacctgattgcggagaaaatgcagcttggaggcccctcgatgcgcatgattgagctatccagtagtgagctaagagtttgcgttctggctggtgtgcagttgctggaggaactgaggaagcagagctcaatggaaattcatatgcacgaactccgcggtgctcttggcaccctgatgactgaaggcgcggtggttatccatggagacaacgtgaggagagtttga

SEQ ID NO: 24384 - DNA, 336 bp, Zea mays
  Peptide Sequence Number=SeqID_67759
atggaggacacaatgctggtgctgatgccgagcgacaaaatgcgggagacccctcacaccacggtggccgcacagatgttggaggacgccgccatcggcctcctccaccttctctacctcgttctccaccctgccacatcagggttatcccgtgatgttcgctgcaacgcccctgcttcctcccccttctccgcccctgccacgctggggttctcttgtgatgttcgctgcaacatccctaattcgcagcatgagagggagttgttgcatgcacggagggggacttccactttaagggctgatttggtgacaagaaaattggaggcggtccattga

SEQ ID NO: 24385 - DNA, 426 bp, Zea mays
  Peptide Sequence Number=SeqID_67760
atggcctctcctcccactcccagcacggtgtctacgaccgtgaccacgtcgccgtcgtcgaccggcgggtccgagctggggcccgacccgcagctggccgccgagaggaagcgcaagcgcaaggagtcgaaccggctgtccgcgcagcggtcccgcgcgcgcaagcagcggcagctggacgacctcacggcgcaggtggccgcgctgcgcgcccgcaacggcgccatggacgcggccgcccgcgacgccgcgcgccggtgcgtcgccgtgcaggccgagaacgcgatgctgcacgcccggaccgtggagctcagcgcgcgcctccagtccctcgtcgacctcatccagtgcatgcaagcaggcgacgccatgtaccagtaccagcagttgccgctggtggacgccaccatctacaactactactag

SEQ ID NO: 24386 - DNA, 456 bp, Zea mays
  Peptide Sequence Number=SeqID_67761
atgtcgcgcgcgttcgacgactactatatcgaggactatggcgtcatcttggcgccagaggtgacgcaggggaggaccgacaacaatgaccagttcgtcatcctcgccaccgttaggccctattttcgaaaaatatttatgtttagacccccagaaattttatatgcaactttggacccgatactcggcgccataggatgtggcgccgagatgaaatacatgtaccgggaggcgttgtggcagaagagaggtcgtcctcgggagttatatccggacgtatctagtaaggatgttcctgtttctcctgaactccctgtgcctagctgtgactgtggcagactggcttggtgtccaacacaagtgcctaagtgtaaaaaggtggacaaagtacaaatcaaggataaaggaaaaatccaattggaaatatcttggctcgagcagccaagactctgctga

SEQ ID NO: 24387 - DNA, 1410 bp, Zea mays
  Peptide Sequence Number=SeqID_67762
atgcccatccccgcacgcccgccgccgctgcgaaatccgagtgtagagtccccccccgcacgcctcctctgcgcgtgccccgcgaactccccacgcaagccccgagagcgtcgtccctacctcgtctccgggtgccgcgacctcaccgacgccgagcgctggcgctccgagatcctccgcgagatcggcgccaaggtcgacgagatccagaacgagggtctcggtgagcaccgcctccgcgacctcaacgacgagatcaacaaactcctcccctccgcggtcggtgtctccacagcagccgtcacgtcgtaccagggggcgcaggagggcgctagccactatgcgcttctcgtcaccacgtccctcctctcggtgctcctcttcaccttcgacctcctctgcggtgtgctcgggggcgctagcttcaaccccaccgactttgccgtctcctatgccgccggactcgatagcccctccctcttctctgttgcgctccgtttcttggtgcaggtcgtcggcgttgtgggtggtgccctggccatctcggagctgatgcaggcgcagtataagcacacgctcgcgggcccctcactcaaggtggatccccacactggtgctctagccgaagggatgctcaccttcatcatcaccctgaccgtgctctgggtcatcataaagggccccagcaacgtcatcctcaaggccttgctgctctcaacctccatcgtctccgtcatcctcccaggcgcagagtacaaaggaccgtctatgaacccagctaatggggctttaccagttattatccaaaattcacaggggggctttaccagttattatccaaaattcagaaaatctaaagagagccgccgtgaccccgcccgccgcaatcccgccacggccgccgcgaactacccgcccacaagccgcaattccgccacggccgaagcaacctcccgttcctccgcgacccagcgacgcctccgcggccgtccgatcgccctatccgccgccggtgggagggcgccggatccagcggacatcatggttgtcgacacggtcagcgcgagcacctccataatagcccctcacctgttcgaccacaggtccaggggcgccgccgcttcccaccaccaccacctccgccggacgttccatgtcgtcgcctgccgacccctgcccaccgccttcgccggccgccgcctcgtggcccgggtcaccaggcagccgtcgtcgcgcctcgccgattggccggtcagggcgctggctatggggtcacgaaggaggccagggccagccctcgcagggagtatagggggatccccggggatggtggcgacatgggggacgttggggtcaccagccccacgccgtcatggcctccacggaacagggcagatgaccccaaactga

SEQ ID NO: 24388 - DNA, 627 bp, Zea mays
  Peptide Sequence Number=SeqID_67763
atggcaggcagcgagcttggcaaccttgtgtccgagcagtgcccgctcctgaggaatctgtaccttttcgtcaggctggctgctgcttccaacgtgtccatacactccaactcgcttcagtccctctcattcaacgtccaaaacacccagaagctagaagtcatggcccctaagcttgaagtgctggccgtatgtgatgccactaaggcacatatctctgccccaaagctctccgtggtaagttgggacaatgacactggctacaaccctctgtgccaccactttgccaatgctgcccgtcacctccgcctgctacacttgggctcaaagtgtgtatccgcttccctgatgcgtcaattcgatgaagttgatgtgctgaagctgaagctgaacctcctcaatattaagattttcaaggctgatggcattattctcgagtcccttgaagaggtgaaaattacttttattagacattgctatggacaagtgcagttcgtggaggagtttgccaggtgccatgcaccaagcctgaaaaagttagtcgtcaactcaccaaccaaagggctacaagagatggtcggcggattgtttgatccggatgtcactgtcaaatgcaatgttatctag

SEQ ID NO: 24389 - DNA, 703 bp, Zea mays
  Peptide Sequence Number=SeqID_67764
atggcaggattcgcacgtttgcgatctctagcgacgtttgaacaacagaagaaactcacctccacgtgttcgacgccttctgcccgtgccagagcacgcccgcgcgcgcccccgcatgcccagcgccgcgcccgagccaaaccagcgccgtggcccgcgcccgagcctataaagccctcccaggcttcgactgcactcttccgcgcaccctccaaacctcaccggagtttagctcgtcgccgtttgcccgtgcgcagcaagtccgcggccgcccaatccctctgttaccgtagaccggccaacagagccattcccaacctcgtccagccctcggggaaggccgggcacgcctccgggaagctccccgagcgaggaatcggagtttgcttcgccggagaggccagcccacgctcgccggagctctcaaccccgccggagtacgtggaccgggtaaaccactcaaccatccttcgattccttgtgcacacagtcgctacgttgcaccgtgaagctcaccgggcccttgggattgaaccagttcgccgtagtttggccggtacacctcacccgccgacgagcacaccccgcctgcgctcgtgggaccgggcgattccggccatccccgacgtcaagtcgtacctcgacgtgaccgccagagtctccccgagccaaccccacccttctcggacctccctcgccgccg

SEQ ID NO: 24390 - DNA, 141 bp, Zea mays
  Peptide Sequence Number=SeqID_67765
atgtcggccgacttgtggcctcaaaactcggtggtggcagttccggagggaaccggtggtggcacgcggcgagaacgcggagggtgcgtcaaggcgaagcaactccgtgtgaaggatgtggtcgtcggatcgaaaacttag

SEQ ID NO: 24391 - DNA, 846 bp, Zea mays
  Peptide Sequence Number=SeqID_67766
atggcgaccaccacctcagcactgacgacagcggccacctgcccaccaacaccgcaccagcgaacggcggccgccccaatgcgcaccggcaggtcctcactcccgacctcgccgaggctgtcccagaacacgagtaccgccctcgcggcgtacgacgtgttgtgcgaccccccggtgcagccgacggcgcaaggaggacctggacgtggccggcccgcgcacggcgcgaccgacacccgtgcggcggacaggcagccacgctccgccccagcgataggaggtggcaccggaagcagcgccagagccactcaggccggggagccagacacgcggcagctgccagcgccacggacggcgaacgcccttctccctcgatcactgagggaaggagcgggccgctgcccacgcggaggtgggccccgactcagcgcaccctcctcctcagcgcggatgatgaacatccttgaagctgagggcaagggagcggccacaagcctagctcgcccttccccgccacgaagcaggtggtcatcctcctggatgactattggtgggggaatgcagccgggctacgtgatgaaaatccttgaagccaagcaacgactggagagcgccaacccccacggggttgcgctcctccaacagcagcaagaagaaggcaacacaggtgcaccccatctgggggctcgaaaggtggaaagacacgatgaatgcgaggagtgtgaaggcatggctaccgcccggggggtcgatccctttttaaaggtagatctcctcactcgcacccccaagcgccacgggcaaagtctccaccgacgtgctgtcacacccggttccagggggtag

SEQ ID NO: 24392 - DNA, 282 bp, Zea mays
  Peptide Sequence Number=SeqID_67767
atggcgcagtcgaccgttgctgtattggagccgttggcgcaccggacagtccggtgcccccatatgaccgttggctcggccacgcgtcacgcgcggattgcgcgaccgaccgttggctcaccggacagtccggtgcacaccggacagtccgttctggttttgacacttgttctccttctagtgaccttgatctccttcttagagcttgatcttgagccttatgacttacaccacataactgtagctgttacctcattggctgtaagtcacgtccttatgtag

SEQ ID NO: 24393 - DNA, 279 bp, Zea mays
  Peptide Sequence Number=SeqID_67768
atgtcacgggcgtttagcgtctactatatcatggactgtggcatcatctcggcgtcggaggtgacgcagaggaggaccgacaacaatgatcagttcgtcatccttcccaccgtcggggtagctttttgtgctgcaagcgtgtatggtggtgtgtgcctgatgactgacgatgtacgagggaactttttccggcacgcatggggcgtgctctccaatgatgagaccatggaaatcgtggcatatatcgaagtctgtatgatactgatggttgcaatgtag

SEQ ID NO: 24394 - DNA, 234 bp, Zea mays
  Peptide Sequence Number=SeqID_67769
atgaggaccccctgcttgacgatggacaacatggtgcagccgcgctggaccgcgtccaagcgcgctgcgtcggagcttgtcatacacagcggctcatgcggctacgtaggactgcttccagaggtcgaactggcagtcgtcaagcttcttctcgtcgtcgatgagcgacgccaaaggatctcccgcgcatctgggatggagaacgacatcgtcgccatcgtcgtggtcggctaa

SEQ ID NO: 24395 - DNA, 276 bp, Zea mays
  Peptide Sequence Number=SeqID_67770
atggcgacgatgtcgttctccatcccagatgcgcgggagatccctgcggcagtgggagaaaacttgatgaatggagaatgtacaaagatcaaagtatggctaaatgaccttgctggaagtgaatgggcaacaaagacatatgcacagggagaaaggtggagattccaaaactttgatgttagcagagtacggagcatagagcttggacaggctaaaaaacaagtcgatgttggagaattgtcaagatacaagctcatggttgggagagccaagtag

SEQ ID NO: 24396 - DNA, 1977 bp, Zea mays
  Peptide Sequence Number=SeqID_67771
atgggaagaaaggacacctcgtcctcctccgcggccgccggcggcgggaaaaaggagaaacctatgtcggtgtcagccatgctcgcctccatggacgcccccgcggcgaagcccaagtcctccaagtcggcggcgccgtccaaggccaaggcgaagccctccaaggcgccggcgtcctcgtacatgggcgacatcgacctgcccccctccgacgacgaggaccaagaggaggcccagctcgccgccgccaagcccaagccggcccgcgccgccgtcgacctcagcgccggcgctgcgccgtcgcacaaggacgccaagaagaaggacaagcgcgaggccgtggcggccgcagccgccgaggccgccaggcaggaggcgctgcgcgacgaccgcgacgccttctccgtcgtcatcggcgcgcgcgtcccgggctcctccgccgccgacggcaccgtcgacgacaacgtccccgtgccgcggaacatcgatgtcctgctcgtcgagcaggagatcatcggcgatgaccgctcggccctcgaggccgtggtcgccgccgacgaggagctcaccgccctccaggccgagcaggcgaggcttgaggcctctaatgatgctgatgacaacgagcggcttgtggaggtgtatgagaagctgaatctcgtgggctctgacgtcgcccgtgcccgagcgtccaagattcttgcggggctggggtttgatcaggcgatgcaggccagatccacaaagtccttcagtggtggctggaggatgcgtatttcgcttgcccgtgcgctcttcatgcagccaactctgctgctgctcgatgagccgactaatcacctggatctgcgcgctgtgctatggctggaggaatacttgtgctcccagtggaagaagacattgattgttgtttcccatgaccgtgacttcctgaatacagtgtgcaatgagatcatacacttgcatgataaaagtcttcatgtgtaccgtggaaattttaatgattttgagagtgggtatgagcagaaaaggaaggagatgaaccgaaagttcgaggtgtatgagaagcagatgaaagcggccaggaagtctgggagcaaggccgcacaggataaggttaagggccaggcgctatcaaaggctgctaaagaggccgccaagaacaaggggaaagggaagagtgctgcagatgacgatgatgaccagaaacaggtagctgtgccgcggaagtggcgtgactacagtgttgagttccatttcccagagcctacagagctcacaccacctctccttcagctcattgaggtagggtttagctaccctggtaggccagacttcaaactctcaggtgttgatgttggcattgatatgggaacacgtgtagctattgttgggcccaatggagctgggaagtctacgctgcttaatttacttgcgggtgatcttatcccaacagaaggggaggcaaggaggagccagaagctgaggattggacgatactcgcagcattttgttgacttgctgacaatggaggaaaatgcagttcaatatttgttgaggctccacccagatcaggagggaatgagcaaagcagaggctgtccgtgctaagctcgggaagtttgggttacctggacacaaccatctcactccaattgtcaaattatctggcgggcagaaggcccgagttgtgttcacttctatatcaatgtctcaacctcacatactcctgcttgacgagccaacgaatcacttggacatgcaaagtatcgatgcattggcagacgcgctggatgaattcactggaggtgtcgtcttggttagccatgactcacgattgatatctcgtgtttgtgaggatgagcaaaggagcgagatatgggttgtggaggatgggactgtgaacagatatgatggcacatttgaggattacaaggatgaactcatggaagaaataaagaaggaagttgaagaataa

SEQ ID NO: 24397 - DNA, 1545 bp, Zea mays
  Peptide Sequence Number=SeqID_67772
atggtcgccgtcaaccgccccctcgtctccgtgaaggccctagagggcgacatggtaaccgacgcccccggcatcgccttaccgcccgtcttcggggcgccgatccgccccgacgtggtcaggttcacccacaagctgctgtcctgcaacaagcgccagccctacgcagtctcccgccgcgccggccaccagacgtcggccgagtcctggggtaccggccgcgccgtgtctcgtatcccccgcgtccccggcggcggcacccaccgcgccggccagggagcgttcggcaacatgtgccgcggcgggcgcatgttcgcgcccaccaagatctggcgcaagtggcaccgccgcgtcaacatcaacctccgccgcgtcgccgtcgcctccgcgctcgccgccaccgccgtcccggccctcgtccaggcgcgcggccaccgcatcgagtctgtccccgagatgccccttgtcatttccgactccgcggagtccattgagaagacctcccaggcgctcaagatcctcaagcagatcggcgcccacgccgacgccgagaaggccaaggactccgtcggcatccgccccggcaagggtaagatgcgcaaccgtcgctacatcaaccgcaagggcccgctcatcgtctacggcaccgagggctccaaggtcgtcaaggccttccgcaaccttcccggtgtggatgttgccaacgtcgagcgcctcaacctactagaccttgcccccggtggccaccttgggcgctttgtgatctggacccagagcgcgttcaataagctcgaggaggtgtatgggagctatgacgccccgtcgcagaagaagaagggcttcgtgctgccgaggcctaagatgtccaacgctgacctgggcaggatcatcaactctgacgaggtgcagtctgtggtgaagccactcaacaaggaagtgaagcgcagggagaagaggaagaacccactcaagaacatggctgctgtgctcaaactcaacccctacctcggcactgcccggaagatggccacccttgctgaggctgctcgtgtgaaggccaggaaggcgaagctcgactccaagaggaccaagcttaccccgggagtggttagaacagttgacagagtggcctccagcggggtacgcggggagttggtggctgttggcaaggctattggccgaggcctagctcaggtggagtcttctcccgaggctgaagctgctctttgggcgaagcgtagttttctctcgagggtgaggctgtgcccagatgtgtgcgtgccccatccaaagttgttcgagaacagtgaccagagtgggggagcagtgtccggtattcacgggcgtgcatcatcgaagttggtgaaattacatgggaccgtggtcccatcgtcctttgttgaccacaatgtcacatgggcagatattcgtatcgagactgccaaggttaaggctgctggcaaggcatggtacaagaccatggtctcggacagcgactacaccgagtttgagaacttctcaaagtggctcggcgtgactcagtga

SEQ ID NO: 24398 - DNA, 234 bp, Zea mays
  Peptide Sequence Number=SeqID_67773
atggcccctccggcggcctctgacagcccacggcgcggacgaagcggccccaacggcgctgctccggctcctgcagcgtgggcgcgcggacctgtcgagggcacggctcggcacgcgtcccaacagcgttggtgcgatcccgtggtaaagagagtagagaaagacaaatgcaagagacagaatgacagttactgcagagctacttccctaaggggtgcgacccttgagcagtaa

SEQ ID NO: 24399 - DNA, 165 bp, Zea mays
  Peptide Sequence Number=SeqID_67774
atggatgaatctaaggatattccttcacttgtcactgatctgaacaattcagaggactttgcaacatatgtaaagcttgcgaatgaagaggcgggagacgaagataatgatgcaagtgatccagatgtcatgaatgatgaagaagagttgtttgggacgttttaa

SEQ ID NO: 24400 - DNA, 1344 bp, Zea mays
  Peptide Sequence Number=SeqID_67775
atggagtcggcagcggccgcgaagacggtggagcggctggcgcagcgcctggtgccgccggcggagcccacccccactgccccccaccgcctgtcgtggctggaccggtacccgacgcagatggcgctcatcgagtcgctgcacgtcttcaagcccgacccggcgcgtgacgggctcagccccgcggagaccatcgagcgggccctcgcacgggcgctggtcgactactacccgctcgccggccgcctcgccgtgtccgacagcgccgggggcctgcacgtcgactgcagcgctgagggcgtctggttcatcgaggccgccgtacggtgccgcctggaggacgtcgactacctcgagtacccgctccagatccccaaggacgagctgctcccgcacccgctgccgaggcccagccacgaggaggagagcaagctcatcctgctcgtccagctctcagaccgctgccccgacgcgtacgtgcaggtgacggcgttcgcgtgcggcggcttcgtggtgggcttccgcttcagccacgcggtggcggacgggctcggcgcggccaagttcatgggcgcggtgggggagctggcgcgcggggcggaccaggtctccgtggcgcccacctgggcccgcgacgccatcccagacccgtcgggcgcgctggtcggcagcctccccgagcccacgggcgccaagcgcctcgagtacctggccatcgacatctccgccgactacatcgaccacttcaagtcccagttcgcggcggccacgggcgggggccgctgctcggccttcgaggtcctcatcgccaaggcgtggcagagccgcacccgcgccgcggggttcgaggaccccgacacccccgtgcagctctgcttcgccatgaacgcgcgcccgctcctcggcgcccgcctcccgcggggcggcgccggcttctacggcaactgctactacatcatgcgcgtcgcgtccacggccgacaaggtgtcctcgtcgtccgtcaccgacgtggtgaagatcatcagggaggggaagaagcggctgccgttggagttcgcgcggtgggcggcgggggaggagggcgccgacggcgtggacccctaccagatcacctccgactaccggacgctgctggtgtcggattggacgcgcctcggcttcgcggaggtggactacgggtggggcccgccagcccacgtggtaccgctgacgaacctggactacatcgccacgtgcatcctcgtcaagccatgggcccacaagccaggggcgaggctcatcacgcagtgcgtgacgcccgaccgcgtctcgcgcttccacgacgccatggtggacatgaactag

SEQ ID NO: 24401 - DNA, 180 bp, Zea mays
  Peptide Sequence Number=SeqID_67776
atgaacgacggagggctgctggctctcgcgctcgactgtctccagacactgcccgcgctgctgttcggcctgttcttcctcgcgaacgcgcagcggcacgtccatggtccgcgtgagacgcgtcgccgaatccgccgcgtcaacacgaacggcaccgccgcacgcctagctccgtattag

SEQ ID NO: 24402 - DNA, 150 bp, Zea mays
  Peptide Sequence Number=SeqID_67777
atgggcgggggcctcctggcagcagcattcgccctgaggtcagtgctgccgctgttcggccccccggagcagaagtcgtcgtcgtcgccgctgctggagcagggatgtttgtgcgagcgagagttgcttctcgcggaaggtgatgagtga

SEQ ID NO: 24403 - DNA, 1212 bp, Zea mays
  Peptide Sequence Number=SeqID_67778
atggagcgcgaaggggggaaaggcagccggagggagacgggcgtgagaggtggaaatcccgcggccttcgtgcgcaaggagaggatccaggccgaggtcgagtccgagcccctgggtcgggcgaggcggagaccgtcggctgaggccagggctgagtccgagccctggggtcgggcgaagcggagttcgttgtctcccgaggctgagcccgagtccgagccctggggtcgggcgaagcggagttcgtcgtcttccagggctgagcccgagtccgagccctggggtcgggcgaagcagagttcgtcgtcttccggggctaagcccgagtccgagccctggggtcgggcgaagcggagttcgtcgtcttccggggctgagcccgagtccgagccctggggtcaggcgaagcagagttcgtcgtcttccggggctgagcccaagtccgagccctggggtcgggcgaagcggagttcatcgtcttccggggctgagcccgagtccgagccctggggtcgggcgaagcggagtttcccatggcgcctagagccggacttggctgctgtcagcctcactctgtcgagtggcacagcagtcggagcggcgcaggcggcgctgtcctcttgtcagaccggtcagtggagcggcgaagccacctttgcattaaatgcccctgcgatttggtcggttggcgtggcgatttggccaaggttgcttcttggtgaaggctgggcctcgggcgagccgaaactttgtgctgatgggggttaccagctgagaattaggagtcttgagggtacccctaattatggtccccgacatgggtgcgcgcgagcgcacccgccgggtgtagcccccgaggcctcggaggagtggtttgactcctccgaggtcttaatgcctcgcacaatgcttcggctggtctggtcgttccctcatggcgagaggacggtccaggacagactcgacttttttacatacgcccctgcgtcgcctttccgcaaggaggagggagggaaagcgccatgttgccctcagagggcgccgaacatggtgtcttcggtgagctgctggcgggtaatccgagtggacgcccgtgccccatttgttaggggtcggctagaggcccggaggcgcgctcaaaagtacttgcgggtgatctgtcggagccggtcccctttcgacggggtccgagggctcgatgcctccctctga

SEQ ID NO: 24404 - DNA, 507 bp, Zea mays
  Peptide Sequence Number=SeqID_67779
atgaacaaaacactggcattcaagatgccattacaaatggaactccggttccgtccccgcgggtatgaacaacctccacaccggggagcctgcggggcgacaagttccgggcaactcgccagcgacctctgcagcagcagctatggcggcactgacggcctcgacggtggggaagcttcctccggctaccaccacgtcagcaccgacaacggcatccacctctccaccaacgccgcaccgacgaacgcgggtcgctccgaagcgcaccggcaggtcctcgctcctgtcctcgccatgaaaacgaggaagagggcggaatgttgcatcctagctgggcagcaacagttcgccttccccggcatggctggaggacgccccctccgcagagctaggggatggtttccgccaccagaagctggaagaggaggtggccagccgacccgtgcgagaggtagagccccggctcgcctcgctctccgccccagcaaggatggtgggcatccttga

SEQ ID NO: 24405 - DNA, 730 bp, Zea mays
  Peptide Sequence Number=SeqID_67780
atgggcgaggagttcgtactgcccttccttgacttccccacctctgattctagcaccctcatgctcacaccactctccctctacctgaccagcgtcggctttgaggtcgcctcaccgggccaccgcgacgtcgtcagcttctcggccatcgcgaacgcccacgccagacgttgcaagatcttcgatgatgcttcttcaccaaataatgaaatgatcatgacacatgatggaagaggatacatctacttccttcttctgagccaaccagcgaggcacgccgacgagcagggcgctgctccggcttccgtccgcaacggcgtcaacaaggaagaggagagggagagagagggtcggtcggcgttcttcatggcggtcatgaatggcggtcatcaatggaggaagggccgttcgggttctcttgtcacggctgctggcggcttcgactgcgcgcagggctcggcgagacgtgaccgggcgcttggacttgggctcgtgcggtcgtcgaggcagtcgggcgcgcggcatcggggttggcgcgaggcagagggccggaagttagtgaatggttgtcgaatgtggattgctgggttcttggggcccagtatgagtatctcactggagaagaagaaggtggcgatcccgctggtgtgccacggctcgcggccggtggtggatctcttctacagctccgtcacacccaatggttacttcctcatcagcgccagcaagg

SEQ ID NO: 24406 - DNA, 852 bp, Zea mays
  Peptide Sequence Number=SeqID_67781
atggctgaaagggaccaacttccacgaagttgcgttcctccaacgacaaggcggaaggattgcgggtgtcccccatccgggggctcggaaggtggaagaacacgatgcataagggagcgcgaagacatggtcgcctttcaagggggtcaccctccttttaaaggcgactctccctacttgcgtccccagtcgtcgtgggctgagtcttctccaacacactccaaggtccttcccctacggcgcggggggctgggtcccacgcgtcatgcaaactggcccagggcagaagaagccaaaccgccgcgcgcggtgcatgcaaccgcccagcggttacaagcgttcctccactttcgcccagaccagcgggtgaaagggcggacagccgtgcgggcagcatgcaaccgcgccaagtgggcgcgcccctccgacttccaacgcacccagcatggaggcccaggcccacgcgtcatgcaaccggcgcgccggttgctgcgtgcgagcaactgcactgccactcgcaccactaccacgcctcctcgactgcggaaccagtaccgcgactcgaggcaaccctgcgtacgacccagggaccgtgaaagggggataccccgaaaaaggatccttccccgtgaaggaaacaggccccgagcctccctactgatcagaggttcaaaggctggcccctcggaggggtttaacagccgcctcagagcgcgtgggctctgcacccactactggtcagaggttcgaaggccggcccctcagaagggttcaacggccgcctcaggccacttgggctccgcgcccactactgatcaggggttcgtaggctggccctcgaagggttcataa

SEQ ID NO: 24407 - DNA, 1818 bp, Zea mays
  Peptide Sequence Number=SeqID_67782
atggcggacgctcaccacttcaacaacatctccctcggcggccgtggcggcggtcaccctgggcagttcaaactttactcaggaggcttggcgtggaagaagcaaggaggaggaaagatcattgaggttgataaaggtgatatcactaatgtggcttggatgaggattcctaaatcctaccagctcagcgttgggaccaaggagggcctctgttacagattttttggcttccgcgaacaggatgttagtaacttgactaatttcatagagaagagcactggaatcacgccggaagagaagcagctttctgttagtggccaaaactggggcgggatacaaataaacgggaatatgctttgctttaacgttggttcaaaggaagcttttgaagtctctctagcagatgtggcacagactcagatgcaagggaaaacagatgttgtcctagagttccatgtagatgatactactggagctaacgagaaagattcattgatggatttaagttttcatgttccgacttcgaatactcaattcattggagatgagcatcgtacttcagcacaggctatctcggttgaaattgatggtggtggctcctcagagatggcagttgtcacatttgacggaattgcaattcttacaccgaggggtcggtacagtgtggagcttcatcagtcattcttgcgactccaaggacaagctaatgatttcaaaatccagtatagtagtattctccgcctatttgttttaccaaagtttgagacagaggcagttgttgaaagggaactgacattaagtggggagattttggctgagaagtacaaggataggcttgagagctcttataggggtctaatacatgaggtattctccaaggtccttcgtggcctgtctagtgctaaagtgacacggccaagtacattccgcagttgcctagatggatatgcagtcaaatcatcacttaaagctgaagatggtttgctttatccactcgaaaagggcttcttctttctgccaaagcccccaacactaattcctcatgaagagattgagtatgttgagttcgagcgtcatggtgctggaggtgcaagtatatcatctcattactttgaccttttggtcaagctgacaaatgatcaagaacttctcttcagaaacatccaaaggaatgaataccataacctcttcaacttcatcagcggtaagcatttgaaaattctgaatcttggagatggacaaggtagaactagtggtgttactgctgttcttcagagcactgatgatgattctgttgatccacatctggagcggataaaaaatcaggccggtaatgaggaaagtgatgaagaggatgaagattttgtggcagacaaggatgatagtggatctccaaccgatgattctgatgcagaaggctctgatgctagtatgagtggaggagaaaaggagaaaccttccaagaaggaagctagtagctcaaagccgcctgtgaagaagaagcagaagagtgggccagatgaaggttctcaaaaaaagaagccaaagaagaagaaagatcccaatgcccctaagagagctatagctccattcatgtacttctcaaaggctgagcgagctaatatcaagagcagcaatcctgaactggcgaccacagagattgcaaagaagctcggagaaaggtggcaaaagatgacagcggaggagaggcagccatatgtggagcagtctcaggtcgacaagcaacgctatgcagaagagtctgcagcctaccgtggtgcagccgctcagcagggctctggtgctggatcggaatga

SEQ ID NO: 24408 - DNA, 735 bp, Zea mays
  Peptide Sequence Number=SeqID_67783
atggtcgtggtgacgacgcgggattccggaatcctggcacggttcctcatcaagcccgcggcattccacccgtggcgcgaccgcgccaccacgcagcccacgcaccaacgccgccctaataaatcccctgcgctccgcgcccgccggctcgcaaccctaaccttcctcccctgctccgccgccgccacggtcgcctctactgccatggtgagcgctgaagtcggcatcgattacgtgctgtggacggaggacgaggtgtccacccgcgtgggcgaggtcgccgccgagctcgcggccgacctgcgcgcgttgccggagcccgccgtcatcgtcggcgtcgccacgggcgcgttcctcttcctcgctgacctcgtccggcgcgtcgacgtgcggctcgtggtcgacctcgtgcgcgtcgagtcctatggggcgggcacagagtccagcggcaagccacgtatcacggccgacctcaaagtcgatgtggccgggaagcatgtggtcgtggttgaagatattgttgacacagggaatactctgtcctatctcattgctcatttggagaagaaagctatagtactgaaaactgaaaagctctcctgggctgcccttccccacctttgcccagactactttgttgttggctatggtttagattacgcggagctctaccgtaacctgccttatgtcggagttctcaagcccgagatgtacaaaaaggattcaagcaattag

SEQ ID NO: 24409 - DNA, 902 bp, Zea mays
  Peptide Sequence Number=SeqID_67784
atgtgtgggagtggcagcagcagatctcggggggtgcttgcggaatcgtcctcctcgtatccatcgtcgatatcgagcgaggacgcggtggtgtatgctaaagcggcatcggcggatgcctccgggacggaggcgcttgccgcccatgtggagcccgaaggcgtgccaaggagggtgagagacgacggctccgaggatgggggcgagctggcggcacttaggatggtggcagggtcacgaccacttcgaagacgggggcgagggcgagggggtgtgctgaggcaggagcggggcatggtatcgcgtaggagacgacgtctgtcgcagcagatctcaggcgagcgaacggttgtgtctgggggaaagggtggcggtcgtttcggcggtgtgaggggagggcacgggaccagggcaccgcacatcacgcgaggcggggaagggcgcgccggggcgggggcatgggaatgctggtgtggtcgcgggaggtgggacgccagcgtgcgccactcaggagcgcgcgcctccgaggagccgacgtcgcgcgcacaactgtgggaagtgatcgacgccgcgcctccagatcggagagctgttgtcgctacacctccagatcgaggaactgtcgttgtcgtgcaaccagatcagggagttatcgtcggtgcgccttcgaatcgagaaaccatcgtcgtcgagtcgcttgggagctgccactgttgtgccgtcggatcagggagccactgccgccgcggctctggatcggagagccgccactgtcacgccttcggatcgagaagtcgtcgccgccgcgccttcggatttgggattgcccgtcgatcgcacgacagaaggccaccgctgccgccttgggctctcgtggaaccgccgcctccgctcatgcctag

SEQ ID NO: 24410 - DNA, 519 bp, Zea mays
  Peptide Sequence Number=SeqID_67785
atgtcgtccatctgcgtcgtgcccccgacatcgcatgttgggattcgagactccagcgacaaggcgaccaccacgccgcgcgggcgcggcgtcggcgtgcgggatctggtaccagtgctggagctcctccagcggcgccaggactgcctccgatccctcgtggtctggctcaaggctgatggtcaggtcgaccatctcctccacgcgcagttctgcccccgagaccgagattgtcgcgcgatggcggtgaactgcacgtcgtggatgcagccccccggcgatatcgtcgccgcccccacccccgctatgcctcggttccgcgccctccacccctgcccctctgctgcaatggtggtggagaccctggagggggcgctgagggactacggcgaagggaagcctttcttggtggcgaccgcgtcgggttcgtggacatcgtgcacggcggcctacttgggtgggtgcgtgcgacaaatgagctccacggcgtcagaccctttgaccctgaatggactctaa

SEQ ID NO: 24411 - DNA, 528 bp, Zea mays
  Peptide Sequence Number=SeqID_67786
atggcgaccacctcctcgcggtgcctcctcatgtggccgcccagcacctaccccatcttaaagcgagcctgtagatgtggcactcgtgttgcgcctcctcgcgttgccttctcatgtcgccgcccagcactgccccatcttaaagccaagcctatagacgtggcactcgtgttgtgcctgcttgtctcctctgctgtcgtcgtcagtcggctgctgcttgtgctgtttgagtgccctggtgccgagtgcgacgtcgaactcaaggccgtggcgccccctaggtggtggtccggtggccaccgagcgcctggaacaagcttgatcgggcactggctagaaatggttaagaaaggaaagaatttgggcaaggagaggaacattgtggatggcgctgaggtgaggaggctcggcaagtggtatggggacgcaatgcaggctaggatggaggagacccttatctcccctgacataccgagggcgtcatttacaaatcgatttgaatttgatctgattatttgtgtctcttaa

SEQ ID NO: 24412 - DNA, 284 bp, Zea mays
  Peptide Sequence Number=SeqID_67787
atgaatatgtctatggggttgaggattaagatcggggtcctcatcgtcgtcggcggtgacaaaggggattggattcgcaagggcaatgtccgccatctgttgaagcttgtgtcccacgctagatgcaagagaaaattcctgggaattggccctagatgcaagacaactgatcaagccaaggacggaggcaagaagagcttcgaggtaccaagtgcatgggagaaggtcaaggaggctgaggaacccaaagccaagggtgaagaagaaggcttgcaaagtcaagg

SEQ ID NO: 24413 - DNA, 762 bp, Zea mays
  Peptide Sequence Number=SeqID_67788
atgcagaaagcacacaaccgcaccacggttgtgcaccctttcagcttcgtggcatccagcggtccagcatccagcggtccagtggcgcaacgaaccagtgccgtgactcgaggcagccctgtgcgtgacccaacagtgccaattgagtgcaacgatcacggggcaagcgacacctccggtaggagaagcaggcgtcgtttcacctccgtcatgatgaccgcgtcaaaaagggactgggaaaggggatattccgaaaaggatccttcccagcgaaggaaacgggccccgagccctcctactgatcaggggttcgaaggttgcgccctccggggttcggcaaccgtccagagcactcgggctccgagccctttactgatcaggggttcgaaggctggcccctcggaagggttcgacagccgccccagagcatgcagagtcagggatgaccctgggtacgtccgttacatggccgaggctcgggctacgctcccgagcctcggcctcgggagaaggtcttcgcctcgcccgaccccaggcctcggccttagcctcggcctcgggagaaggtctccgcctcgcccgaccccaagactcgacctcagcctcggcctcgggaaaagctacgaaggaacaagaccggtgtcccatctaaggttactccggcaacatgtaatgatggttccccgcggctcaaggcacttcttcgacgaccatgatagctcatgtacagggctcaaggcacttccccgccagccacgttag

SEQ ID NO: 24414 - DNA, 294 bp, Zea mays
  Peptide Sequence Number=SeqID_67789
atgacaaaggtgatgcttgccaaaggtattcaaagctcaagaaatggaatcaaattacgttttcgaggaccttcggaagccgaaggcccccaacaacacccatgggaaccaatgggcatctcaatctcgacacagaagaaagagcacatcggggacttgccagttcttgggaagatccttggtgtcttgggcttcaaagaagcaaaattcggttgctctttctaccgccgaagccgagtatattgccgcaagacattgttgcgcgcaactactttggatgaggcaaacccttag

SEQ ID NO: 24415 - DNA, 630 bp, Zea mays
  Peptide Sequence Number=SeqID_67790
atgatggtcacccggttagccatcaccgagcggaagaagtggcggcgcaaggggcagggagggcggtttcctcttctctggctaagtctctcgggttgcgaaaacctaagagggaggcaggaggcggagcgaagaaccgtcaccagaccctcccctgggtatataaaggccaaggcgagaccggttcaaacgttccgcccggaccggacgcgggattcgaaaacgcaaagcgaaacagccgttcctcgaacggctcgcgcacgcgcaacggccgcctcgccaaccactcgccccgtcgcattaactccgtggtgggacaggcggtgcctctggcaggagaagcaggcaacgcttcgccttcgccgtaataaccgcgccaaaaaaggaaccaggctccgagccaccctactgatcagaggttcgaaggctggccccccgaaagggttcgacagccgcctcagatcgcgtgggccctacacccactactggtcagaggttcaaaggtcggcccctcggaagggttccacggccgcctcaggctactcgggctccgcgcccattactgatcaggggttcgaaggctggcccccgaagggttcacagccgcctcagacgccgagcgagggatga

SEQ ID NO: 24416 - DNA, 3270 bp, Zea mays
  Peptide Sequence Number=SeqID_67791
atgccgtgtgcactagaagtgattgatgcaaggttacagagcacatcacatattcagtgcagcagatcatttgaccaaaacattggaagacgcttttcaaagattcccaagcttcgcccgtactcattcggcgctttgtattctcatcagggccatctgatacaaaaacctgttgccatttgtcctgagaacagtgacacctcatcaacaatacttctgtttcggcacgatccagactggaaacaagcaccattcttgtctgacactcaagaggtcaacaagccaagaatactgttttgcttagatcagccaaatgaaaagaacatgcatgatcaggttgattcttctaaaccagtttccaatggaaacacacatgggggaagcacctttagacaatctcagcaaagggaaaacgtttgtaattcattgatggcagttcctccctgccatgtagttgcaaagaagtactccaggtctgttgctactgctctgagtctgggatctgattctgatattttgcacaacggtgacaagcttccaaaaaggaattctagaaagagaggaaaacagtgcaagcgaacaatccgcaaaaggctgaatttggcatcagaaaccatttttgaagagagtacttatggtgcttctcctgcggaggtagttccgaccaatttactggttgataagttgtcagagaccacatcctctgctagctcattggttaaaactgatggtcggtacaaggaggaccatgtggaatgtggtattatgttgaatttagctacattgggaactgatgagatggatggttctggatgtgctggttcatcttataatgatgcaggagggagattaagctccagttgtgtttcttacttgaatgacaaatccaatacgacagattcttcagaatttgacggatccaccttcactgaacatggcttgggagaagaaagcaatagctaccagaagttaacatgcccctatgtttataatcccagttatgcaaccatggattccatctttagtaggtggaacagcgacaacagtgggaactacagtgtcgatgttgaggctaggttaaccgtcaaagacgaaaatagacatgatcattcgaaactgggggcttccacagggcggagtaatgtgaggatggaatgccagttgatagggtcatgttttagtgctactcatgctgaagacacaaacgatcctctagggatcagatcatactcctctaaggatgttactgatagttgtagccatactgaaatggttcagtgcagcagcaagtcctttcattttaaatcagggaggaggaacataaaatcaagtaaaacaccaagctatgttgatttgactgcgtctaacagagtgagaggttctaataggcacaagaacaatggaaaagatagttcagcagtgtggcagaaagtagaaaggaatgacaagatggtatctaaagcaggccatccgagcgatacacctgttcatgataagggtgcaaatgaagttggtaagaagggtgtacaggaagatccaacaagaattcgggcaaaacataatccgaataagaaagtgtgcaaacagaagccttcaaatggagcagttgaattggagcctgccaaaggagaagatgcattgaactcatgccatacattttctggacctttctacacgaagcaagcaccctttctacgccagcaaagaaactctttttcgaaacaaggttctcagtcattgaaaaactactgtgctcctaggaatggtatccccaaggtggcaaaggattacttgcagcaagaagaattacctatgttggtgctagttcatgccaagaacaccagtgataaatcaagctcatattcaagttcagctgatgaagttggtctaactggagtcagcaacaactatccaactgagggaaatgagagttcacaacctgatattgaggtagcagcgtcagtatcttgcaacttggttccagatttggctccacaagctgcttctgatgatttccacatatcagatcctcactctttacgtcctgaaaacaagggtgcatccaacagtcggagctccaataacttgtgcacagatccttttgctgcagaagcaaaggaagctcgatgtgtgaagctactaacagagaataattcccaagaaccctcagataatgcagctgagaccgattacagcaagatgaaagaagtcatcagctatgtttacacagcacagcagcgagtggaagacatccaactttgcattggtaggcctattgctgattttgaaaattttgtttactctgcttctccagttgtgcactgcagctcgtgctctgttggctgtaaatcttgcctgcaagaatgtgtgaaggatggcttatgtttgcatcagactccagatatcactctaagaactgtctggcagtggtacgaagagcctagttgctatggtttggatgtaaaggcacaagatctctggaggtcaaaagccttgtggaatagtcattgtcagtttacaacatattttgtaccatatctatctgctgttcaactcttcagtcaacctaaaagaaccagtggtggaagcattgataaggaatcaatccatagggatgtgacatgtgaaacatctccacagctgaacctgcccccaatatttgcaaagctttttccaaaacaatctgttccagtaaataaaccatctactctgcgtactgaagatgatcaacagtcagcagatggggagctggtatttgaattttttgaatatgaacagccatactcacggcgacaattatttgacaaggtaaatgagctgattgccggtgcgaaaccgtcaaattgccaaatatctggggacccaaagaatctggaggccagcctgcatgatctccatccagcgtcttggtattgtgttgcatggtatcccatataccggatacctgatggaaaattccaggctacattcttgacatatcactctcttggccactggattcgtcggagcagctcagcaggtggggccgctgttttgccagtcatgggcctgcagtcttacaatgccaaggcagagtggtggtttgagatgagcaagtccgaatctgaaggcgggcagtcgcaggccagtgaagcatccgagattctgaaggagagatcgcgcacgctgagtgaggctgcggccgtgttgtccagggccagcgtgctgaagaatgggcagatgagtagaaacagacatccagactacgagttcttcctctcccggagctga

SEQ ID NO: 24417 - DNA, 474 bp, Zea mays
  Peptide Sequence Number=SeqID_67792
atgagcaccgagtcaggggagctgctcgggatcgaccccgtcgagctccggttcccattcgagttaaataagcagatctcctgcacgctgcaactcacgaacaagacagacaagcaggtcgcgttcaagagcgccatcatggccaaggagatcatgtcgaaggaagtcactggagacatgtttaccaaagattcaggcaatatagtggatgaagtgaagttgaaggtagtttatacagcgccatcgtcctctcaaagcgagggatttgaggatggtaatctcggcagtttgagttatcaagagtgtatgtctgcaattgctctcatatggttatattgctccaggtttgatattgaaacgggactcttgactcgttatttgaaaagtgctcagagaaggccaattgcattaggctcattcttcccagcatatctgacacacctcttccaagggcagctcgatggaactgattga

SEQ ID NO: 24418 - DNA, 342 bp, Zea mays
  Peptide Sequence Number=SeqID_67793
atgtgcagccgcccccccccacttctcttcccccttggccgccgcccccctgcccatctcctcctctctcaattcttgcagccaccaaaccctagccccccctctcaatcccctcctcccaaggtgccaatccttgccgctcggatcatcgtcgtcgtggtgcgagtcttcaatcgttttggtggagggaagaagggaggaaggaaagggggagaatccaaggtggtggacttccggatcgtacttagggatttgcccgaacttccggtaaaggcaagtaaatacagtggtggttgctaccgtttggtttgcatcctattccctgtcattgagtatgcataa

SEQ ID NO: 24419 - DNA, 639 bp, Zea mays
  Peptide Sequence Number=SeqID_67794
atgcgggcccaggggcgaaacgaagggaataatatagaagtatccaacgccagtgtcgcccagaagatctccgagcgccataatctccatagtgcatacactatttatattctacgctgcttcctcggtaatcgccacgcggcccagaggccttacgtcaggctctgcccgttggcttacgtcatgggcagtaggccatgtggcagcatcgggtctccgcctgagcggggagcagaagtgtacatggtatggtccggacacgtgtctgctccggacccccgcctggccttgattaaggccaagatgttctttgtcccagaatcccgggaccctgctgagggtggcccagaccctatacagagaggtccgggacccgtcctgagggtccggtctgtacccgcggaggtcctggaccctgctcggaggtccggtccggatatgcaggggtccggcactttcccatgggggtccggacccaccgttgataccttggaggatattgtcttccctggccacgtggcgcccctggagccgtccacgtggtggggtcatgtgttgttcgccacgcgactaaagatagccgcatggacacaacaccttcatactatagtaacgggtaccccatttcaagggttctga

SEQ ID NO: 24420 - DNA, 675 bp, Zea mays
  Peptide Sequence Number=SeqID_67795
atgcagcccagcgcggcccagaggccttatgtcagactccgcccgctggcttacgtcatgggcagtaagccacgtggcagcatcgggtctccgcctgagcggggagcagaagtgtacatggtatggtctggacacgtgtcggctccggacccccgcctggccttgattaatgcatgggtgttctttgtcccagaatcctgggaccctgctgagggtggcccggaccctacacaaagaggtgaagaggcgcactaccgcaggcggtggcgtactcctcatgcggtagactggtccgctgctttcggcggaggtgaagagacgcaccaccgcaggcggtggtgtgctcctcacgcggcggttcgccttatccgcacacggaggccgacgctcgaggagcatgactcgtgggcccgggcccccgtgccagaggctggtccgcttctttcaatggaggtgaagaggcgcactgcagcagggcggaggcgtgctcctcatgcggcggttcccgttcttcgcacacggaggccgatgcccaaggagtatgactcgtgggcccgggcccccatgttagagactgggtcaccttggcgcacgtcgggcgaggtcttctgtggcgctttggggcgtcagttggggaaatctctctttaaaaagggactcccccaagcatggtag

SEQ ID NO: 24421 - DNA, 159 bp, Zea mays
  Peptide Sequence Number=SeqID_67796
atggcgagagtagcgtgtaccctccgtggcaagaggctggacggtggtgtatctgtgctctcggtgaagaagcggcaaacttttgttgcttctgttcaaaggtggtaccaaaataagaaaaccaggactaaagctgcgggaggaaaggtcctccattaa

SEQ ID NO: 24422 - DNA, 405 bp, Zea mays
  Peptide Sequence Number=SeqID_67797
atgatggtcacccggtcggccatcaccgagcagaaggggtggcggcgcaaggaacagggaaggcggagaagcaaacgacgcttcgccttcgccttaatgaccgcgacaaaaaagggaccgggaaagggggataccccgaaaaggatccttccccgtgaaggaaccaggctccgagcctccctactgatcagaggttcgaaggctggcccctcggaagggttcgacagccgcctcagatcacgagggccctacacccactactggtcagaggttcgaaggccggcccctcggaagggttcaacgaccgcctcaggctactcgggctccgcgcccactactgatcaggggttcgaagactggcccccgaagggttcacagccgcctcagacacagagcgagggatga

SEQ ID NO: 24423 - DNA, 315 bp, Zea mays
  Peptide Sequence Number=SeqID_67798
atggtgcctcctgtcgacgtggtcggtccgcgccctaggttgggcgatttggaagctcctccgaagccgaggtcgagtctgtcttccgtggtcgaggtcgagtccgagcccctggttcgggtgaggcagaggccatcggcggagcccgagtccgagccctgggtcgggcggagcggagttcgccgtcttccggggcttagcccgagtccgagccctgggtcgggcgaagcggagcttcgtatgaccggtcagtggagcggcgaagtgacggcggtcacttcggctctgtcggctgaggggcgcgcgtcaggataa

SEQ ID NO: 24424 - DNA, 954 bp, Zea mays
  Peptide Sequence Number=SeqID_67799
atggggagcgcccgcgttgctttcgtcttgctgtcgttgttggaggaacgcaactttgcggaagttggtacctttcagccatcgctcggcttcaaggattttcatcaggcagcccggcttcatccccttgccgatggggagagggcgctcaccggcctagcggaaggggcggacttcgacaacgcggggctgagcggccacaatcatcgtcagctccagcatgcctggtggctggagaagtcctcgtcgccgacgggatcgctgctgccatctgcgctccgggcctccggctctttggctttgatagcttgtccttgcccctcgagtggggacgtgggcgagggccttattgcagcagcgtctgccatgaggtcatcgctgctgctgtttggccgcacggagcggaggtcgttgtcgctgctgccggagtgggcggcggcgagctacctgggattttgtcgtcccgcaggccctccaataaaccctcggccgctctgcaatgagtcggagccggaggcagcggtgtcagcatggacagaggcggagttggctcgaaaagaagacttcgtcggcccagaagcagggaacctcccaagccgaggaggcgtagcagcggcggccggagcctggccgggtcgtccactggcgggaccaacgccggagtcgagctgccgaggccatgatcctggccgacgtggtgctgacatcttccttcgaggtggagatcctccgaccgtgtcgtcgtccgaggccgggccagattccgccgaaggtggagtcgatgccgagggtgctgctgctccccttattgatgacttgttcgtcggtagcagaatcgtttatccgagcgagagttatttttcacggaaggtgatgagtgaggagtccctcggctcggtcgaccttgccgcttacgtgtactccgtcgttttcaggatcccactatcgaagtag

SEQ ID NO: 24425 - DNA, 417 bp, Zea mays
  Peptide Sequence Number=SeqID_67800
atggcgcctcctgtcgatgtggtcggtccgcgtcctaggttgggcgatgtggaagctcctccgaagccgaggtcgagtctgtcttccgtggccgaggtcgagtccgagcccctggttcgggtgaggcagaggccatcggcggagctttatgctgatgggggttaccagctgagaattaggagccttgaggattgcaacctcgccgacggagagtacgtcctcgtgccagagcaaggagttgctcaggaggtagacccggatccagcaccagagcctgccccagagaatctgcgtgccccaactttggaaggttctctggaggacatggttgctggagtgacttggtcgtccatcttgccaccgggttggacagtcgagtgggaccctacctcggctgaggaggagcatgaggagtga

SEQ ID NO: 24426 - DNA, 759 bp, Zea mays
  Peptide Sequence Number=SeqID_67801
atggggtacccgttactacagtatgaaggtgttgtgtccatgtggctatctttagttgcgtggcgaacaacactggaccccaccacgtggacggctccagggccgccacgtggccaggaaggacaatatactccaaggtggcgacagtgggtcaggaccccacaggaaaatgttggagccccgaatacacagcccggacctctgagcgaggattccaaggcaaagactacccaggccttaatcaaggccaggcgggggtccggaccataccacgagcgcccccactccccgctcaggtggagacccagcgctgccacgtggccttctacccgtgaccatttaatgtgccctgtccactctgctgacgggcggtggctaggcaatcctgtaggcgacgtgcccgcccgctccggtggcaggcagtacgccagattggtaacccccatcagcacaaagctgcaaaggcctgatgggcgcgattccggtcaaggctccgtccactcaagggacacgatctcttctcgcccgagcccagcctcgggcaggaacagtagaccaaggcagattcacgcctcgcccgagggtctcctcaagcaacgggcacaccttcgactcacccgaggcccagctcggggaggcttcgcggagaatgaccgcagtcacttcaccgctccactgactggcctgacaggaaaacagcgccgcctgccctgctccgactgctgtgccactcaccagagtgaggccgacagtcgctaa

SEQ ID NO: 24427 - DNA, 195 bp, Zea mays
  Peptide Sequence Number=SeqID_67802
atggggaagcctgtcccatcactcctcatgttcctcctcagccgagtgaccacacttgtacccaccataaccggaatgggagaccacgtctcatgtcgcgtgaggggcaaagtctactgccaggttcaatcagaccaacatcagtatgatatgaaagtgggtacaatcaatgtcctgacctcgcgcgagtgctag

SEQ ID NO: 24428 - DNA, 432 bp, Zea mays
  Peptide Sequence Number=SeqID_67803
atgcaccaccgcaggcagtggcgtgctcctcacgcggcggttcgccttctccgctcacggaggccaacgcccaaggagcatgactcgtgggcctgggcccccgtgccagaggctggtccgctgctggtttcggcggaggtgaagagacgcaccaccgcaggcagtggcgtgctcctcacgcggcggttcgccttctccgcacatggaggccgacgcccgaggagcatgactcatgggcccgggccctcgtgccagaggctggtccgctgctttcggtggaggccgatgcccaaggagtatgactcgtgggctcgggcccccgtgttagagactgggtcaccttggcgcacatcgggcgaggtcttctgcggcgcttcggggcatcagttgggggaatctctctttaaaaagggactcccccgagcgtggtag

SEQ ID NO: 24429 - DNA, 735 bp, Zea mays
  Peptide Sequence Number=SeqID_67804
atggcgagctctcagtgctgcgataacccgccggccctgaacccggcctgcggggagggcaaggtcgtcgacagcttcggcgggctcaaggcctacgtcgccggccccgaggactccaaggccgccgtcgtcctcgtcgccgacgtcttcgttgctttatccaattcagggtctatgccaatgggtgttaggccatctccaggagaccgtgtaaaaggaaaaatatctgaaacaggaagagacgcagaaataggaaatgcagcgataaaaattgcaagtcccttcaacacttctttcattctttggaagtttgaaaaagggtttgaagagacaaaacaagttattggggctctaaaggagaagggagtgtctgctgttggagctgcagggtattgctggggtgcaaaggttgttgtggagttggcaaaagctcatgagatccaggctgctgtgctgttgcacccttcttttgttaccgttgacgatatcaaagaggtcaagtgcgcaatttctatcctcggagctgagattgacaaaatgtccccaccggagctaatcaagcagttcgagcaggtcctttctttgaactcaggggttggccacttcgtcaagatcttccctggtgtggcgcatggatggagcgtgagatacaaccacgacgacgcagctgccgtgaagagtgctgaggaagcctttgcggacatgctcgactggttcaacaagaatctgaaataa

SEQ ID NO: 24430 - DNA, 576 bp, Zea mays
  Peptide Sequence Number=SeqID_67805
atgacggatgcagagaaggaggtagcaacagaaagaataatggacttgccgcctcgatgcgattgtggagatcgtgctgtcatcgacgaagacactgcgaagcacttcgtgtgtccgaatattgattatattattccggacaggagaagctctttggaaaaacaggccaagcgcggaccgtccgggcccttgcggcggaccgtccgcaacactagaatgactctcggacagaaccaatgcaaaaatacaagtttccattacggactgtccggaggaaaagcaaagaccgtccgagccctcgcgcggaccgtccggcttcaggcgcggaccgtccggtcgccgttgatcaacaggggcggaccgtccggacctggctcgcgaaccgtccgcgctcagcagaatggtgcaacggctaggaagtggttggtggctataaatacaaccccaaccacctccattcaagacatccaagcattccaaccttcaacattcaatacaagagctagcaatccattccaagacacattcaaagcctccatctctccaagtttcacaattgagaaaagagatcattag

SEQ ID NO: 24431 - DNA, 684 bp, Zea mays
  Peptide Sequence Number=SeqID_67806
atggcgcccaagctccccgtcgtcctcctcgctgcctgcgccgtcctcctggcgctcgctaccccgctgctcgccggcgatcccgacatgctccaggacatctgcgtcgccgactacgaatcgcttgaaggcccgctgcgggtgaacgggttcccttgcaagcgtgaggcgaacgtgacggcggacgacttcttcttcggcgggctcgccgcggccgccgacgtgtactcgggcaacccgatggggtcggcggcgacggcggcggacgtgtcggtgctcccgggtctcaacaccctgggcgtgtccatggcgcgcacggacttcgcgccgtcgggcggcgtcagcccgccgcacgtgcacccgcgcgccacggagatcctcttcgtcgtggagggcaccctcgaggtgggcttcgtcacctcggcaaaccgcctcttcagccgcgccgtcggcaagggagaggtgttcgtgttcccccgcggcctcgtgcacttccagcgcatcgtcggggcggcgcccgccgtggcgatctcggctttcaacgcccagctgcctggcacgcagacggtcgccggggcactgttcggcgctgcgccggcggtgccgacggacgtgctggcgcgggcgttacagatcgacggtggagcgatcgagtacatcaagtccaagtttgcgcccaactag

SEQ ID NO: 24432 - DNA, 453 bp, Zea mays
  Peptide Sequence Number=SeqID_67807
atggcttgcgggtttctctcgctctttcctttcagcgggcggcacgggttcgttgtggcgatcacgggtgtggaggacatcggcaaggggctcatccgggaaggcacgggatacgtcaccttccccgtcaagtaccagtgcgttgtctttagacccttcaagggcgagatcctcgaagctgtcgtcaccatggtgaacaagatgggcttctttgcggaggctgggccggtgcagatcttcgtgtccaaccatttgattccagacgatatggagttccaatcaggagatgtgccgaactacacaacttctgatggatcggtgaaaattcaaaaagagagtgaggtgcggctgaagattattggtactcgtgtcgatgctacagaaattttttgcattggcacaataaaggatgattttctgggtgttatcagcgatcctggtgcggcagtgtaa

SEQ ID NO: 24433 - DNA, 663 bp, Zea mays
  Peptide Sequence Number=SeqID_67808
atggccgacctccacttctcccttggcaggcgctgccctcctctggtccgagctcgagcaggcctccctcgcccacaaagtcagagcggaagccgccgagctcggagcccagcacgctgcacgccgccgccggccatgtcggtggatacggagcgaagctccaccgagtcgtccgcggcctccaggctcggctacgaggacaccacgctcgccctcaccctccgcctcccgggctccgactccggccgttcctcctcgctcgccgcgccctccgacgctgcgacatcacccaaggcgcgggtggtggggtggccgccggtgaggtcgtaccgcaagaacgcgctcgccgactccagcaaggccagccacgcagccaatttcgtgaaggtggtcgtctcccgccgccccttggccttctccggccaatctcggccttctcccgcgcgcccttggccgcctgccgcagcactgttctgctctgctcgccgcgccctgaaccttgctccagctcgccggctggatctccctggtgccgcgcccctgctcatcttcctcgcgcgcgcctcctccccatggccggcagcaggcaggcaggtctcgcgcgttgccgatatttcttcccaacgtagcagtagcaattcaaaggattccaaggcccgatga

SEQ ID NO: 24434 - DNA, 408 bp, Zea mays
  Peptide Sequence Number=SeqID_67809
atgagcacgtacagaggtcactatcacatgactggccccttcattaaggtgtctgaactcaacttagatgactactggtgggcatggctgggaggagacaggcgacaaggaaccactggagccgcttgtgtcggacagggcagcaagagcggcagccagtgcggcctttgccatcgtgagttcctcgagcgccagggagatcgccttgggagaaggagcggaattcttggtcggcgtaaagggcacgcgtggtgcgattgccaaggaactggaagtctggaactctatggagagccagagagagcgggcagaggcgccgcactgggacacaatgtcggcgagagtgtcggaaagagtttcgagaaaccaagtgcggacgacggcattcatgcggacccaatcgagtga

SEQ ID NO: 24435 - DNA, 747 bp, Zea mays
  Peptide Sequence Number=SeqID_67810
atggacccaagcgagcacccatccctcgggctacgacctcgaccacgacacgtggcatgggagatccacggccaggagagggatgcgaggcagcggcggggcgagaggaagatggatgatggggaggccggggagggggctcagcggaggaggcagggcctccagaccctgagggagcccgcttcgtacgagcagctgggttggagcaatcaacctagtaggatcatgtcaaacacattgatgcgcgagactgttgggagcaaggaggagaaggaagactcgactctccccaaggacgttcatttgattcccgaccttcgggagaacggtcatcctggacaaagaattaaggtacctgtagtacctatgcatgttggcggtcgtccagaactcccgatcattagagacatgaataaattcagtctcttcccgcatgggcagcctaatgttatgcactcgcatgttgctgccctgaatatctgcattagagaagcccaaaatatgggcaaaacgacgataactgactttgtgccagttaccctggatgaagaaatacatgactgggtaatcatacccatcgacttcctcatctactttcttgatccagagggtggcataaaaactgagctacccacctcgtcgttccaggggtattccatggtcataatgtttcttaacccctttctctctaagttttggagagttgacatcatgtcaacatctcccatgttctcacatccctcctag

SEQ ID NO: 24436 - DNA, 477 bp, Zea mays
  Peptide Sequence Number=SeqID_67811
atgggcaagagtaacaaacgcaagcgcgagctgactcctccgtcgaaggacttcggcgactcggaatactcgaaggaggagttctcctccgagtccgaggggtctccagctcccgtctctcccccggcgtcgtctgatgattcagacgactcccaggggattgccgcggaagtctggatgtacatccgggccgtcgagcgctccgggcttgagggctcggatgagtcggagtactcctcggatgaggaggactcggacggcggcgaggacgaggatgacgacggcgacgacggtgacgacgacgacggtggcgacggcgacagtgacggcagcggcagcggcgggggcagcggcggcggcgacgggagcaaggacagcaccagaggcggcagcagcacgggcagcaccagaggcggcagcagcaagggcagcaccaaggacggtggcggtggcagcagcagcaaggccagtggctaa

SEQ ID NO: 24437 - DNA, 492 bp, Zea mays
  Peptide Sequence Number=SeqID_67812
atgaagatgctacactttgacgagttgactaaagaacatgaggagctaaagtgctctcatgttgatttggtccaaagcaaatcttcctttgagctagaatctacaggagcaaacgatgatacatatcaaaagctcaaagaagaaaatgagaggctaaaaataagcttgacacaactaaaagggaaatgcattgcccaaccttctcaagataactgtgatctcatggtaaagaagcttgagacaggaacaactgtggcatgcactaaatcccttgaagaaaatgtcaaggacttgaggattgtcaagaggaggaagcaaaagaagaaaatcaatacctcttccaaaagcctcaaccatgcctccataaaaggtaacatccaaggaaataaagaattaatcctatgccgaaaagtcaagacctacaacatggaggaaagtcaagggatgatttattcccgtaatcttaaagaactaactatgcttgttccatga

SEQ ID NO: 24438 - DNA, 909 bp, Zea mays
  Peptide Sequence Number=SeqID_67813
atgtcggcgtcgagcgccgcgtgccgcgtatgtggcggcgtagcggagtgcgcgtgccacggccacggcgccggcgcgcggtgcggggccgccgtcgcggacctcaaccgcgggtttcccgggatgtggcaccagcaccaccagcagccggaggaggaggagcccagcgtcgccggcggtggcgcggcggcggggctgcaggagttccagttcttcggccacgacgacgaccacgacagcgtggcgtggctgttcaacgacccggcgccccacctgcaccgcggcccggcgccggccgcgggcgcggccgggaacggggttgtggccgaggccgcgcagcggagagcgccgctgttcgacgggtacgcgcacgctcagtacggccagctgccgggccacgggctcatgttcgacgtgccgctgggccggggcggcgacgacgacgcggcggtgctggaggcagggctggggctaggcggcgccggcgccggcgccggcgacagcaatccagcgacgacgtccagcgccacaatcattttaatttggccgataacacaagtgattattggaaacgtcaaaaagccgccaatttgtggtccagcgtcactccgactaatgtccttctgcgggagcacgttcaccgacgcggcggccaacggcagcgcaagcggcgccgacccggcagtggaccgggaggcgaaggtgatgcggtacaaggagaagcggaagaggaggcgctacgagaagcagattcgctacgcttcccgtaaggcgtacgcggagatgcggccgcgcgtcaagggccgcttcgccaaggtgcccgacggtgatgctcccgcgccaccagcgccggccgctgcggggggctacgaaccaggccggctcgacctcggatggttccgttcatag

SEQ ID NO: 24439 - DNA, 207 bp, Zea mays
  Peptide Sequence Number=SeqID_67814
atggctattcctactagaatcaacagagtacacatgcgcggcggcttgtggggcaagggctcaaggctagcacagcgggtcagttcaaactcagtggagcagtcaaggggctttgtgccttttcttcgctttcttcagatttgttttcctgttggtgtggctcagcttcaggccttcagctcaacggctggtagacttgagcactag

SEQ ID NO: 24440 - DNA, 1125 bp, Zea mays
  Peptide Sequence Number=SeqID_67815
atggagaaaggctggaaggcgagagacgctgctggtgctttcatgatggacttggagctggtggccgaggaaaccgacgacgcggtgccgtcgataccgccaccgcagacgccgctggagcccatggagtacctctcccggtcgtggagcgtgtcggcgtcggagatttccaagattctcctcggtggaggcaagaagagcagcgttgcggcggcgagccggcttccggaggtgaccataccggagcagtctgcgctcgccaccacgtcctccgtcgttcctctaccgtgtcatcagcagaacgtccaccacagggaaacacgccgggcgaagcagagcagcaaggagaagcagcgcgccgagaaggcccacgtgcacgccatggtgtccgtggcccgggtcgctgccgccgtcgccgccgtcgcgtcggccacgagctccaacgcccaggctaccactaccaagatggcgacagccatggcgtcggccaccgagctgctggcctcccactgcgtcgaggcagctcagcacgcgggggcgcgccacgaccaggtggccgccgccgtgcaggccgcggttggcgtcagaagccccggcgatctgatgacgctcacggcggccgcagcgaccggtacgcactacgcagtccgacggagctgtgtcatcgcgtcgcaggttttccactgccgattcttgaaacaagacgctaagcttccgtgcacttttggctcgcgtcgaccagctctgcgaggagcggcgacactgaggcagagggcgcagcgagagacgaggagcaacgcgagcatcctgctcccgtacgagaaagccgcgaattcgtggagcccggacatctggtgcaaggagggggcgctgctgaaacgcgcaaggaaaggcgtggtttacggcgtatacagcgagcttccgacgtgggctgagccagggaaggactgcatagaggagacatgctgctgctttggcctcagcacggcgcagggcctagtggagttcgagtgcgagggcaacgcgagcaagcaggagtggatcgacgacgtgcagaacctgcttcgtcaggcggctctgcatgaccgagtaggggataaactgggattagtaaaactcagctag

SEQ ID NO: 24441 - DNA, 1014 bp, Zea mays
  Peptide Sequence Number=SeqID_67816
atgctcgcgggcctgttcatggagcttcgcgacgccacccgcctcgtcgtgttcgtgaccgaccagttcgggacaaccttcttcaccgccgcacgtgacaccagcgtgatcgcgcagtgcctctccatgcccatgaacctccacgtgctctcacttgtcgtccacctccccgagctggtcgcctccatgccagacgagttccgagaccttgccgagccggtgcacctgcctggctgtgtgcccatctcggggcccgacattgtcttgtcgttccaggaccagtccgactcgttgtacgcggtgatgctgcgcctcatcgtgcgctgcgtgaagccgccgatgctatcctcgtcaattccttcgacgccgtcgagcctgaggctaccgaggcgctgtgccatccaacatagccctactggccacccgtaccatgtcggtccgctgatccttcagtccaagttcaatagtggcaccagcatcgatttcttccagcgtgaggaagcggagcgccgggagcgcgatgattgcgatggagaggcgtcgtgggaaaagaagaagcggggcgggggcgacctccccgtaggccaacttggcggatgtcttgtggcggaaggcaaggggggacgggggcgggggcacggcctcaccccctgtggacgcggacagggccaggactaccttcggcgtcgtcggtggcggtcgaggcgcgggcggagagggcccggcggaggtggagcagcagaaggggcatgcgagcgggagcggaagggcgagggcgcccagggaggcatggagcacgggcaccggtcccgacagtattctaggcatcgcgacggcggggtgggggaatggtatgtggggcggtcgcagagtgtggccgtgtgggggaagaagggggcggtcgtggacctgcgagcggggggcacgcgaatgcgagacagcgggggcgggggcacagagggcaccgacaggggcgacggcaggggggcaatgtcccccataatgctcccctaa

SEQ ID NO: 24442 - DNA, 357 bp, Zea mays
  Peptide Sequence Number=SeqID_67817
atggacgacgtcgacgtcggcggtaatcctgtggtggtgggcgggcgagagttacagcactgctccacgaatgaaaacgtaaagaaaacgtctgagacagttgtcgctactagtccgatttatggtttggaacaggaccaggaccaggaggccagccagtccgcggtgcacgtccaccaggtcctcgcatccccctccgacggccgaccccccatggccatgcaaaagcaaattgttggctgttgctatttgtacggttgcaagagacttcgatctatggagatccttgcgaggagaaaaaatataagaagaaaccgtggtctcaagttgataattggatcacttgagaagagttga

SEQ ID NO: 24443 - DNA, 519 bp, Zea mays
  Peptide Sequence Number=SeqID_67818
atggccaatgtgctaagaaaccacactgcattggcacaggtgactattgaggaccatcctcacttattggctgggaagcatgcatcagtgcacccatgcaaacatgcagctgtgatgaaaaagatcatcgacgttccaatgtcggggggagtggaaccagaagttgacaatggagttctatggaacagcgcccctccaagtccaaggatgagcgcgcggctgcccgtgatcggccgccgtcgttcgcccgacacgagaacccccccacccccatctcgtcggcgcgctttgtgcagcgtgatgcgaccagagcgcgacagtgcgttcacatgcgtgctcatggccagctctggatcgcggcgcgcgtggttcgcaggaggcgagccgtcgcttttggccgcggcgtttcgcccgtacaagcgcgcccccgcgtccgcgtgccgccccggtcgccgctcgtttgctgatcgcggccggacgcgtgcggtgaaagacagcgatgagaaatcttttggttag

SEQ ID NO: 24444 - DNA, 822 bp, Zea mays
  Peptide Sequence Number=SeqID_67819
atggcgtggagagtggcagggaatcctcatcgttgtactgacggtacgatatacaacagtgatgacaattgctttgctcaagatagtcacatagcagcagttgaccattcaagtgctcagcctacccagactgcttttgtgaagtgcaaggatgaaacttggtcagagtgtttaccatatggattggcagtgaaaccaaaaaagaaggcgcgcttctgttcttccgtattcatgtcaatgcaacaacagctatgcctggtgagtggagataagtggaggtggcactaccaattccttgatgtaccaggaatgtttggattgttgtattctgacattgtttggttcaacatattcaagtttgatgtcgacaacgtggtcatggtgaccggcaggaggaacatcgggcgtgtaggagtgatcaagaactgggagaagcacaagggcagcttcaaggaaaaatcaaatttaaaaagagatgactttgttcagccaaagtcagctcggtctgggtgcaccggactgtccggtggtgcaccggacagtgtccggtggttcaccagacagtgtccggtgcgccaggttggctctggcaaacttgctgctctcggggctttgacggcggtgtacggctataaatcaccggactgtccggcgacagaaggcaagaattgccttcctggaatgctctcaacggctcctagctgccttggggctataaaaggggcccctaggcgcatggagaaggcatccaagtattctctaagcattcctaagcaccaagacttcgattccgcgcatttgattctttgtgatagcatctag

SEQ ID NO: 24445 - DNA, 1509 bp, Zea mays
  Peptide Sequence Number=SeqID_67820
atggcccaagggcacatttccctttcagggatccacattcctggtgctccggtcggaggctcccagtcagctgacgtggcccccagggcttctcctgcggtccccagttcctcggacaagggtaaggggcccacaagcagctcctccactccggacgccgccgggaggtcggaggaagtaaggcgacaccggctacgtcgcgccgatgggtcttttgttttggatctaccccgagactcgggctcccccagaagcatcagaagacagctggtggggctaaggaggccgaaccttgggtccaggacgagcagaggggcgcgagccctctgccgccaccacattcggctccgacaccgccatcaccgccgcctgtgtcagaccgaccgtcgtcaccgcaggggccgcggcagcaacagcagcatcagcaacgacaacgggcgccccgcttccaaggccactagaagggcctcctcttcttcggcatccgtggacgctccttccccgctggccgccatgcccgccggtgggtctggctcccatcagcatacatctgttgggaacatcgccggcgattcgtcagcggctaccgcagcctcatcagcatcgacgctaggcccaccttcagcagcggccgaagaggttccagttgcatttgcccccaccatgcaggatgacgctggtgctgaggtggtgccatcaaacccccaggatccgcctatcaccgtcgaggcaacgccttcggattcccaagttttaggtgggggtccagaagtggcagcgttgctgaaagggaaattgactaatgtattgtgtctaagtgttggaaacaggaaaaagccaattgaaaatgccttggctcgagcagccaagtttcagctcagtctggagcaccggactgtccggtggtgcaccggacagtgtccggtgcgccaggctggcttgagcgaactggccgctctcgggaatccaccggcgacgtacggctataatttacaggactgtccggtgtgcaccggactgtccggtgagccaacggtcggccgagccatctgcgcgggacacgtggccgagccaacggctagaagaatgcaccggactgtccggtgtgcaccggacatgtccggtgcgccaacggctctcagcctgccaacggtcgactgcttcgtttatggaaagaaatcgggcaccggacaatgtccgttgccaacagctgctacagacccaacggcggcgataccgtcggatgcaccgtcggtggaaaccgaggcgactatctggcgggagtgggaggcgctcgagaccgagcaccaacgcctcggcgattggtgcacccaactggagaagcgcactaaggcgacctcctgccaatttgcctcagagcaggccgagcttgagcaggagcgtgaggacttcaaggaggacatctggaaggcatgtgtcaccgctgcttccctggggccgtgggcgcttgctgtgctcgccttggctcccggcggcagcagcaactga

SEQ ID NO: 24446 - DNA, 600 bp, Zea mays
  Peptide Sequence Number=SeqID_67821
atggtccgtatcgccgagcatcgtggcgagatctctgaagacttccccatggaggaagaagccgcatcttctacgccacagagctctagccaccctacgcttggtgctggagccgtgcgccccgcacggcggcgcacgccagtacaggcgttccgaactccgtcagaagatgcccccgccggagcgctctctgtggccaaagagttgttgcaccacttactaagccccacgacctcgccaggggctatgaggcagtggcgcgatgacatggatcgcctccttagcatggcgcacgctggcttgatcaagcctaagccttggtcgtaccggcgctggcacgaagcatctgcctcggagcgctcgccctcgatgaggactgccccgaccagagatctacaagcggagctcaaccgcagacacgcagaaggaggcgcgcgagttcctccagagggaccaggagacctgcgggatgaactcaaccgcagacgtgcgggcaaaggtgcctgtagctctttggagaaggcacgtgagcgctgcggcaacctcgggcaagattccgctgcggtcgcgccatgggccccaggggatgctcgattctag

SEQ ID NO: 24447 - DNA, 462 bp, Zea mays
  Peptide Sequence Number=SeqID_67822
atggaattactcagcaagtcttacccgactaaagaaaagactctcaagggtatgctggttatatgggagtcaaggatttcaaggagggtaatcaagatcaaggaagtgctacgcgatagcgaattaaggctggggaaaggttcatgggtgcaccagggtctacggacatcctttgatttgggtagaacaagacccaaagaacgggtcgacggtggggggggggtcacggcggtgtttgacagcgcacaggtgcgttccggtgaggagcttcgaccaaactctaaattgccacatctaagggcaataggagatcaaggattaactaaaacagggagcaattggagagttactgaccagaggaacgctggctgcgcagaagttcttcacggcggagcaagaacaaagaagagagggaattggggctgcgtgggtatttctggtgagctcgagtcaagtgcttag

SEQ ID NO: 24448 - DNA, 171 bp, Zea mays
  Peptide Sequence Number=SeqID_67823
atggctccgccatggggggctgtctgtgccgccgcatttctgtttcgcgccgtcggatccctgggactgcttcgggtaaatcacatcctgtacgaggatctcggatcgaacggatgtgaatggggcttagtacttaaaaatctggacggtcgatctttgatcctacggtga

SEQ ID NO: 24449 - DNA, 264 bp, Zea mays
  Peptide Sequence Number=SeqID_67824
atggcggtagagttcaatccaagggcacaggaagcttcacggggtgctaaggaatctacccatgcaaggaatcgaaggaagactcaccgtggagctcggtctacgtacgccgatggtggggtgaagtccggcgacgtcgatccggcgtctccggcgagggtgttcctaagggctgatttggtgaccggggatcccgaggggaagaaatcctcttgctattcaaaattgaattgcaaggggattcctccccgatggatcccctag

SEQ ID NO: 24450 - DNA, 525 bp, Zea mays
  Peptide Sequence Number=SeqID_67825
atgtggaggatcttcatcacgcacgctaaacgtcggcttcgtccacttcctcatgtgaacgaggacctcggcaacctcttgctgttcgtcgcctccttcgatcactccgtcttcactaccttcgcgctcagcttcctcctcgacatggccaactgtaatcttgctgacggggaatacatcctcgttccggagcaagaagttgctcaggagatagcccaggagccagcaccagagcctgccatcgaggatctgcctgccccagccttggaaggcaagccccggttttcccttgtgatggatactagtatgctaggtcgagtagctgctttgctaattagggatctcggtagaagtcaagtgatttttctagcactcgtgcgaggtcaggaattgattgtatccacttttcgtatcggaatgatgatggtctatggacacggatccatggggatgcatggtctacgagatggaattggaataaggattaacgtgtggatacctgtgtcaagcattggaacatactaa

SEQ ID NO: 24451 - DNA, 222 bp, Zea mays
  Peptide Sequence Number=SeqID_67826
atggcagtcggggtcagtgaggcattgtacgccaaggcggtgagccctgatctgctgacggggaatcgatggggacggttgatgtgtgtggggacggagtgcctcgccacgtcgtgttccttggaggacatggttgctggagtgacttggctgtccattttgccaccgggttggactgtcgagtgggaccctacctcggctgaggaggagcatgaggagtga

SEQ ID NO: 24452 - DNA, 993 bp, Zea mays
  Peptide Sequence Number=SeqID_67827
atgcgggaggggatgaaggagagggacagaggtgggagcccagatgcctcgggccctcctcccttccgcggcccggcgtacaagacgaagctgtgcgctttatggagaggcaggggcggctgcccccgccccaactgcgggttcgcccacggcgaggctgagctccggaggccgccccctcgcgcctccttccagcctcgccctcggcctgggagaagggattacagagataatgactttagagttaggcctgagagaagacactcaccctatgggaggttttcccctgaaagagatatcaggcgtcgttcatttcgtgataagagacagagagcaagttctgaagataggggatctagtcattcaagatcacctattaggaagagtgagagaaaacatagcaaaagtcctgatggtggaaaaaccgattcatccgtaagttttagaagttcagataacgaagacaaaggaaaagatgaaaggtacttaagcagtgatgagaaaaatggccgtgaagaacaattgaaacaaatgcatctggacatggaagcattgcgtgaagataaatcaaagctggaggcgatattggagaagaagactgatgaagagcgcaaactttgtagcagagtagaagatcttgaattgcaattgaacaaagagaaagatgatttccaaaggtctcaggctcgctttgagaggctagcagatttgcttgcttcagatattttgaagccttataccaaggagcagggttccatcggtattactgccaatgacgatccatataatgggaagagacagagagagaatggtgatgatatgattccaacaccagagaactatagacctgaagatgctctagaacatgtccaagatagcaagggaactgatcgactagaatcatttacagtgaagaagttaagagtgggtgactacgatgatgaaggaaacattgtttcttcaagcaatatttttgcggataggctattgtag

SEQ ID NO: 24453 - DNA, 459 bp, Zea mays
  Peptide Sequence Number=SeqID_67828
atgggcaagagcaagaaaggtagcggttcttcacaccgttctggcgacaaacgcaagtgcgagccgactcctccctcggaggacttcgacgattcagagtactcggaggaggagttctcctccgagtccgagggctctccagctcccgcctctcccccaacgccatctgacgattcagacggctctcaggggattgccgcggaggtctggacttacatccgggccgtcgagcgctccgggctcgagggctcggatgagtcggagtattcctcggacgaggaggactcctcgtactcgtccaaagagggcagcggcggcgattgtggagacggcgacgacgacggaggcgacggtgacgtcggcgacgacagcggcaggggcggtgacggcggcgacgagggtggcagcggcggcagcagcaagggcagcagcaagggcagcaacaaggccagtggctag

SEQ ID NO: 24454 - DNA, 2199 bp, Zea mays
  Peptide Sequence Number=SeqID_67829
atgtgctcgcatttctactcagcatacccgccttttgaagtggcggaggaggatgcggacgaaggggcccttcggtgcgccgccggcctgagcagtgggcgggatttggttgaggaatttattgcgtacggggtatggcctttggcgcatggctgggcgttgggcgaagtgtgccctcgccggatgccttcccatggtgggaagctggtgcgaagtcctgtcttcgcgctggatctgcatagccgcgatctagccgcctttgtgcgtgaggtggaggatggggcggtgcggatcgttggtcgggtttttgaattgaatggactgctgtatggcggttatcccggccaggacgatgtggatcgtcgcgggaagaaactggtggtagagtctggagacgaccccgtgccggcggccgccccgtcctctaagaagaggaaactaggtactactatgggaggacttggggtttctgatggttttgctagagaattgatgaggacatgcgcggccccggggggaaggatgtcttcgcccgagctccgggagtcttcgacgcggatgctgagggttaccgggggttggtggcctaggaatgttcctatcccccgcgcggccgacgaagacttttttacatctcgcatggttcgtgagtggaaagtgtttccttacgggcggaatattgctgctgttgtgtcggcagtgatggacaaggatcgccaaggagctgcgcagaagcgccaggtggtcgtcaggcttcatgaagccaggacgaagaggcagcggggggctgtgaaggctacggcccccggcgggggtcagccgccgttggcggcgaagtcggccgtccctgcatccggcagggcgccggaggctgcggctgccgccggtggttccaaggctgcgaaggccgcaccggcgtccggcagggtgccggaggctgtgaagtcggcccgagggttgctgccgccgggcaagcgcgtcgccgacttcgccaccgacattagtgtggacgactatcttgttgggtcggacgaaggccaacttgtcgttgttccgcctgccgcggcgaccacggcgactgccgtaatgccaaaggcgaagggtggtgctcttagtgctggcggcgagatgccggcacttgctgctgtgagggacgaggcgggcgctgtgtcccgccggctggaggagatgaaggaggcactaagtcagagacttcggacgcaacatgctgacgctgtccgggaaaaatcggccgccgacagcaagtgccgcaagctggcggacaaggtggccgtgctggagggggagaaaactgacctccggcgccaactggcggaggagaggagggaggccaatgaggccctcgccaaggcgcaggctgcgcaggcggaggccaatttggcgcgggtggagggcggtcttgccagggaacgcgccgagcagttggaggagcggctccgcgccctgcagagccgtgtggagagggccgaagccgcgacgcgcacggaggctgagcgaactcgcaaacagcttgtggattcataccatgagctgggcgcgcggaccgctgagttcgaagtgctagaccgagagcccggacttcgctgcctggagtgggtgcagaaggagttgcaggcgctccccaccatcgtggaggggtttatgtcttatgcttccctggtcacctgcgagggggcgatgaacgcgctctctcgcgaagggtgccggcactatgaagtcttcgaccaagctgatgaagatttcgagcgtgatatctacaaggtcgaggactctgtagtgaaggagtccgccggagctctctacgaccggatgtggggcccccatggacgagaggtggtcagggaacgggccgagacggcgaggggtcaggcggcgcgtggtgagagggtggatgactttaaggctttgaacagcacgctgcctgacccggagtcgaacccggcggaggtcgccctggagccgctcccggagaccgccgaaggcgcccctgaagcccccgcggctgctgaggccggcgaaggcccacccccggagaccgccgaaagtgttcctgatgcccccgcagccgctgcagccggcgaaggcctgccgccaactgatgtgccgagggttgaagatcctgcgacggcggcggtggaggcgacggtggaggctcccgcaacggctgggtcctcgtag

SEQ ID NO: 24455 - DNA, 354 bp, Zea mays
  Peptide Sequence Number=SeqID_67830
atggtgcggagtagatcggacgctatgcatcaccccggcgagcaggaccgaccgcacaggaacagggcggcggcgctcccgtgcagagcagtggcgcacacaacggcgaagtccgcacggcggtcccggcacccgaaggaggcaacagtcgaaggggccagggcttcctgcgcgtcctccagtggtggcgcgaggcggacgaccgcagcaagaccggcggttcaacgatccagtgaatgtgcatgggtcgatccccaagccacggagttggccacgcgcgaaggaggcgccaggactgttgtacggcggggcgcgaggttggatcaatggtggccgtgcgagaagcaggaatga

SEQ ID NO: 24456 - DNA, 81 bp, Zea mays
  Peptide Sequence Number=SeqID_67831
atgaagaagatcaacctcatcaaggaaaggataagagtcaccgtcaagggagaatcaaacttaggattgaaattggaatga

SEQ ID NO: 24457 - DNA, 747 bp, Zea mays
  Peptide Sequence Number=SeqID_67832
atggccgcggtgctcctccctgcttgccgcgtttctgttgcgagctcgtccctggcgctgggtttcctccctccatcgcgcgtcttcttcctcaggctcgcgcccttcctgttgtcgcgcctggctcgcccctgtgccgcgcaccgcttcaccagctcgccccttcccttgccaagcaggtcgccgcgcccagccgagtttacccctgcgtgcaaccgtgggtttcgctgcgcagcgttcctgctccccggcctgtgtcatgctcgccagatcgagtctcgcgtcgtcgatctgcgcagttcctgttcggctatcgattccgcctacgtcgatctcctaattatcatggatagtgaaaacagcgccgcctgccccgctccgactgttgtgccactcgatagagtgaggctgacagcagctaagtccagccttgggtgccatgggaagctccgcctcgcccgacccagggctcggactcagcctcgacctcggaagacggactccgcctcgcccgacccagggctcagactcagcctcggccttggaagacggactccgcctcgcccgacccagggctcggactcagcctcgaccttagaagatagactccgcctcgcccgaccccaaggctcggactcagcctcggcctcgaaagacagactccgcctcgccagaccaagggctcggactcagcctcgacctcggaagacagactccgcctcgcccgaccccagggctcggacttag

SEQ ID NO: 24458 - DNA, 870 bp, Zea mays
  Peptide Sequence Number=SeqID_67833
atgacacaggccggggagcaggaacgctgcgcagcgaaacccacggttgcacgcaggggtaaactcggctgggcgcggcgacctgcttggcaagggaaggggcgagctggtgaagcggtgcgcggcacaggggcgagccaggcgcgacaacaggaagggcgcgagcctgaggaagaagacgcgcgatggagggaggaaacccagcgccagggacgagctcgcaacagaaacgcggcaagcagggaggagcaccgcggccatggcgagggagcaggagccagggcgccgtggctatgggagacgggcgcgcgcaccggcagaaaagcttcacgcgcggccgtggaagaagagggaacgtatctagtgctcaaaggggtacggtgctcatgtgcacattttaaatctggtgcatccatttcgcatctaacaacagggaacgtatctggtgctcaaagggctaattttacgaagaacccctcccaccaggggaggaaggtggaaggggtgcttcacaaaattggtactgttgttagatgcgaaatggatgcaccagatttaaaatgtgcacatgagcaccgtacccctttgagcaccagaaacgcagacggaaacaggggtgcggcgagccaaggggaaatccagtcgggcgccatgggggaaagcttcgggaaggagagagaaacttggaggacggccgagctgggcgagctcgaagccaagcccgtcgagctggaggccaggaggggcggagggcgctcggccatggggaaacagagaacgccgagctcagcgcgcgtgcagggaactgggaccgagccgcgggaactccgagctgagcggcggggaagctccatggcggggtcgcggtga

SEQ ID NO: 24459 - DNA, 444 bp, Zea mays
  Peptide Sequence Number=SeqID_67834
atggatcatctaggcgacggggccgcggaggatgaggtcgtggaccttgaggtcatggtgtctgtcggctgggagcgacgacttggcctcctgcacacatttcctggaggcctcagatacaacatcttgttcaatgttctgggatcctctatagtgcatactctaaatttagcaatatcattctctttaacaaaaacaactgcaaagaaatgttcttctgtgaggtgtttcttccataagaagactaccgacatgggatacgtctcttcagtttgtttgtcaatattttgtaggaatcagaagagctgcaaacaaggacttgtattcacctacaccatggagccactactggttccaagcatggaagacgtcatggaagacatcgcgaaggtcatgaccgctgaccaaccaagggttaacatgcccttggtctttgagagatga

SEQ ID NO: 24460 - DNA, 591 bp, Zea mays
  Peptide Sequence Number=SeqID_67835
atggtggtcgccgaggaggaggcgaagaggtgggcgaggcggtcgcggaggaagtacagatcgaggttgatgaattacagtcgagatctgttccttttcctctactttcttcttatcattgtagcagatatgacttcctttaagatataccttcaaatgaacaggacggaccacgcaaagaagcagctcagggtgatgcaggagctggacgaagaccacacgctgacgcagctcgccaacgcatgggtcgaccttgtgctgggtggttccaagatccaagaagcgcgcctcatcttccaggacctatccgacaagtacccgacgacctgcacgattcttaacgggaaagccctgtgctcgacgcacatgggaaacttcgaggacgcggaggggttgctgctcgagtcactgaacaaggacgccaaggatactgagactctcaccaacctcacggtgtgcagcctgaacctggggaaacccgcaacgcgctacctcaaccagctgaagctcgcacacccagaccatgcgctggtgaagcgaatgtcctccgctgcagagagcttcgacagagcctgccaagcaatggtgtga

SEQ ID NO: 24461 - DNA, 93 bp, Zea mays
  Peptide Sequence Number=SeqID_67836
atggcggtagaagaggaggaagccttcgatggtgcgctcaccgacgagcagctgcgagagcctaggaataaggccatgagagagccaagttga

SEQ ID NO: 24462 - DNA, 204 bp, Zea mays
  Peptide Sequence Number=SeqID_67837
atggccggcgcccagcagcagccctgcgcagcgccgctgctccatctcctccccatcttccccacaaaacagcacccgcagcgagccgccgtcgtccatgctagccgtcaatgccatccgtcgcgcacgcgtgttcgatacaaggccggtcgggtgaaccacatgcatgcccaactccgatccgatctcgttcaggttgattga

SEQ ID NO: 24463 - DNA, 138 bp, Zea mays
  Peptide Sequence Number=SeqID_67838
atggggacgtattcttgtctaaggtacctcacccagggggccaccaccatcgtctttagaaaccttagcgggttgcttcgtattaagggtgatgctggagactttgatggagattttatcgacgccgaggaattctaa

SEQ ID NO: 24464 - DNA, 618 bp, Zea mays
  Peptide Sequence Number=SeqID_67839
atggctggacgcgagcaagagcagggagaagacaagcagagagagatgagcgtcgtggggcttcacagcacgcggacgccagggaagaagacgcgaccggacgccatggctgggcacagggaagatgaacgagcagagggacggcgaccagggagttccggccggcagagaagcatggcgcgcgcacaaagcacagaagctgggcacggccatggactgggagataggctcggcaccagggagctccgagcagggacgccgcggtccgagcgccggacgccgggcggagcgcgcgacgcaggagaagctcgagcgcgcggggaaggggataagctccgtgaagaaaaatctagagattgggagagacgagctgggggaagcaggtgctgcagcggctacaaatcccacaagcgcccgatcgactgggaggagataaaggagaggaacgacttcaggagaattccagcgcggtggagaagatatttggaggctcggactcgggcaaagtcccggaagacggcgaactccgctccgcccgactcagggctcggactcgggctaagtcccggaatacggcgaactccgctccgcccgacccagggctcggactcgggctaa

SEQ ID NO: 24465 - DNA, 354 bp, Zea mays
  Peptide Sequence Number=SeqID_67840
atggtgtggagtagatcggacgctatgcatcaccccggcgagcaggaccgaccgcacaggaacagggcggcggcgctcccgtgcagagcagtggcacacacaacggcgaagtccgcacggtggtcccggcacccgaaggaggcaacagtcgaaggggccggggcttcctgcgcgtcctcccgtggtggcgtgaggcggacgaccgcagcaagaccagcggttcaacgatccagtgaatgtgcatgggtcgatccccaagccacggagttggccacgcgcgaaggaggcgccaggactgttgtacggcggggcgcgaggttggatcaatggtggccgtgcgagaagcaggaatga

SEQ ID NO: 24466 - DNA, 297 bp, Zea mays
  Peptide Sequence Number=SeqID_67841
atgaaccacgacggggtattcacatctccaccaatagggacacgacgaacaggggacggtggagctgggcagggaaagccgtcgtgccgaggtgcggaaacgatagaggagatcgcggtgaacttgctggcgcactccaacagcggcgcggagtctccggggtgcggcggcggcatgcaggacagggattccggcgagcagacaggggcggcacaacgtctacacgcggccagcacgcatggagagctaggaggagaaattgaggaggacccgaactctagcgcggctgcagcttga

SEQ ID NO: 24467 - DNA, 597 bp, Zea mays
  Peptide Sequence Number=SeqID_67842
atggcgagggagcaggagccaggacgccgcggctatgggagacgggcgcgcgcaccggcagaaaagcttcgcgcgcggccgtggaagaaacaccgacggaaacaggggcgcggcgagccgaggggaaatccagccgggcgccatggggaaagcttctggaaggagggagaaacttggaggacggccgagctgggcgagctcgaagccaagcccgtcgagctggagggcgggaggggcggagggcgcttggccatggggaaacagagaacgccgagctcagcgcgcgcgcatggaactggaaccgagccgtgggaactccgagctgagcggcggggaagctccatggctgggtcgcggcgaccatgggaagccagggaccgcgggggagccgctcggatgggagagtggacggtcgaggctgagaaccacggcaacacggaaatggactggatatcggatacattatttttctgggacaacgcgcgatacagattattttgcctcgaacattttagtcgtcgagttcttcttaatctgtttgggataaaatcatccgagtgggtcgggcttccgaattcatattcgcgcgagcgatga

SEQ ID NO: 24468 - DNA, 1440 bp, Zea mays
  Peptide Sequence Number=SeqID_67843
atgcaggcggcatgcaaccataccaagggggcgcaccctttcgactccgacgcatccagcgtggaggcccaggcccacacgtcatgtaaccggcgcgccggttactacgtgcgagaagctgcaccgccacttgcgctagtaccgcgccttctcgactgcggaaccagtgccgcgactcgaggcgaccctgagaatggcccaacaatgccaaccgagcacgtcgatcatgggtcagtaagccgcgggagaaggcgcgatggtcgatatagccaaaagtgggccggcagtaatggcggcggcaggcgggcggaagcagcggtcaagtcggaccgagaaaggggatactccgaaagggatccttctccaagaaggaagcgggccccgagccccctactgatcagaggtttgaaggctggcccctcggaagggttcgacagccgcctcagagcactcaggctccgagccctcctactgatcagaggttcgaaggttggcccctcggaagggttcgacagccgcctcagagcactcgggctccgcgcccaccactggtcagaggttcgaaggctggcccctcggatgggttcgacagccgcctcaggccactcgggctccgcgcccactactaatcaggggttcgtaggctggcccccgaagggttcgacaacagcctcagagcacgcagagcgagggatgactctgggtacgttcgatacatggccgaggatcgggctacgctcccgaggctcgggggctgctctcgcaaacccggctccggccaaaccgttgacaacgtcaacataccagcccgagaacttggaacctgactatgcacctgggctacgaccagaaaacagcgccgcctgcctcgctccgactgctgtgccactcgagagagtgaggctgacagtagctaagtccagcctcgggcgccatgggaagctccacctcgctcgactcagggctcggactcagcctcgaccttggaagacggactccgcctcgctcgacccagggctcggacgcagcctcgaccttggaagacggactccgcctcacccgacccagggctcagactcagcctcggcctcggaagacagactccgcctcacccgacccagggctcggactcagcctcgacctcagaagacagactctgcctctcccgaccctagggctcggactcagcctcggcctcggaagacagactccgcctcgcccgacccagggctcggactcagcctcgacctcggaagacagactccgcctcgcccgaccccagggctcggactcagcctcgacctcagacgacggtctccgcctcgcccgaccctcgggcccagactcgacctcgacctcggaggagcctccacctcgcccgacctcgggctcagaccgaccacatcgcaaggaggccatcattaccctacccctacctag

SEQ ID NO: 24469 - DNA, 489 bp, Zea mays
  Peptide Sequence Number=SeqID_67844
atgggcaagagcaagaaaggcgaaagttcgtcgcaccactccggcgacaagcagaagcacgagccgagccctccctcggaggacttcggcgattccgagtactcagaggaagagttctcctccgagtccgaggggtcgccggggatcaccgccgaggtgtggacatacatccgggccatcgagcgctctgggctcgagggctcagatgagtcgaaggtccctcggacgaggagaactcctctgactcgtccgaggaggggagcggcggtgacggcgacgacgagggcgacgacaacgacggaggtgacgatggtggtgacggtgacggcgagaaagaacggctgtgttactgccggtgtctttagaggtaacagccgaatggttcttggcgacgtcagcgttttcgattgtaacagccgagtcatgctgagccacatcggtgttttagaagtaacaaccgagtggtgcttggcgacgtcggcgttttag

SEQ ID NO: 24470 - DNA, 1014 bp, Zea mays
  Peptide Sequence Number=SeqID_67845
atgcaccacacccttccacgttccgagcccccggatggggagcgcccgcggttcttccatcttgtcgtcgttggaggaaagcaacttcgcggaagttggtacctttcagccatcgctcggcttcaaggattttcatcaggcagcccggctgcatcccctcgccggtggtcacccaagacggtgaccaccagttcgatggtggggagaagcgagccgggttgcggcctctgccccgccctcagcttcaaggatcttcatcatcctggctggggcggaggccgggctgagctggagctctacctgccgcgcgggttcgtgggtcaccttctccctcagcattcaggggagagggcgctcaccggcctagcagaaggggcggactccgacaacgcggggctggttggccgcgagcgtcgtcagcttcagcacgttgggcccgctggctcagctggctctggctcggctcccgatgccccctcccgccgtacgagcggtcgtcgcgccgcgcgcaccggaggaccgcccaagacgtcgcgcgctgctagggcggcgttcatgttcttgggctgtcctgcctttgctccgacggctgccgtcgttggtgctgaggtggtggcggctggagaagtcctcgtagccgacgagattgccgccaccattcgcgctccgggcctctggctctttggctttgatagcatgtcctcgcccctcgagtggggatgcgggcgaggaccttatcgcagcagcgtctgccctgaggtcatcgctgctgctgtttggccgcccggagcggaggtcattgtcgctgctggagcgggcgacggcgagccacctggggttttgtcgccctgcaggccctccaatgtggggggttgttcgtacctgcgggggtggaaccggagttccattcgtaatggcaccttgagtgccggtgtctgttcattgtggctgtcggggcctgaacatgttgtattttggcgtgaagccgtgtttcgtccttatttcgagaactag

SEQ ID NO: 24471 - DNA, 810 bp, Zea mays
  Peptide Sequence Number=SeqID_67846
atggcccctccagtgacgtggtcggtccgagccctgggcagggcgaggcgtaggctcctccgaggtcgaggtcgagtctatcttccgaggtcgaggtcgagtctgagcccttgggtcgggcgaggcggagaccgtcggctgaggccagggctgagtccgagccctggggtcgggcgaggcggagttcgtcgtcttccggggttgaggacgagtccgagccctgggtcgggcgagacggagttcgtcttccggggccgaggccgagtccaagccctgggtcgggcgaggcggagttcgtcgtcttccggggccgaggccgagtccgagccctgggtcgggcgaggcggagttcgtcgtcttccgaggctgagcccgagtccgagccctgggtcgggcgaggcggagcttcctatggcgcccgaggccggacttggccgctgtcagcctcactctgttgagtggcacagcagtcggagcgacacgggcggcgctatcttcttgtcagactggataaggtgtcaggccacctttgcattaaatgctcctgcgatacggtcggttggcgtggcgatctggtcaaggttgcttctcggtgaagactgggcctcgggcgagccgaagtgggtggaaatgttttcaaaaagaaaaacttgtgatggtggatccatcaaggccttgataggttcaacatcggaaaagatgtacctctgccaggtgaagaagcgacaaacttttgttgcttctgttcaaaggtggtacccaaagaagagaaccaagactaaagctgcgggagggaaggccctccgttaa

SEQ ID NO: 24472 - DNA, 705 bp, Zea mays
  Peptide Sequence Number=SeqID_67847
atgacgaagtcaagagcaagggaggacgggtttaacagctcgacaacaaatgcgagcacgcgtgaagtccgatggacgaagagcgagtgtgccgcggtgacaacgagcaggcgcatgagcgttaacgcgagccagcggcaagcacgagtgatgaggtacaagtacaaccgacaacactcggcgaataggacaacgacagctaacaagttggagcaccagcgagtagccgacgcgggtgagcacagcaggcaggacgtcaagcgtcgcggcgagctaaacaaggattcagcgcgggagctcgacgcgatggggagcagccacggcttgccgtgtacgatgctgcagagaaacaaagaccgagctaagctcgacgccggacgaaacactacgcagtacctggcacgacgttcagctgcgcaagcacaaggggcgcaatgcagcggccatgggagatgctgtggaggaactcggcaggaaaaaaataaaacagagcaggcgactggaggagcgccggctggggaagaagcagctccgctgctggggaccagaggcggccgagcgaggcatcagggcgagcgccagggagtgcggcaaacagtacgcagcgagttgggaccaagcaccggccatgggagcttggacaggcgcggcgtcagagagctccaaccaggagccgagcacagggagataggcgaactggattga

SEQ ID NO: 24473 - DNA, 465 bp, Zea mays
  Peptide Sequence Number=SeqID_67848
atggcccgttacaatgggccggatcacacgtgggcctcagagctggacgaggccgcgctgcgggatgacgtcgtcgcaggccttcgtctggtgccgaatcgagcgaagggtgtccttgcccgttttgtctctgtcagaccagcgactgcagcgaaggcctcaagcgaaggatggcccgtcttagatgcactacagtctattctagaaagtgtgagccatggaacaaagctggttgaaaaaagaactacatgcatttaccccgtttttgtttggtttcatcttattctttctttcagacgctttattgtaggtggttcggagttctgtgtatcacaagagacatctaggttgacctcactcttcttagtgttcatgcccactatgcaggacaacaccgcaacactgatggagttggacgatttcatcaggctggactgtatctggatgggatggactctactctag

SEQ ID NO: 24474 - DNA, 750 bp, Zea mays
  Peptide Sequence Number=SeqID_67849
atggccgccgccgcggccgccgcccggaggctcctctcccgccgcgcctcctcgaactcgctctccgcgttcctccgccgcggcgctgccccggagcagtcgctgctgcgcccggccgtcgtcgcggcggcctcccgcctcggcttcccgcgcgggatggcgcggcgacctggcggggacggctacggcgcgggccgggaccgcgcgcccacggagatggcgccgctgttccccggctgcgactacgagcactggctcatcgtgatggacaagcccggcggggagggcgccaccaagcagcagatgatcgactgctacatccagaccctcgccaaggtcctcggaagtgaggaggaggcgaagaagaagatctacaacgtctcgtgcgagcgctatttcgggttcgggtgcgagatcgatgaggagacatctaacaagctcgagggctcgttcaacctatgctccatgatgccattattacggctccctggtgttctctttgtgctaccggattcgtatgttgaccctgagtacaaggactacggagctgaactgcttgtcaacggtgagattgttcagaggcctcctgagaggcagagaagggtcgagcccgtgccacagagggctgcagacaggcctagagtgaacggaacagagcgtgactgtgagagcgggattggaacggagcggctccgttccattgattttttggagcggaatggttctggatctgaggagaatattctctaa

SEQ ID NO: 24475 - DNA, 102 bp, Zea mays
  Peptide Sequence Number=SeqID_67850
atgggcttgtgtgtcagtgtgcagaagctggagcatgggtggactgcgcgtgagaagctctgtgagccagaaaagagggtgttcacatgtgatgatgcataa

SEQ ID NO: 24476 - DNA, 282 bp, Zea mays
  Peptide Sequence Number=SeqID_67851
atggcttcggcagaggacgaagctgattgttctgtggcaaaagatgctatagaagggatcaggcttcaggcagtggagaacatcaataaagatcaaagcttacagcgaaaagtcaacgctgattccgccaaaagtaaaggcgaagaagctccaaagacgttcctaagggaatgcagagcttacagcgaaatctactatctaaatctccaagggagcttcggcttcggcgttatttttgatcctccaccttcggcttcgtcgtcctacatgaataagatcgtg

SEQ ID NO: 24477 - DNA, 612 bp, Zea mays
  Peptide Sequence Number=SeqID_67852
atgggccgcatttttttggtaaagtgggacacagcccctgcctggcgacgcggcctcgggccaccaactggaagtggcgacgcgcggcccgacgacgcccgcctccactcgctctcccacacagaaaaccctagccgccgccaccgaagcgccctcccaggtaagctggagcgtccatcccaccgccgccatgaagcacaatccccgcgtcacaagctcccgcctgaagtgccgcaaggcgcactcacggccccgtcctccgtccgctgcgttctcatgtccgccgggctgtcgacggagctccgccacaagtacaacgtgtgctccatcccgatccgcaaggacgacgaggtgcaggtcgtgcgcggcacctacaagggccatgaggggaagatggtgcaggtgtaccgccgccgctgggtcatccacgtcgagcggatcacccgcgagaagtctcatatggaggctttgagggctgaacctgttgctgaaggtgagatgccagcatccagtgtgcgccttgtgtccaagctgaagcgacggctgctgttcaaggtgaacttgaccagctcaggaagaaatgtgaagtcaagtggtgatgctgtgaactga

SEQ ID NO: 24478 - DNA, 948 bp, Zea mays
  Peptide Sequence Number=SeqID_67853
atggtcggcacgccggcgctcgcccaacccgcgcgcgcgctcgccccggtgttcggtcaagtccgccgcgcgcccttgccctcggtcgtgcccgcccgcgcctataaagcctccccgggcgcgcctcactttaccccgcgctcaccatcaccggccaaccacccctccttagctccgacgagctcttttccgcccgccactgccgccagagcctcggccaccgtggccagcccactccagccacccccaagtcgcgccagtgcttcggctaggtcccgccagtggcccgtgaagctttccaagccctcggacccggcagaacttcaccggaagcccgaaatcgacttcaccagacttcggtcgcctgcctgtgcgcgtggaccaagctctccgttgtatgaggagcattgggtacctcgttgtcgggtctggctgactttggaggctcatccccttcagccaggttggtgttctcttgattctgagacaattggactcaggacggacgacaccgttgaagcagcagccatgaagactctgacgactttctgtggctaccatcccctggagatggtgatgcaccccttgggactcttccctgctgagaagaaggatgatcccatgtggtgtaaccgcgtgagccatgtgaaggatgtgtgggcaatgtatcctgacttggttgggagggtcaccgttcagtgcatgggtgcgctgtactgccttcaggcccttcaaagcgatgctatggcactccttgctaacaccgctcaaaccgccaagctcactctcgatagtcgagaagattttgtggtcgatctatccaccgagttggtagagaaggatctgcaggtggaaaggctgagccaacgcattaccaccttggagcagcaggtggagatccgagacaacaccattgatgtcttggagaaccagcttcacgatgtgtag

SEQ ID NO: 24479 - DNA, 372 bp, Zea mays
  Peptide Sequence Number=SeqID_67854
atgggaggtgggcagagggaggagcgcggcgtgcgggagctgaaggctgtgcggcgtccgatggccagcttccacgctgagccgagcttgggaagagatgagggcgctgagaaaatctcggctagcgagagaaagcaatggcgtgaggtttgtcgaggaaggagacgagcggagaaggagaggccaccatgcgcgctggtgctgctgctggtgagcgcgtgccccatgcgcgctggtgctgtccacgccctcgccaccttctgcgtgctcctgcgggcggccaggatggggctcctcgtcaagggactaagggaggcaacgttcttgagtcgttgggcgtgtgacgagcagcggacttgccgtactcggtga

SEQ ID NO: 24480 - DNA, 318 bp, Zea mays
  Peptide Sequence Number=SeqID_67855
atgaccgacctgacaggaaaacagcgtcgctcgctccactccgactgctgcgccacccaccagggtgaggctgacaacagccaagttcagcctcaggcacaacaggaagctccgcctcgcccgaccttaggcctcgacctcggaaggaggtctccgcctcgcccgaccccagggctcggcctcaacctcggcctcggaaggtggtctccgcctcgcccgaccctagggctcggcctcaacctcggcctcgggaggaatcgcgtcctcgcccgaccccggcctcggcctcaggaggagtctccgcctcgcccgacctag

SEQ ID NO: 24481 - DNA, 1446 bp, Zea mays
  Peptide Sequence Number=SeqID_67856
atgtcgtcctttctacgtcgaaccgtgtcgatgctgcttgcgtggcacgctgtcggtcagggtcaccaccgcgactctgcatcgctgtgctcggtcgcacctcctcagtcgtcttgtgcgcactcatctccaaacaggaccgcgctgccgactgttgaccccgtcgttgtctcgcagcgctcggacaccgacgtcgttactcggcaacatgtttgcccgtcaccacattatcttcagcaacacggctctgctggactccgtgcacttgtcgacacccagttgtcgatctccgccacgtcgtgcccctgctcttcagcatcattgtcaccctttttctgttatgttgcaggcgttcgtggattggaaggcgccattccagggattaccccaccattctcaccctcgtccgctctccggcatcctcgcccccacccgcccccgccatccttgccctcctacgcgcaagtcctcggcaccccttcccctgctgccatcgtctccgcgccatccttggatccggggttcgcagcgccatccttggatctggggtccgcgcaagggcccgtcgtctctgtgccatccttggatccggggatccggggtcgcaaagaaggaggctattctgaggcgtctcgcatgcgctccgcacgggcctcctcatcgccggcgccacgctcctcctcatcgtcgcagccatcgccttctttgtggcccgcgacatcaggaaacgctcccctctccgccccaccgtccatctccccctcccctcgcgcacatttccccagcacgctcgaatccttcggttcgcgcatttgcgaccccttcacctccctcctcgaggccatcattgcttgggacgccaccgtcggttgcccccacatccgcaccaagctcgccgccgcggggctggggccaggcctgccgctgctggcagcgagcgccaacggtaacggctccgcggaggaccctccgggagcgtctgtcaccggcagcgccatgtggcgcggggccacgaggtgcgaggacctggcggtgtgccacgtcagggtgctaatcaagggctggacctggatccctaacgcgctcgtcgatgtctacacctgtcactgcggagtaagctgcgtcgggagcaagtttcctgccgccgtcgatcgtcctggcgcgcttctctttgaggtcgccacgccgccaccccccccggcaatattgtcgccgcccccacccccgctatgcctcgggttcgcgccctccacccctgcccttcttggtggtgaccgcgtcgggttcgtggacgtcgtgcatggtggcctacttgggtgggtgcgtgcgatagatgagctccacgacgtcagacccttcaaccctaaatggactctaaacctaaacccctccctgatccattccctcaccgatgctcgcctcctattcttcttcacgagcatctga

SEQ ID NO: 24482 - DNA, 90 bp, Zea mays
  Peptide Sequence Number=SeqID_67857
atggctgatcccaacgcccccgacaagctcgggttcagttaccagtgccaacagagaagaagccctaacgatgcgggtccacagaagtaa

SEQ ID NO: 24483 - DNA, 336 bp, Zea mays
  Peptide Sequence Number=SeqID_67858
atgaccgccatcgcagcaaaatcatcccaagggcctccctacactgaccactcccctactgcacatgcccctttcgggtaccaggatgatctccagatgactcgtgacctcacgctagtcgtagcaatacagacaaacatgggcgtttcatatggaaggttccaggtggcggaaacccagggcatgccacccatggcgaatcggtcggcggtgagccatgcccacgccgcggcgtggctttccccccttctgtctggatgcggcgagcgaggtcttaaccatccgcggcatccgcgcgagcacggagatgttgttgctatggccgcggctgcgtag

SEQ ID NO: 24484 - DNA, 249 bp, Zea mays
  Peptide Sequence Number=SeqID_67859
atggggctcggtgtatgcggctcgctctgccaaggtggttataagatcgatggttttggttatgactatggtgctgctagtccactacagctaaacaggatacttgctgagtatgttgatgtgtactcacccttgctctacacaccaaaccccccatccccaggttgtcagcattgcaaccactgctcggacgaagatgaagctgtggaaggagacttccaggagttccaagattatgatgagttctag

SEQ ID NO: 24485 - DNA, 161 bp, Zea mays
  Peptide Sequence Number=SeqID_67860
gtaccgggaacatgttgcatggaccgacagagacaccaacttgaaacttttaaggaaggatgtattaacacatatatatgtgcccatggcaagcgtcagaaagatcctagaaatggttgatgcccaggaaggagcagcgatgccgccaatgtcgcccccag

SEQ ID NO: 24486 - DNA, 210 bp, Zea mays
  Peptide Sequence Number=SeqID_67861
atggatcgaaactcatatgtggtgaaatggttcaagtcacatgctcaagattggatagcccttgaaataagctttctggaaaaaaataaggtcactaaaaatagagttcaggagattggtgttcaaaacactccaaacccatttccagccatttatgagccctctctaacccccaccctttgtgagaatgagttattagtggttgattaa

SEQ ID NO: 24487 - DNA, 258 bp, Zea mays
  Peptide Sequence Number=SeqID_67862
atgtcttctttacggcaaagtaaatggtctgtagacgaagcaggatctaaaacgtgccgcatcacatgtaaggtttgtggagtggacttgactgataaagtagtagacataattttccatgtgtttgatgctaactgtgatggtaacctgagttcagaggagttcctgaggtcattacaaagaagagaaagtgatattcgccagccagcaacgtcaggtttcctaggggagctggagaacgtcatcggggagttctga

SEQ ID NO: 24488 - DNA, 177 bp, Zea mays
  Peptide Sequence Number=SeqID_67863
atggccgccccgcgaaccgcacgccccatcgcattaactctgcggcgggacaggcgacgcctctggcaggagaagcaagcgacgcttcgccttcgccataatgactgcgtcaaaaaagggaccgggaaaggggataccccgagaaggatccttctccgtgaaggaaccaggctctga

SEQ ID NO: 24489 - DNA, 573 bp, Zea mays
  Peptide Sequence Number=SeqID_67864
atggcggccaccacatccacggcggcggcggcagtatccttctccctcccctcaccaccgcactgccgcggggcccggcgccgccgcgcgccttccctcctccgtgccgcctccaccgccgcgcccccctcccccgacctctccatccagctctcgccccgcgcgtccccgcccgcgtctaccaacggcgccgccaccgcgcttggaccccccgtgtccgcctcctttgcccgtgaccgcgccgaggacctgcaggccgaggcccgcgcgatggcccgcgccgctggcgccacagtggcgctccgggcaggggaggtgctgtccaagttggcgtcgttcggggtgaaggtcctactggacgagcggagaggggagtcgtcatcggagaggaggcgcgccagggcggtggagttgcgcaccatcttcactaggctcggcccaaccttcgtcaaaattggacagggcctgtccacgcgccccgacctctgcccggccgagtacctcgaggagctcgccgagctgcaggtgcacccatctcccgctctttgcttgcttgccctttatgtgatttaa

SEQ ID NO: 24490 - DNA, 951 bp, Zea mays
  Peptide Sequence Number=SeqID_67865
atgggcgccgaacatggtgtctccggtgagctgcaagcggggcccacacgatctgaggcagctgttgaacccctcggggggccagccttcgaacctctgatcagtagggaggctcggagcccggttccttcacggggaaggatccttttcgggaagcgccgcctgtcccaccgtggagttaatgcgacggggcgagttgttggcggggcggccgttgcgcgctgggcgcgttgggagtcggagaagcgcgtccacttggcgcggttgcatgccgcctgcatggctgcccgcctctttcgcccgttggtctgggcaaaagtggagggtcacttgaacacaactccgtgggagttggtacctttcagccatcgttcggcttcaaggattttcatcagccagcccggctgtacccccccaccccgccggtggtcacccaagacggtgaccaccagttcctgggtggggagaagcaagccgggctgcgatcttggtcccaccctcagcttcaaggatgttcatcatcctcgctggggtgggggccgggctgagccggcgctctacctcccgcgcgggttcgtgggtcaccctctcccgcggcgttcgagggagagggcgctcactggccctgcgggcggcccggacttcgacaacgcggggctggtcgacggcaggcgtcgtcacctccagcgtgtcgggctcgtcggcttggctcctggcggccccttctgccggagggcggctgccgcgccgtactcgcctgttgattatctgaaccgcttcaccaagcatgagtcgccccgtgtcaaggtgacgagtgagagtggggatccctggaccatgtcgccgtccgaggctaggtcggacctcgctgaaggcgtcgtcgatgccgagggtgctactgcccccttccagcgtcaagacccgagcctgcaggatcagagtgtcttgtag

SEQ ID NO: 24491 - DNA, 369 bp, Zea mays
  Peptide Sequence Number=SeqID_67866
atggctctccgcaccctggcatcgaagaaggtcctatccttcccgttcggcggcgcgggccggccgttggcggcggcggcgtctgcgaggggggtgacgacggtcacactccccgacctctcctacgacttcatcgcgctggaaccggccatctcgggggagatcatgcgcttgcaccaccaaaagcaccacgccacctacgtcgccaactacaacaaggcgctggagcagcttgacactgccgtctccaagggcgacgcctccgctgtcgtccagctgcagggcgccatcaagttcaacggcggtgcaagtgttcctgtaccgtgtaccctgagggtttcggtggctgtggtggaggttttctcatag

SEQ ID NO: 24492 - DNA, 257 bp, Zea mays
  Peptide Sequence Number=SeqID_67867
gtcatgtgaaccattcaatcttctggaagaacctcaagcccattagcgaaggtggcggggagccgcctcatgggaaacttggctgggccatcgatgaggattttggttcgtttgaggcacttgtaaagaagatgaatgcagaaggcgctgctttacaagggtctggatgggtgtggttagctttggataaagaggcaaaaaagctttcagttgaaacaacagctaatcaggtgatctttgtgatgctcctaaactga

SEQ ID NO: 24493 - DNA, 1155 bp, Zea mays
  Peptide Sequence Number=SeqID_67868
atggcgcaccggacagtccggtgcgcccaccggacactgttcggtgcgccagccacgtcaccaggccgttgggttccgactgttggagctctgatttgtgggcccgcctggctgtccggtggtgcaccggacaagtcctgtagactgtccgctgtcgggcctcaaggcgctgttcctgcagcacaacctgctgtccggccccatcccgacgggaatctagaggctcggcggcctcgagcgcctggtcctctcccgcaacaacttgtcgggccccatccccttcgcgctcaacagcctcactgcgctacgcgtgctcaggctcgacggcaaccgcctctccgggagcattcccagcatcagcatcgcgggtctcagctccttcgacgtctccgacaacaacctcaatggctccatccccaaattgctctcgcacttcccgcgagaatccttcgctgggaacttccagctctgcggggacccgcttccgccctgcagcagcccgttctttccccagcgccgtcgcacggtgggcccggccccgcgccgggctcatccaagaagcggaagctctccggggccgcaatcgcgggcatcgtcgtgggcgccgtagtggtggggctcctcctcctcatcgccaccgtgctctgcgtggtgtccaaacgtcgtggcgccggctcccgtgacatccgcggtggccagggggcagcccccgccggcgtccggcgtgggcggcgtcttgacgtcctcgtccaaggaggacctcggaggcgacgcattcgggtcggccacggcagtcgcggcggcggccgccgccgccgtgggggagcagagtcgactggtgttcgttgggaagggcgccgggtgctgggcaaaggcagcgtggggacgtcgtacaaggcggtgctggaggaaggcacgacggtggtggtgaagcggctcaaggacgtggcggtgcagcggcgcgagttcgacgcgcacatggaggtgctcggcaaggtggagcaccggaacgtgctccccgtccgcgcctactacttctccaaggacgagaagctcctcgtctacgactacctccccaacggcagcctctctgccatgcaccacggtcagtgtccaacctcttttcatcctcacgcttgcattgcgtcgccgtag

SEQ ID NO: 24494 - DNA, 348 bp, Zea mays
  Peptide Sequence Number=SeqID_67869
atgaagggaaagaagcaaatagaaaggtcaagcttctcaagtgaagataaaagatatgaggatgaggatgatgatgatgataatcaagcctccacctcatcttccaaagccgatgaagaggcaatccaaagagttagaaaagtgttgagaatgatacataaggttaatctaatgggtgtgcccattcaagttaaagacatcttgttcaacattgatagaatagagcaaagaaagaagagatacttcgagtgcgacatgaagggtcattattgggataattgtccaaacacgaccacgtacaagaaaaataagggaaaaggtcaagctctaacttcaaccaagaattag

SEQ ID NO: 24495 - DNA, 384 bp, Zea mays
  Peptide Sequence Number=SeqID_67870
atggccttcgtctggcccctgctcaagccctcgaccacccctccgcacggccgtccggccatggccgaagatagcccgtccctacgtgacctgggcgagttcgcacctgcaggacagccggccaggccgtgtgatctgcccggcgcggccaacccagtgtggctcgcctgcgcggccccggctcagcctcgtcgcgagctcgcctcgccatccgtcgtcgtcggaaggaatcgacagtcaagcttcggcgaccaagagatcgaactcttcgagttctacgaggctgaagatcctgagcatctgtttggtgaaggcaagggactcgggctgtttcccgagtacctctccgtaaggacctgttcgttgagagaccacccgggataa

SEQ ID NO: 24496 - DNA, 813 bp, Zea mays
  Peptide Sequence Number=SeqID_67871
atggaggatgaaaaaaaactcaccagagatgaagaagatagtcgaggcggtgcggttgaggatagagcgaggcgcagcacagcagggacggctccaactcttcctatcgtaactgtgttcacgcgcgggaagcggctaggaggcgagccgcgtgcgccgcgctgggcgagctcgccggcgagggctggtgtgcgacacgggacctgggcgctgtccgctggctgtcaccacgccgccgcgccggggcaaggtgtggccacggcaggggcgagaggtggaggcgagctaggtgagggcaaaggagagaccgcacagagacggcaaggaaaggcctggctgcgtggaagtttggagcagggagaggagcatcgggtggttccgaagtttttggcatcatggacgctggtgacggcgtcatgttcaggacccattgatgcaattcttgaggatctcttggacctgcgggtttggacccacgcacgctttcgctctctgatcttgttggttgatgttgattgcattgtcttcattgggggtgtcaaagaagggggagcagtcaatgatgaaatagatgaggcattatcctcttacagggatggaaaagaggaggtttcaaagggtatgttcaaggagaggcttttaaaggataagttcaaggagattggagattttgataacagaaataatgtaatcaccaaggtatggccgagagatgggaaaggtaaaggcaacactaacagaagcacaacaaaggatggagttgaaaactcgcaagcgacaaggaagaggatacgaccaagagaaaataggtaa

SEQ ID NO: 24497 - DNA, 519 bp, Zea mays
  Peptide Sequence Number=SeqID_67872
atggccttcgtctggcccctgctcaagccctcgaccacccctccgcacggccgtccggccatggccgaagatagcccgtccctacgtgacctgggcgagttcgcacctgcaggacagccggccaggccgtgtgatctgcccggcgcggccaaaccagtgtggctcgcctgcgcggccccggctcagcctcgtcgcgagctcgcctcgccatccgtcgtcgtcggaaggaatcgacagtcaagcttcggcgaccaagagatcgaactcttcgagttctacgaggctgaagatcctgagcatctgtttggtgaaggcaaaggaactagaggtgtagttgcttcgccgtcgtgccgtcaatggggtccaggcacagtgcttgctctgccgaggctgagtgccgagagggtaatgaaactgatatatcagccgtgcttgcggttaagagcagccttgggatcctctttgattagagatactccggaatacacctcagatgatgactttaatgatgatggttaa

SEQ ID NO: 24498 - DNA, 435 bp, Zea mays
  Peptide Sequence Number=SeqID_67873
atggatgccatcgcatatgatgggatcggtgatggtgacgccggcatggatagcatgtgtatgggcactccttgtgttgctgtcgcccccggtatgaggaagggcatagagtggcggctgtggtgggggtatgattccagcgtgagtattggcgtaggtgtggtggaaactggtggagagatggtggtggacggccctggaacagtggaaggcgatggtggcggtgggtggctggtgaatggaggatcgctggacatagctgataccaggttgataggattcctattcctaccagggacctccctcaagctgtactggtgtactgctggaggttggcgggggactgggcgagagggacgccgggacgccgtgttcacggcgtgggaaaacaggctagctcaggttccggcttccacagggaagacggctaggtaa

SEQ ID NO: 24499 - DNA, 387 bp, Zea mays
  Peptide Sequence Number=SeqID_67874
atggaggacttgtggaccaacataagggttgatctcgcaaagatgcaagcgacgctccaaaaggttgagcaagggctgctgcaaatcaagatagcagtgcaacatgagcaggaccagttggcgttgtctgcgcggctccggacgtcgacgactgtgggcatacaagctgctgctcgtggcttccttgcgcgacggagagtgcgggagatgcgccggtgtctggttttgggtcaagtagactcggtctttgagcacacgtcatgctgcaactcgaggacgagctgcttatccaggaggggtgtagtgtcagggcctaaggaggcccacggaggggctgtgacagcagcaaccatgggccctccaagaggattagataaggatagttag

SEQ ID NO: 24500 - DNA, 537 bp, Zea mays
  Peptide Sequence Number=SeqID_67875
atgaagcagaaaagggcgaaagttacaacgaagcgtcgaaaagtcaacttcataaagggggaaatagttatcgaaccaaggctacccatggagcttggatttgttaaggaaattgtcatcgagccaaaattagtttttgagtcgaaggtctctagctctttaggaacgacgaaggaaaagaaagaagatgatagagaggtggatgagttacctatccgggacaaggtcctcatagccagcatgcaaccagaaccaaagtcgaaagcggctaccaaggggacgctgaggaaaggtagcagaatgaccttagtaatggacatactctttggtacaatgactactgaagagccttccaatcctgagccgacaccaggctccccaaaggaaaagagtgcacaagatactaaggatacattagttttagttgcactaaagggtattgtccaagagaaagcggaggccaagggagatgagaagactgaagtgcatgttacaaaagaaaacgccgacaaacgagcaaacaattgggcctactga

SEQ ID NO: 24501 - DNA, 330 bp, Zea mays
  Peptide Sequence Number=SeqID_67876
atggcggcgcagttggagaagcacgcagccatgaggctagaagagcatgcggcaaccagggacgaagacgagcgggagcgagagtgcgcgttccgaaaagcacgcggtgctgcgcagcaggatgaggacatgctctattctctccagcagcgtcctctaaacgaggatgttgggacgaggacgagtgggaccgcacattcaaagaagcgcgcggcgctgtgcagcgctagcacacgtggcagcatcgagcggacgaaggtggccgacgaagcggacgaaggtggccgttaccgtcggccactgatatttgatcataacggtgaaggttaa

SEQ ID NO: 24502 - DNA, 179 bp, Zea mays
  Peptide Sequence Number=SeqID_67877
atgtccggtgcaccagccacgtcaccaaagccgttgcaatttgaccgttggagttctgacttctgggcccgcctggatgtccggtggcgcaccggacatgtactgttgagtgtccggtgcgccagtatgggcgtgcctgacgactgcgcgcttctggcgcgcattaaatgcgcctgcag

SEQ ID NO: 24503 - DNA, 522 bp, Zea mays
  Peptide Sequence Number=SeqID_67878
atggatggaaggccacggtctcttcctcattcacgcccgacgtccaaggctcgacgaacttccatggagacggccctagatgcgatcgggagatcgcctcctgcctctcgcccggatccgcgaaggtctgcaatgctaccaggtgctgcggctcctcagtcgatccaagcacaggcacttcgtcatcgaacgatggcaactaatgtcaatctccattcatcatccagggcaccggctatataccagcaagatcccttggggactgctgatgattacagcgcattgcctggttactacacttccctactaagccaacaaacagaagatgtttttccatatgaaaataatttagacacatatctcaatataagtaaagatgctattgttggaagagatcaaaaagagggtaggttttgggaaagaattgagaattactttcatgacaacaagacatttgagacagatcgcaacgcatcatcgttgaagcatcgatgggctataattcataaagaggagccttga

SEQ ID NO: 24504 - DNA, 204 bp, Zea mays
  Peptide Sequence Number=SeqID_67879
atggcgctcggcggtattgagactaacagttcgatcaaagctaaaggggtcacgtccgttgagtcaaccatcgggactaaggccactcgtatcatcctaaaaacacttggagttgctcttagtgctcaattgattagtgacggcacaatggttccttgtcaagatcataaaaactcgtttacgatggagcaagggccaacctag

SEQ ID NO: 24505 - DNA, 123 bp, Zea mays
  Peptide Sequence Number=SeqID_67880
atggtcacccggtcggccatcaccaagcggaagaggtggcggcggaggaactgggtgcgcggtttcctttctctggctattccatcgggttgcgaaaacgggtcggaaaaggggatactctga

SEQ ID NO: 24506 - DNA, 633 bp, Zea mays
  Peptide Sequence Number=SeqID_67881
atggccgtccccgtcgtcgtcgaagaagaagaggaaagattcggcgggcgccggccgagagccagcagacgacgtcagagagcggaggcccgtccaagctctaggaagcttcctggcagccattcgttcgtgacgcccggtgcggtcaggtcggcatcgggggcaacccacccgccacggcagtcggcggccccgacgaacgtcagtgcgtcatccgtgccgtacccggctccggcgccactaaacttacgtggccaacaggccaagcacaacgggccgctagctcagctgggcgtagcctgtaccagcaaccaaccaacccagacggccaaaccaaagacgcccacagcacaacgtcgcgggggccgcggcaagcgcacgtcgtgctcgacggccggatcgggcggaaggaagcttcgcggcagcttcgtcctgggggcgcggagtgggggcgaccagccctccaccgagcaaccctgcgaggcggagaagacggctaagtcctcgctgagcaagcttgcgaggcggaacggacgaccaattccccgccgagcaaccctacgaggcggagcggctgaccaagtcatcgacgagcaaccctacgaggcggagcggccgaccaagtccccgtag

SEQ ID NO: 24507 - DNA, 804 bp, Zea mays
  Peptide Sequence Number=SeqID_67882
atggttgggcatgcacgtccgtttgcccagtcccagtcccaggcaagagaagcgtcgcacggaaacctcgtcggtccggtcggcaccgcggcgcggaggaggccgacgacgagccaagataagataagcacggcgcacgggccgcgccgaggcaacccagtacgctacactgaccgatgtgatagggacggcgacgagaggctacgcccagctgagctagcggcccgttgtgcttggcctgttggccacgtggcgacgacgtcaatttgtagcgccagtaaaaacttgacacttgtgcagtactacttccagaacctggcagacacgacagcgatagcagccatcggtaacaaaatatcaggacgcggttgctttgatcacgtctcgctgctctcactgtattcgcccgcctctcagagaaacccgccgaatctttcctcttcttcttcgacgacgacggggacggccatcattgccgcgagcatgctgcagcagtccaaacagctgcaacagtgtcggcttgcagccagccgaacacgccctttttttaggcgcgtacggcacggccattgtgcctctcgtgtcctttctccgcggggaggaacaacaggcgcgtgctctcgccaactcttgcgcgccgttgccaacttggatggaatggaacaggcaaaaggcgcgagcgacgcccccatgtggccgcggtccaaagcggcatctccgatggcgatgcggggaccattcgcccgatgctccggcacatgtggtggcccccgtgactgtatgttccttttaaaagagtcgtaa

SEQ ID NO: 24508 - DNA, 564 bp, Zea mays
  Peptide Sequence Number=SeqID_67883
atggcccgaccaggaggaggtggcggactggcggcggctctcggtccagagcatggactcggcggctctcggtccagagcacggactcgtcctggtagtctgggttgtagggcaccagcttcacgaggtgaccctgccctagtgccctgtggagtgcttgagcgcctcaccggtgaccatgttgacgaaggctggatagccttcctcgtcccgcacatgggtgctatgccgcatgtccatgacccactgctagtactcgtcccgcgggttggtgggcaccaggcacaccgtcctgttgtgcgccatgaggctgtagtcctcgccgtcggccttgcagaagacgcgcacggtgtagaaggcgtcgaagttgagacaggtaacaaatcccgcgagaaactaggaaccctaactgactctgcgcacgcgcggaccgtccggcctcaaggctggaccgtccgcgaggctctttttagctttcaacaccattttgtcgatgagggcgacagtgacccagtagtagccggggaaggcaccgaggagtgcgacgaggaacatggcctttga

SEQ ID NO: 24509 - DNA, 342 bp, Zea mays
  Peptide Sequence Number=SeqID_67884
atgtgctcgacttcaggaggtgattggaaggtgatccaagccatgtatgcttcacaatcaagggcacatattatgtatcttcgctccaagcttgcaagcacaaggaaggacgaccagtctacgatagcttacttcaccaagatgaagtcttatggcgatgagatggcgacatctagtaagaagctatatgtaccaatgtcacgacatgtggtggttcccaaggaagaggaggatgtgatggtggtcatgttgttagaaatggctttggtcatggtcgcggacaagggctcaatgcaccaggagacacaaggccaatgtttcagttatgtatttcaagaatga

SEQ ID NO: 24510 - DNA, 396 bp, Zea mays
  Peptide Sequence Number=SeqID_67885
atggcgcccttccccaacggctgccgagatgcacacgctgaggctgccgccctcgccccacatcctcgcccgccttcaacgtcggcagccgcaccacaaattcatccacacacgctgctttctcccgaccaacggcgcccttccccaacggctgcgaacgccaacgcgcttccccaatcgctgcgccttcgactaggtgcttcggtagaaggtaccttggagaggaccagcaaggacttgagaaaggccaaggggttgaggaggaggagcaagggcggccacaacaggaaggagatcaagtccgactcggctgcgactccatctcgggttccaggaccagtctgcactaaaatgaacgcccaggatgcatccagactccgattgcgacggacttga

SEQ ID NO: 24511 - DNA, 675 bp, Zea mays
  Peptide Sequence Number=SeqID_67886
atgaactcaggaacatgtgaggatttagagtggttcgggccgccggagcgtaacaccctactccaagaccgcgtggcccagaggccttacgtcaggctccgcctgctggcttacgtcatgggcaacaagccacgtggcagcatcgggtctccgtctgagcggggagcgcaagcacacaggataaagcttggacacgtgtcagtaccagacccttgcttaggccagggtatccccagtcccgggacctcgctgtgggtggcctggaccccgctcagaggggtccagacctcacccaaggggtccgtcttgcttgcatgggagccctggtccatactcggagatccgggtcatgagtataggggtccggcgctttctcgaggaggtccgaacctactgaagccccgaggaggcgcggtattggcgcgagcagcggttcaacttctctgtacgcacgaaccgacgcccaaggaggatgaatcatgggcccaggcccccgtgccagatactgagttgtcggttttgacgggggcgaagaggcgcactaccgcaggcgatggcgcgctcttcacgtgccagttcgccttctccacacacagaaaccggcgcgccaggtgcatgacatgtgggcctgggcccccatgccaggggttggactgttggttgtggcaaagatga

SEQ ID NO: 24512 - DNA, 492 bp, Zea mays
  Peptide Sequence Number=SeqID_67887
atgggggccatcggagacccaaaactcgattggagtgggtataagatgagttttgcacccatgatgagtatgaggatagggatagggttagggatgggtaagctgtcagtgtttggagcccgaccgcgcacccagggttaccccttgaggtgcttttggggggtgtggaccgacaaggtggtgcgagcgaggtggaccgacgtgtggtgcgagcgaggcgtggcgatcctggctctccttatcttagtgccgatagagaggatgagtgttctggcggatagagtctgccggcagtggtctatcgagaagctctccaacgatggattcagcagggacatgcgcgtcagcgacagattcagtggcgaaggacgcggatctagtgacgacggcgtggatccaaaggtggtggtggcggcagaggtggtgcggggccgggctcgatgggctaccgggctcagatactcttatttaaatcttaaaactatttactga

SEQ ID NO: 24513 - DNA, 168 bp, Zea mays
  Peptide Sequence Number=SeqID_67888
atggcaaggagccgggagaagctgatttctcgaacgagaacaaggagaaaaggaaagattgggaggacaacgctcggcgaatacattcgcggtgaaggattagatgttttgggagctgttggagatgctcttacaaccgacgtaaggccttcgttaatcaatgattaa

SEQ ID NO: 24514 - DNA, 93 bp, Zea mays
  Peptide Sequence Number=SeqID_67889
atggattggctaagcaagtctggtgttcactggagctactttgtagaggctgctcctttttgtgcagtaatacacagtaacctgtgggagtga

SEQ ID NO: 24515 - DNA, 96 bp, Zea mays
  Peptide Sequence Number=SeqID_67890
atggcgatgggtaatagcagtgtttgggtccagggacacagcatgggtgcgagagcggggaagggagcgacggtggtgcatggtatcttcctctag

SEQ ID NO: 24516 - DNA, 633 bp, Zea mays
  Peptide Sequence Number=SeqID_67891
atggcgcgcatgctgaggtggtcgccaccgctgggggaggctgcccggcgtagagaggtggtcacctcagctggtgagtcgctcagagcagaggtggccgccgccgctggcgaaccggtgagccgcccagagctagcttccaacgtgaccctgctggacaccagtcacagagtggtggagcgtgccggcccacggtacgggatcaggctgagcggctacatggctccagaccaccccaggagacaagaccaggctaagcagccacacaggctccggacctccccatggaacgggctcccgttctttaaaaccatcccccaggctatcgggccctcctgctttcgcaaagaggtcctaaactgcaagcctggctgttcaattcggatgccatcataccaacaggccgggcttatgagggtggacctcaccgggctggtgtacacgtatgcattacctagttacaaaagggagaaaaattcgaccccaagacttgctcctatggatagaacttacagagatgctccagtggtcaggaagagagcccttcttggtttggtacttgccgtaagactaggtcccgaccctgggttcccatctgcgtttgatgacagagtcctcgtcctcatgctgtag

SEQ ID NO: 24517 - DNA, 147 bp, Zea mays
  Peptide Sequence Number=SeqID_67892
atggagaaaaagaagaaggcctgtagcaagcttgtggaagttcgcaagaggaagatgctcctcaagagccagattttgttgaagctccatctcctcgaagagtctgcaaagcaaagatttgtagctgaagtaaagctatacccataa

SEQ ID NO: 24518 - DNA, 402 bp, Zea mays
  Peptide Sequence Number=SeqID_67893
atgaaggcccggtcccacataccatgcaaccggcgcgatggtcactacgtgcagggaaaccacaccgccacctgcgccaatgttgcatcttctcgactgcggaaccagtgccgcgactcgaggcagccccaacagtgccaattgagtgcagcggtcacgggtcagccactcgcgggggaccgagaaaggggatattttgaaagggatccttctccgcgaagggaatgggcaccgagccctcctactgatcaggggttcgaatgctggcccctcggaagggttcgacagccgccccagagcacccgggctccacgcccattactgatcaggggttcgaaggctggcccctcagaagggttcgacagccgctccaaagcactcgagctccacgcccattactga

SEQ ID NO: 24519 - DNA, 1059 bp, Zea mays
  Peptide Sequence Number=SeqID_67894
atggggcgcaccggtgtcgccttgctcctgctatcgttagaggagcgtggcctcgtggagattggtgctcttcagccatcgctcggcttcaaggattttcgtcatgcagcccggctgcattccctcaccaatggtcagtttggtgcttcaaagatcttcgtcatccgggctgaggcggaggagcgcaccgagtggggggcgcctccgcgtgggtcggtgacccttttcttcccccagcgttcgggggagaagggcatcctccagccctacggaggcatcctccaaccatgcggggaaggcaaactgctgttctctggccagggtgcagctttccgtcctcctcctaggcggcggtcgtgccgcgcgctggtggctactatcaccgcccttgtggaggggcggacttcgacaacgtgggtccagtcggtcgtaggcgtcgtcatctgcagcgtgcccggctcgctggctcgagcgccgcctccgacgcttcctcctaccgctcggcccatctgcgaggacttgagtggggatctgtcggcgcaggctggggcggccgccgttcgctggcgcggtgttggcgtgcaggtggccgctgtcatcggtgctgaggtggtgatcgccataggtgaggcttcctcttgcaccagcggttgtgtctgccgacgagaccgtcggtgccacctgcggctggacctccgactcttcggccttaacggcttgtcctcgcccctcgtgtggggatgtgggcgagggccttttcacaacagcgtctgtcctaagaaccttcggctgctctacgatgagccgaagctgaaggcagcggtggcgtggacagaggcgatgtcggctcgaacagaggctttctcggcatgggagcaggtggcttcccaggccgaggaggtgcagcagcggcagctggggtttggccagatcactcgcgagcaggaccaatcccggagccaagccgtcgaagccatgagccgggctgagatcctcgggggacagctggctggggcttcggagcggctggccgaggcgcctgctcgcatcgccgtctga

SEQ ID NO: 24520 - DNA, 406 bp, Zea mays
  Peptide Sequence Number=SeqID_67895
atggctgagagctccccctacgtgcgcccccaagcgccgcgggccgagtcttctccaacacgctccaaggccctcccctgcgactcgggggctgggtcccgcatgtcatgcaagccggctcagggcagaagaagccaaaccgccgcgcatgggaccgggaaagggggataccccgaaagggatccttctccgcgaaggaaccgggctccgagccccccattactgatcaggggttcgaaggctggccccccgagggttcaacagtcgcctcagatcgcgtgggcccgacacccactactggtcaggggttcgaaggccagccccccgaagggcttcatggccgcctcaggctactcgggctccgcgcccattactgatcaggggttcgaaggctggcccccgaagg

SEQ ID NO: 24521 - DNA, 1467 bp, Zea mays
  Peptide Sequence Number=SeqID_67896
atgcttctggctttttacaccgagaagctggtgagaagctcaaacaaacagggaagaatctcctctgaggaagccgcttgcaccggggaacctggcctgcctcattgtggagactccacagttcacatgacagttgagtctcaaaagagcagagttttgggagcaatgtcatcctctttgcctattctgccaaatcctttgaaagggagcttctcaaggcctcataacccccagcatattcctatgttgaggcagctgcctgatgactctatgcccttgtgtattgacacacatcagtctgctagtttgcacccaagagctggtgttatcggggtaccatattcaggctacactgctagtccacttgattctgtgtctaaccttgatagccagacaatggctgcaccctttatttctcagtcatccaattttgaagctctccagtctctatctaataataccccagaaacacacactaaggcagcctggttcacatcttctatggatgtttcaccactcaacacagataatattgctgcttctgatgttaatcaaatccagagtatacgtcctgctatgacatctgatgagagtgctacacaaaacgattggtgggcagatataatgaatgatgattggaaagatattcttgacgcaacagctactgattcccactcaaaagccatgattcaaatttccaactcagctacatcactacctgcagtaaatcagtcagcttcatctcatagtagggagatttgtcctgttgctagtcctcccaatagcagcaatgcttcagttgccaaacaacggatgagatggaccccagaactccatgaatgttttgtagatgctgtaaatcagcttggcggtagcgaaaaagctactcctaagggtgtgctaaagcttatgaaagttgatggtttgactatatatcatgtcaaaagccacctgcagaagtaccgcacagcccgctataaaccagacctgtcagaaggtacatcggaaaaaaggacagccactgaagagctggtcctggacctgaaaacgagcatggatcttactgaagcactgcgccttcagatggaagtccagaaacggcttcatgaacagcttgagattcagcgaaaattgcagttgcggattgaagagcaaggaaagtatctgcagatgatgtttgaaaagcagagtcaatcgagcacggagaaagtccaggatccatcctcaagggatacaacagctaaaccgtcatctaatcagagccagtctacaaacaaggattgtggtgcaaccatggacccaaatggaacaggaggcatcgtacggactgcagaactgggagaacgttcgtctgaattaggtgtaaaacagaaactcgtagagatcgaagaatctggtaccgaagtagccacaggcgacagatctaagatctcccaagagaagcggcgcaaactgcaagatagttaa

SEQ ID NO: 24522 - DNA, 573 bp, Zea mays
  Peptide Sequence Number=SeqID_67897
atgaacgaactcactggcattcgaagtgccattacaaacggaactccggttccccctccgcaggtacagacaaccccactccgagggggaaggcctgcggagcaacggaaggccgacgagtggtgcgccgtcgcccgctccagcagcagcgacgacaacgccttctgctccgagggaccaagcagcggcagcgccagcctcgggctcgatgccgctgccaggaagcccccgcccatgccaaaacttgggaggcaaggacgggcagaaggccatagagtcggagggaccggggaagggggataccccgagagggatccttctccgcgaaggaaccgggctccgcgccccccattactaatcaggggttcgaaggctggccccccgagggttcaacagccgcctcagatcgcgtgggcccgacacccactactggtcaggggttcgaaggccagccccccgaagggctccatggccgcctcaggctactcgggctccgcgcccattactgatcaggggttcgaaggctggcccccgaagggttcacagtcgcctcagacaccgagcgagggatga

SEQ ID NO: 24523 - DNA, 141 bp, Zea mays
  Peptide Sequence Number=SeqID_67898
atgggggcagcagcgtgcactgaggggcatttcgtcgagcagaccgagcgaagaggagagtggcttggggcttgctgttgtgatggggcggacagcgaggtagagcatgtcggcaacggtgcgcaaggtcacgccatgtag

SEQ ID NO: 24524 - DNA, 849 bp, Zea mays
  Peptide Sequence Number=SeqID_67899
atggatcctggcacacatatggtatacgctcggttctacctcctagaaccgggtgtgacagaagtgatggttcgcactctccaaaccactcgcgtcaacaccagctacgcccctcagccccggcagatcccggtctacccagtggtagtcgaggaagctccagcgaatctccctcccgtccgagtggagaacgtaatcaacctagaggacagctcggaggagcagctgccgacccccaccccgttggctgagtctctggccttcgcagctgggtcatcgacgtcagcatcgtcgtcaccagccttccaagcacctgcacctagaggcgacgaccccgacgactccggagacggcgatgacgaggatgacgacaacgaagacgatggagaagacggacacatcaatgaggaagatgactacgcccagcaggacaacttcatggggtttggtcctgttgtcgaacattatacatcaatgttcaagacgggcacttccccaacctgctgcaggaggactctgtctgctcacgagtccctgataccgctgtccacctacgctgcctctgtcagcgatgctgcccgtcggaccctgtggtcgctcagccacacctaccggcagcagctgcagaacacgaggttcaggcatcttcctcagcgcctgcgtggagaaagccagaccaacattgtcccaggtgaacctggtgaggatcgcctcaacaccctagctgccctagaagcccaactgcaaggactggatccgccagaagctcaggtccccgccgtggcgctgtctcctccccgcaagaggctgcgctatggagagcccggatccgtcactaggctgctttag

SEQ ID NO: 24525 - DNA, 270 bp, Zea mays
  Peptide Sequence Number=SeqID_67900
atggtgtcagcacatgctgtgtttgataggatgccgatgagggatgccatctcttggaatctcatgatctcagggtatgcatcctacgtggctgcatgcgccgctatggacgacaagcttcggcacagccgtcacttggacgcgatacagagcggctgcactgcgttgtccatcgtcaagcagggggaccttatggtcatcaccaacgtcggcgactctctggttgttctgggcaccgcattcgaagatggcgccatcacgaccgtctag

SEQ ID NO: 24526 - DNA, 1470 bp, Zea mays
  Peptide Sequence Number=SeqID_67901
atggccctctccacgcccacgccagcgcgagcagagcagcctgacatcaccagatgtcatcgagggggcgaggtgcgggagggcgacctggtgcagttcaactacgtgtgccgccgcgcgaacgactacttcgtgcacaggtgcgtggtggagttcccagacgccatagcgttgctgttcgacgcgtgcactggagatgcgtgctgcacagctccagactttgagtcagatcgagtccagattcaccaaatgtgtcagggtgcccaaatggttcaaggatactgcgtccgtctcatggtggggaaattgttcgtagttgagaacgccgctgtgggcagcgaggtggagcaggaggagccaaagaaggaggcaatggcaggagtaggggagactctccgcagcttcatggaggggtttggggatcaaggagaggactccattatcttgtcaccgcggttgaaggagattagtactcctgaccgccccgctgccctccgtttcctaggcgaacggttttctaagatttttggaagtccttattacatggctccagaggtgctaaagagaaactatggcccagaggttgatgtttggagtgcaggagtgattctgtacattcttctttgtggtgtccccccattctgggcagaaacggaacagggtgttgctcaggcaatcattcgatctgtcattgatttcaaaagagatccatgggcaagggtgtctgataacgccaaagaccttgtcagaggaatgctgaatccggaccaaaaacgacgattgatagctcaccaagtgcttggtcacccatggttgcagaacattaagaaggctccaaatgttaatttgggtgaaaccgttaaggccagactccaacaattctctgtgatgaacaagttcaagaagcatgcacttagggttatagctgagcatctttgggtagaagaggctgctgacataaaggatatgtttgagaagatggatcttaacaaggatcaaatgcttagtttcgaggagctgaagcttggtctgcataagtttggtcaacaaatgcctgatgcagatgttcaaacactaatggaagcggcggatgctgatggaaatgggtccttgaattatggagaatttgttacattatttgttcatctaagaaagatcggaaatgatgagcatctgcataaggcatttgcatacttcgaccggaaccagagcgattatattgaaattgatgaactccgtgagtcattagctgatgaccttggacaaaaccgtgaagagattatcaatgccatcatccgtgatgtagacaccgataaggatggcaagttaagctatgatgagtttgcgacgatgatgaaggccggaacagacgggaggaaagcatccagacagtactcgagagagcggttcacaagcctgagccttaagctgcaaaaggatggatcgctgcagatgacgattacacggtag

SEQ ID NO: 24527 - DNA, 354 bp, Zea mays
  Peptide Sequence Number=SeqID_67902
atggagacggtgatgccgaaggcagagaaggtgaagggcgagatctgcaccacgggtaatgaaattgcaatgaaaaagccaaatgacaaacgaattaggtctgcagttcatacaatttgggtgaaaataagggtgaaagaaaagctcgatgtcgtgggacacgagaaccggttcctgtcctctgagtcccggcgcctcgaggtcctcgtgtcccaggctcgcgaggaggtcgccgtcgccgagcaagtcgccgccaccaatgagagcgaggccgccacgctccgcgccgaggtcgagcgtctccagggcctcctagccgcagagaataccagaaacttcaggacgagtccttga

SEQ ID NO: 24528 - DNA, 357 bp, Zea mays
  Peptide Sequence Number=SeqID_67903
atgggacacaggaagaaggccagcgtcgagctcctggccatgggaggcgctgctccttgcttggggaagaagggcgccgccgagggaggtgaagccaagggtaaggggttgcgcgcccatggaggagaggaggagctgctgctcgcctgcacttggagactccctgctgctggcgaggacgctgctggcattccattggtcgggatgggcggcatttcttactggccggctgcagccattggtgcaggatttggtggccagccactggccgggggctggcagtggcagactgtctacgccacgcggtggcgctgccggcagtggcatgcgggcacgagaaaagaaaacagatgctga

SEQ ID NO: 24529 - DNA, 1728 bp, Zea mays
  Peptide Sequence Number=SeqID_67904
atgaaggcgacggcgccgccggcgaagcggcggaggggcccgcggctggcggtgctggcgctcgtgttctgttcgctgctcgtgccgatcgccttcctcttcaaccgcttccccgccgtatatgtgacagatgagcgccctcagcaggagattgacttgccttcgttcgatcgtgtggtatttgaaaatggtggctctgtaaatgaagatgtgtccaagaagacttccaggagcactagtgtgtcgcaccgtggtattgatagtgacccttccatagttagcactaaaccaaaagctatagttctacggcctccaaaaattgaacaggtcctcccccctccaaaagttgaacccaatccagaagtgaagccagtacttgtaccagttccagttcatcaaaacaaaaaaattaaccttgacaagattaggcctcccagagttcaaagtgctgatgaggtggaaaaggctaaggcttgtcaacttgagtttgggagttactgtctctggtctatagagcacaaagaagttatgatagataccattgtgaaaaggctgaaagatcagctatttgtagcccgatcttactaccctagcattgcaaaacttaaaggaaaggagacattgactcgcgagctgaagcaaaatattcaagaacacgagagggtacttagtgaatccattgttgatgctgatctaccatcctttataaaaacgaagctagagaggatggaccaatcaatagcaagagccaaatcatgcactgtggattgtaacaatgttgacagaaagcttcgtcaaattcttcatatgacagaggatgaagctcattttcatatgaagcagagtgcatacctatacaaccttggtgttcacaccatgcctaaaagtcatcattgtcttaatatgaggttgacagtagagtactttaaatccatgccattggatccaaatgactcttctgcccataagtttaaccttccagacaataggcactatgttatattatctaaaaatgtccttgctgcttctgttgtcatcaactcaactgttagtagctctgaggatactgaaaatgtagtatttcatgtactgactgactctcaaaatttttatgccatgaagcactggtttgcaagaaactcctacagggaatcagctgtcaatgtcataaattatgaacaaattatttttgagaatttccctgagtttggaacccagcagttatatttgcctgaggaatttcgtgttctcatcagtagccttgagaggcctactgagaagagtagaatggaatatttgtcagtgttcagtcactcacatttctttcttgccgaaatattcaaagatttaaagaaggtaattgtgttggatgatgatgtggttgttcaacgtgatatttctttcttgtggaatcttgatatgggagagaaggtcaatggtgctatcagtttttgtggtttgaaacttggtcaactgaggaaccttttgggtaggacaatgtatgatcaacagtcatgtgcatggatgtctggggttaatgtgattgatttggacaaatggagagaacataatgttacagagaattacctgcaactcctgagaaagctagcaaatctgttgactaccatggaaccacaacctatttatgattataggaagtactggaagaggtttcttacacgagacgagagattcatggacgagtgcaatttagcggggtttagttaa

SEQ ID NO: 24530 - DNA, 168 bp, Zea mays
  Peptide Sequence Number=SeqID_67905
atgggtaactcacagctctcaaactgggttgaaagaaaggggaggcttctaaaggataagttcaagcataatccatggacagagtcaaggcaagactcaccaaatggcaaggtggagaaaacaatccaggataagataagtgaggttccgacagaagagttgaagtaa

SEQ ID NO: 24531 - DNA, 111 bp, Zea mays
  Peptide Sequence Number=SeqID_67906
atggggtccaagcacagtgcttgctctgccgaggctgggtgccgaggtaaagaagaaggcgtcgaggcggatctccaggagttccaggacttcgacgagttcgaggattag

SEQ ID NO: 24532 - DNA, 549 bp, Zea mays
  Peptide Sequence Number=SeqID_67907
atggcggagctacagcaccgacgaggaattgcgacttacccccaactccatatgcttgaagggtgcccgcaacaccatccatgcgcaccgcgctccaccctggtcgagttcccaaggcccgaacggcatcccaggcgaggttccacggcagcgggtatctcccctccgccgcgagctcaattgtggatgcaacacgcgctagatcccggattggatagccaaaaggggttcacggggttgggttatatatcccaggaaggtagagtccgcgagggaggcggcaacccgatcacgcgcggattccgggctggttgcaatgaactcgcggcgatggattcagctgctgctggtggagatggagctgacagcgtggtgcccggtttcagcgacacatgtttgcccatgaacgcgcggctccggctggagagtgggggcggcctggcagagacatcggagcgggcgcgcgcgcgtggtgttactggctgcgggacccacatgtcagatgaggtacgattatggccagtggaggttgtggcaagggtatcataa

SEQ ID NO: 24533 - DNA, 384 bp, Zea mays
  Peptide Sequence Number=SeqID_67908
atggacggccccagggccaccacgtggccagagaagacaatgccctccaaggtatcaacggtgggtccagacccccatgggaaagtaccggacccctgcatatacggaccagacctccaggcaaggtccaggacctccacggatacaaactggaccctcgggacgggtctcggacctctctgtgtggggtccgggccactctcagcagggtcccgggattctaggacaaagaatacccaggccttaatcaaggtcgggcgggggtccgggagccgacacgtgtccggaccataccgtgtacgctactgctccccgctcaggcggagtcccgatgctgccacggggcctaccgcccgtgatgtgatgtcccgtctcagcatttaa

SEQ ID NO: 24534 - DNA, 552 bp, Zea mays
  Peptide Sequence Number=SeqID_67909
atggcagcagcctcgatctgtctcgggtggtgcttgagcttgtgggtcaggtggccggtgtactccggcttgccgttcatgacctcgcagaacacggtggacaggacctcggcgagtagttccgtattcgacacacatctatccgtatttgtatccgagaacattcgtattcgtattcgtatccaaagttatccgtattcgaattcgaatccgaataaaaatataaaaacaaatatggtttcgatgatatccatccgtatccgatccgattacatccctatcggcgaggatggcaaggatgttagcctcgaagagcacagtggaggcaaggctagagcccacggccgtgccgttcaccatcgcaagaccctccttgggctgcagctcgaagaagccgccctggattccggcaattttgaatgcctcggcagcgttgaccttgttgccgtctggggcgagcgcaacagagttctcacacccagtgacgaggccgacaatgtaggagagcggcacgaggtctccagacgcggtgaccgtgccgcgcagcggtag

SEQ ID NO: 24535 - DNA, 972 bp, Zea mays
  Peptide Sequence Number=SeqID_67910
atgggcgaaaggatccagcagcaccccgtgcgcgtggcgatctcggcgtggcgcggcgccttcctcccggccctgccggcgagagcgcggtccgatgaggcgacgaccgttcctggaccagcgacgaccatcgttcaagcgctggtggcagcagcggccgtggtgggtgcgcctcttgttctccctcctcgccctcgcatgcgccctcctcttcgctgtcctcctcggctcccccgaccccgacacctcaccgtccacctccgctgcatcctccggatggtggccgagtaccgccaacccttggtgaagatcgagggcgccagcctcagcatcgcgcaggtggccgtcgtggccaccggcgctggcgaggcccgggtcgagctggacgagtccgcccgtagccgggtcaaggcaagcatcgactgggtcatgaacagcatgatgaacggcaccgacagctacggcgtcaccaccggcttcggtgccacgtcgcacaggaggaccaaggagggcggcgctctccagaggaagctcatcaagttcctcaacgccggcgccttttgcaccagcacggacgaccacgtcctcccgaccgaggcgacacgtgcggccatgctcgtgggttactccgggatccgcttcgagatccttgaggtgatcgtcaagctgctcaacgccaacgtcacgccgtgcctaccgctgcgcggcacggtcaccgcgtctggagacctcgtgccgctctcctacattgtcggcctcgtcactgggtgtgagaactctgttgcgctcgccccagacggcaacaaggtcaacgctgccgaggcattcaaaattgccggaatccagggcggcttcttcgagctgcagcccaaggagggtcttgcgatggtgaacggcacggccgtgggctctagccttgcctccactgtgctcttcgaggctaacatccttgccatcctcgccgatagggat

SEQ ID NO: 24536 - DNA, 1179 bp, Zea mays
  Peptide Sequence Number=SeqID_67911
atggagctcacactccatctcacgcccgccgactggtaccgcaacacctccgacaatgaccttgcctactggggcctggactacccgcccctctccgcctaccagagcctcctccacggccgcatcatcaacacctcactccccgaggccgtcgctctccgctcctcccgtggctacgaatctatggaatcgaagttgctgatgcggtggacggtgctgtcatcggatctgttggtgttcttcccatctgctttgtggtttgtgtgggcgtacatgaaacttggagtcggtattagtggagaggagagacgggaggggtggatgtggctgctagccttggtcctgatcagtccttgcttggtattgatcgatcatggccattttcagtataattgcattagccttggacttacgctcggagcaattgctggtgttttgtcgaagaatgagcttgttggtgcatctctcttcactctcgcaatcaatcacaaacagatgagcctgtactttgcaccagctttttttagccatcttctggggaagtgcctcaaacagaaatatcctattgtcgaagtaacaaaacttgctttcgtggtcttgggaacttttgctcttgtctggtggccatttttgcattcttatgaggctgtccaacagcaagtcaagtctccaagtaatcttggcttcctttattctctgatgaacaactctttctctttctacctattctcataccaagttcatgagaaatcaattttgcttcctcttttacctgcaagtcttttagcactggaagaacctcggatgtacggatggttcgtgtactttgcccttttctcaatgtacccacttatctgccgtgatcagcttcttctacaatacatagctgttcttagcctattctttctgatatactactcacctggcggaagctacggaaagagatcaaacatttcatgcaaggcaaagttagttcttagcttgccatttttatgctcacttctacttcacattacctacctgcaaatagagcctcccaagaggtatcccttcctctttgatgcactgataatgttcgtctgtttttcacaatttgtcatcttagctgtgtacaccaactataagcaatggatgttggactcaaattctagatccataggtgtgaagaaggatctgtga

SEQ ID NO: 24537 - DNA, 1110 bp, Zea mays
  Peptide Sequence Number=SeqID_67912
atgcggcgcctctggcaggagaagcaagcgacgtttcgccttcgccataatgaccgcgtcaaaaaaggaaacaggccccgagcctccctactgatcagaggttcgaaggctggcccctcggaggggttcaacagccgcctcagagcgcttgggttctgcgcccactactggtcagaggttcgaaggccggcccctcggaagagttcaacggccgcctcaggccactcgggctccgcgcccactactgatcagggaatcccatcagagggaggcatcgagccctcggaccccatcgaaaggggaccgggtctggcagatcacccgcagctcaccggagacaccatgttcggcgccctccgagggcaacatggcgctttccccctcctccttgtggaaaggcgatccaagggcggctcggactcgggctcagccccggaagatgacgaactccgcttcgcccgaccccagggctcggactcgggctcagccccgggagacgacgaactccgcttcgcccgaccccagggctcggactcgggctcagccccggaagacgacgaactccgcttcgcgcgaccccagggctcggactcgggctcagccccggaagacaacgaactccgcctcgcccgaccccagggctcggactcgggctcagccccggaagacgacgaactccgcctcgcccgaccccagggctcggactcgggctcagccccggaagacgacgaactccgcctcgcccgaccccagggctcggactcgggctcagccccggaagacgacgaactccgctccgcccgaccccagggctcggactcgggctcagccccggaagacaacgaactccgcttcgcccagccccagggcccggactcagccctggcctcagccgacggtctccgcctcgctcgacccaggggctcggactcgacctcggtctcggaagacagactcaacctcgacctcggaggagcctccacattgcccaacccagggcacggaccgacgacgtcaataggaggcgccatcattaccctacctcgagctgactcaggctacggggaacaagaccggcgtcccatctggctcgctccgccagacaagtaa

SEQ ID NO: 24538 - DNA, 666 bp, Zea mays
  Peptide Sequence Number=SeqID_67913
atgagcatgtacgggagggacccctggggcgggccgctggagatatgccacgactcggccacggacgacgaccgcagccggaacctggacatcgaccggggcgcgctgtcgcggacgctcgacgagacgcagcagagctggctgctggcggggcccggggacccgggccgcaagaagaagaagtacgtcgacatcggttgcctcgtcgtcagccgcaagctcttcgtctggacgctcggggtgctcctcgccgccgccgtattcgcgggggtcgtggccgggatcgccaaggccatccccaggcgccaccgcccgccgccgccgcccgacgactacaccgtcgcgctgcacaaggcgctcatgttcttcaatggccagagatccgggaagcttccgaagcacaacaatataccatggcgtgctgccttctccatgaccctcctcagctggagcgtcattgagtacagtgctaagtacgatgctgctggggaacttggccatgtccgtgacattatcaagtggggttcagattacttcttgaagacctttaattccacagccgatagcattgatcgtgtcgttgcacaggccattgctaatctgaattatggggagggtgcaggtgggaagtactgcaacatcgcccggttcaacgcagcccaatga

SEQ ID NO: 24539 - DNA, 582 bp, Zea mays
  Peptide Sequence Number=SeqID_67914
atgaagtattgggctctgataccaattgaaagtcacctagagggggccttcatcaactcactgcaccaacggaggcaagatgaccggcacggcccacccctcgtcctattcactgcaagacgaaggcctatgacgaagtctctccatcccacgtcctcacccaacctggagacccacgtgtctgtaaccctcccttatgggaatattctggggataatccaggcagccccatccgtcgacgaagcagcgaaggcagcactgctagccgagaaaaagggcaaggtcctcgcagacacaacccaccaagaagcctgcgaagacgacgcactcaacaagagacagcgcaatgatcaacccactctcgaagtcaccctccgcacctgcagctccggaggacaaccacaagaaccaccaccgggcttcgctccactagagggcgaggatgcaacagaggacggcgaagtcaatggcatttcagcagaggaacaactacagctactggcccagcgcatcaagaaccgcaacctccaaaagcagaaagaaatcatcgaggccaagcgccaacgtgtctgcgccagatga

SEQ ID NO: 24540 - DNA, 417 bp, Zea mays
  Peptide Sequence Number=SeqID_67915
atggcgcttcctattgacgcggctggcctgcgccctaggttgggtgatgtggaggctcctccgaagccgaggtcgagtctgtcttccatggccgaggccgagtccgagcccctgggtcgggcgaggcggaggtcgtcggcaaaggccagggcggagtccgacccctggggtcgggcgaagcggagttcgtcgtcttctggggctgagcccgagtccgagccctgggtcgggcggagtggagttcgccgtcttccgggacttagcccgagtccgagccctgggtcgggcgtcggagtggcgcaggcggcgctgtccttctgtgaggccggtcagtggagcggcgaagtgacggcggtcacttcggctctgccggggggcgtgcgtcaggataaaggtgtcaggccacctttgcgttaa

SEQ ID NO: 24541 - DNA, 372 bp, Zea mays
  Peptide Sequence Number=SeqID_67916
atgatgagctcctcctccggtattaagcaagaagggcccaagctgttcagctcgaggaggatcctcgcaagggaccgctcgagcgtggccgtggccgacgcgtccttccgggtatactacagtctcggcgccggcaccgtgccgttcctgtgggagtccaagccaggcacgcccaagagctccgtcaccccgccggcgccggcctcgtcgaccgccggcgccgtgccggtgccgccgatctcgccgccgccgtcctaccagcaggcggtgtcccggtccaaggccaacaagttcgcgaggaagcagaggccagcaagaacctcttggcctcccgcagataattctgttttgatcaacttcacccgggaataa

SEQ ID NO: 24542 - DNA, 591 bp, Zea mays
  Peptide Sequence Number=SeqID_67917
atgtcgtcgtcgagttcgccgccgccgggtgagctaactgtcattgttgtcatgctgcgaggggaggagtaccatgtcgtagctgccgtcaagggacatgaacttgagactcgagaagcggagcaccgtcccgggctaaagaggttgctgaagtctacccatctggaactcaacgggaaaatgttcgttaacacgcagcaggcccctacctggcgcgccaactgtcggcgtttcggactcggggggtccctggaccgacgagtaaatttgtcgctgcgtgtccctgcccagatgggttggataaggtgtcaggcgatcccagcattaaatgcgcatgcacttcggtcggctggtcaggcgatttggccaaggtcgcttgcacaacaaggcttgcctttggctgagccgagggtgtgctcactgcttgaggagaccctcgggcgagacgtgaactcgtccgggaccactgttccgcccgaggctgggctcgagcgaggcgagatcgcgtcccttggtagacgaagctttgactttgacccgaactgtaagcctttatggtttgttctgaaggtgtttaccagccgtgtttag

SEQ ID NO: 24543 - DNA, 2025 bp, Zea mays
  Peptide Sequence Number=SeqID_67918
atggatgaaagagctaccctcggtggtctggagtttgaggacgacgccaagccgggccacgggcttcacgccgtttttcctagtctaaggggtcgaggccatcttacccacggacttggaatacgctggaagaggctcgagacgtggccttactacactcagcgcggtatcagcagtctctacgacgctaccacgcccgaagggttcggccccgaggcttccaagctcaaacatcagcagggggaggagcagcaccctcggcgttgtttccaccctcggcagaatctggcccagcctcagacgacgatgcgagcaaacgcctcggccagtcgctccgaagcctcagctagctgtcccccgaggatctcagcccggctcacggcttcggcagcttggctccgggattggtcccgctcgcgggtgatctggccaaaccccagctgccgctgctgcatctcctcggcctgggaagccacctgctcccgcgccgagaaagcctctgtccgagccgacattgcttctgtccacgccattgctgccttcagcttcggctcatcgcagagcggccgaagcgccctcggaggctttcccgacctacaacagatatctcagtacatggagcaatcacattttgctcctacattccctaacaaacgggactccagctccattcccctgggaatgaactacctccacaccagaggggctgcgaggcggctagacagcagcagcgatggccttagggcaaacgctactgctgaagggccttcgttcacgtccctcacggaggacgagaaccagccattaaagccaaagagccggaggcctggaacgcagctggcgctggcggtctcgtcggcagagacaaccgcttgtgcaagaggaagcctcacctatggcgaccaccacctcagcaccgacgacagcagccacctgcccaccaacaccgagccggcgaacagcggccgccccaaagcacaccgacaggtcctcactcccgtccacgccgagaccgtcctagaacacgagtaccgccctcgcggcatacgacgtgttgagcgaccccccggtgcagccgacggtgcaaggaagacctggacgtggccggcccgcgcgcggcacgaccgccgcccgggtggaggacggaaagctgcaccctggccagggagcagcagttcaccttcgcccgcatggctggaggacgtcacctccgcagggctggaggatgcccttcccctccgaatgctggaggaagaagcgggtcaccagcccacgcgggaggcagatcccagctcggtgcgctcctccacctcagcccggatgacaaagattcttgaagctgagggcggggcggaggctgcagcccggcttgcttctccccaccacaaggctgcaagcaacacctttggtaggcgaagtgagcgacgtttcacctccgccataatggtcgcgtcaaaaaaggttgcgccctgcggggtccagcaaccgccccaaagcacccaggctccgcgcccattactggtcagggtttcgaaggctggcccctcgaaagggttcgacagccgccccagagcacgcagagtgatggatgaccctgggtacgtccgttacatggccgaggctcgggctacgctcctgaggtaccctaggacatttccgagaccagcgggaacgatttgtaatggaatcccaccggagggaggcaccgagccctcgggccctatcgaaatgggcccgggtccagcaaatcccccgcaggaaaacaacgccacccgccccgcttgggctgctgtgccaaccactcgggcgaaagcgacaacggccaagttcagccttgggcgcaacaggaagctccgcctcgcccaaccccaggcctcggcctcggcctcggcttcgggaggagatctccgcctcgcccaaccccagggctcggcctcgagaagagtcacgccctcgcctgaccctgggtctcggccccggcctcggcctcggaggagccaccgcctcgcccgacctcaggcttag

SEQ ID NO: 24544 - DNA, 306 bp, Zea mays
  Peptide Sequence Number=SeqID_67919
atgccatcagtccccgcaaacatcgcgccggcaaggaacatctaccacgctcgccgccaacaacctctacaccatcctccggaggtgctggagaagatgcaggcgccgatcaaggaccccacgatccccgtgaacgcgtcggccgcggagctgcaggaggctgacggggtgttgtttggcttcccgacgagacaaaatgttgtggagtcgtacactgttccatttcaaatgccgccattcccaaaacatatattcttggaggccctggcggcggtacaaggtgtcaacataattgcttatgattaa

SEQ ID NO: 24545 - DNA, 528 bp, Zea mays
  Peptide Sequence Number=SeqID_67920
atggagcgattccctcaaattgattggtgccatctaatttttagtgacttatgtgaggctgcacagagatggcacaacaggagcattaacaatgtgtcggcgacgatatatggttgttccatcgttgttcttttgtattatttggatcatttgcactatgctgctgctccaaacaacaaaaatggcactccgcgcataaagtattttaataagaatattataagggcgttgtcaatggccgataagcggaagcctcgccagggtggtgaaccatttggtgtttgcccttttcggagcagcagtgagacatgttatgtctcaaaatcgccatctactggtcagattgagcaaggtcagacagtggtaggtggcacagttgaccatgattctggaccagtatttgacaagactcctattgggagtgtttttgcaccaggcctcttcttatctgaattagaatgtgctcgcgctcttcgggcatacttgtgttctaggttcattgaattggacagatttagccttgaatag

SEQ ID NO: 24546 - DNA, 1419 bp, Zea mays
  Peptide Sequence Number=SeqID_67921
atggccagattcacgctgttctgctccggcatgtcagcatgtgacgaggacgccaccatcctctgcacctcaaaagtgagagcgagagcccccccctcaacatcactgacaccaccaaagcacgggaaagcagaggaagcggagcagagctttgtgggagcgtcaatggcaggaacttgggtgaagttttgcaagccatctttgatattaggttcaaaagtgagttgggatcagttggcgatagtaacccacccactcggatggtcggggaactggactctggagccctatgtgatctacaaagggggattgattgcgggattggtgggtggcgttgacgaggaagtttccattccgtcttcaatggatcttcgtcttcctagtgtcaaaggcatgctgacagggaagtcggtgatgcccaagttctgctcgagtcaacgagcttcttttgcagctatggagcagaagggcgccggtccgggagcacggagctcccacgccatcacgctgctcgggggcacggcctactcgttcggcggcgagctcaccccgcgcgtcccggttgacagcaccatgtacgccttcgacctcaacacccagacgtggtcggcgctggacgcgacgggcgacgtgccgccgccgcgcgtgggcgtgaccatggcggccgcgggcggcacggtgttcacgttcggcgggcgcgacctggagcacaaggagctgaacgagctctacgccttcgacgcggcgacgcgggcgtggacgctgctgtcgtccggcgccgacggcccgccgcaccgcagctaccactccatggcggcggacgcgggcgcggggcgggtgtacgtgttcggcgggtgcggcgacgccggccgcctcaacgacctgtgggcgtacgacgtggcggcggggcaatgggagcagctgccgccgccgggggaggcgtgccagccgcgcggcgggcccgggctggtcgtcgccggcgggaaggtgtgggtggtgtacgggttctcgggcgaggagctggacgacgtgcactgctacgacccggccacccgggagtgggccgcggtccagaccacgggcgacaggcccagcccccggagcgtgttctgcgccgccgggttcgggaggcacgtggtgctgttcggcggcgaggtggaccccagtgacctcggccacctcggcgccggcaagttctcggccgaggcgttcgcgctggacacggagaccggcgcgtggacgcggctggacgacagggcggaggccgagcaccacccggggcctcgcgggtggtgtgcgttcacggcgggggagaaggacggccagcgagggctgctggtgtatggcggcaactcgccgacgaacgaccggctcggcgacatctacttcttcacgcccgttcttgaggccgcaagctag

SEQ ID NO: 24547 - DNA, 615 bp, Zea mays
  Peptide Sequence Number=SeqID_67922
atggagggtggtgcttcaggatctgcagctgtgattgactctgctatggcagaagctggtgcagttgaccctgacttagcgttggtctccgtgccgtcagcagccactctcctccgcctccctatcatccccccccccgcggcccccagcccccacgcgccccgcctcagcgcagtggtccccggcgcaccgcagccctctccaccggctcctccccaccgccacgctctcctcgcctcaaggctcaagcgtatggttcacttccatgtcagctcaaccaggcagcaacagacggcggcgcgggctcacggcacggcggcagcggcgacgcggcgcactcgcgccggtgaggcggcgcgaactcccctgctcggctgctggagactggagcttctgcggttctgccccagtcgcccccgaccccgagcggccgagccccgaccccccgacgacgagtcgacgacgacagctgctctgctcctgctcggctgctcgcatgctccaagcctccaacgcttcaacgctcctgctcggctgctcgggcaggcactcggcctctccaacgcttcaacgctcaaagtccccagttgcttcattcccaggatgggagtgtaa

SEQ ID NO: 24548 - DNA, 408 bp, Zea mays
  Peptide Sequence Number=SeqID_67923
atggcgcctgaggctgggcttggctgctgtcagcctcactctgtcgagtggcacagcagtcggggcggcgcaggcggcgctgtcctcttgtcagaccggccagtggagcggcgaagtgactgcggtcacttcggctctgtcgactggagggcgtgcgtcaggataaagacggcttggtggcgttgggagctcggtgatcactgtgaagatcttgttggtgacccgactcaagtttataagcggtctcgagggatccaccgcgccagagtgccaaaggaatctcgtagtgagcacttggttcttgcgagggccaagggggagcgatacccttgcgcgggtgctccaacgaggactagtggagagtgccgactcttcgatacctcgggaaaaattggaggagtgttctaa

SEQ ID NO: 24549 - DNA, 699 bp, Zea mays
  Peptide Sequence Number=SeqID_67924
atgtcgaaaactggagggtcccgcttgtcaatgactgttgctattctagcaaaaggaaggactagtcatgagcgttttaagcgttgggtacctcctcccccaaatcctccaccaatgacagatgcagagaaggaggtagcaacagaaagaagaatggactcgccgcatcgatgtgattgcggagaccgtgctgtcatcaacgaggacactgcgaagcacttcgtgtgtccgaacattgattatgagatgaggaaatgcagttgggagagttacgacgacaaaagagaggacatgcgtaggtacgcgaaatctgtgagttttgatagcccgatgcatgcagagcagaggaggttgaaggcggcaaatgagaagagagcacatgatgcaagggaatgggaggcggctagagccgagaaacagatgttggataatcttactgatcgtctcaagggaaagattggatgtggcgtaaactatatcgcagatgaggcacatgcaagatacgttcaggaaaaaatggcgatggtggagctgatggaggaggacaacgacacatctaggttgagtgagtttatcgctctcgcagaggaaggattacatggggaagaggaggacgacacatcaaggttgagtgagctcatcacactagctgaggcaggattacgtgctcaagaggaggaggacgagtttatgtcttag

SEQ ID NO: 24550 - DNA, 1380 bp, Zea mays
  Peptide Sequence Number=SeqID_67925
atgcatcgcatccctccaccttccgagcccccggatggggagcgcccgcgttgccttcgtcttgttgttggaggagcgcaaccttacggaggtgggcacccttcagccatcgctcggcttcaaggattttcatcaggcaacccggctgcattccctcaccgatggtcacctaggatggtgaccaccagttcgatggtggggagaagcaagccgggctgcggcctctgccccaccctcagcttcaaggatcttcatcatccttgctggggaggagggcgaggcgagccggggcttgccctcgcgtgggctggcgaccggcttcttcctccggcatctaggggtggaaaccatcctccagctctatggaggaggcgtcctccagccatgcgggggaaggcaaactgctgctacctggccagggtgcagcactctgtactccgtccgggcgactgcgaccggctgcaccagggggtcacacaacacgtcgtacgccgcgagggtgatactcgtgttctgagatggtcccgttctcgttcttgcggtgaggacgggagtgaggacctgccggtgcgctttggggcggccggtgctcgctggtgcggtgctggtgggcaggtggctgccgtcgtcggtgctgaggtggtggcagccagagaaggtttctccgccgacgagatcgtcggcgccacctgcggtcggacctccggctcttcggccttggcggcttgtcctcgcccctcgtgtggggacgtgggcgagggacctccagcagcagcgtttgccctgaggctgtcactgcagctgtcttgccgtctgagacggaggtcgttgacgctgctgcaggggttggcggcgagccacccggagtttgtcgtcccgcaggccctccggcgtggaggttgttcatacccgtgggagtggaaccggaatttcgtttgtaatggcaccttgagtgtcggtaaccctcggctgctctgcgatgagccggagccggaggcagcgatgtcagcgtggacagaggcggagtcggctcgagaagaagcttcgttggcccgggagcacgtggcctccctggccgaggaggtggagatccttacgcccgcgtcaccgtccgaggccgggccagattccgccgaaggtggagacgacgccgagggtgctgctgctccctctgttgatgacttgttcatcggtagcagaatcgtttatccgagcgagagttacttttcacggaaggtgacgagtgaggagtccctcggctcggtcggccttgcttcttacgtgtactccgtcgttttcaggatcccgctatcgaagcagtcgaaaagcgcgaaagatgttctggcagaaagactttttccgaggaaaattttgacgtag

SEQ ID NO: 24551 - DNA, 135 bp, Zea mays
  Peptide Sequence Number=SeqID_67926
atggcaattgccaagcgtatgtggagtagtgatgagttaaaaagaaactcctgtgagagcgtctccgtgtccgtgccagggcttgttcggttagctctcattcaatgtggattgagtgggattggatgggtttga

SEQ ID NO: 24552 - DNA, 486 bp, Zea mays
  Peptide Sequence Number=SeqID_67927
atgccgcccgcgctgcagcgccgcgcgttctgctgcgcccacgacgagctcgcggcgatgccgcacttcccgcgccggctcgagcccaagcgcctcgcgctggcgctcaagaagctcatttggaaggttctcagagttgctgatcccaccattggcagttcaagtatcaagaggccattggtgacagaagcttcaacatccatggctttctgtgactttgattcggtgatctctgttagtacttcagcactggacgtcaaggcatctaatatccttctaactgaagactaccaacctcagatatcagattttgggcttgcaaagtggctccctgacaaattgacccatcatgttgtgtatcccattgaaggcacattcggcgagcgtctatgcgttcgggttactaggacatgggacttctatgatcctggagatgataaaaaacttctgcattctgatcttgtaccgctcgatgaggaggtataa

SEQ ID NO: 24553 - DNA, 840 bp, Zea mays
  Peptide Sequence Number=SeqID_67928
atgggtactggactaagatgtggaatagaacatggatatgatttttttatcctgttctcggcgtactggcatctctcggagcaaggctatctttgtgtcttcttggcactcacgtcgtcactgcaggcgggcggcgggttcgcgtccgccttgaagcccaagggggaggcgggtaacgacgaggcgggcgctgcggtggaccatcttgccgaggcggccagacttgccgaggccagcgacgccttcgacgcccgcgagatattggcgcagctcaattatcggctctccaccgtccccacgaccgggactccgctgctccgctcagccttctacttcaaggaggccctgcgcgttgcgctctccccgaccggcgaggccctggcgcccccggtggtgtcgacgtcgtacgacgtggtcctgaagctcggcgcgtacaaggccttctccgaggtgtcccctgtgctccagagtggtgtcgctgatgcaggagctggcgcagcgctgcccgcggcgacgctcaaggtgactgcattggtgtcaccggcgtcgcaccactcgctggagctgaacctcatccacgagaacctgtcgggcttcgcccgcgagctcggcgtgttcctccagttcgtggcgtacaacgtggacgccctggaccccgcggagctggtggccatcaccagcgacgacgccgtggccgtccacctccgcgtggggtcggcccacgtgacaacaatgtcgaccgtgctccgccttgtgaagcggctcggcgtcaaggtggtggtgtctgtggaccgcggctgcgacctctctgcacttggcggcgagatatatacaggttag

SEQ ID NO: 24554 - DNA, 642 bp, Zea mays
  Peptide Sequence Number=SeqID_67929
atgactctgggtacgtttgatacatggacgaggctcgggctacgctcccgaggtaccctaggacatttccgagaccagcaagagcgattttgtaacggaatcccatcagagggaggcatcgagccctcagaccctatcgaatgggaccgagtctggcaaatcacctgcagggtgaggctgacagcagctgagtccagcctcaggcgccacaggaagctctgcctcgcccgaccttgggcctcggcctcaggagaagtctccgtctcgcccaaccccagggctcggcccccgcctcagcttcggaaggtggtctccgccttgcccgaccccagggcccggcctcaacctcgacctcgaaaggaatcgtgtcctcgcccgaccccggcctcggcctcaggaggagtctccacctcgcccgaccttgggctcggaccgaccacgccacagggggtacatcattaccctacccctagctatctcaggctacgggggaacaagaccgacgtcccatccaggctcgccccggtaacaagtaatgatggctccccgcatgcgtccatgacgacggtggctctcagccccttacagaagcaaggagacgtcagcaaggtcccaacagccccgacagctgtgcttctatag

SEQ ID NO: 24555 - DNA, 1125 bp, Zea mays
  Peptide Sequence Number=SeqID_67930
atggcggggaagggagccaaggccacagccgccaagtcagcggacaaggacaaggggaagaagaccgacggccccgtctcgcgctcttcccgcgccgcaccccagacaaccgcagttgattttaagccatacgttggtccaatctataatgcgatactgggacgtttggtcaatcaagatcaggatcaggaggtaaaagaatgcgccatatcttgcatgagtttggtggtctctacttttggtgatggtcttgaaagagaattaccagcatgccttcccatactcgttgacaggatgggtaatggaattacaagacttacagctgtcaaggcaaccaaggatgctggtgtcattgccgacctcaatgttgctaggatcatcaatgagccaactgctgctgctattgcctatggtttggacaagaagggtggcgagaagaacatccttgtctttgaccttggtggtggtacttttgatgtcagtatcttgaccattgataacggtgtgtttgaggtgatggccaccaatggtgacacccatcttggaggtgaggattttgaccagaggatcatggaatacttcatcaagttgatcaagaagaagtacagcaaggacaaccgtgctcttgggaagctgaggagggaagctaagcgtgccaagagagccctgagcaaccagcaccaggtccgagttgagatcgagtccctctttgacgggaccgacttctcggagccgctgacccgtgctaggtttgaggagctgaacaacgatctgttccgcaagactatgggccctgtcaagaaggccatggaggacgctggccttgagaagagccagatccacgagatcgtcctggttggtggaagcaccaggattcccaaggtccagcagctcctaaaggactactttaatggcaaggagcccaacaagggtgtgaaccctaatgaggctgttgcctttggtgccgcggtgcagggaagcatcttgagcggcgagggtggtgacgagacaaaagatatcctcctccttgatgtggctcctctcaccctgggtattgagaccgttggtggagtcatgaccaagttgatcccgaggaacactgtcatcccaaccaagaagtcgtag

SEQ ID NO: 24556 - DNA, 1296 bp, Zea mays
  Peptide Sequence Number=SeqID_67931
atgaacaaaaacactggcattcaagatgccattacaaacggaactccggttccacctccgcaggtacgaacaaccccacacgattgggggcctgcggagcagcagaagaccgacgaacggctcgccgtcgcccgctccagcagcagcgacgacgacgacttctgctccggggggccgaacagcagcagcgatgacctcagggcggatgctgctgccatgaggccctcgcccatgccctcactcgagaggcaaggatgggcagaaggccgtagagttggaggtcagtccgtgggtggcaccggctatctcgtcggcgaaggaacctcttccagctgccgtggcggaaggcggcgccgggagcggctccgaagccactcgggtcagagagccaggcacgcgacagctgccagtgccacgaacggcgaacgcccttcccaccgatcactgagggaaggagcggcctgccgcccgcgcagggaccgaccccaactcggcacactcccctccctagcactgatgatgaaaatccttgaagctgagggaggggcagaggctgcagcccggcttgcttttccccgccatcgaactggaggtcaccgtcttggccgtcgtgggctgagtcttatccaacacgctccaaggtcctccccctacggcacgggggctgggtcccgcgcgtcatgcaaactggcccggggcagaagaagccaaaccgccgtgcgtgatgcatgcaaccgcccagcggttacaagcattcctccactttcgcccagaccagcgggtgaaagggcggacagccgtgcaggcggcatgcaaccgcgccaattgggcgcgcccctccaacttccaacgcacccagcatggaggcccaggcccacgcgtcatgcaaccggcgcgccggttgctacgtgcaagcaactgcaccgccactcgcaccactaccacgcctcctggactgcggaaccagtaccgcgactcgaggcaaccctgcgtatgacccagcagtgccagccaggcgcgacggtcaatacggccaagaatgagccggcagtaatggcggcggcaggcgggcaggagcagcggtcacatcgtcagccaagctcacgtcacctcgtgggacagcgagagaaccctctctcacggcgtgaagacggcgcgcccgtgttccgttcctcgaacggctcgcgcacgcgcaacggccacttcacgaaccactcgccccgtcgcattaactccgcggcgggacaggcggcgcctctggcaggagaagcgagcgacgcttcgccttcgccataa

SEQ ID NO: 24557 - DNA, 441 bp, Zea mays
  Peptide Sequence Number=SeqID_67932
atgggcaagaacaacaagcgcaagcgtgagccgactcctccatcagaggattttggtgactcggagtactcagaggaggagttctcttctgagtctgaggggtctccggctcccatccccctgcgtgagtcgtctgacgactcagacgactcccaggggcttgcggcagaggtctggacttacatccgggccgtcgagcgctccgggctcgagggctcggatgagtcggagtactcctcggacgaggaggactcgtccaaggaggacggtggcggcgatggcgaggacgacgacgacgacgaaggcggtggcggtggtgacgatgacggcggcggcaggggcggcagcggcggtggcaagggtgacgacgacggcagcagcaggggcggcagcagcggtggcggcggcagcagcaagggcagcaacaaggccagtggctaa

SEQ ID NO: 24558 - DNA, 327 bp, Zea mays
  Peptide Sequence Number=SeqID_67933
atggctgcccagcagtcgagcgcccaactcatcctctcccccccgcaggccctcttcttcttcctccagcgagcagcaagcgcagggagcagttcccctggggccgacgccctgctcagggatgaagcccgacgccccagccatggcacccttcttccccacgcagcgcctctgctctccctctcccaagctccagctctcacaaacagaagcagcgcctctcccctgctccacggcgagcagcagctcatccacctctcccttccatggtgcccctgctcctcatctccatggtcggcgcccagcagctcggctcctcggctctag

SEQ ID NO: 24559 - DNA, 408 bp, Zea mays
  Peptide Sequence Number=SeqID_67934
atggagaaagagcttagcatccatggctggaataggagatgtgtgatgagcagagcacgtcacaagctcccagccgcgactagggctctcggtgctggaggaactcacttaggagatggtagtgctgagctccaaggactggaggaggggagggagaaaccgtatggagcactggtcacccaagaacaagggggcgtcgatctccatggaagatggccaaccaagggggtgtgctcaccggcgcgagctcaaaccagagggggccctgcgccgaccaagggagaagtggaggtcggccatggttggcgtcgagtggaggatgaggtaggaatctcgagctcggccatgggagagagggcacatggaggaggagcttctgctatcgtgagggagaagctactgtcatga

SEQ ID NO: 24560 - DNA, 270 bp, Zea mays
  Peptide Sequence Number=SeqID_67935
atgacgaaggacttcgccatgccgacagtgttgccaccatatgatgatatgtttcgggcttctctcagaggaagaccttcttggttgatgtccaatggtgcaagggcagcccctggcgctattgccttcttcgacggcatgacgaagttggttgcttgggatgttgtcgaaggtggtcgtttgagttcaccagagatgggcgccaatgttggtcacttgttctcaaatactgtggatcaagaacaaggcaacacaattattaaagattaa

SEQ ID NO: 24561 - DNA, 345 bp, Zea mays
  Peptide Sequence Number=SeqID_67936
atggagaaaagggcagcgaggcttacctgcgtcgttctagctccggtgaggtgtccagggaggttacggtggtcacgtcgatgtgcgggtcggcgccggagatggtcggagtcggtcggtcctcgtgcgcaggcgggggagctcgtcggcggtgagtgtcccgacctaaccacgacgaaagagttctattggttggatcggcgagctttaccaagtgacgcagaggcggtatgcgcgaggaatttggaaatggtgcagtggcttacccggtccacgctctccggtgagcgaaagaagtccggcgaggatgacccagtgtttccggtgaggtttcgcttggtctga

SEQ ID NO: 24562 - DNA, 294 bp, Zea mays
  Peptide Sequence Number=SeqID_67937
atggcggagctaaccgaagcgctggcgcgacttgggggtgactggagtgggctggccacggtggtcgaggctctagcggcaagggcgggcgaaaaagagctcaccggagctaaggaggggtgtctggctggcgaaggatttgagctagggatcaaggtgaacacgcttgatctttggctcaagcacttgagagaaaccctaggtgacactggggtgtcacagccttccccccttaaaggaatctcgtctcgagattcgggccagagtcctcccggggtgaagcgaaggatttga

SEQ ID NO: 24563 - DNA, 219 bp, Zea mays
  Peptide Sequence Number=SeqID_67938
atggaggccaagtcacaacatcaaccagaacaaggaggtacctgcaaaaattatgccacaagcaaggctgagtatactaatactcagctagagttacccgaaacaaaaagttttaacaggctccaaatttggctgttcttgatatcgaataattccaaacttggtgaaactttcatgagtaacttgataaatggagataaatatgataaagagatataa

SEQ ID NO: 24564 - DNA, 489 bp, Zea mays
  Peptide Sequence Number=SeqID_67939
atggccgacctcatcgtgcctccgatctcggtgatgccgttgcggcttcgccctcggcgcatatatgagatgcacctgactttgttccttaaatctgggtgtgacaaggagttcaagacggctttcagaggacaccatattccagcaggaattctagatcgcaagctcaatgagttcttggccttgactcaaggaacccacactgtgctacagtatgcccaggccttcaacgacctgtgccagtatgcgggctatcatgcagattcagatgagaagaagagagactacttccacaggggaactcaacaacaagctgcaaaagaagaggaaggcaccaatgtctggatcttcagctctgtctcagagatttcggattgtctccaacagtcagagcagaggattccagcagcaagcgggaagatgggtcatcaggccgccatagcagcagcaagcacccaacagttcccccgcccccgctccaaggaataa

SEQ ID NO: 24565 - DNA, 51 bp, Zea mays
  misc_feature (13)..(13): n is a, c, g, or t
  Peptide Sequence Number=SeqID_67940
atggcggccgacnacccgccggccggcgcggaatcgacgacgtctaccccg

SEQ ID NO: 24566 - DNA, 1081 bp, Zea mays
  Peptide Sequence Number=SeqID_67941
tgatgccctgctgggtcaccttggtagtgatcaatggagagtcatgatctccgggcagaatgggaatcacggcttgtggagatactttggtacaggtggttatgagattgatggttttggttatgactatggtgctgctagtccactacagccaaacaggatacttgctgagtatgttgatatggctcgacttagacacactgcacgaaagtccgtcatccccttcttaccctcccgccttgctgagcgtccgcttcgccgtcccgtggccggacagtccagccacttggagagactacaccaccgcctgcgtgaggagcaggaacgtcgacgacaggagcagcagggctcttccttctcgctccagcaggagatagagtccgtgaggagctgctcccctgtgcttcctctggaggcgccccctgcaccaccactgggtgccccagcctctggagtagctgctcgcgggtgtcacttccacgatgcgctcgacaccctgctacgtcgggcatttaaccggcatacttggtttgtcgagtatcgctgtgtggtctaccagcacagtcgcggggtctacccggaccgctgggaggcgacttgcttggtgcgctgcccggagaacagtctccagggtgcagaggcctgttcagagcactattctatctctgagcgggactcagctgaggcagccatgcaagatgctgcacggcgtgcgctttcgcactacggctcggttttcggtggggcagttgacggccttgacctgaagtattacccccgccgtccatctggcagcacaggaggcgtgattgtctcacctgtcggtgagggcaatcctaggttgagcagcacagtcaacctagccgccatgctaaacacggagctggaccatgcattagacgagctgagtagggctcgtgctgagatcgccctgctgcgggctgagcgcgcggaacgtcgtcacctggacggtagttcccccgctcccgtcgggactcagcacccgtaccgctcacctcagcgtggacaccagtcttatagcaatcccgactgcaagaccaagataactctagaaccatag

SEQ ID NO: 24567 - DNA, 609 bp, Zea mays
  Peptide Sequence Number=SeqID_67942
atggcccgctgcggtgatagagacatcgtcacggcggcgatggcgcggcagccctggcgccgccgccacggatggcagctccccctacacccgcttcagctggtggccgcagcggtattcgcgcttctcgtggccgcgttctacgtcgtcctggggccctacatcgggaacaccctcgccggcaatatcctcctaatcaccttctctttctcggccgcagcgacagcggcgctctacgtgcgctgcacagcggtggacccgtcagaccggactgacgcgaagaagaccaagcggcggcggcagctcgctcggggcggtgggggcacggcgaagttgccgcggctgcggtatggctacatcctgtggcgctacgcggtgcggttgctgcggcgggttgaggcgcgggtcaccaaccgctgggtgcggcggagctacctggagcagtggaacaccagcgttcagctcgatcccatgctccccttcgccttcaccagcctcgatgacatcgtctcgccatgcgccactgccgacgggcacgacatctctttctgccccatctgcgactgcgaggtatttgtttcattcttcgcctctgcgtatcggtggtga

SEQ ID NO: 24568 - DNA, 108 bp, Zea mays
  Peptide Sequence Number=SeqID_67943
atggatctagacgaagtggatatacggaaagctataactaaggactatgttacatctactcctagggaagaaatggtaaaaaggctttctcttcctgtatttaagtaa

SEQ ID NO: 24569 - DNA, 294 bp, Zea mays
  Peptide Sequence Number=SeqID_67944
atgtggttggtgagatggccgcttccgttgctggtgctgctggtgctggtgtggccggttggtgcgcgcctcggcctcggcctcggcgcctccaccacgatgagattattctcctgtcacttccagcgggcggcagcagtgcggtggcggttgcggttggcggtgcggcacctgcactgcacagcacacccaatcggatccaaagccggaggaggaggcgtccggctgaagcttcgttccgacgaaaagattccgtcaccggctaatcagatgcagatgctgctggctacctag

SEQ ID NO: 24570 - DNA, 2388 bp, Zea mays
  Peptide Sequence Number=SeqID_67945
atgtcctcctgcgacgacgaccacgcctcgctcctcagatcccacgctggggcctcgtcgccgtcctgcccctcgccgcgcggttcggcgggacatcagcaccacgccgacgtcgaggcggacgaggccaccgtcaccgcctccccgaggctcgccagcggcggcgggggtgtgcgcggtctcctgcgcaacctcgagcgccgcatgtccgcacgcggatctgggcctgggcgtcgccagcaccagcattatcagcagctcgatcgctccgtggcgatcgagtcgccgccgtctcagcggcagcgggagagagcggcggcgggggatgacgacgagctcggggacggggcgccgcccgagtgggcgctgctgctcatcggctgcctcctcgggctcgccaccggcatctgcgtcgccgcgtttaaccgcggggttcatgtcatccatgaatgggcatgggcagggactcccaacgaaggtgcagcatggctccgcctgcagaagatagctgatacttggcacaggatactgctgatcccggtgactgggggtgtggttgtaggaatgatgcatgggttgctcgatatatttgagcagctaaaacttgtgaaatcagggcagaggcaaggaatcaactttgttggagccatcttcccaaccataaaggctgtccaagctgctgttaccctagggactggctgttccctgggacctgaaggtcctagtgtggatattggcaaatcgtgtgcaaatgcatgctcagaaatgatggagagtaaccgggaaaggcgtattgcacttgttgctgctggcgctgctgctggcattgcttcaggcttcaatgcagcagttgctgggtgcttctttgccattgaaactgtattaaggcctcttaaagcagaaaattcacctccatttacgactgcaatgataatattggcatctgttatatcatctactgtttcaaatgttttacttggagccagaccagcttttatagtgccagcatatgagctcaaatctgctgccgagctaccattgtaccttatcttaggaatgctatgtggagcggtcagtgtggtatttgatagattggttggatggttttcaagattctttgggcacataaaggaaaagtttgattttcctataatagtgtaccctgctttaggtgggctgggagctggtatcatagctctgaaatatccagggatcttatactggggtttcacaaatgttgaagaaatattgcataccggtaaaagtgcttctgctcctggtatctggttgttaactcaactggcggctgcaaaggtagttgcaactgctctctgcaagggctctgggcttgtgggaggactatatgctccaagcctgatgattggggctgctgttggagctgtttttgggggttcagctgcttatttaataaattcagctttacctggtaatgctgctgttgcacagccacaagcttatgctctggttggaatggctgctacactagcttcagtctgttcagtcccattgacttcagtactgcttctctttgaactgacaaaggattacaggattttgcttccgctcatgggagcagttgggttggcaatatgggttccttcagtagtaaaccagccaaacgacagtgagccttctgggtttagaacatccagacgaggttattcttcaatgtcaccagaagaaagaaatggcagcttaaggcaaggtgatgttgtggatgatcttgagctcagtattatacaaactgacatgagtaactatggaacttataatgcagaaatgcttctggatgatttgaaggtcttccaggccatgtcaaagatatatctcaaagtgttaccatctgctacagtaacagaagttcttaatctgttgcatgatagacagcaaaattgtgccctggttgtggaccctgaagattttcttgaaggaataattacattaggggatatacggcgcatgggatatgggttacatgtggaaagtttcatcaatggagatcaccccaaggctgacgataactcttcttccatttcattgtgtcttactcgaggattccagtatcgtgggagcgaacgtggattgttaacatgctttccagatactgatttgaccactgcaaagagtcttatggaggccagagggataaagcaactgcctgtagttaagcgtggtgttgcccatagaactgcaggaaagcgcaggccgattgcccttctacattatgattctattggttgctgcgtgcggggcaagcctgataaattctgcaaagacctcccattactgcaagtttcatgtggcatccctgctcgtaccacttatttgttcttgttacgacctggacttgtactttacgcgggatag

SEQ ID NO: 24571 - DNA, 1636 bp, Zea mays
  Peptide Sequence Number=SeqID_67946
gtggttggactggattaaaaggggtcgtttttcaaccgccgaggctgaaagctaccgcgggggttcgcaagctagcactagcaggacgggcgggcgggccatcggaatctctataaaaggccgcgaggtggccaggcttagcgtcatagagagccacaggccacaggcaggcaggaggatcggacgagtcagcgaggaagctgcctgctttcagatagagagagttattaagatggcgttgcttcggctgcttgccatctccctgctcttcgcagtggccactcctgtcagggacatcgcccacgatgcctgctcgtcagaagtgaaggatttccagcacctgaacaacagctcggggctccacctgacgctgcaccacccgcagagcccctgctccccggcgccgctgcccgccgacctccccttctccgcggtgctcgcccacgacggcgcgcgcgtcgcgtcgctcgccgcacgcctcgccaagacgccgtcctctcggcccaccttgcttgacgagagccgcgcggggtcgtcgtcgtcgtcgtcccccgatgacgagtcgtccctcgcgtccgtgccgctcggcccgggcacgtccgtcggcgtgggcaactacgtcacccgcatgggcctcggcacgccagccaagtcgtacgtcatggtcgtggacacggggtcctcgctcacctggctccagtgctccccctgcgtcgtgtcgtgccaccgccagtccgggccggtgttcaaccccaaggcgtccagctcctacacctccgtgtcctgctccgcgcagcagtgcagcgacctcaccaccgccacgctcaaccccgcctcctgctccacatccaacgtctgcatctaccaggccagctacggcgacagctccttctcggtcgggtatctgagcaaggacaccgtgtcgttcggctcgaccagcgttcccaacttctactacggctgcggacaagacaacgagggcctcttcgggcagtcggcggggctcatcggcctggcgcgtaacaagctgtcgctgctgtaccagctggcgccgagcatgggctactccttctcctactgcctcccgacgtcgtcgtcgtcgtcctcggggtacctgtccatcggctcctacaacccggggcagtactcgtacacgcccatggcgtcgagctcgctggacgactcgctctacttcatcaagatgaccgggatcaaggtcgcgggcaagccgctgtccgtgtcgtcgtcggcctactccagcctgccgacgatcatcgactccggcacggtgatcacgcgcctgcctacgggcgtgtactcggcgctcagcaaggcggtggcgggcgccatgaaggggacgccccgcgcgtcggcgttctccatcctggacacgtgcttccagggccaggcggcgcggctgcgcgtgcccgaggtcaccatggccttcgcgggcggcgcggcgctcaagctggccgccaggaacctgctggtggacgtggacagcgccaccacgtgcctggccttcgcgcccgcccggagcgccgccatcatcgggaacacgcagcagcagacgttcagcgtcgtctacgacgtcaagaacagcaagatcgggttcgccgccggcggctgcagctga

SEQ ID NO: 24572 - DNA, 330 bp, Zea mays
  Peptide Sequence Number=SeqID_67947
atggcgttaacagggttctcgcgcgtgttggcaatagctctgttaatctggcctctcacgggcactatgcgggggccccgtaacacgcggcggccatgcggggcccgttacaatgggccggatcacacgtgggcctctgagctggacgaggccgcacggtgcgatgacgacgtcgcaggccttcgtctggtgccggataaagcgaagggtatccctgcccgctttgtctctgtcggacctgcgacatcagcgaaggcctcgagcgaagggtggcgtctttgccttcgccccaacagctctttgaattgtttctcaaacttgaagcgatag

SEQ ID NO: 24573 - DNA, 213 bp, Zea mays
  Peptide Sequence Number=SeqID_67948
atggacgaagcaagcctttggtcgggaaagcgtgcaaagaagcttcacccatgcgtgcaagtggaaaaggtgctagacaaagctgatagcttcggcgacaacagaggaacttcggacagctacaactttgtagtgcttagccttcgaagaatcatcgtgcatcctattactctggagtcaatgcaattgaaaacaagtggccacatcatgtga

SEQ ID NO: 24574 - DNA, 489 bp, Zea mays
  Peptide Sequence Number=SeqID_67949
atgacgccacgcaccaggtgctgcagcgccgccgagccttcttccacgccggcaatgaatgcatcgtcaaaacgagaaccttcgccgttgacggttgaaacccggaccctggacctggagcgcgcgcgctggtgtggtggcgagctcgcgggcagccaagtggcaagccatggccacggcgcgtcgccggatagcgacagctcgatcgatctttgggccgcgtgccggaaacaactggctgcgcccgtgacccacggggctatgagccaatcgcatgcccccgtgtggctgcagaatcaggagttggtggcgtttacagatactcaaaggccgtgccccgctagtgtgttcgccgagtcctcctcaccagttccagccagccccggtgacctcagacccctcggaggcggcgtctgccccgtctccagcgaattcgccgccacggatggagtggcaccggtcaccgtgctgttcacccctgcgcgctag

SEQ ID NO: 24575 - DNA, 213 bp, Zea mays
  Peptide Sequence Number=SeqID_67950
atggcgcaccggacagtgtccggtgcaccaggaccgtacagcgtccaactctccactcttaggtttctcagggcgcgctccgctataattcaccggactgtctggtgtgccatcggactgtctggtgtgccaccggactgtccgatgcaccagcggagcaacggctacttcgcgcaacggtcgcctgcaaaagctaaagattcagatgaatag

SEQ ID NO: 24576 - DNA, 229 bp, Zea mays
  Peptide Sequence Number=SeqID_67951
tattcaaggtcttggagatgttgccttcagagattcatcatcctccaaagaagaagatgaaaagaagaccatcgaaggcagcggatctttagggcacgagaaggcagaagaagagccaaaagagcctagccttacacttagaacaaatacaactgaccctactcaatctattagcgaagaaatagatgagattgggttctttgtgagacatcttggtggggtgagctga

SEQ ID NO: 24577 - DNA, 497 bp, Zea mays
  Peptide Sequence Number=SeqID_67952
atgatgagggtcatggacaagctcaaagggaagaagcgcagagaccgtggtgactcctcgaggccacggtcgactaggggttcaggtggtggggatacattctctatgttgttccagggctctacagcgtcaaggcaacggctagagcagctccttggttgcatggaggagcaggggcgcgaagtggcaagccatagtgcacctgggcaagagcgcaaggtggtaggccatagtgcacctgggcaagagcgcgaggtggcaggccacaatgcacttgagccggagcgtgaggcgataggctcaagtggacctatgctagagcaggaccacaatgcatttgagcaagcgcgcgaggcggcagaccacaatgcacctaggcaggaggacgagctcgcacgccatggttcaccgatgcatgatgatgatgactatggagaggactacgatggagaggccaatgacgagattgttacaatgacacaggcaacaaacttcag

SEQ ID NO: 24578 - DNA, 966 bp, Zea mays
  Peptide Sequence Number=SeqID_67953
atggctcgaagaagatcccaaaagaacaaaaaaactactccgaaggaaaacaaggaggtaactcttgagatattacttttcgattattctaattatgcttcatggtctactagagtagtaaatgcttttagaaccatagactcacgattagaacaaattttagacaagagtattctaccctttaattatgataagaaaaatgcttccgaggaagatcaaagatgtatacgcttaaattatcttgcttttgacatcttaggttcgtcttcccatttcgattcccacatatgttgtgttgctaatgaaaatggtagtggaagcacaaatgaggatgaggaggatgaaaaaagctttacacaactctacgctcatctaagccaagaagataagacggtcatgctcaaacttctaaaaagagtgagagagaaaagtgaagctcctcacatgctagaagatattctcaccataaaaatgcaatgctttgaagagttgactaaagaacatgaggagcttaagtcctctcatgttgatttggtccaaagcaattcctcctttgagctagaatttccaagaacaaaagatgatgcctgtcaaaagcccaaggaagaaaatgagaggctaagaatgagcttgacacaactaaaagtgaagtgcactacccaaccttctcaagataatcgtgattacatggtgaaaaagcttgagacgggaacaaccgtggcatgcacaaaatcccttgaagaaaaggtcaaggatttgaggattgtcaagaggaaggaacaaaagaagaaaatcaatacctctgccaaaagcctcaaccatgcctccatgcaaggtaacatccaaggattatcctatgtggaaaatcaagaaaacctacaacatggaggaaagccaaaggatggtaacacttatgtctttaagtgcaagtatattcaattatcatttctcctgtgtattgtgtag

SEQ ID NO: 24579 - DNA, 738 bp, Zea mays
  Peptide Sequence Number=SeqID_67954
atgagtctgcacgccctgctacccgtcggatcaaggatccacggcccacagtatgatcgcacgcggatcccatcagagccccaggatgttgatctaacggaggacgaggtgatccgttcggatgggtttcttaccgggattagaggcggcgagcacccagtccgcggcgtgaggcgggtctgcggcggcggagttgctccgtcgagcaattgcctagacgtcgaaggtccgcacgccaaattgatggtttccggggctccacgaaataatgacgctgccccagagtaccacaccgaagtccaggcaacccagccgtgcgcgcgcgtcggcagcggactgcccgcaccggtggttgggatcgtcgcgcatgccacggagaagatgacaccagctgcgcaacgtagagggtccaccgcggcgcgcgagcggaacaaggggaaggagactggcgagatccgtggaggaagcgcgccagatggggagtccgcgcgggggtcacgccatggttcacggagctcggaaatcctgggcgccgagcgggttgttggggaaggggatgagcctgacgagtgggtcccacctggaagtgccccgatcggaaaagaaaaggaagaggagcagagtgggctggcgcggtggaaaagtagtgttgggccgaggcgcgcgagaattcggcccaagatcacctggttcaacctctacttctgcatgatgggcatgtccccggttgatagatag

SEQ ID NO: 24580 - DNA, 372 bp, Zea mays
  Peptide Sequence Number=SeqID_67955
atgagtaccgccctcgcggtgtacgacgtgctgggcgaccccccggcgcggctgacggtgcgaggaggacctggacgtggccggcccgcacgcggcacgaccgccgctcggacgaaggacggaaagctgcaccctggccagggagcagcagttcgccttccctcgcatggctggaggatgcctccgcagggctggaggatgcctttctcccccaaacgctgggggaagaaaagggtcaccgacccacgcggaggcaacccccactcggtgtgctcctccacctcagctcggatgacgaagatccttgaagctgagggcggggccaaggccgcagcccggcttgcttctccccaccaaactgaccattggtga

SEQ ID NO: 24581 - DNA, 581 bp, Zea mays
  Peptide Sequence Number=SeqID_67956
atggcgtcctccccttcttccccagcgcagggagcacggctccttccctcccatggccgcgacgcccccaaccggccaccatcttccccaagtgctggcgcacgggagccatgtcccctctgtccagaaaatgtagagctcgagcacacccctctgctcccgcgatggacaccagggcgccctcctctagcccatggccgccaggatccacagagcagagcagcacctctgctcctgcttccttcctccaatgtcgaccgacgccatgtagctgaacccgagccccccctctctaatccaacgctcaaggctcctctccccctctcccatccatggcgccacactcagcagcagctctgcccactccaccttggtcagcgcagggcccctctgatccgagctcgagcagtgagctcaccgtcgctcatggagcccccactccctgctacactttctcccggcctcctctgcccagcagcaacatctccttcccccaaactactcttgccatggctggcgccctgcgcagtgcctctgctcagctacctctcccgcagccccacaacgttggcgcttcgcgg

SEQ ID NO: 24582 - DNA, 174 bp, Zea mays
  Peptide Sequence Number=SeqID_67957
atggtgtggttttatactctaagaggtatgaaggcagaggacatatgcattgcattcatatgcattcattgaagtggtatttgcagatggaaagtgttatacaacctattgtggttgttcgaggaaatgagatggcattggttattttgggactattgagttctatatctacaa

SEQ ID NO: 24583 - DNA, 1626 bp, Zea mays
  Peptide Sequence Number=SeqID_67958
atggcgcctcctgttgacgtggccggtccgcgccctaggttgggcgatgtggaggctcctccgaggtcgaggttgagtctatctttcgtggccgaggtcgagtccgagcccctgggtcgggcgaggcggagaccgtcggctgaggccagggctgagtccgagccctggggtcgggcgaagcggtgttcgtcgtcttctggggctgagcccaagtccgagccctgggtcgggcggagcggagttcgtcgttgtcttcaggggctgagcccgagtccgagccctgggtcgggcggagcggacagtcggagcggcgcaggcgacgctgtccttctgtcaggccggtcagtggagcggcgaagtgactgcggtcacctcggctctgtcgactggaggacatgcgttaggataaaggtgtcaggccacctttgcattaaatgcccctgcgatttggtcggttggcgtggcgacttggccagggttgcttcttggcgaagactgggcctcgggcgagccggaagtatgctcgtcgctggagggatgcctcgggcgagacggagatcctccgggctttgtgctgatggtggttaccagctgagaattaggagccttgagggaggccggcgtgttattcgtctcccgactcccctactccaaagtccaaacagggcgatctcgactcctgaaatcccagttcccaagcggaacaaaaacggcgttcgaaggaacaacgggaagaaagaaaaccgccccccacgtacacgctcccacctcgcacgcccaccgcccccaccgcacttgggcctcgccaaactttcccctcggcctccgcccagtcccgcacttccaccaccgcacctcgcagatgccccagtaggctccaaaaatccaaagtggccagagcgaggagaagagatccctggggcggcggccgggaccatgacgaccggatccaacggcgacggaggcggcgcggggtcctggtacccgcagcgccgcccgcactacgggtacggcggggggtccgcctccttccgcggctgctgctgctgcctcttcctgctgctcaccttcctggcgctcctcgctctggccgtcgcgctcgtcgtcgtgctcgtggtgaagccccgcaaaccgcagttcgacctcaaccaggtgtccgtgcagtacctcctggtggcctcgccgacgacgtccccggccggcgtgccccccggcgccgcctacctctccctcaacatcacgctgctcttcaccgccgagaaccccaacaaggtgggcatccggtacggcgccacggcgttcgacgtcatgtaccacggggtgccgctcggggtggcggcggtgcccgggttcgagcagcccgcgcacagcacccgcctgctccagacccgcgtcattgtcgaccgcttcaacgtgctccagaccgacgcgcaggacctcatccgcgacgccgcgatcaacgaccgcgtcgagctccgcatcaccggcgacgtcggcgccaagatcctcgtgctcgggttctcctccccgagagtgcaggtgtcggtggattgcacgatcgccatcagcccgaggagccagtcgctgaaatacaagcagtgcggcgtggacgggctaagcgtgtag

SEQ ID NO: 24584 - DNA, 678 bp, Zea mays
  Peptide Sequence Number=SeqID_67959
atcctaaaatctcgtagttcactagggtacaagcaggttcgcgaagaggataagagcaaattggttggcaacgtgttcagcagcgtggcttctagctacgacctcatgaacgatctcatgagtgtcggcctgcataggctgtggaaggacaggcttatttccaagctgaaccccttttcggggatgaagcatctcgatgtggctggtggaacaggtgatgttgcttttcgtgtactggaaagagttaagagtgtgggtcacagagctatgcagggttatagcgaagaacattgtcttagctggatacaaggagatgcagaagctctgagttttgaggatggatctatggatggttacactatcgcatttgggatcagaaatgtgacgcacattgagaaagctctgtcagaagcttacagggttctaaagcaaggggggaggttcctatgcttggagttgagtcatgtggatgtccctatttttaaagagatttatgatgtttactcgttttctatggttccggctattggagagctggttgctggtgatcggcagtcgtaccaatacttggttgagagcatccgtcggtttccgaatcaggaagccggattccagagggtggaatatgagaacctcgtgggtggtgtagttgccattcattctggactgaaactgtag

SEQ ID NO: 24585 - DNA, 1863 bp, Zea mays
  Peptide Sequence Number=SeqID_67960
atgggcgattctgacttctgcgcgcgcagagcgcgcattaaatgcgcggcagagagccgttggcgcggagatgaccgttgctccggagtcgcaccggacagtccggtgcacaccggacagtccgatgatgagcttgttagaggcatgtattctcgtttgaatctaattatcaatgagctcaattctattggcattaataagctaggtgatgcggacattgtgaggaagattatctccctactaccacaacgaagatatgggagcatcatcactatccttcacaacatggaggacttgggtaacatgaccccaaccattgtaattggaaaaatcgtggcttttgagatgtcgcgaaaaatgtgtcggggagaggagccaacttcctcaaggccatatgcttttgcatgtgatgaaaggaagggcaaaaagaaggctcccactccaagttcctcaagtgaagaagaggaagaagaagaaattgatgatgatgaagataatcaaccatgcacatcatcctccgaggacgaagaaacaatccgacgcgtcggaaaggtaatggggatgatccgcaagattaatctaatgggtgtgcccctgcaggtcgaagatcttctctttaacattgacagaaaaaagcaaaggaagagaggatgcttcacatgtggggagaagggccacttcagggacaactgtccaactatggccgaacccaaaaaggagaggagcaaaggcaaggcgctaacaagtgttagaacttgggatgactcttcaagtgaagatgaacctccaaggacgcgcagccaccggtcctcatcacgctcatcacggtcatcacacaaatgccttatggcaagaggtaacaaaagcattccatactctagtgatgaaagtggtagtgatgatgaaggtgagggaaagccctctgtagatgagcttgcgaatgccgttgaattttttcaagatgtttgcactaaacaaaaagctcaacttaaaaccttgaaaaataagttgattagctcccaaaatgattacaaaggtttgctagaaaaatttgaaacttttgcaaacttaaatagtgagctgtcaaccaaaattgagctattagaatctagtgctccatccactgctaccgatgatggccttattaaaaagaatgaaaaactcaaggctaagttagctagctcccaaaatactattgaaaatttgctagagaaaatggaaattcttagcatacacaacaatgagctaactactaagctagaaaacattggtagcaccccagaagcatctttagttcctgaaattattaaaaaggatgcttctacttcttgctttgatttaattgatgattctaacccatgcaaccaagttcgtgttgagaatattgttgcagaaacatgttcggatgaggttgcaaaggaaaatgaacaattaatgcaagaagtggctcgccttggcaaggctttgtatgacaagaaaggcaaagccaaacaaatccgacctccacaggataacaccactgcgggagtgaacaagcctatggagggagaaattgtgatttgtcggctatgtcacatggaaggccataagtctttccaatgcaaggcgatgaccggggacaaacaaaggcaaaagctcaagcaaaagccatcaagcaaaatctctaacacctacatcaaaaaggtggacaaaaaggctgctacaccatatttgatcaaaaagaaaaagaatggaaaggtgatagcaatcaaggccaacaagcaagccaacaaaggaaagggggccaaacgcatctgggtgccaaaggaaataattacaaccatgaaaagcaccaagaaggtttggatcccgaaagggaagtga

SEQ ID NO: 24586 - DNA, 273 bp, Zea mays
  Peptide Sequence Number=SeqID_67961
atggaaatggaagaaaggataaacgatggaggctggcagaccgtcggtgagaaaaagcgccatggaagaccacagcagggtccatgggcagctatggccacaacaggcatcttccttgctgccgcagtcactgattggctagatggttatattaatagaaagctaggaacaccttttggtgcatttcttgatcctgtggccgacaaggcacttcctttgagtgggaaagaagcgattgaacttcttgacatactattaagcacaataacctaa

SEQ ID NO: 24587 - DNA, 360 bp, Zea mays
  Peptide Sequence Number=SeqID_67962
atggcggagaacgtggaagcagtcgggtcggcggagagcgaaggagcagaaccgtcgccggagaagacagcgagcggcgaggggttggaaaagtcttctgataggggagcggagtctccggtatggaagaatcggtggagaatcctggagtcgcgccggggttggggttttgcggttatggaaactgaggcgggagcaaaggagctaatcgcgggatcacgtaggtatttatatggaaaccgaaaggtttgttgcaagcgtggcttcgagaagtccctcatgaaaatgttgtcccacttgccagagatacgcagtagcatagttcacacgcccacaatccgtggaaagaagcttggatga

SEQ ID NO: 24588 - DNA, 879 bp, Zea mays
  Peptide Sequence Number=SeqID_67963
atgaagcaagtcgaccgtcctccaaataaccccaagcgtataacaatccagtcaagccaggagtgcttcagtgttgacattccctctgcagaacatcctaatccatgtccagaagttcaaaatccttcaaatgctgacagtcaaaatgtgaccaatgaaacagttcagattgattctgatgaagatgacttcatgccagctctgaagaagcgcaatgtttctgaaagccacacaagagtgttaagaaaagtcgtgacaaagagggttaaacatgaggagctaccccgacagaggcttaatgtgaggtgcaaccctcaagatgtcattgcaagcattaacattttgaatgaaagacaacgtgaggctataagactagatgctctgtgcagtaaatcacacctccaatggttgatggacaagctagaccccaaggatatgacaatacgtcctggtccaggaaaggaactcaagatcacaaaggatattgttcatcttattcttggcgtgccaaatcatggaggtggtaaacctttgggtattgatgaagcagttgcagcaagcaacttgagggcagagcttggtgtggccaaagatgagttcaatgtggcatttctacaggatcatttaaggaaaggcgaggatgatgacctttcaatcagatgtttcttcctcattctattcaaccgtttgctgtttccaactgctagctggggcatcacatatcatgaggtgcttctcacagaagaaatgcaccgtttccatgatatcgactggtgccagttgatttttaatgatctatgtgaagatgccaagaagtggcacaaccggatcaccacaaatgtctccacgactatatatggatgctccattgttgtcctt

SEQ ID NO: 24589 - DNA, 969 bp, Zea mays
  Peptide Sequence Number=SeqID_67964
atgcctcggccaacttttaacatcaaacttccatctatcaaagagatgatgtcaaatattcttgctgcatatgacttggaggttgacaagtcatgcgtagccataaaagacagcatcgacaaaattattgtcaagcaatatgacatagtagacaagtttatagaattgatagaagaggtactacgtgccgagtctgaaaatttggaaaacgagactgatgagccacagcaaccggggaattcggctgattcagcaggacacacagttgatgccacccagcccacacccgatatgccatcccaagcttcgcagcttgagacccaactgggtgctactcagtttgaagaaattcacgaaagacaacagcatatccgtacagtccttgagacctttcccgacgaatcggatgtggtttcagatcaacagagaggtgcaatggcaacagaggaaatggaacacaatgacagtgggccagttttttaccagaccccaactcctcatgttgatacactcaaaggtactacaaactctggatctgatccaccacttacagaggttgttattgattacggtgattacagtgcaaactgtatggatatttatgaatctttcgcggagggtaaatgtcttgaggatgtcttcatgcagtgtttcatagagtgtgttcgtgatgattctaaaaatcatcgtcgaactttgacatctaacagattaatacttgatgtcaacgttggggctctgttaaattttgaagaacaggaacgtcacagcaagaatcctcagccgtttgatcaaaatgtcctacagaattgcttgcacaacacattgcctgctttggtgaatctggataaatgcaagtcggtgtcatatcttccttcaatcaaccagacaattcccgagacctacgtgctcatgcccttcatcaactcacattccatcgcatcaacaaggcgttgccacttccattag

SEQ ID NO: 24590 - DNA, 891 bp, Zea mays
  Peptide Sequence Number=SeqID_67965
atggccgtgatgggttcaacatccggaaaagatgtacctctgccgggcttgctgaccgaggaccctttaactggtcacatgcctcgtcatggtaacgcccaacagatcctttacgagggtgctggcgtcatcagtccgcttggggctgacacgttgcaaggaagtgacacccgccgtcgtctcaggtgcgaggacaatgcccgacatgtcccccgggggagtgccagcgtcgtcgactcactctggtgcgacagccgacaaggtgccgcctcctgcgtggccatggttgccccgtctccgcctcctccggcgaggagggtggcggggacgatcggagtgctcctcttccgccgcagggagatgctgtcgccgagctcgccgccaccgggcgagtcgaagactgtcgttgtcgttgtgccgcgaggggaggagtaccatgtcatagctgccgtcaagggacatgaactcgagactcccgaagcggagcaccgtcccgggctgaagaggttgctgaagactccccatctggaactcaacgggaaggcgttcgttaacacgcagcaagcccctacctggcgcgccaactgtcggcgttttggacctggggggtccctggaccgacgagtgaaattgtcgctgcgtgcccctgcccagatgggttggcgcgcgatggaacacaagaggtgggacaagccttgtattatcctgcaccagggtgctgctcgtagtaggggttacaagcacgtcgcgagagggaaagagagagagagggagcccattcgttcgctccttcccccgcgcgaacccccctccaggatggccctggtcctcccttttattgacgcaaggagagggtccagacgtacaatggggggtgtagctatgtgctaa

SEQ ID NO: 24591 - DNA, 1169 bp, Zea mays
  Peptide Sequence Number=SeqID_67966
agattcgtctgctccttctgactttctccctcgcgctctccctgctctgtgctctctaccctgtccctctctggggcacaccgcacacactcgtcgctcgcaacatggtcaagcaggaacgcgtctcgacggtgaccgtcgcggccgtctcgacggtggcaccggcgctgcccatgcaggagcaccgactgccgctgtcgaacctggacctcatcctgccgcccatcgacgtcggcgtcttcttctgctatgacgcggaccccgcgggcggccgcagccaccagccggtcgccgccgtcctcaaggcggcgctggccaagacgctggtggcgtactacccgctggccggggaggtggtggccaacgcggcgggcgagccggagctgctgtgcagcggccgcggcgtggacgtcgcggaggcggccgccgacggcaccgtgctgcgggacctgcgcctgggcctgccggacgagagcgtcgagccgctcgtgcccaagaagaaggccggcgtcatgtccgtgcaggtgaccaagttcaagtgcggcggcgccgtggttgggtgcaccttcgaccaccgcgtgtgcgacgcctactcgttcaacatgttcctcgtcgcgtgggccgcagccgccagcggcagctcagcgcctccggccccgtgcttccaccgctcgttcctcgcgccgcgtgaaccagctgcggcaccgctccgcaccgccggcagcctcgcggaccgcctcttcgtccccgtgagccgcgcgccggccttgccggacacagccaccgccaaccgcatctaccgcgtgtccgccgccgacgtcgcggcgcttcaagcctcggcgggggccgggcgcacgaagctggaggcgttcacggcccacctgtgggggctccacgccaaggccgcagcggcctcgcggcgccagcagccgcgttcgtgctgcatgggcgtggtggtggacgggcgcagtcgcctccgccgcgacggcgccatgggggcctacttcggcaacgtgctgaccatcccctacggcgtcatgggcaccggcgccctgggcgaaatggcgctcgcggacgtggccggcgacgtgctccggtgggtggcggaggccgcgaccggcgagcacttccgcgagctcgtcgactgggtggaggcgcagcggccgtag

SEQ ID NO: 24592 - DNA, 246 bp, Zea mays
  Peptide Sequence Number=SeqID_67967
atgtcttcgccggaggctcctactccggtgaagacaactagacggaccccagaggggccccgtgctctccggtctacggagctgaagatcgccttcctccggaaacccttctggattccccacgggtctaggcttccgtcaggtggggacccaggtcgggacctagccctacgacaagtaccaaaccaggaagggctccgcaactctcccccagcagggaaggacccttcaagttttttcagataa

SEQ ID NO: 24593 - DNA, 441 bp, Zea mays
  Peptide Sequence Number=SeqID_67968
atgggctggaggcccgcttcttcctccagcgttcgggggagaagggcgttcgccagccttgcggaggaggtgaacttcgggtatgcgggaccggccgactgtaggtgccgccggccgccgcgtgcctggttccccagcttggatggcctcaacgtcgcctccgatgctgcctcctgccgtttggttggggcgtggttgtccatccaccgcacgagcgacggtcgcgccgtgcgcagtgaggacgggagcgaggacctcttcacgcatgctgggtggccaccattcgccggtacggcactggtgcgcaggtggccgctgtcgtcggtgctgaggtggtcgccgccgctggtgaggctccccactgcagaggtggttgcctccgctggcaagaccgaagatgggggcgaggaccttttcacagcggcgtacgtgctgaggtga

SEQ ID NO: 24594 - DNA, 1137 bp, Zea mays
  Peptide Sequence Number=SeqID_67969
atggacgagtctggtatgccccactctgatgatatgtcccgagttgtggaccaactcttaaagttgttcgccacctttatagaggattgggacgcttcaggtggtatcagagctgttaggttggccgcaggacaagtcagatggaggttcagtgccaaaccagttttccagaaggaagatggtttccccgagttgctgagagcatgcacagttcgcctcggaatcaggagccagccagagtatgatggtcgtgaattcgtcgagcatggcacagagaagtgtgtcgtgactgtatacattggatccagtctgcaccatgtggaatggagtgtcactgctgctggacacagattcaaagacacccgccaaagagaccgtctcgcttggatggccaggatgcatgcattggaggagcaacagctgcttgaggacgatcccacagtcatgtacctcactgcatacctgctcacccttgatgcacagtatgatttcttggttcggcaccaccgtcagatgattgcccgagcagaagatgcagagaagcgcaaccgtcaactccatgtggatctcaccacagctcaagcccgtgtagctgccttggaaagtcatgaagtcattgctgttgaagccctgaagcaagccaaggatgagcatgtccagaagttgatggaggcctacttggtaacccataaccaacgtagagccctgcggatccaagagcccgctccatccaacccagttcaacccaggagagtagaagacccccagattcttgaaggtcacccggtctctaccagaggagaaaagaaggcttgggaacccccggaaggagccatagtcttggaaggaattccagtctcccctaaggctatggacaagcaagagcaccctgaatcctcccaagatcccccgctagagttgtttgagcccctcaccatgaagaagattccagcaccctcccttgaggtcaaagaagaagctgcaagcaccccgccaacaccatcgccctctaaggaactacaagagcgagtccagcttgaagaagagttcgaccctgtctcgccatctcagtcgccgccaaaagaagtcatcaacatcagctccatcttgacccatccaggagatgtctcagattga

SEQ ID NO: 24595 - DNA, 516 bp, Zea mays
  Peptide Sequence Number=SeqID_67970
atgggctggcggcccgcttcttcctctagcattcgggggataagggcgtttgccagccttgcgaaggaggcaaactccgggtggctttggtgccgcctccagcgctgcctcctgccgcttggatgggacgtggctgtccgtccaccgcacgggcgacggtcgcgccgtgggcggatcggccacacccacggcttctcccgcgccgccgaccgcaccggggggtcgtacaagacgtcgtactccgcgggggcggtggcggcgttcttggatggtcttgtcctcactcccgcagtgaggacgggagcgaggacctcttcgcgcgcactggggcggccgccattcgccagtacggcactggtgcgcaggtggccgctgtcgtcggtgctgaggtggtcgccgccgctggtgaggctccccactgcaaaggtggttgcctccgctggcgagaccgtcagtgccacctaccgccggacctccggctctttggctttaatggcctcgttgtcgcccctgtaa

SEQ ID NO: 24596 - DNA, 240 bp, Zea mays
  Peptide Sequence Number=SeqID_67971
atgtccatcttgttttcagtgtttctgctatgtctgcgacatcgctgccccatgtgtgtcctggaagggacctggagggcactgcgacgcttcggacagggacaaacagtggaaggctttgaggcgcatgatgcaagtcaacaaaagcaaagcctagttgattttgcccccgatgctaggtctggcaatcggcattttggagtctcagcttgttctgatgggaaggttatcttggagtaa

SEQ ID NO: 24597 - DNA, 735 bp, Zea mays
  Peptide Sequence Number=SeqID_67972
atggtggtggccacggaggaaatggtggtctactgctttgacaccctcgtcgcctatttcaccggcgagcggccgccgcctcccgccttcgaggatggaaaccacccattgtttgtgacctggaagaaggctgccaatggttcagaaccacgcctccggggatgcataggaactctggagtcccgtcagattgtcagcggctttagggactacgccctaactagtgcgctgagggaccgacgctttcccccaatacaatcaaaggaactcccaaccttggagtgcacggtatctatactcactgattatgaaattgcagaggactacctcgactgggaggttggaaagcatggtttaattattgaatttacagctccagactccaacacaaaacacagtgcgacctatttgcctgaagttgcgggccatgaaggttggacacatgtagaaactattgattcactcgtgaggaaggcaggttaccagagaatcatcactgagtccttgaggaagaaaatcaaagtcactcgctaccagagcaccctgtacacgatgcactatggtgaatatgttgcgtacctcaagaagaacagagtttcatttcaaaaaatggaccccaacctcggcgccatcatcattggcgtcgaagtaaggcacaacgacgccagtaccattggcgccaacttttcctacgtgccagccgatgtggcaaatcccagggggtcggcgccatag

SEQ ID NO: 24598 - DNA, 597 bp, Zea mays
  Peptide Sequence Number=SeqID_67973
atggccaagaagtcggcgtccaccggggcagcgattacggccacgaaaagccccgcggcggcgtcaccgctgattgtgatcgaaatcccgtcgtcacctgatgcctccacgggtggccgccgctcgacgacgaaagcgcggaagaggcccgcgctgtggccgctcgtccttgacgacgagatcgagatgtggacaccgcgggagaagcggcgcctcgacgaggactgtcagatcctcgccggagaccctctcgcctccaacatcgaggtggcccccgccgccgccagtgacgaaatcgcggtcgttgcggagcgaggaaagattgcgtgcagagattacccacatccgaggtctgcttgtgcaaagcacccatttagtagaacccctcatgaacgctattgtgaccagctgttggggtctcaaattgatgtcctgttagacactttcaacttacatgctgttatggccctggtgggcactgctgtgcttcgaggagagatggaaatgtggaacaacaaggtcatgaagggtctcattattattgcagcattatgctcaaacttatcagaaacttctgacagcctagaaactgcatga

SEQ ID NO: 24599 - DNA, 975 bp, Zea mays
  Peptide Sequence Number=SeqID_67974
cctccccgccacggcagcccagcgcgccagcgccgctcggcccagctcccagcgcgacgccccgcagcccagcgctcgcccgagcctgcgctcggcccagcggccgcaccagcccagcacgcgatgccccgcgcccagcgcttggagcgccagtgcccgccgccgcccagtgggacccgcgcgccaggaagcacggtttcttcccaaaccgaaccgtaggaacaaccgcccgtcgcgcagattttctctcgccagtcacgcagtttttccgcccaattgcccagttttctcgtccacgacctcgctctccgcctcgccgaaccaccgccggagccacgtcccgctggagcgtcgccgctcgtccgccgaggtgagctcgcttcttctttcctctctccaccgctctcctcctcgccgttcgctcgccgcgaccggggctcggctgagccggcccggatgccctcgtctctcctcctctggcggctcagcacgcccagccgcgttgacgtctagcgccgtagcagccgcgtcccgcttcgccggcgaacctcgcccctgcgcatcgcagccgagtcgctgcgcgctcgctgcatgcccagctcatcccatgcctctggtcgccggtgcgctgcgagcacggccaaacccagcccaaatcagcgagccgccgcgagtccagtaccccgtgcccgatcgaccgtggccaccgtggctagctatggtgaccgaaccgccgaccccgaccccgccggtgtccctgcagcccgccccgtacgttcgcccaccatctccgcgcctcgagctcgttggtagccgtgtcgtgcacgtcaaatcgcgcgcgcgcagcgcctcgccgtgctatcgcagccgcgtcgcgcaactagtgcgcgcgcttgagctcgcttgcgcgcagtgcgtcgacgggactccgtctacgttcgtctaccccccgtctacccctcgtctaccccccgt

SEQ ID NO: 24600 - DNA, 432 bp, Zea mays
  Peptide Sequence Number=SeqID_67975
atgaactacctccacaccaacaactcgccagctgtggcgatcacctcagcatgtacgccgctgcggaaaggtcctcgcccccgtcttcctacggggggtgacaacgaggccattaaagccaaagagccggaggtccggcggcaggtggcactgacgatctcgccagcggaggcaaccacctctacagtggggagcctcaccagcggcggcgaccacctcagcaccgacggcagcggccacctgcgcactagtgccataccgacgaatggcggccgccccagtgcgagcgacgaggtcctcactcccgtcctcactgcgggagtgaggacaagaccatccaagaacgccgtcgccgcccccacggcgtacgacgtcttgtacgaccccccggtgcggccggcggcgcgggagaagccgtgggtgtggctgtaa

SEQ ID NO: 24601 - DNA, 753 bp, Zea mays
  Peptide Sequence Number=SeqID_67976
atggcggcggccacctctgcaccgacaactcgccagcagcgaaaggtcctcgcccccgtcttcctacggggggggggggggggcgacaatgaggccattaaagccaaagagccggaggtctggcggcaggtggcactgacgatctcgctagcgaaggcaaccacctctacagtggggagcctcaccagcagcggcgaccacctcagcatcgacgacaccggccacctgcgcaccagtgtcatactggctaatggcggccgccctagcacgcgcaaagaggtcctcgctcccgttctcactgtgggagtgaggacaagaccatccaagaacgccgtcgtcgccttcatggcgtacgacgtcttgtacgaccccccgccatgccccatccaagcggcaggaggcaacgccggaggcagcaccaaagccacccaggccgaggaaccagacacgaggcagctgacggcgcctcagacggccggctccgcttacccggagttcgcctccttcgcaaggctggcgaacgcccttctccctcgaatgctgaaggaagaagcgggccgccagcccatgcggaaggcgggaccccaactcggctcgccctcttccctagcgcggatgatgaacatccttgaagctgagggcagggggaggccgcagcccggctcgcttctctccaccacaaggctggtagtcatccttgtggatgaccaccggccggaggttgcgaccgagctgcgtgatgaaaatccttga

SEQ ID NO: 24602 - DNA, 393 bp, Zea mays
  Peptide Sequence Number=SeqID_67977
atgggcaagaacaacaagcgcaagcgtgagccaactcctccatcggaggagtttggtgactcggagtacttagaggaggagttctcctctgagtctgaggggtctccggctcccatccccctgcgtgagtcgtctgacgactcagacgactcccaggggctcgcggcggaggtttggacgtacatccgggccgtcgagcgctccgggctcgagggctcggatgagtcggagtactcctcggatgaggaggactcggacggcggcggcgaggacgaggacgaggacgacgacgacgacgacgatgaaggcggtggcgacggtgacggcggcggcagcaggggcggcagcggcggtggcggcagcagcaggggcagcaacagggccagtggatag

SEQ ID NO: 24603 - DNA, 222 bp, Zea mays
  Peptide Sequence Number=SeqID_67978
atgcccacgtatgtcgggaatgggactccgatgagagctccaccgactcctcctccgacgaggggcaccgccaacatcgccgtcaccaaaggcctcctcttccccaacgtcggccacaagtgcctcatggcaaaggacagcaaaaggaagaagcatcaccgactagcccatgttgggatgaagaatgttaacaagcttctaaaggaaaaatctcaaacctag

SEQ ID NO: 24604 - DNA, 423 bp, Zea mays
  Peptide Sequence Number=SeqID_67979
atgggcaagagcaagaaaggcggaagctcatcacaccattccggcgacaagcgaaagcacgagccgactcctccctcggaggacttcgacgattccgagtactcggaggaggagttctcctcagagtccgaggggtcgccagtccacgcctctcccccggcgtcgtccgatgactcggacgattcccaggggatcgtcgccgaggtgtggacatacatccgggccgtcgagcgcttcgggctcgagggctcggatgagtcggaggcctcctcggacgaggagaactcctctgactcgtccgaggaggagagcggcagtgacgacgacggcgagggcgacgacggaggcgacggcaagggcgtcggcaagggcgatggcaagggcggcagcggcaaggccagtggcaatgcgtcgttggcttaa

SEQ ID NO: 24605 - DNA, 462 bp, Zea mays
  Peptide Sequence Number=SeqID_67980
atggagatcacgctcaagggtttgctgacatatcagagcgacttccagaaggggaggccaggaatcgaagcggaggaggtggggatgatggaagcaccaaagtccgttcagaatctggtggcgaacgccatatcggcgcgcgtcatctccattgagaaggatggctccgtctccgacacgccagcaacaccatgctgtcaccgccgcgagcaggcgcgccggtgcgggccacgtcgcgagcgaacgcacgagcgggcgccaccgtcgcccccagccgtgcggacgagcaagcgcccctgccgccgtcgcgggcacacgcggaccttcgccgccgccgcgcaggcgagcgtgcgcgggccgtcggcgctacacaggcagcaccgaaccgtgccccgtccaggcgcccctgtcgccatcgcgcaggcgagcgcaggcgggtcgccgtcaccgccgccacattga

SEQ ID NO: 24606 - DNA, 66 bp, Zea mays
  Peptide Sequence Number=SeqID_67981
atggagggcgtgctcgcctaccgcctgggacaccgtgtctgcacccgtcctggtatttacatatag

SEQ ID NO: 24607 - DNA, 288 bp, Zea mays
  Peptide Sequence Number=SeqID_67982
atggcggcggtgggtgcgctgcaaaggggggtgggcggcggtagtgcgctgcaaagggggtgtggggcggtggtagtgcgcatggaggcgggcacgcgtgcgggggcacgagtgagtggtggggtcgatgaccctgatgtttgtggtctctggttccaagaatctttgcctctctgtatgcttgttccaggcttcaagggtaagctttccggtatcttctttggtaagggctctagccaaagtgaagaaaaacttcactacccaatgcacgcagaggactgggcataa

SEQ ID NO: 24608 - DNA, 675 bp, Zea mays
  Peptide Sequence Number=SeqID_67983
atggagccgcgccaccgcgagcgggacgcgccgccaccgcgcccccaagagctgtccgcgtcgctgccgctcccccaagagctgtccgcgccgccgccaagccctagcgagcggggggattctgacactgtttcctctgttgccaggttcacaacagtgtttagccatgacaaggattcaatttcaagggtctggacaggaaaggaagatgttcgtgcaatagcaaaggaagctcgatctgcggctctcaaacttctgtctgtaatggcggccattcgctgggatgacgagccagataggattgaaagcatcctcacttcaacacttctggaaggctctgttgtatcaaagattgcaagtgctgcttctgctgatccacttgcttctaccacttgggaagagcaagctcacaggcgcgataatagtaaactgcctcctccttgggcaatcgtggccattgctattcttggtttcaatgagatcatggtgcttattaggaatcccatttatctgttcttgctatttgtgggctacttgatggtcaaagctttggcgatgcagctagatgtcagcagagaattccagaatggagtggttcctgggataatctctgtgtcggtgaagctcctaccaacgatacagaacctgctttctaagttaagttattttgtttaa

SEQ ID NO: 24609 - DNA, 342 bp, Zea mays
  Peptide Sequence Number=SeqID_67984
atgcgtttgttaatgggttcaaatgaaaacccaacgggaacaattggatctataccattaaaagatccaaactttagatatataccatggaccccacatgtcattgactcatgtggacccacatgtggtgatgatgaaggtaatgatggaggcgcgtggactgtgggaggcagtcgacaccggcaacaacaagcgcaacaaggattagtgagtgatggaggcgatcctacgagcggttcctctagagatgcatcagtccttgggggcaaatgtgatgacaaaggaggccttggacaacctaaagactatgcggactggcttagggctggtgaagcaggctaa

SEQ ID NO: 24610 - DNA, 345 bp, Zea mays
  Peptide Sequence Number=SeqID_67985
atgtcgggaagagatcctaaagggaaggggaagatggtggatgacaacatcgagaaagacaagacgcccatcaacgacaggacgaaagatgagaagcccatcgactcaaagaagaaggatggcaagaagaaacgaatcaagaagatcgtctactacgagacagactcttctacaacattgtccggtgagccaacggtcgccgggccaacggtcggccgcttaatccgggcgcgacgcgtggccgagccaatggctagaagggggcaccggaatgtccggtgtgcaccggacagtgtccgatgcgccaacgactccaaggcgccaacggtcggcttcgccaaataa

SEQ ID NO: 24611 - DNA, 855 bp, Zea mays
  Peptide Sequence Number=SeqID_67986
atggggtcgcgctcctcaaacagcagcaaaaagaaggcaacgcagggaccgggaaagggggtatttcgaaaaaggacccttcccagcgaaggaaacgggccccgagccctcctactgatcagggggtcgaaggttgcgccctccggggttcggcaaccgccccagagcactcgggctctgagccctctactgatcaggggttcgaaggctggcccctcggaagggtttgacagccgccccagagcacgtagagtcagggatgaccctgggtacgtctgttacatggccgaggctcgggctacgctcctgaggtaccctaggacatttccgagaccagcaggaacaattgtaatggaatcccaccggagggaggcatcgagccctcggaccctattgaatgggtctgggtccagcgaatcacctgcagggacacgcaacaacaaatttactagttggttgacggtcccagcggatccgaaacgccgacacctgtgttatgatgatgatgatcctatgtgccaaaggttcatctacaactatactaaatcgactgtccggaataccatagattattccagacaggagaagctttttggaaaaacaggccaagcgcggaccgtccgggcccttgcggcggaccgttcgcaacaccaggatgaccctcggacagaaccaatgcaaaaatccaagtctgcactacggaccgtccggaggaaaagcaaggaccatctgacacctcgcgcggaccgtcgggcctcaggcgcggaccgtccggtcgccgttgatcttcaggcgcggatcgtcaggaccaggcgggcggaccgtccgcggtcagcagaatggagcaacggctag

SEQ ID NO: 24612 - DNA, 550 bp, Zea mays
  Peptide Sequence Number=SeqID_67987
ggcggatgcgcttgcagtagggggttacaagcgttcgcgagagagggagagagcctcgttcgtcagcccgtcctcccgcgcggccaccctttcgtacgagggccctggacctttcttttatagatgtaaggagagggcccagggtaatgatgtaccccccctgcgacatggtcggtccgagcccgaggtcgggcgaggcggtgactcctccgaggtcgaggctgagtccgagccctggggtcgggcgaggcggagaccgtcgtccgaggtcgaggttgagtccgagccctggggtcgggcgaggcggacaccgtcttccgaggtcgaggttgagtccgagccctggggtcagtcagtggaggggcgaatgactgtgatcactttggccttgttgactgaagagcgcgcgtcagataaggtgtcaggcgatccttgcattgaatgctcctgcgatacggtcggttggcgaggcgatctggccaaggttgcttcttcgcgaagcctgctcgagctgggcctcgggcgagtcgaaggtgcgcccgttgcttga

SEQ ID NO: 24613 - DNA, 753 bp, Zea mays
  Peptide Sequence Number=SeqID_67988
atggcggcagcaggcgagcggaagcggcagtcaaatcgtctacatgctcacgtcccctcctggggcagcaggagagccctctcccacggtgtgaagatgacgcgcccgtgttccgttcctcgaacggctcgcgcaacagctgccccgcgaaccacttgtcccgtcgcattaactccgcggcagggcagacgacacctttggcaggcgaagcgggcgacgcttcacctccgccatgatgaccgcatcaaaaaagggaccgggaaaggggatactccgaaagggatccttctccgcgaaggaagcgggccccgagccctcctactgatcagaggttcgaaggttggcccctcggaaaggttcgacagccgcctcagagcactcgggctctgtgcccaccactggtcagaggttcgaaggctggcccctcagaagggttcgacagccgcctcaggccactcgggctccgcgcccactactgatcaggggttcgaaggctggccccccgaagggttcgacaaccgcctcagaacacgcagagcaagggatgactctgggtacgtccgatacatggccgaggctcgggctacgctcccaagaggctcgggggctgctctcgcaaacccggcttcggccaaacagttgacagcgtcaacataccagcccgagaactcggaacctgactatgcacccgggctacgaccagttcgcatgagggaacaactagaccggccgaggcatcacgaaaggcattaa

SEQ ID NO: 24614 - DNA, 951 bp, Zea mays
  Peptide Sequence Number=SeqID_67989
atggggagcgcccgcgttgctttcatcttgctgtcattggaggagcgcaacttcgcggaagttggcagtccggttacatcccgtcaccaatggtcacccaagacggtgaccaccagttcgatggtggggagaagcaagccgggctgcgacctctgccccaccctcagcttcaaggatcttcatcatccttgctggggcggagggcgaggcgagccggggcctgccttcgcatgggctggcgtcccgcttcttcctccaacttctgggggtggaaaccatcctccagctctgcggaggaggcgccctccagccatgccggggaaggcgaactgctgctgcccagccagggtgcaacatttcatcctttgtccgggcgacggtggccagccgcactggggggtctcacaacacgtcgtacgccgcgagggtggtactcgtgttctgggatggtcccattctcatttttgtggcgaggacgggagtgaggacctgccggtgcgctttggggcggccggcgcccgctggtgcggtgctggtgggcaggtggacgccgccgccggtgccgaggtggtggcagctggagaaagcttctccgccgacgagaccaggtcgccggcgagtcacccggagtttatcgtcccacaggctctccgatgtggaggttgttcatacccgcgggagtggaaccggagttccgtttgtaatggcaccttgagtgctggcgagtccctcggctcggtcggccttgccactcaaggcttctcttgctcagttaaagagaaccatcggccgctctgcgatgagccggagccggaggcagcggttgccgaggccatgagccgagctgatatcctcggggggcagctgtctgaggctacggagcggccagtccagccgtctactcgggccaggttcctggaggagatcctggcggcgatggctcaggcgtag

SEQ ID NO: 24615 - DNA, 180 bp, Zea mays
  Peptide Sequence Number=SeqID_67990
atggctaaaaattttggcagcgaaacagtgcaaatagcaatgaatgctgtggtaacttcacacctactcgtctgtttatatagtgctgcagcatttgagaacaagtccccaacacctctcgaccccagcaacgacgcctccaagcaagtccggattggctccgagctcgaccccaaatag

SEQ ID NO: 24616 - DNA, 979 bp, Zea mays
  Peptide Sequence Number=SeqID_67991
atgtcgcggtggaagactcaaactcgaacgcctaggcggtcggcggacggcggctacgtcctgacttctgcgttcgccgagcagcgatcgccgatgccgatgccgattggcgattgccctgcccctaaatctgaatgccctgcaacgacgtcttcatgtctcggcggctgcccgtatcaccgcgagcgcctctcatgcatgggcgtagggccggcgctggctggcggcctggcacttgggctccgtggtggaagtggattagtggaacgtggcacgcgtaaggaaaggatccaggtgtacaacgggggtgtagcaggtaatgatggcgcctcctgtcgacgtggtcggtccgtgccctgggttgggcgaggtggaggctcctccgaggtcgaggtcgagtctgtcttccaaggccgaggtcgagtccgagcccctggggctgaggcccgagtccgagccctggggtcgggcgaagcggagttcgtcgtcttccggggcctgagcccgagtccgagccctggggtcgggcgaagcggagttcgtcgtcttcccggggctgagcccgagtccgagccctggggtcgggcgaagcagagttcgtcgtcttccggggctgagcccgagtccgagccctggggtcgggcgaagcggagttcgtcgtcttccagggctaagcccgagtccaagccctggggtcgggcgaagcggagttcgtcgtcttccggggctgagcccgagtccgagccctggggttgggcgaagcggagtttcccatggcgcctagggccggacttggctgctgtcagcctcactctgtcgagtggcacagcagtcagagcggcgcaggcggcgctgtccccttgtcaggccgttggcgtggcgatttggccaaggttgcttcttggtgaagactgggcctcgggcgagccgaagctttgtgctgatgggggttaccagctgagatttaggagccttgagg

SEQ ID NO: 24617 - DNA, 228 bp, Zea mays
  Peptide Sequence Number=SeqID_67992
atggccacgaccgcgcaggcgtccgtcgaggggttcaactgcaccgccaaccgcacgtacccatgccaggtgtacgcgctctaccgcaccggcttcgcgggcgtgccgctcgatctcgcggccatcggtgacctctttgccgtcagctgcttcatggtcgcgcacgccaacaacctctccacgacggccgcgctggccaacggacagccgctgctcgtgccgctctag

SEQ ID NO: 24618 - DNA, 897 bp, Zea mays
  Peptide Sequence Number=SeqID_67993
atggttatgaaggctggggagcaccaggaggataaggtgggggaatgttttgtccggtttggacatggcggtggcctgactccttccagtataatcgttaaggacatcctactgctcagaggtggaagggttcccacatctgttgcgaagttgtgcgcttcgcatgggaatccgcaaaaaagccagaatatgtctggaacgagtatctcgagaatgggatggaaaagtgctctatggcagtctacctgggataaagctgaaactatccgaaccatccttctttccaagtcactttcaccggataccgcttcccagatacttgccaaaatgttgcccggaaagccctccgacaactatgccagagctacaacaagcaacaaatatacacctgcctggaggaaaagacttcaggccctgtcaggaggagacactattgaggatgaccccaccatcgtctacatggctggataccttcacaccctcgataaccaatatgatgaccttgcctcccactgcactcacctaaactcccgggtggaaagcttggagcaaaaagtcagggaacttacaaaggaaaagacgtcccttcaagagagcctcgagatagcagaaggtgaggaaaccaacacccgtgaggcctaccgcacactgaaaatggattacgacaagaagctgaagaagctcgcccctgcaagaaaactccgcaagaagaccaaaagtcaaggatgtcagactgagcagaaggaagaagcccctccagccctacctcctaccaggataagaaactcgtccgacaccaaggaaatgtccctagccagccttgatgaccttctcaaggaatttggggacactttagagaaggagttcgggagtaccctcgatagcactcgcgtgtaa

SEQ ID NO: 24619 - DNA, 471 bp, Zea mays
  Peptide Sequence Number=SeqID_67994
atggcggaaacaaaaaccgacatggtagtagtggtggttctgatggcccagaggacgagtcttttaagcaatcgttatatgagttttggtactgttgcttgggtagatgtgaacgaatatgagactctgcaacctgacaagattgctatggatggaggggaacaaaatctgaaggaactcaactcaatgttctcaaagcctgtgaaagagcatttgtcaactgatgaaggagaggtagacgacctagctgttatttcgatggatagcaaaggcatcgatatccgtgtccaacaaggtgcacaggtgcaactttctgaaaagggtgccggggctttaacgactcttgctaaggaatgcttcctattttgccaaaacaccttgtcgatagagcttgcaaacttttactatctgaagaatgaagatttgatatgtagttcactggaatcttcttgcatgatgggatttgattga

SEQ ID NO: 24620 - DNA, 483 bp, Zea mays
  Peptide Sequence Number=SeqID_67995
atggagatgacggccgcgcgcctccagcacgaccctactgatgtcgaccatcctttgatacatgcacaggacttgcaggttttagtctgggaagccaagttgtgtgtccagaccccttggatcgcggttccagatactaggacacccgtcgcaaagtggtggagcatgcaggcttacggccaacaggccgggtttatgagggcggacctcaccggactggcgtacacgtatgcgcaacctagttacaaaagagagaaaattcaatccctcaggcttgctcctatggacagaacttatagagatgctccagaggttaggaagaggtgctccagttgcagcaaggtggtcacccccgggtcggcacatttccgtcaccttgaagggttcagaacccctcttagttcagtactcaccatagggctaggtcccgaccctgggttcccatctgcgtttgctgataaagtccatgtcctcacactgtag

SEQ ID NO: 24621 - DNA, 1356 bp, Zea mays
  Peptide Sequence Number=SeqID_67996
atgcatcgcatcctcccaccttccgagcccccggatggggagcgtccgcgttgccttcgtcttgtcgttggaggagcgcaaccttacggaggtgggcacccttcagccatcgctcggcttcaaggattttcatcaggcagcccgactgcattcccccaccgatggtcacccaggatggtgaccaccagctcgatggtgaggagaagcaagccgggctgcggcctctgccctgccctcagcttcaatgatcttcatcatccttgctggggcggggggcaagttgagccggagctctacctcccgtatgggccggcgggccacctcttccttcagcattcaggggagagggcgctcaccggcctagcggagggggcggacttcgacaacgcggggccgatcggccgcaagcgtcgtcagctccagcatgcctggctcgctgactcagctggctttggcgtagcttccggtgccacctcccaccgctggggcagagtgtggctatctgccggtgggcaggtggctgccatcgtcggtgctgaggtggtggcagccagaggaggtttctctgccgacgagaccatcggtgccacccatggaccgacctccggctctttggctttgatagcttgtcctcgcccctcgagtggggacgcgggcgagggccttgtcgcagcagcgtctgccctgagaaaccctcgactgctctgcgatgagccggaggcagcggtgtcagcatggacagaggcggagtcggctcgggaagaagcttcgtcggcccgggagcacgtgggctccctggccgaggaggtgcagcagcggtggctggaacctggccaggtcatcgactggcgggaccaacctcggagtcgggctgccgaggccatgagccgggctgatgtcctcgggggacagttggctgaggctatggagcggcctgtcaaggtgttcgcccgggccgggacccttacggagaccttggctatgatggtccgaggttggtgctggcttccatcttcgaggtggagatccttccgcccgcgtcgccgtccgaggccgggccagattccgccgaaggtggagacgacgccgagggtgctgctgctccctctgttgatgtctgaatctgcagggagagacttgttcgtcggtaacagaatcgtttatccgagcgagagttacttttcacggatggtgatgagtgaggagtccctcggctcggtcgaccttgccgcttacgtgtactccgtcattttcaggatccctgctatcgaagcagtcgaaaagcgcgaaagatgttctagcagaaagactttttccgaggaaaacgttgacgcagagggggttccccccttctag

SEQ ID NO: 24622 - DNA, 531 bp, Zea mays
  Peptide Sequence Number=SeqID_67997
atgaggctgtcagcagctgagtccagcctcaggcgccaccggaagctccgcctcgcccgaccccagggctcggcccccgcctcggcctcggaagatggactccgcctcgcccgaccccagggcttcgcccccgcctcggcctcggaagatgggctccgcctcgcccgacccaagggctcggcctcaaccttgacctcgggcggaattgcgtcctcgcccgaccccggccttggcctcaggaggagtctccgccttgcccgaccttgggctcggactgaccacgccacaggggggatcatcattaccctacccctagctagctcaggctacggggaacaagaccggcgtcccatctggctcgccccgtggcacggcaaagatggcaaaagtccatttggattggaggataaggaggtggaaaagcagagcaaaaggaggagcacaacagaagtagaatcttatcggttcccgcgcaaacgtgcccgagtcgcctcgcctcactttctcattctgcggctctgctactggtag

SEQ ID NO: 24623 - DNA, 951 bp, Zea mays
  Peptide Sequence Number=SeqID_67998
atggaggcccaggcccacgcgtcatgcaaccggcgcgccggttgctacgtgcgagcaactgcgcaactgcaccgccacttgcaccactaccacgtctcctcgaccgcggaaccagcgggcaggagcagcggtcacgtcgtcagccaagcttacgtcccatcaaggggcagcgagagaaccctctctcacggcgcaaagacggcgcgcccgtgttccgttcctcgaacggcttgcgcacgcgcaacggccgccccgcaaaccactcgccccgtcgcattaactccgcggcgggacagacggcgcctctggcaggggaagcaagcgacgcttcgccttcgccataatgaccgcgtcaaaaaaaggctccgagcctccctactgatcagaggttcaaaggctggcccctcggaggggtttaacagccgcctcagagcgcgtgggctccgcacccactactggtcagaggttcgaaggccggcccctcggaagggttcaacggccgcctcaggccactcgggctccgtgcccactactgatcagggctcaccggagacaccatgttcggcgccctccgagggcaacatggcacttccccccctcctccttgcggaaaggcgacgcaggggcgtatgtaaaaaagtcgagtctgtccttgaccgtcctctcgccctgtgcagaggctcgggggctgctctcgcaaacccggctccgacggtctctgtctcgcccgacccaggggctcggactcgacctcggcctcggaagacagacttgacctcgacctcggaggagcctccacatcgcccaacccagggcacggaccgaccacatcaacaggaggcaccatcattaccctaccccaagctgactcaggctatggggaacaagaccggcgtcccatctggctcgctccgccagacaagtaatgatggcgccccgcacgccctatga

SEQ ID NO: 24624 - DNA, 783 bp, Zea mays
  Peptide Sequence Number=SeqID_67999
atgaacaaaagaccggcattcaaggtgccattacaaacggaactccggttccacctccgcaggcacgaacaaccccacacaattggggggcctgcggagcaacagaaggccaacggacggctcaccgtcgcccgctccagcagcagtgacaacgaccctcgctacgggtggccgaactgcagcagcgatggcctcagggcgcacgccgctgcaaccttgccctcgcccacaccgacgctcgaggggcgaggacaagagccgtcagccctccggcagatccccactcagatcctcccggacgagtggagcaccgacctccacgcggaggcgccgtaccggtgcgaaggcaggatagccccagaacacgaacgccgccctagcagcgcgcgacgtcttgggcggtcctcccgtgcgcgcggcgcgacaaccgcccttgcggcaggagggggcaccgggagccaagccggcgagcccaacgcgctgaagctgacgacgcccgccgtcgaccaaccccgtgttttcgaagtccgcccctctcgcagggccagtgagcgccctctccctcgaatgctgaaggagtggctggcccacgaacccgcgcaggaggtagagctccggctcagcccggcctccgccctagcgagaatgatgaacatccttgaagctgagggtgggatcaagatcgcagcccggcttgcttctccccacccagggctggtggtcaccgtcttgggtgaccaccggcgaggggatgcagccgagctgactgatgaaaatccttga

SEQ ID NO: 24625 - DNA, 696 bp, Zea mays
  Peptide Sequence Number=SeqID_68000
atggcgagggtaagcctcgagcacagcgaccacttcgcttccgttgaccaaccccacgtggccacgtcggcgatggaattccccggcagagcaattggagttctatcggtcgatggggagaggaggaagggtgtttccacaactcgcatatatatccacacgctggtaaaaaaggggaaaaatctcaacaaccgtaccgagagcggtggcatcggattcggcgttcggtatgaggagggaaggaaaaggatgacagcgcgggacgacatctcagtcagcggagtcgagcgcgcgctctttgaatccgaccagtgggccccaccgggcagtgccatgcgcacgccacggctgggaagcggggctcggatgagcgaccacacgcgccagaacttgggcagaacgcacgggcacacgtgttcgaccctggtcggcacgccagagctcgcccaacccgcgcgcgcgctcgccccggcgtccggtcaagtccgccgcgcgcccacgccctcggccgtgcccgcctgcgcctataaagcctccccgggcgcacctctcttcgccccgcactcaccctcaccgggccagccacctttccttagctccggcgagctcaattccgcccgccattgccgccagagcttcggccaccgtggccagcccactccagccaccctctggggaagccagtgcttcggctag

SEQ ID NO: 24626 - DNA, 294 bp, Zea mays
  Peptide Sequence Number=SeqID_68001
atggggaagcctgtcccatcactcctcatgctcctgctcagccgaggcggggtcccactcgacagtccaacccggtggcaagatggacgaccaagtcactccagcaaccattacaatggatcaagcagtctcattaactgcgagaagcagacgattcaaaacgagtttttatccttgcaagtgaccgcacttgtacccaccataaccggaatgggagaccacgtctcaggtcgcgtgaggggtaaagtctgcgggcaggttcactcaggatttggtaatcattatgctaagtaa

SEQ ID NO: 24627 - DNA, 159 bp, Zea mays
  Peptide Sequence Number=SeqID_68002
atggcgagagaagcgtgtaccctccatggcaagaggctagatggtggtgtatctgtgctctcggtgaagaagcagcaaacttttgttgcttctgttccaaggtggtgcccaaagaagaaaatcaagactgaagccgcaggaggaagtgtcctcctttaa

SEQ ID NO: 24628 - DNA, 1569 bp, Zea mays
  Peptide Sequence Number=SeqID_68003
atggcgaacattagggccaccgtcttacctgcaatagcgatgcagcgagctcgggccatggcaaacggcggcgaaactcaaaccaggcctcagtgggtgatgctacgggacgatgagtcaccagccacccaggcgcagcacaccacagcgatgcccaccagccaaccctcgagagcaatggcgagggccggtaaagaaggggaaaaatctcaacaaccagttccgggcgcggcagcatcagatttggtattcgaagaacacctccacgtgttcgacgcgttatgggcgcgccagagcacgcccgcgcccgaccccgcgcgccccgtgccacgccaagccgcgcccgcgtctcctgctcgcgcccgcgcctataaatcaccctcaggcgtcgaccgtactcctctgcgcacgctcgacctcaccggagcccgaaaccaccggcgtttgccccgcgcacggcgtgcccgcggccacccgagcccctgccaccgtagaccggccaacagagcccttcccagccacgcccgacccttggaagagactgtgcacgcctcggtgatgctccccgagcatggaatcggactttgcttcgtcggagaagccagtccacggtcgtcggacttcgcccgaccgccggtgaacgtagaccggccggaacacctgccgccgacgagatcacccgcctgcgcacgtggaccggacgattccggccacctccgccgtcaagtcgtacatcgctgtgaccgccaggacctcccggagccaaccccgcccctcgccggacctctctcgccgccgggagctggttacacgacgcctccccagtacgcggtgcagcagttcgagaagcaccgagtgccccgttgtagggtgaggatgaccctggagcctcatcccctacagccaggctggcgttcgctggactatgagtcctttggataccgggctgaggatacgatcgaggcaattgcccttcacggactgaccactttctgcggattccaccccttggagctgtccactcaccccattggcttgttccccgctgagaaggaggacgacccaatttggaaggaccgagtggagcatgccaaggacatctgggctatctacccaggccagactgctcacttgacggtgcggtgcatgaatgccctgtatcgtctgcaagtgatgcgtggtgaggcaatgtcccatctgatggcattgttggaggcaactaagatcaccttggataaccgagaggagcttgtggttgacttatccactgagatggtggaaaaggacttacaggtggagcaactgtcaaatgagatccaagagcttgaggaactagtgggaacaagggagaacaccatcgaggttctcgaggatcagttaattaacacccagcagcagcttgccgaggctaacgagcacctggatatgcatcaccaggagatccaggacatggaggccaacgaggatgtcgacatcgagggcggagaggaacctgcctccagcttggacactactagctcagggagacccccttcccccgagtcgagtgttgcctcgtttgctcactag

SEQ ID NO: 24629 - DNA, 234 bp, Zea mays
  Peptide Sequence Number=SeqID_68004
atggggaagcctgtcccatcactcctcatgctcctcctcagccgaggcgcgtacaatggatcaagcagtctcattagctgcgagaagcagacgattcaaaacgagtttttatccttgcaagtgaccgcagttgtacccaccataaccggaatgggagaccacgtctcaggtcgcatgaggggtaaagtctgcgggcaggttcactcaggatttggtaatcattatgctaagtaa

SEQ ID NO: 24630 - DNA, 396 bp, Zea mays
  Peptide Sequence Number=SeqID_68005
atggcgggttcattatcaatttttaggaggggctctttagaaaatcaacctggccgaaatggtatccaccgatccaggccgtttgaacaaacacggatgacacaaattaaatcatccctcgatactggtatggaaatccagtcactggatcagagatcaccggtcagctttttatgggcaaaaatgttatccgagccacacatcgacatctcaacggtgcgggttcaacggagcaaaaggttgaggcacatcttccagctctcggcaaacaacaggagcggctgcgccaccgcaccgtggctgtggtcacgccggagctccggaatccggcgcacaaatgccctattcccgagactaactggtgatagacgatgtggggacaattgcgaactctag

SEQ ID NO: 24631 - DNA, 210 bp, Zea mays
  Peptide Sequence Number=SeqID_68006
atggcagctggaggtgcagtgcacggggtcggctgcgtggggtacaggggcacgtcggctgtcctcgagcggggctcggtggcgagcaagggttcctggcgcgcggtcgggcgagagcagagaaagagaagagaagggaggagagagagccggtgttacaaatgtacccctcttaaaaagaatctcgtcctcgagattaaggaaggctag

SEQ ID NO: 24632 - DNA, 465 bp, Zea mays
  Peptide Sequence Number=SeqID_68007
atggcagctcgaggtgcggtgcacggggtcggctgcacggggtacaggggcgcgtcggctgtcatggagcggggctcgatggcgagcaagggctcctggcgcgcgtgttacaagcgtgaacagtacggtgatattgttcatctatttataggcacgggacgcagcccgagcaaaagccaccatcaacatttctttgcttcgttgcgagccgaagcttcttcgtctagtgaatgcttcggcgtttacacttgtttcctttggatctatcttcatcatgctggaaagggatcatggctcgtgggtaaagtgtgtgacctctgcagaggaatgaaactgatatatcagtcgtgctcatggttaagagcggccttgggagctcctttgattagagatgcaactaatctgagatacaattgttctatcgatggtttttgctacgatgatgataatgatgttcctcgatga

SEQ ID NO: 24633 - DNA, 264 bp, Zea mays
  Peptide Sequence Number=SeqID_68008
atgaccgttggtggaggctatctgtcgtatggtgcaccggacagtccggtgtacaccggacatgtccggtgcgccagccacgtcaccaatgccgttggattccgaccgttggagcttctgtcttctgggcccgcctggatgtccggtgcacaccggacatgtactgttcaatgtccggtgttagccttcggcgttattgaaaatagtcattcatggctattttcgacaaaaatgggggttgaatggccattcatcatggactag

SEQ ID NO: 24634 - DNA, 360 bp, Zea mays
  Peptide Sequence Number=SeqID_68009
atggcagaagcaagcttccacgtgttcgacgagccgccgacgacccccgccgcttgtgctcgtggccagggtagccccgaccacctccgacgccgacccgcacaccgacgtgaccgtcgcgacctcccggacgtcactgaccaccccgccagagctctactgccgccggcaataccaatccactatgttatcctaaaagaaaacctaagcttaaaagactgtaatcttgctgacggagagtacatcctcgtgccggagcaaggagctgctcaggaggtagccccagatccagcacccgagcctgcaccagaggacctgcctgccactgctttggaaggcaagccccggttttatgcataa

SEQ ID NO: 24635 - DNA, 228 bp, Zea mays
  Peptide Sequence Number=SeqID_68010
atggggacgagcccggtcaggccgcgcgacgggtgcgggagatcctccacggattccgcggattccgttttgggcggcgagtccgacccgaggaaggagaagatgttcctggtttccgggcccggctgccagtcagatgtaattgtggacattactccacaacccatcacactcaatcaaagatccaaatcagacaagcatcataagaacaaacactcaagcatatag

SEQ ID NO: 24636 - DNA, 1602 bp, Zea mays
  Peptide Sequence Number=SeqID_68011
atggctcgccgcgaccacgacgacgacgacgaggaagaggtcgaggaggaggcatacgacttggacgaggaggaggatgacgaggatgaggaagacgactacgaggaggaggcgaggcgcgggaaggcctcccgcggcggtggcaagggtggcggcgggcggaagcggtcacgcgaagacaacttcatcgacgactcggccatcgaggacgaggacgaggacgacgacgacgacggcgggggccggccgaggaagaagggcggcggcggggtgcgagggttcttcgacgaggaggcccaggtcgacgaggatgaggaagaagaggacgaaggcgagggagaggacgattttattaatgatgctggggccgaccttcctgatgaggatgttgttaggggctcaagacgtcattctattcctatgagagatgaggaagaggatattgatgagattgagagacaagtgcgggagagatacgcacgatccactcatattgagtacggtgaggaagctgcagaagtggaacagcaagctctgctgccgtccgtgaaggatcccaaactatggatggtcaaatgtgcgattggacatgagagagaaactgctatttgtctgatgcaaaagttcatcgatcggtcagaccttcagataaagtcagtcgtggcattggatcatcttaaaaattatatttatgttgaagctgaaaaggaggcccatgtcaaagaggcttgcaaaggtctaagaaacatttatgcttcagcaaaaataacattagtgccgataaaagaaatggcagatgtcctctccgttgagagcaaatctgttgatctttcaagggattcttgggttcgaatgaaattgggcatatataaaggcgaccttgctaaggttgttgatgttgataatgtacgtcaaagagtagacgtgaagctgatccctagaatagatctacaagctttggctagtaaacttgaaggggagtctgtaaagaagaaagcatttgtcccaccaccacgattcttcaatatcgatgaggcgagggagatgcatattcgtgtggaacggaggcgagataaagaatctggggagtactttgagtgggttgataatttgaagttcaaagatggtttcttgtacaaatctgtctccactaaatcgatccacacaaacaatattcaaccgaattttgacgaacttgagaagtttaagaagcctggtgatgacatgaatggcgacatggctagcttgtccactctgtttgcaaacaggaaaaaaggacactttatgaagggtgatgccgtcattgttattaaaggcgatttgaaaaatctggagggttgggttgagaaagtagaggatgaaaccgttcacatcaggccaaaaatatctgatctcccgaaaacattggccttcaatgaaaaagagctttgcaaatatttcaagcctggtgaccatgtcaaggtgatctcaggagttcaagaaggcgctactggcatggttgttaaagtggaagggcatgtcttgatcattttgtctgacacaactaaagaacatgaatcaccagaatcggtgattatgaactgcatgatcttgtccttttag

SEQ ID NO: 24637 - DNA, 501 bp, Zea mays
  Peptide Sequence Number=SeqID_68012
atggggggtgtagcagagtgctacgtgtctagcggaaagagagctagtgccctaggcagggcggtgtgggggctcctccgaagccgaggtcgagtctgtcttccgttgccgagaccgagcccgagcccctgggtcgggcgaggcggagatcgtttggctgaggccagggcggagtctgagccctggggtcgggcgaggcggagtttcgtcgtcttccgggtcttagcccgagtccgagccctggggtcgggcggagcggagttcgccgtcttccgggtcttagcccgagtccgagccctggggtcgggcggagcggagttcgccgtctttcgggtcttagcccgagtccgagccctggggtcgggcggagcggagttcgctatggcacctttggcaaggcctgactgcctgtcagactcactctgtcgagtggcactgcagtcggagtggcgcaggcggcgctgtccttctgtcagactggtcagtggagcggtggagtga

SEQ ID NO: 24638 - DNA, 534 bp, Zea mays
  Peptide Sequence Number=SeqID_68013
atgcaggaatcccttgcaggaccgccatcacagcaaaatcctcccgagggcctccccaggaatcccttgcaggaccgccatcacagcaaaatcctcccgagggccttcccaggaatcccttgcaggaccgccatcacagcaaaatcctcccgagggcctccctacactgaccactcccctactgcccttgcccctttcgggtaccaggatgatcttcaggtgactcgtaacctcactgctaaacgtagcaatacagacaaacatgccgttcgctgtgagatcaacgcccggcagtctttctcctacctcgcgcctgagcagaacagccgccccgccagactacggcgaaccccgccgaggaccaaggaggtgacgaactccgacaccaatcgttcctcctccaccaatcgggacctggagtcgctatggaaggcacccaagggcgagggccaggtacctacctatttgtacccgaggcaagagcttcgcacggagttctcgccaggttcaacggacagagcaaaaatcggctag

SEQ ID NO: 24639 - DNA, 279 bp, Zea mays
  Peptide Sequence Number=SeqID_68014
atggacgatatccttgaagaacgctaccgcttgctcggacttgatgttggtgaggggtcggacctcgatccacttggcaaacttgtcgatggcgaccaaccttacgaaggtcttggtccgctgagccagttgtatggcctcagccttgccaagagggagtccctccggaggaggtactccagatatggggccattaaccaaggcttcgtactcggctacgttcttggatgtagcaaagtcgaggcgtattatatagcgcagatgtatgccaaggggtga

SEQ ID NO: 24640 - DNA, 435 bp, Zea mays
  Peptide Sequence Number=SeqID_68015
atggggatccgcaagaagcccgaatatgtctggaaggaataccgcgaaaatggaatagagaagtgctctatggcggtctacctgggagaaagccgaagctacccaaaccaccctcccttccaagccctgtcagggagagaccccaccattgtctacatggccagatacctccacactctcgataaccactacgatgatctctcctcccactgcacccacctaaactcccgggtggaaagcttggagcagcaggtcaaggaacttaagaaggagaaggcgtccctccaagagtgtctcgatatagcagaaggcgaggaggccaacacccgtgaagcctaccgaaccctaaagatggattatgataagaagctgaagaagctcgcccccacgaagaaaaatccaaaagaagaccaagaaccaaggaggccaagctga

SEQ ID NO: 24641 - DNA, 225 bp, Zea mays
  Peptide Sequence Number=SeqID_68016
atgggcaagaacaacaagcgcaagcgtgagccaactcctccatcggagtattttgacgactcccaggggctcgcggcagaggtctggacgtacatccgggccgtcgagcgctccgagctcgagggctcggatgagtcggagtactcctcggatgaggaggactcggacggtggcggcgaggacgaggacggcgacgacgatgacgaaggcggtggcggcggttag

SEQ ID NO: 24642 - DNA, 474 bp, Zea mays
  Peptide Sequence Number=SeqID_68017
atggcacaagggggaaccgaccttaagatgaaaagacttcgggatgaacagtactcccgtactgttcacgctgacttggcattcgcttttgcgtcacgctcgtacttttcgcctttctctcaagaccgaagaaatgattctatgatgatgcttatattatatttcgtgctttacgtgagtccttcgtcattacttgttatgtttacgaagggatcaatcaaagactattaccatcacacagaggaggaaaacaaaggctatgaaccatgtagaatggtcctcaacccaaaaatccccaagcattgtgatctcaagggcaagcgagtggaaaatgagttgcttgtgaataggcatatgggtttttatcagacccagatgggtgatgcaaggagacacaagtctttatcctggtttgggcaagagaagaccctacttccaatggagggggatgagacttatatttcctgcacctaa

SEQ ID NO: 24643 - DNA, 573 bp, Zea mays
  Peptide Sequence Number=SeqID_68018
atggagagtgtccggaggtgtggcaggccgcagcgaggtggggtcaagcctggccccgggcctgcatggcggggtggcgacgtcggggcccaggtggaggcgggtggcgcggagcacgcgcgcgttgtcgggcgcgagctcgcactgcaggcccggccatggtgtgtcggtgtagggctgtgggtggagctgcggccacgccgggtcgccgaggaggttcgccatcactcggaagatggccgccagctccgcccccgacaacttcggtgccgttatatctcgcccgaggccagttctgggcgggagacacggttttggcttgcctggggccaacctcggatgcgggacattgttctgactcgcccggggacaaccttgaacgggagacactgtttcgactcgctcgaggccagctctgggcaggagaagcagtcacgacttgcccgaggccagctctgggtgggagaagcagtcatgactcgcccgaggctagctttgggcgggagatgcagtcgctactcgcccaaggctaacctagggtgggagcatagaaacgctccatgggccgcttga

SEQ ID NO: 24644 - DNA, 804 bp, Zea mays
  Peptide Sequence Number=SeqID_68019
atgtcgctcgacatcaagtacgacatggtgctcctcccacctagacacatggctgacactcaggggcatccagacatctacccctgtcctcctcgccgtaggaggcagagacggaacaaccgcaattgcaccgcgagcaacgccccatgcctagtcgacgctcctaggctggctaacgacgaagactccctcgcaagggacctgacgaacgtcagcatcacgtccggagcatcgacgacaacacacgtcaccctagcaccgactctactggctcctccccctatggtgtggggagcaccagcttcgtcggctccccatacactacgtcgagtcgcgcaatctttgtcgtctcccccacctgcgagttgggaggcgctagcttcatcaaggctagagatgttggcttcgtcagtggctaggggagaaccatcaatgttcagccctattccctttcaaccgagcttcgacacaagcgccttcaccaacatgtatgctgatttccccttcccctcgaggtgcctcgactccgaggaggaggacggtctgggccgtggcctagatttctccaggctttgtgaccctgaggccatgttacagttcttattctcgtgtgatgaactactctctgacggtttagacggttatagcaccaacgaggagggttacgatccaactcgggagagctttcatgtagtacacgaggagcatgccaaaggggaccagctcggcatgcctcgagaaggcaacacaccacccccacatgtcagggaatcaagggagcagggtgaggctcggaccccctag

SEQ ID NO: 24645 - DNA, 423 bp, Zea mays
  Peptide Sequence Number=SeqID_68020
atgaaacgacgtagccctacctcggacctaggaccttccaatccccatgagatccaaggtgtaagcatagatgatgttgaggctgctgcctccatccatgagcaccttggtgagtctggtgttgccgatgacggggtcgacgacaagcgggtacttccccgggttcgggacgtagtccgggtgatcatctcggtcgaaggaagacctctcaccattcctgcttccgctgcctcatggagaggttcacggtctgtccaccaaagattgcggcgggtgagaggtgctctagccgtgctcaagtggagtcggacaggaagagggccgtccgccgaggcggtcgtgaacaccgtgattctagcagttgtcgaggaggcggtcttcaactgcgagtgcttgctccatggtgggctcggggtggactga

SEQ ID NO: 24646 - DNA, 699 bp, Zea mays
  Peptide Sequence Number=SeqID_68021
atggggataattgggaagatggaaatcctgctacttggggtagcagtccagcttaccagatgtgtaacccccacatgtcttactccaattatccaaaattttcagccaggaaccccacaagctcggccatacgaagcccccacacctggatcagggtgggcaaacactccaggagttagtttcaatgatgctcctactcccagggataactatgcaaatgccccaagtccatacgtgccttccacgcctgttggccaaccaatgacgccaaactcagcctcatatcttccaggcacacctggtggtcaaccaatgaccccaggcaatgctggaatggatatgatgtcgccgataataggtggtgagggtgaagctacatggctgctgccggatgttttggtcaatgtgttgagcggaggtgatgacggtcctggtgtggttagggaggtactcggggatggatcttgccgagttgcacttgggtcttcgggcaacggtgacatggtgacggttcttccgaacgaggtcgaggtcatcaggccgaagaagagtgacaagatcaagatactgaatggtagtttccgtgggcacacaggaaaacttataggtatagatggttctgacggaatagtgaggcttgacgacacatacgaagttaagatattagatatggtgattttggccaaactggcgacttga

SEQ ID NO: 24647 - DNA, 576 bp, Zea mays
  Peptide Sequence Number=SeqID_68022
atgaaggaaggcggcagtgcgcccatgcgtttccatgataaggccaattcgatgcacaagtcgtgtctttctcttatcaccaaatatggttatgtgtcgtggccacataaggtagaacgtatctggtgctcaaaggggtaccgtgctcatgataaggtcgaggcggcggcggacgacgtcgtcatcgacggggcgggcgtgggcgtcggggacgcaggggaggaggaggaggaggagatggcgcccgtggagcccctcccggagcctctcgacgactgcgggcccgtcgcgtggcccatgccggacttctgccctctcacgatcgatggggcgctgaaggagtcgttcctggagactctacggaaggacgcggcggaggtcgagcggcctgcgcgagaaggggcggaggagggggaggaagcgctcagcccggactcgcggccgtcgagcagcaagcgccaccgcgcgggcaccgcctcgccgtcgtccaggagcagcccctaccgcaacatcctgcacgtgttccagcagtgcaggcaggacgccgtcggggagactcccaccaagaattactga

SEQ ID NO: 24648 - DNA, 2199 bp, Zea mays
  Peptide Sequence Number=SeqID_68023
atggatttcggcgacgaacctgagggctccgacagccagcgccagcggaagcggtaccaccggcacacgccgcgccagattcagcagctcgaggcgtacgatctcgcttcgtttccatttcttttgctgcttctttattctgtccggccgcccttgtggttgttcgtcgtgagacgtgatggtttggcggaaaggaatgtaatggcgtgcgtgctcgcccatgactgcaggatgttcaaggagtgcccgcaccccgacgagaaccagcgcgccgcgctcagccgggagctcggcctggagccgcgccagatcaagttctggtttcagaaccgccgcacccagatgaaggcgcagcacgagcgcgcggacaactgcttcctgcgcgcggagaacgacaagatccggtgcgagaacatcaccatgcgcgaggcgctcaagaacgtcatctgccccagctgcggcggcccgcccgtcgacgaggacttcttcgacgagcagaagctccgcatggagaatgcccgcctcaaggaagagctggatcgggtgtcgagcatcacgtccaagtacctcggccggccgttcacgcagatgcctccggtgccgaccatgtccgtgtcgtcgctggacctgtccgtgggcgggatgggctccctcggcgggccgtcgctggacctcgacctcctcagcggctgctcgtccgggctgccgtaccaggtgccggcgcccgtgacggaaatggagcgccccatgatggtcgatatggcggcgcgcgccatggacgagctcatccggctcgcccaggccggcgagcaaatctgggtcaagggcgtgcccggggacgcgagggaggtgctcgacgtcggtacttacgacagcctcttcgccaagcccggcgccgcgttccgcccgccggacatcaacgtcgaggcgtccagggactcgggcctcgtgttcatgagcgccgtcgcgctcgtcgacgtcttcatggacacgaacaagtggatggaattcttccccggcatcgtgtccaaggcgcaaaccgtcgatgttctcgtgaacggcttgggcgggaggagcgagtccttaatcatgatgtatgaggagctgcacatcatgactccggtcgtgccgactcgcgagctgagcttcctccgctactgcaagcagatcgagcaggggctgtgggccgtcgcggacgtctccctggaggggcagcgcgacgcccattacggcgtgccgtcccgctcccgtcgcatgccgtcggggtgcctcatcgccgacatgtcgaacggctactccaaggtgacctgggtcgaacacatggagatcgagcagatgctcccgatcaacgtcctttaccgcaacctggtgctgagcggcgccgcgttcggggcgcaccgctggctggccgcgctgcagcgtgcgtgcgagcggttcgcgtccgtggccaccctcggcgtgccgcaccacgacgtcgccggagtgacgccggaggggaagcggagcatgacgaagctgtcgcagcggatggtgagcagcttctgtgccagcctgagctcgtcgccgctgcagcggtggacgctgctctctggcaccacggacgtgagcgtccgggtctccacgcaccgcagcaccgactcaggccagcccaacggcgtcgtcctcagcgccgccacctccatctggctgcccgtccccggcgaccatgtcttcgccttcgtccgcgacgagaacgcgcgctcccagtgggatgtcctgtcgcacggcaatcaggttcaggaggtgtcgcgcatccccaacggctccaaccccggcaactgcatctccctgctaagaggtctgaacgcgaaccagaacagcatgctgatccttcaggagagctgcacggacgcgtcgggggcgctggtggtgtactcgccgatcgacatcccggcggcgaacgtggtgatgagcggcgaggacccgtcgggcatcccgctgctgccgtcgggcttcgccatcctgccggggtccggcgcgggcgcgtccagcagcgccgtcgtcccgccgccgggctgcgtggtcaccgtcgcgttccagatcctcgtcagcaacctgccgtcgtccaggctgaacgccgagtccgtcgccaccgtcaacagcctcatcggcaccaccgtgcagcagatcaaggcggcgctcaactgtgccggccattga

SEQ ID NO: 24649 - DNA, 462 bp, Zea mays
  Peptide Sequence Number=SeqID_68024
atggtcggagatgctcggtccacatgcgtaggcggcggctccaaatttcaatcaacggtggtggttgagctcgattcaaccggctgggaagcttcactcgaggtcgggggtgctgctagtgcaaggaattgggcggcggtgtactgggtggcgctggacacgttcatcagcgggcggatgaagtctggcaagcaatggcatcgccgctgtaggggcataaagagtgagggggcaggcggggagcttcaccatgactcagggaagctagcgatagagcttgctcggtcgaagggtggttatgatggccgagccacggtggccggagctcgggtggcaatggcgggtggtggcgcacttagtttaggcaaaactccggcgagggcacacttgccaacaggtttggggcttgcgggaagaacagccgagggtaggggtggtctttataggcatgggcgagggtga

SEQ ID NO: 24650 - DNA, 1275 bp, Zea mays
  Peptide Sequence Number=SeqID_68025
atgacggcacatccaatgttcgtgagcaaaaacattgccttaaatgattataattcttttgccatgaaagaaaatgagcttgttagagacatgtactctcgtttgaatctaaccatcaatgagctcaattatattagcattaataagctaggtgatgcgaacattgtgaggaagattatctccctgctacctcaacaaaaatatgggagcatattcaccattcttcacaacatggaggacttgagtcaaatgaccccgaccattgtaattggaaaaattgctgcatttgagatgtcgcggaaaatgggtcaacaagaggagccaacttcttcaaaaccatatgcttttgcatgtgatgaaaagaaaggcaaaagaaggctcccactccaagttcctcatgtgaataagaggaagaagaagaaagcgatgatgatgatgataatcaaccatcaacatcatcctctgaggacgaagaaacaatccgacgcgtcggaaaggggaggagcaaaggcaaggcgcttacaagtgtcaaaacatgggatgactcttcaagcgaagatgaacctccaaggaccgcaaccactgatcctcatcacgctcatcatggtcatcacacaagtgccttatggcaagagcatacacaataatgagctaactactaagctagaaaacattagtagcacctcagaagtatcttttgttgaaatacctagaactattaagaaagatgcttctacttcttgctttgatttaattaatgattctaacccctgcaaccaagatcttgttgagaatgttgttatagaaacatgttcgaacgaggttgcaaaggagaatgagcaattaaggcaagaagtggctcgccttggcaaggctttgtatgacaagaaaggcaaagccaaacaaatccaaccttctcaagataacaccactgcgggagtgaaaaagcctctggagggagaaactgtgatttgtaggctatgccacaaggaaggtcacaagtcttaccaatgcaaggtgaagatcgaggataaccaaaagcaaaaactcaagcaaaagccaacaaacaaaatctccaacacctacatcgacaaggtggacaaaaaggatgatacaccatatttaatcaataagaaaaataatggaaaggtgatagcaattaaggccaacaagcaagccaacaaaggaaaaggggccaaacgcatctgggtgccaaaggagattatctcaaccatgaaaaacaccaagaaggtttggatcccaagagggaagtga

SEQ ID NO: 24651 - DNA, 309 bp, Zea mays
  Peptide Sequence Number=SeqID_68026
atgaaggtgcattttgagaaggataaggctttggctcacagattccagccagtattggtgaatgagcctagccagttcaagctctgcaaggtgatgtctgttctgtttggccagaaaggcatcccctacctgaacacctacgacgaccgtaccatccgctaccccaaccctctcatcaaggccaacgacaccatcaagatcgatctggagaccaacaagatcatggacttcatcaagttgtatttgccctttcatggacttcaccaagttatatacttagttaggctcaatgttagcacaaacagttga

SEQ ID NO: 24652 - DNA, 885 bp, Zea mays
  Peptide Sequence Number=SeqID_68027
atggtggcctcatcctcttccaccgcgcctaagccgaagaaggttaaagttttgacacataggccgatgccacattctataaaaaggacagctgtaatacctaatacaaagaggatagagattcctgaacaggccgaagttatccctttggcttcggaggcaattcctactgtgacggtcgaagctagtgccggaccaacttgcgatagtctcgcttataacagcctgaaggtcataactctaagaaatgaagctctcgagaaggataagatcttgctctctttggtggagagactaaaatctagtgaagctaggctttctagcctttccgaagcagagcagagggtgaaggagttcgaagagaagcaacagaaatatgtgaagcgcattgctgacttggagtatgcgctatctgttcaagtgaaatcgcatagatctgaagtgcaaggattggaaaagaaactcgatgaagtggctgaaaattttaatgtcgagcaaagaaagcgtgaaatatctaatactaaacggctgagagttcagaaaaacgtcgaggagtttcgcctagcaaaagtggaatgctacaatgttgccatggaatgttgtaataaattgaaagaagcttttccaaagttggtgcattctctacggagcaaaattttatctgtggtaatcctgatggagttattcgatggatcggcggcgaagccaaagcttttgaggagattcttagtgataggggagacttctgcgccttcgtcggcgggcgtggagctgtgtcactccttgagaaggttggctgcgagcatgcaaagggtgtacttcagccagaattctcgatctcagccaatgacattaagaacccttcagccaaagccactgcactga

SEQ ID NO: 24653 - DNA, 192 bp, Zea mays
  Peptide Sequence Number=SeqID_68028
atggccaccgcacggcgacgaggaggacccattcggcgactgggcgctagcgcgaagctgaaggcgctgaagaggaggggacatggattagggtttctctggacggaggacgagtgccctagtggccagggtgtcacattccacaaggtcgtgacagccataggaggtggtgtatcggttgctaaggcgtag

SEQ ID NO: 24654 - DNA, 372 bp, Zea mays
  Peptide Sequence Number=SeqID_68029
atgggcctcacgtcctatgcctcccttgtttcctgcgaaggcgttgcgaatgctgatctatcccgtgagggcttcaagaacatcgaggccttcgagcagagtaatgaggagttcgaccgggaagcactaaggaacgaggaggttgaagaccttgctggcttcaagtgctttttggctactcaagatgttggtgttgaggagggcgcggaggagcaatcgtcctgtgctgaggtcaaccacgccatcctcgatgcggtggggactttgcagccttatgccgctgagcagtgtgctaagggtgccgacccggtccatgtcgaggagatcttttgctattacctcatcgacgtctgggatggtgtcggggtctga

SEQ ID NO: 24655 - DNA, 264 bp, Zea mays
  Peptide Sequence Number=SeqID_68030
atgaggggacctggacatggagtcgagcgcgagttgctggggcaagcgccatggcaggccggagctaacgaccatggagttcaagtatggggaggtgtggcaggcgagcaccagttagctgtggtcggtggtggaggctggctccgacgagcacgacgactgagagatggcacatccgcttggggaggcagagaagcgatgcagccagggagcttcgacggtggccaaggaaatgaggataagggaaaatcagctagaagataa

SEQ ID NO: 24656 - DNA, 264 bp, Zea mays
  Peptide Sequence Number=SeqID_68031
atggcccgcgcctataaagcccccagggacttcgaccactgtaacctcgctgacggagagtacgtcctcgtgccggagcaaggagctgctcaggaggtagccccggatccagcaccagagcctgcaccagaggatctgcctgccactgctttggaaggttctttggaggacatggttgctggagtgacttggccgtccatcttgccaccgggttggactatcgagtgcgaccccgcctcggcagaggaggagcatggggagtga

SEQ ID NO: 24657 - DNA, 627 bp, Zea mays
  Peptide Sequence Number=SeqID_68032
atgaccgagaataagagccgaaaccttctcgacaaggtgataatgcttgagaaggagaaagaggaccttggccatcgcctcaatgatgagagggaagctaccgctgaggcaaggacagatgcagagaacgcccgcacggaggcccaagctaccaccaaccttgagcttgagactgccctcttcgacaagtcaggggaggaggtggggacccgcttcattgggtggctgcaagagaagttggagtcgctcccatccatcatgacatgtcttatgtcctatgcgtcgcttgtcgaagacgacgtgctaaagcgctctgcttgggcgctttatgataggatgtggggccctcacggccgaggcatcgtccggaagagggccaaccaagcacttgcacaggcaaccagggatgaagaattggaggaactcaccgacctagaaagctcggtggctcaaaagaacgctaaggtggctcaaaaggagtggaagagcaatcctcactcaaggaaggcggcgcggagggtcctgcggcgacggggacttctgcgcagatttgtctgtcgtggagtctccgccaagggtcgcccacactgcggcggcgaggacttcgccaagggttgccccgagtga

SEQ ID NO: 24658 - DNA, 231 bp, Zea mays
  Peptide Sequence Number=SeqID_68033
atggggtcgaaggcctctaggctttttgttgaggagttgatggagacgtgcgctgggcccgaggaggttatgacttcacctgagctccgagaaacatctttgcgcatgctgaagagaaatattggtgctattgtgtcaatagtgatggagaaggatcaccaagagatccagcggaagaagcggaaagccccgctacggctagtggacccgcatcgcgatgccaagacttag

SEQ ID NO: 24659 - DNA, 225 bp, Zea mays
  Peptide Sequence Number=SeqID_68034
atgttcgatgaccagactgggctgctgcctgctggagtagaggctgggaaattggtggtggcgccgtcgaaggtgcccactgacccagggattcaagagaagagtgataccgggacttcgctggacccatggtcgaaattttgcgccgctgccgatggcggaagcaaagtcgccttagctgttgccgccgacggtgtagcgacatctgtcgcgcagcagctgtga

SEQ ID NO: 24660 - DNA, 1422 bp, Zea mays
  Peptide Sequence Number=SeqID_68035
atggcttcacttggtcatcctgaccgctttcagtttgaggaagcgattaatctgcccttcttcctgctgctgatggaggagttcaggcttcaacttcaacacctcatgccccactccatcctccagacagcaatcttcgtccacctccgcgagatgatcaaggtcttggctacgggcgacctgacatcaatgcacgtggtcggcgatctcctgaagcgtcggatcgcgccgctgcagaggaggatccagcgtgggccgggcctgaggacgacgatcttagccacattgacgaccctcgatgacagcagcgtggcggttcgacagaccggtggtcgggaccccctccgcgggatccggatctccgatgcaccggctagaggtccccagcccgtcggtgtggctcctagtgccaatctcgccgtggcctccagccccttggacaagggcaaaggtgttgcaagtagtgcctccgccccaggtagctccggggggtcggaggaggagaggcgacgcaggttgtgtcgcgctaacgggtcgctcgtttcagagcccccagaagcgccagaggactacagaggcacgtcagtcctccagtcccgccgccaccaccaccatctgggggtgatcaccccaggagcaccagcatcagcaacagcaacaactgcagcagcaggagcggcgatcgcctcgcttctaggggcttcttcctccgctgctcccaaggccacgcctcctccaccagataccaggcccaccgatgggtctggctctcagcagcaggaatctgttgagggtggtgccggtggtccgcccccagctgctaccaagatagcgccagcggcttcccatgccccagccgaggatccggtggcagcggcgccaacgtcgggtggcgtcgttgtggtggaggaggtcccagctgcgggatctgcacccactcccgacactggggcaatcttgcgggagtgggaggcgcttgaggctgagcaccagcgcctcagtgactggcgcactcaactggaggagcgcaccaagacggcgtcccgacagttcacctctgagcggtcccaactcaagcgaggccgcaaggagtacaagagagacttccagagggccaagctgaatgctttggaccagactctggaagcccagcgggcccagcaggtcaaggctatggaaaggctgcagaaatggcagcaagagctcgagggcaaggccagcgacgccgccctcgccgagaaaaaccttaaggcgaaggagcagtccttggataggtgggagacggacctcgccagggaagaaatgctcacccggcgaggcaagttgctggccgagcacgagcttgaagcagaggaaaaagagtggaagctagaggagcagatctaccagtacaatgcggcgcaggcggctccgcgtccctag

SEQ ID NO: 24661 - DNA, 480 bp, Zea mays
  Peptide Sequence Number=SeqID_68036
atgttggagaagctggcgacacacgacgtggaaaccgtcactacactcttcgctctggctgacaagtgtgccagagctgccgagggctatgcatggcactcagcaccacagaccggagttacccagacggctggctcgggtcccgctacccagggcgatagcaagaagaagaagaagaaccgcagccatgagaggtcgcagtctgctgctccggtcgtcgctaccgcgactgggggccggaacgagcacaataagcgcccatggccacagggaggcaacagtggcttgtgccctatgcaccccaacagtcgccacagtgcctcggagtgccacgagatcatcaagctcgagaagcttgctctcaagctctcagactctcaatacaacatacacacagtggaggtgtattccgccacccggccggaggattttctctccgacagggaagttgatgacgctacacacaacaaggacaaataa

SEQ ID NO: 24662 - DNA, 273 bp, Zea mays
  Peptide Sequence Number=SeqID_68037
atgtccgtggagcagccgttgcgaattcccgaggctgccaagttccagagccgcgtcctcttggagcaccggacactgtccggtgtacaccggacagtccggtgtacaccggacagtccggtgaattatagcgcgccgactctgaaaattcccgaggctgaggagttcatcgcggagtcccctggtgcaccggacactgtccggtgcgccaccggacagtccggtgcgccagaccagggagcctttcgggatgcctttagcactatattttag

SEQ ID NO: 24663 - DNA, 729 bp, Zea mays
  Peptide Sequence Number=SeqID_68038
atgagtcatcctccctgggcgctggttcctaggtgcagagaagtcgaaccgccgctcgcgccagtaccgtgtctcatcgaggccgcagcagaagacagagaaggcgtgacatttggcatgaccgaaggcggactggcagtaattacgtcagaaagcgcacagaagcagcatgccaatcgccaatcaggctttggccccacctgcaggcttgtttcctcccctgaggcggggccgggggccactatcggtaccctgaatcaggggcggagacccgatgctgccacgtggcctactactcgtgatgtaagccagcgggtggagccagacgtaaggcctctgggccgtgtggcctctgcatttaatgtggataaggcgcgccgcctgtccactccactgggaagcttccgctgcacgccaatgctacacagaccgaggataccagggcgcaaggagattgcactggcgactagcattagttgctccaagtattacatccgttatgttcctaggcccgcatgtacgagggtgggtgcattccgccacccggctggaggtttcctctctgacaacaacataacagtaaagcccatccatagttacaaaagcggccttattgaggttggtgtagtcgatgcacatccaaagcttcccgtttgccttgggaacgatgtctggattgaccagccatactgggtgatggacctcttcgatgaagccagcgtgcagtag

SEQ ID NO: 24664 - DNA, 330 bp, Zea mays
  Peptide Sequence Number=SeqID_68039
atgtctgaacagctagcggtgttgcttcgctgcggcgtgccctgccagggtctggtgctgcaggacgtggaccttaggtacaaggggcagggtgccacatcggtgtgccctgccagggtctgggttctgagaccgaacaaggaaacccacagatggacatatagtggtcgatgccccctagaggatagattcttcctcctccacaaccaggtatgggatattggccaccaccactatggggatatcctacacacccaatggggccttggggacgcccccatggccaacacagccacttccatcaccagcggattccggctcatcaagtga

SEQ ID NO: 24665 - DNA, 315 bp, Zea mays
  Peptide Sequence Number=SeqID_68040
atggacgaaggccttaagccgaagtttttcaagctttctgagcttcggtcaaaaagatgcattttcgtcatttctgaaggagaaatgtctcaagacaagaaggttgctgctgagacgaagctgactgaagaggagaagctttttgaggagaagaaggctgtgaatccttacattgctggatttatcgagtcaatggcaaaaacaaatacagagaagattactaaggagatactggaaggctttctgaagatactggtgacagtgatagttatgatgcggaaagcggggggcgaagattctaaggatcgaccctag

SEQ ID NO: 24666 - DNA, 240 bp, Zea mays
  Peptide Sequence Number=SeqID_68041
atggcccccggcgaagccgtggagctaggagggtggcgtagcaagtccctggctgcagacagcaccccaggagcagcccttgacggagccctagatgtctgtgcgggagtgtgctacagcgtagagcgcacagcagcagcaccaggcgcagggcggttggaggcccgtggcatggacgacacaaccttttcttctaccaggaagtcctcaggagtcaagccacggtgctcgacgatctga

SEQ ID NO: 24667 - DNA, 384 bp, Zea mays
  Peptide Sequence Number=SeqID_68042
atggccttgctagaccctctcgagtgcttccagtccgaggtggcactcgacttggtgcgcaacctgctcggatggggtgcgtcggcgttcgctggaaggatctgtgtcggtgcctctcctcacggcgatctcaccgcaagggagttcgtgctcttcgtttcctgcgtgttggcgctgctgatctcgcctttcttcttgctattgccggaggagcacggcctcgtggggggtggcgctcttccaccagtgctcagtttcaaggatgttcatcagccttgcggaggtggaaagcgagctgagctgcggctccatctttcgcgtgagcttcaccagtgcctcatggatttggcctgggaagctaagccgtgtgttcggaccccctga

SEQ ID NO: 24668 - DNA, 141 bp, Zea mays
  Peptide Sequence Number=SeqID_68043
atggctcgtgaattggagttggcgcggtgggggccggagaaggaagaggtcactggtggcgcaatcgtggcgttcaccggcgcagtggttcagagagggcccaaatctcatggtttcttttgcaaatcttcaaatatgtaa

SEQ ID NO: 24669 - DNA, 783 bp, Zea mays
  Peptide Sequence Number=SeqID_68044
atggacgacaccaccactgccgccaccggccccatcgcccccgctgcgatcagcagcgagctcgcccatggagggggcccctacatcgccggcctcgggccgctcctcgccgttcccccgctgaccctgcgccgaggctccccgccgggctttcccaccctcgcttcacccacctggagccacgccgtcgcgccctccgcactccccaccaccgactccccgctcgtcgacaccctcgctacgatccaggccgctgtgacggcctcgcgggagcgcgagcgcgccgcctccctcgccgtggagagagagcgtgccctgggcgccgctctgaccacccagatggccaccacgcagcgcctcctcggtcgcccgccgaccgcccctgtggaacccccagaggaccccctcgcctctgacctcgacgccgacctcatcgctgctctccacgctcaagccgctggactgcacaacatccgggccctcgtgtccgtggtgttggatctggcgtcttcccactaccccgttggcgaggacaggtccttctcacgcttcggcggttcgtcctcgacgatcacgtcctcgtcgaccacgacgctccgccgcctcgctcctggtgcctcatggacagcgttgtcctctcgtggctccacggcaccatcaccgttgagctacaggacatcatccgcgaccagacggacactgcgcgcaaggcgtggctcgctctcgaggaccagttcctcgggaatcgggatgcaccgtctacctcctgctgaagtctattaa

SEQ ID NO: 24670 - DNA, 387 bp, Zea mays
  Peptide Sequence Number=SeqID_68045
atggcccgcgcccgcgcctataaagcccccagggacttcgaccgtacccctccgcacgcactcgacctcaccggagcccaaacccaccggcgtttgcccgtacacggcgtgtccgcggccgcccgatccccctgccaccgtagaccggccagcagaacccttcccaaccccgtccgaccctcggagaagactgtgcacacctcggtgaagctccccgagcgaggaatcaatgtttgcttcgccggagaggccagtccacggtcgccggactccacccgaccgccggcgagcgtagaccgagtaatcctctgctccattcttcgagtccttgtgcacacaacctctatgtcaccccgtgaagctcaccgtgcccttggattgaactag

SEQ ID NO: 24671 - DNA, 306 bp, Zea mays
  Peptide Sequence Number=SeqID_68046
atgagcatcatcctgcagtacctggtcttgacctgtggtgtatgtgagacagcaagagtgagctcacatacgttcatcgctcaacaagttgtggggaataatgtgcatgaactcgccaaaggaccgccatcacagcaaaatcctcccgagggcctccccaggaatcccttgcaggaccgccatcacagcaaaatcctcccgagggccttcccaggaatcccttgcaggaccgccatcacagcaaaatcctcccgagggcctccctacactgaccactcccctactgcccttgcccctttcgggtaa

SEQ ID NO: 24672 - DNA, 2964 bp, Zea mays
  Peptide Sequence Number=SeqID_68047
atgtatgaccgcctcttcccttcccttcctgctctacgaaaccttggaagtatggaagacgagggatgtgggtccctgatttgctgcctatggtacccgttcgatggctcgacatcgtctgtctacatggtgtttgaggttgctgaattggatggagcagcaatgatttatcacgctaacagtaaaatgaaagtgtgctcacagacgtatataaatgtaggcgagggcgaggcagggagggttttggaatttggccgccgtttgcgttgcgtgggtaggggaagaagcaggcggccaggcgcagagccgcaaaagcagacgcggaagcagcccaggcccgagccgaagcggggaggcgacgccgctgcactaccactcacccggtcagcgatttgccgccttgcgggagccagttttggcgtcggcgtcggcgtggagttcccggagaggggttctggcgaggatgagcggcagcggcagcggcagcggcggagggggagccagggggcagtcggggcccgtgccggcgtccgcgaggaagctcgtgcaggggctcaaggagatcgtgaaccgtcccgacgcggagatctacgcggcgctgcgggagtgcggcatggaccccgacgaggcgatacttttcaagaggtaaagagcaagcgtgataagaaaaaggaggttaaagaaaccctagatccaagatctcgaggagcaagtaactcctgtcgatccagtagaggtggtatggaccgtgctggacgaagcagttcagtccagtctggatccagtggcactgattatgtgacttcaaggtcatccatattgggacctgctgtgccagttaagccaacagttcctagtttgtcaacaaacaaagatgtggtttttaatggatcagttggagcaccacaatcatcatctggttttcagcataattggtttggggtgccaggtcagatgtcaatggctgatatagtgaaaatgggaagacctcaagtgaggtcttctggaaagcctatggctgcagcagacacatcatatgctggtcaaaccccatctttatctagctctgtaaaccagaactcgaaacaatctgctagcacaaccctaccaactacttttgatcagggctttcctgctctcccagaccctattccacatactgtgaattctagtcatggttctgctgggaacaaccatacacatgagaatgattggtttcctcaggatgagcctcaatctggagttcagtccacaggcattgaggcatctggtgaccaatcgctatctgtggcatcactggaccaatctatgttggttgctggtactgcttactcacaagaaaattctcatgcagaagagaacaactcaactgcagttaaagcaacagtgtcttccgaaagacacttggaaattgtggaggaggacaatcattacaacgatgggttattgcagaactgtgcttaccaggctcaagtgcactcctatgttgataatgaagttggggtttctaatgttgatgcagaatcagccgtggcaaactttcagcatttaagcctacagaatgaagatatagttgtaaccaaatctgaagataaccatgcggttatactccctgatcatctacaagctacaaatgcagactgtgctcatctgagctttggtagttttgaatctggtgccttctctggcttgttttcatcaaaggtcacaaaagacagtttggaggacaacgaggtgcatattccagatgaatccccatcagttaatctcgatgccaggaatcaagattactacgacaacgatgctctaaatttgtcagcaaatgaggatgttgagacaagaattggtactaacatggataacattgatggaccttcagtttcacagtctgatgtaccgaggcagggggccatagatgtgcctggtcttcaatatgacatgccatcagttccaagtcatgcatattcaagcacaacgcagccaagtaaaatggaagacccacaaggaaacacacaagcacaacccctttcccatttttctggcttactgcaagcaaatactctacccaattacttgttggggtcaaatcttacccctattcgggagtttgacttctcgcagttacttcagacacagtcagctacaaagtataacccatctgcggcacctaataatctgccagcaatctccatgcaagagactttaaaaccaggaggctttcccaacactcagtctacgcaacatgttcccaatacgagcataccatcgggtcttcctctcccacaacaattgcctgtatactctcagccaactctgcctcttgggccttttaccagcctggttggctatccatatttgcctcagaactactacctaccatctgcggccttccagcaagcgtactcaagtaatgggcctttccatcaatctggtgctcctgctgtgcctggagctggtatgaagtattcgatgccacaatacaagagcagcccacctgcttcgagcctaccacagccatcatcactctctggttatggagggttcggaaatgcaaataatattcctggaaatttcagcctaaatcagggtgctccctctgcgcctacaactttgggatttgatgaagctttaggcacacaattcaaagaccccaatcactatgcagctctacagcagagtgataattcggcaatgtggcttcatggaggcgctggttcaagaacagtttctgcagttccgcctggtaacttctatggtcttcagggccagagccagcagggtggcttccgccaggcacatcagccctctcaatacggtggtcttgggtacccaagcttctaccagtcgcagtcgcaggccagtctgccacaggagcacccccagaacctcaccgagggaagcttgaacaattcccagggcgtaccatcccagccatcgcaccatctctggcagcacagctactaa

SEQ ID NO: 24673 - DNA, 414 bp, Zea mays
  Peptide Sequence Number=SeqID_68048
atggtcctcgccttagttaccgccacctcgttcaccatcctgcttcttttctctctcccctcatgcctccacctccgcgtcaccccattctcgacagagggcgtgggagcaggcacctcctccccgtattcgtccgacaccagccttgacaccgatccacacagtggctattgcacgttcacgaggacgtttcacagcatgcgtgcaccatcattttcgccgtcgtcggacatcccgttggtcttcccggccttcgtcctattcttcacccccgcccacggtcgcagccgcaagccgaccaacgctcgtcgacgcgggtacgaggcgagtcggtcttgcttctggcctttctccgtgtgtgtcgccgaggaggacacgatggagcctgccatgcttagattatcttggcgatga

SEQ ID NO: 24674 - DNA, 426 bp, Zea mays
  Peptide Sequence Number=SeqID_68049
atgggcaagaacaacaagcgcaagcgcgagccgactcctccatcggaggatttcggtgactcggaatactcggaggaggagttctcctccgagtccgaggggtctccggctcccgtctctcccccggcgtcgtccgatgattcggacgactcccagggaatagccgcggaggtctggacgtacatccgggccgtcgagcgctccgggctcgaaggctcggatgagtcggagtactcctcagatgaggaggactcggacggcggcgacgagggtaaaggtgacgacgacgacaacgacgacgacgacgacgacgacgacgacgacggcgacggtgacggcagcggtagcggcaggggcggcggcgacggcagcaggggcagcaccaagggcgacggcgacggcagcaggggcagggccagtggctag

SEQ ID NO: 24675 - DNA, 648 bp, Zea mays
  Peptide Sequence Number=SeqID_68050
atgccgatgccgaccttcaatcacttggcgttacctctaaaacgccgaccacgtggtcaattgctcggcattacttctaaagtgccgatgccgaccttcaatcactcggtgtcgcctctaaaacgtcgaccacgtgttcaattgctcggcattacttctaaagtgccgatgccgactttcaatcactcggcgttacctctaaaacgccgaccacgtgttcaatcgctcggcattacttctaaagtgcagatgccgaccttcaatcactcagcgttacctctaaaacgccgaccacgtgttcaatcgctcggcattacttctaaaatgccgatgccgaccttcaatcactcggcgtcgcctctaaaacgccgaccacgtgttcaatcgctcggcattacttctaaaatgccgatgccgaccttcaatcactcggtgtcgcctctaaaacgccgaccacgtgttcaatcgctcggcattacttctaaaatgccgatgtcgaccttcaatcactcggtgtcgcctctaaaacgccgaccacgtgttcaatcgctcggcattacttctaaaaatgccgacgccgaccttcaatcactcggcgttgtttctaaaacgtcaaccctgtattctgtcgctcggcattacttctaa

SEQ ID NO: 24676 - DNA, 567 bp, Zea mays
  Peptide Sequence Number=SeqID_68051
atgagttcttgtgaaactaaccctttaaaggaagaagaagaaaatgaacgttggagaccaaacgatgagtccacctctccaaaaggtttgtatttccatttcaattcccacatatgttgtgtggctaatgaaaatgatagcggaagcacaaatgaggatgaggaggatgaaacaagattcatgcaactctacgctcatctaagccaagaagataaggcggtcatgctcaaatttctaaaaagagcgagagagcaaagagaagctcgtcacatgctagaagatattctcgccataaaaatgcaaagctttgatgagttgactaaagaacatgaggagctaaagtgctctcatgttgacttggtccaaagtaattcctcctgtgagctagaatttccaggaacaaaagatgacacatgtcaaaagatcaaggaagaaaatgagaggctaagaacgagcttgacacaactaaaagggaagtgcactacccaaccttctcaagataaccgtgattacatggtgaaaaagcttgagacggggaacaactgtggcatgcacaaaatcccttga

SEQ ID NO: 24677 - DNA, 240 bp, Zea mays
  Peptide Sequence Number=SeqID_68052
atgcaggtggcatgcaactgtaccatggagacgcaccctttcgacttcaacgcatccagcatgaaggcccaggcccacacgtcatgtaaccgggtccgggaaaggggatactccgaaagggatccttctccacaaaggaagtgggccctgagccctcctactgatcagaggttcgaaggctggccctcggaagggttcgacagccgcctcagggcacttgggctccgcgcccactactga

SEQ ID NO: 24678 - DNA, 1005 bp, Zea mays
  Peptide Sequence Number=SeqID_68053
atggcgcctcctgttgacgtggcggtctgtgccctaagcagggcgacgtggggggcggagtccgagccctggggtcgggcgaggcggagtttcgtcgtcttccgggttttagcccgagtccgagccctggggtcgggcggagcggagttcgtcgtcttccgggtcttagcccgagtccgagccctggggtcgggcggagcggagttcaccgtcttccgggtcttagcccgagtccgagccctggggtcgagcggagcggagttcgccgtcttccgggtcttagcccgagtccgagccctggggtcgggcggagcggagttcgccgtggcgcctttggcaaggcctgattgcctgtcagacttcactctgtcgagtggcactgcagtcggagtggcgcaggcggcgctgcccttctgtcagactggccagtggagtggtggagtgacggcggtcacttcggctctgccgggggcgcgtgtcaggatagaggtgtcaggccacctttgcgttaaatgcccctgcaatttggtcagtcggtgtggcgatttagtcaaggttgcttctgagcgaagccaaggcctcgggcgagccgatgatgtgtccgccataaaaggggggcctcgggcgagacggaagtctctcgagctttatgctgatgggggttaccagctgagaattaggcgtcttgaggcccccgagcctctgcacagggcgagaggacgatcagggacagacccgactttttacatacgcccctacgtcgcctttccgcaaggaggagggggggagtgcgccatgttaccctcgatgggcaccgaacatggtgtctccggtgagctgcaagcggcaactggcgcgccggttgctcgactcgtgggcctgggttccaagctggcgtgtcagaagtcggagaagcgcgtccgtctggcgcggttgcatgccgcctgcatggctgcccgccccttctgcccgttggtctgggcgaaaatggggggtcgcctgtaa

SEQ ID NO: 24679 - DNA, 78 bp, Zea mays
  Peptide Sequence Number=SeqID_68054
atggaaattcatgattataatgaagaccatatggcatggaacaaaggctcttacaagttagtgtatgcaatatcttaa

SEQ ID NO: 24680 - DNA, 213 bp, Zea mays
  Peptide Sequence Number=SeqID_68055
atggatgctcaaaatgatgtgactcaagaatggcttgatagggtgaagatagcaaggaaagggcttcgaggaactaagcgaagggaaagttcagccggggtattttcctcggacctcactggtcaaaaccggttgaaccgggtcctaggggaggttcaaccggtgtcaggctctaaactgcactttggccagtatgtcctggaagactgtctg

SEQ ID NO: 24681 - DNA, 966 bp, Zea mays
  Peptide Sequence Number=SeqID_68056
atggtggcgacgttgcgcttgatcgcgtcccccacgcatttgcatggtgtgggcctggcagcgcgacctggccttggggatggtcctccttccacaattcgcataggtggtcacgttgcctggcccacaccatgtagagatggtaatgggtacccaaaacccgaatacgtgacgggttttacctggtatgaaggtgggtacgggatgatttctctatccgcggacacggagttcggcgccgagatccatggcgccaacctcggcgccgagatccattgcgccgaggtgctgccacgtcaggtccacggcaagttcaaccggggtccagagaggttcaaccggggtccagggcaagttcaaccggggtccagaggttcaaccggtgtccagggaaagttcagccgggatgttgatcctagggcaatagatcttggcatgagaatcgccgaaaggatgttcctcaaaatgaaggaagatgaggcaaagaacaaaattgaagaagaaaatgatcgatggagaccaaacgatgaatccacctcttcacaaggttcgtctttcaaatccacttctcatatgtgctttattgctaatgggagtgacagtgaaagcgaaagagaggatgaggaggagcaagaaagtgataatgaagatgaggatgatcttcaacaattcttcgctcagctaagcaagaaacatcggatgagcttgctcaaactcatgaaaagagcggaagaacaaaaagaaatgcttcataagcaagaagacttcctcatcagaaaaatcgaagacttagagaagttgaccaaagagcatgagaagctaaagtgctctcatgatgatttggtccaaagatactttggtacaggtggttatgagattgatggttttggttatgactatgatgctggcgaagatgaagctgtggaaggagacttccaggagttccaagattacgacgagttctag

SEQ ID NO: 24682 - DNA, 195 bp, Zea mays
  Peptide Sequence Number=SeqID_68057
atggaagatgacaattcaattacatgccataaaatggatgagcataacaccatagctggatgtgaacatgtgttaacattaataacagctggtaaccagatggacaacatgagaattccacctgaggttggtgatacaagttctccgtgtcacgtagcacatgaacaaatggaacagattggtgcatcctcataa

SEQ ID NO: 24683 - DNA, 227 bp, Zea mays
  Peptide Sequence Number=SeqID_68058
actacatcctcgtgccggagcaaggagctgcccaggaggttgcccccgatccagcaccagagccagcaccagaggacctgcctgccactgctttggaaggcaagccccgattgcccctcctcacgcgacctgagacgaggtatcccattccgggttatgggtggggtacaagtgcggccactgcacaacggccattcggggtcagtgaggatttgtacgccaaggcg

SEQ ID NO: 24684 - DNA, 345 bp, Zea mays
  Peptide Sequence Number=SeqID_68059
atggggctgtcggtggcggagcgggcttacatccggtccgtcgagcgtgtagggctcgagggatcggatgactcggaggaggactccttggaggaggaggaggaggactcctcggactccaaggagggcggcggcaagggcgacgatgatggcgagggcgatggcgacggcggcgatggtgagggtgatggcaacaacgctggtggtgagggcgacgacgacaacgccggtgaggtcccaactaactcggaggttactgaggctaggattttgcttgccgagatatctgtactaaagaatagaggcctggcttgtggcggaactgctcgaattattccagcttaa

SEQ ID NO: 24685 - DNA, 138 bp, Zea mays
  Peptide Sequence Number=SeqID_68060
atggcggcagccggggtcagtggagcattgtatgccaaggcggatatggttgatggtgtgacttggcctaccaccctgccaccgggttggacggtcgagtgggatgctgcttccacgggagaggagcaggaggagtag

SEQ ID NO: 24686 - DNA, 492 bp, Zea mays
  Peptide Sequence Number=SeqID_68061
atgatctatgagcccctcgggctacgacacatttatggcatgtgcgtccccgcccgacccggctcaaagcagccagatcacggcactccgtccgaccctcgaagcgatcaccttcaccgcctctcctcctcgtcacaggtgaagatgattccgcagagccagagcagctccctgcagcgccttcaacacgtcgagaagcggatagtgcgggtgctggagcttgcgggagcggtgatggaggagctgggaaactcccatggccctcgcaccgatgcagtcagcgcgcactgccgtgagttcatgatcgctatgaaggaaattcaaacgacgttgcgtgaggaaatcaaaagtgcttgtgaatatcgtccatttgaaaagtgtgattacagtgcaaggattgctaatgagatatgctgcaagaagctggagtatgtaattgagaagttggataccatgcaacagagccttgaacatatcactgatgatgtttag

SEQ ID NO: 24687 - DNA, 285 bp, Zea mays
  Peptide Sequence Number=SeqID_68062
atggtgctccgacacttgcgcgtggggtccgccgtgcagtgccaccttcccccaccttgcgcgcatggcggggcacttcaacggctgaaccgcgatttccggcctcggctgacccaacgtgccacgcctgcgcccataagtactagcgccgcgccttgggtcaacccgcacgcgaatccatcggagcctaggccgtgcgtggacgagcaagccactatggaaactgaggttcaacaagtagaggtagctgagcaggagctcattgaaggcaagttgtgcccttga

SEQ ID NO: 24688 - DNA, 480 bp, Zea mays
  Peptide Sequence Number=SeqID_68063
gcggccctggcgacggccctttcactcagcgagcgattaaggcttgcacggtcgccaaatccgcccgaagactccacgggtaaccttcctccagctcggtgcaggttctcaacccgatcccaggccttgaacgacgacgggcagaagcgtggcacgttgggtcagccgaggccggaaatcgcggttcagccgttgaagtgccccgccatgcgcgcaaggtgggggaaggtggcactgcacggcggaccccacgcgcaagtgtcggagcaccatctccacgatcggaagtcgctgagtgctgggccccgccagtcggcgtgtttgcagaaacgagggcaggtagcgccaccgacacgcgggtcccgaagtgacagtgagaaagcggcaggctgtgcgggatttggcgtggctggcgttagactgttgagtggggcccgcacgccagagtggctgcgcgcgtggtcatgggccgagagtgcg

SEQ ID NO: 24689 - DNA, 240 bp, Zea mays
  Peptide Sequence Number=SeqID_68064
atggccatgatgggtccaacatcggaaaagatgtacctctgccagaaagatgccgccacgcaccaggctaacggcacgcaagtctacgggaccaattggggtgcctcgggcatcaattggctccccgacatgaaagcagcagcagtggaagtaatgaccccatcgggagaccttgaaagcccgagttttctctgcacattatgggccggatccccttccacagatgccgacctggtctaa

SEQ ID NO: 24690 - DNA, 708 bp, Zea mays
  Peptide Sequence Number=SeqID_68065
atggtgacctccagcttgatggtgggggaaagcgagccgggctgcggcctctgcccctccctcagcctcaaggattttcatcaccagggctggggaggaaaggaagggcggccgtcgtccgtggcgccggtagctgcaccgtgcctggctctcggacgcgagtggcttcggagccgctcgcagtgccggcgtctgccacagcagctggaagaggttcttccgccggcgctgatggccaaggccggccacggggctgacctccaactctacggcattctgcccgtccttgcctcacgagtttgggcatgggcggggggcctcctggcagcagcatccgccctgaggtcagtgctgccgctgttcgcccccccggagcagaagtcgtcgtcgtcgccgctgctggagcgggtgacggcgcaccgttcgccggtcttccgttgctccgcaggcccacccctatcgagtggggctgttcgtacctgcggaggggggaaccggagttccgtttgtgacggcacttcgaatgccgactcgtctgttgattatctgaaccgcttcaccaagcatgagtcgccccgtgtcaaggtgacgagtgaggagtccctcggctcggtcagccttgctgtccgaggctcctctggcttagttaaagagacccctcggccgctcttcgacgagccgaggccaggggtagcgatatcagtatga

SEQ ID NO: 24691 - DNA, 243 bp, Zea mays
  Peptide Sequence Number=SeqID_68066
atggggagcgctcgcgttgctttcgtctggctgctgttggaggagcgcaacttcgtggagattggcacctttcagccattgctcggcttcaaggattttcatcaggcagcccggctgcatcccctcaccaatggtctcgcaggggatgcgaacgagagccttccagtggtagcgttcaccctgggaccatcgctgctgctgcagaggtcgctggcgagtcacccggagtttgtcgtcccgtag

SEQ ID NO: 24692 - DNA, 288 bp, Zea mays
  Peptide Sequence Number=SeqID_68067
atgaccgggaaaaagaccatgacttcctctgacggcggcactccaaagaaagccaaggtggtggtggaggatgaggaagaggcggggttggaggatgaggaagaggcgactgtgacactatccgtggagaaggacgcgctggagtgcgacatctgctgcctacccttccagtccgaagttttcatggcaagtcagattaccatgcattgcaagaacgggcattctggatgtgcaaagtgctgcatccgcacggacgaaagtcgtgtaaaattacatgacatgtcctaa

SEQ ID NO: 24693 - DNA, 912 bp, Zea mays
  Peptide Sequence Number=SeqID_68068
atgaagatcgatcaaaaatacaagatcaagcttcgggtaagaaagaagataccgaacttgtcaagtagttcaggggcacctacagggttgtctgagatgaatcaacaagaagctcctacaggagttggagagtttctacgagattttggtgtttcagtggtcctgtggcgactacttcaagaagttggatataccgaagcacccaagtaccagtggtcacgcactgttcttagaggacaaccatggtatgaggtagtagtgcatattccagaacgtgctagaaaaccatcttggccatattggatgttccatgctgaaggaatgactccttgggagggtgctcaggcccaattaatggaaagcattcctattgggcaggattctgttgaatcggcatctactcgagttttgatggtcgtgctagagttgcaacttactcgagggcacagtcgtcaaaagtggcagcagttgtacactgggagttatgcagcatttaagatgatggaaatggccaagaatagtgcttgtacccaggcacaagaacgacttgaagaaacaaaggttcaagcggaacatgttattggactagagcatcaggtgacagaacttcagatgcaacaccaagttgatcagaatcgcattaaggagcttgagcatcagctaactaatgctcattctaaattaaaaattttgagtcagcaacaagaagaaatttgtctgtatgctgttgctgttagagaagaccttaaagaaaccatgagctttataagccatcaggatcaggcgatcaaagaattgaatcgtgctcatcccatggaatttcaagtagcacaacggcttgtcaaccatctgcagcaagcagtgcataggctcaatgctgccttttatcctactcctgcatcggtggactaa

SEQ ID NO: 24694 - DNA, 240 bp, Zea mays
  Peptide Sequence Number=SeqID_68069
atgcagtggctttttggggcaacatcatatggcaatattgtagatggaatattgctctacaactttgctgcagagcttgaacacgaagaagaagtggaagtcactgaagagaagacatcaccaccctcggattctcaggcagaaaactgcttctactttgatatttgtggatctgagccagactcacctacgaacgaaggcaagccccggtgcatgcaacccctttccttgcgttattaa

SEQ ID NO: 24695 - DNA, 639 bp, Zea mays
  Peptide Sequence Number=SeqID_68070
atgggcatggttaaggtcaaggctcagtccactcaagggacacgatctcgcctcgctcgagcccagcctcgggcaaaggaaaacagcgccgcctgccccgctccgactgctgtgccattcgatagagtgaggctgacagcagctaagtccagccttgggcgccatgggaagctctgcctcgcccgacccagggctcggactcaacctcgaccccggaagacggactctgcctcgcccgaccccagggctcggactcagcctcggcctcggaagacggtctccgcctcgcccgacccagggctcggactcagcctcgaccccggaagacggactccgcctcgcccgaccccagggctcggactcagcctcgaccccggaagacggactccgcctcgcccgaccccagggcccagactcgacctcgacctcggaggagcctccgcctcgcccgacctcgggctcggacccgccacgtcacagggaaaggccatcattaccctacccctagatagctcaggctgcgggggacaagaccggcgtcccatctggctcgccccggacaacacgaaggtcgtgggtttcccctttgccgtttctcccccctttgtgctccatctcgcgccgacccatctgggctag

SEQ ID NO: 24696 - DNA, 594 bp, Zea mays
  Peptide Sequence Number=SeqID_68071
atgggcacggttaaggtcaaggctcagtccactcaagggacacgatctcgcctcgcccgagcccagcctcgggcaaaggcagccgaccccggaggattcacgtctcgcccgagggccccctcaagcgacggacacaccttcggctcgcccgaggcccagtcttcgcggagaagcaaccttggccagatcgccacgccaaccgaccgtatcgcaggagcatttaatgcaactaagtccagcctcgggcgccatgggaagctccgcctcgcccgacccagggctcggactcagcctcgaccccggaagacggactccgcctcgcccgaccccagggctcggactcagcctcggcctcggaagacggtctccgcctcgcccgacccagggctcggactcagcctcgaccccggaagacggactccgcctcgcccgaccccagggctcggactcagcctcgacatcggaagacgaactccgcctcgcccgaccctagggcccagactcgacctcgacctcggaggagcctccgcctcgcccgacctcgggctcggacccgccatgtcacagggaaggccatcattaccctacccctag

SEQ ID NO: 24697 - DNA, 624 bp, Zea mays
  Peptide Sequence Number=SeqID_68072
atggtggagaaaggccacgggtcgcgcggcgaaacaacggtcacccggtcggccatcaccaagcagaagaggtggcggcggagcggacaagggaccgagaaaggggatactgcgaaagggatccttctccgcgaaggaagcgggccccgagcccccctactgatcagaggttcgaaggctggcccctcggaagggttcgacagccgcctcagagcactcgggctccgagccctcctactgatcagaggttcgaaggctggcccctcggaagggttcgacagccgcctcagagcactcgggctccacacccaccactggtcagaggttcgaaggctggcccctcggatgggttcgacagccgcctcgggccactcgggctccgcgcccactactgatcaggggttcgtaggctggcccccgaagggtttgacagccgccttagagcatgcagagcgagggatgactctgggctcgggggctgctcccgcaaacccggctctagccaaaccgttgacagcgtcaacataccagctcgagaacttggaacctgaccatgcacccgggctacggccagttcgcatgagggaacaaccagaccggccgaagcatcacgaaacgcgctaa

SEQ ID NO: 24698 - DNA, 1437 bp, Zea mays
  Peptide Sequence Number=SeqID_68073
atgcagtggctttttggggcaacatcatatggcaatattgtagatggcatattgctctacaactttgctgcagagcttgaacgcgaagaagaagtggaagtcactgaagagaagacatcagcaccctcagattctcaggcagaaaactgcttctactttgatatttgtggatccgagccagactcacctacgaacgaaggcaagccccggcttgatgatcgaggaccctttaactggtcacatgcctcgtcatggcatacccttgagagtcttttccttagtcgggtgaggaagcgacaaatttttgttgcttttgctccaaggtggtatcaaatgaagaaatacaagagtgaagatgcgggaggacgtggtcctccatataggactttttgttttaaaactatcgggaggagtttttgcctcccttgtttatgtaattgcttccgcatttctatatctccgatgttctgtaatgtctgcaagacgggtgaaatgttcctgatgaatcaacaagaagctcctacaggagttggagagtttctacgagattttggtgttccagtggtcctgtggcgactacttcaagaagttggatatactgaagcacccaagtaccagtggtcacgcactgttcttagaggacaaccatggtatgaggtagtagtgcatattccagaacgtgctagaaaaccatcttggccatattggatgttccatgctgaaggaatgactccttgggagggtgctcaggtagctgccttagaggtgctaacaaccatttgttaccagaaatgggaagaaatacaagccacatctatgaggttgttccctgcagttgccttaagtgacccatttgtgtatcatcaccaggcccaattaatggaaagcattcctattgggcaggattctgttgaatcggcatctgctcgagttttgatggtcgtgctagagttgcaacttactcgagggcacagtcgtcaaaagtggcagcagttgtacactgggagttatgcagcatttaagatgatggaaatggccaagaatagtgcttgtacccaggcacaagaacgacttgaagaaacaaaggttcaagcggaacatgttattggactagagcatcaggtgacagaacttcagatgcaacaccaagttgatcagaatcgcattaaggagcttgagcatcagctaactaatgctcattctaaattaaaaattttgagtcagcaacaagaagaaatttgtctgtatgctgttgctgttagagaagaccttaaagaaaccaggagcttcataagccatcaggatcaggcgatcaaagaattgaatcgtgctcatcccatggaatttcatgtagcacaacggcttgtcaaccatctgcagcaagcagtgcataggctcaatgctgccttttatcctactcctgcatcggtggactaa

SEQ ID NO: 24699 - DNA, 222 bp, Zea mays
  Peptide Sequence Number=SeqID_68074
atgaagtctgactatctctttgagataaattcgggcaagggtggctcctccaaaggtgtcacactgggccacacactgagctatgtctttcttcatccctctccaccagtacctggttttgaggtcaaggacctctcgtgcttccccttttggtacacacagacgatttttgagccaaagggctccttgttcatctgccttgatgtcacacccggcttttag

SEQ ID NO: 24700 - DNA, 282 bp, Zea mays
  Peptide Sequence Number=SeqID_68075
atggagaaccacccgggaaaacagtgctaccacaagtgtggtgatgaggacatcacttctatacatacaatgaatggaccgataacacgatctcgtgcacgacagctaaatctcaaggtacaggggaccagcaaggacttgggaaaggccaaggtgttgaggaggagcagcaagggcgtccacaataggaaggagatcaagtccgagtcggctgcaactccatctcgggttccaggaccagtctgcactaaaatggacgtccaagatgcatccggactctga

SEQ ID NO: 24701 - DNA, 246 bp, Zea mays
  Peptide Sequence Number=SeqID_68076
atgggacagaaaggactcatcctgagtaaagctttgaaggctaagaaggatgccaaagacgaaagcactcggataacctttggaaatttacggtctgaagttattgagcttcaacatcaggttgaagagaaagaagaaatcttgagtactttggcaagagagttgattgagaatcgtattgagttcacgaaatcctctaaagaaaaggatgataaaattttgaagctggaagatgagaagacgtag

SEQ ID NO: 24702 - DNA, 129 bp, Zea mays
  Peptide Sequence Number=SeqID_68077
atggcggtcaggcgagggatccctgcattggagctagattcacatgagcggcttgtgggtaaagatgcgcaacctctgcagagtgtaaaactggtatggatgcgagagagtgattacaatccagtgtga

SEQ ID NO: 24703 - DNA, 615 bp, Zea mays
  Peptide Sequence Number=SeqID_68078
atggggcgatcaccctgggtcaccaagcgtgatccaattggtcacgtggccgaggaccgaggtggcggcctgcggcaggaggaggttgacatctcggacccacctgtcgaaactgaaggggacaacacggctgagtgggctggcgtacaccgagtcgttacccccgcgctcccgctctctctctcgctgcaccgtgggaccgccctatcagctccgccttccccgcgcccgccgtggaccagcgtgcgcgcactcgcgcacgttcgccggattccttggccacgtcacccgcccacgcccccaactccttttgagcaccgcccgcacccgcactcgctcccccgtcccatttcgcacagcctggctctctctcgtgctctgcccacgccgctcgacctcgccggagactcgcgcccgccgtcccggtcatccagctcgccggaagccacgccaggccaccccgagcttcgccccgaggtgaggcacccgttcccgtgctcgattttccctattcacgcctacatctccggcgacaccggaaccgccgtagcccgcacccaccccaactccggcgatctcacagccgcgaagaggagcgacgccggccgcagctaa

SEQ ID NO: 24704 - DNA, 660 bp, Zea mays
  Peptide Sequence Number=SeqID_68079
atgccccctgcaccaccactgggcatcccggctgctgaaggagaccctgacggagacagaaacgacgacgccggtggcagttcgagccacggcacggagctctcggaggagccggagccagaggggtggatcgctagacccatcactcatgacgccactcacgggtgtcacttccacgatgctctcgataccttgctacgtcgggccttcgaccgacacacttggtctatcgagtactgttgtgtagtctactcgcagcgtcgcgggttatacctggaccagtgggaggctacttgcttggtgcgctgtccggacgatgatctctgggctgacggccttgacctgaagtactaccctcgccgttcgaccggcggtgctggaggtgtgattgtctcaccagttggtgaaggcaatcccaggatgaacagcatggtcaacctggccgccgtgctcaacacagagttggaccacgcccttgacgagttgggcaaggttcaggtggaggttgcggaattgcgtgctgagtgcgcagcacgccactatttggatggtggttctcccgcccctattgggattcagcacccttaccgttcaccgccccgtggtcgcttcgactatggtaccccagactacaggacccggatagatttggatccatag

SEQ ID NO: 24705 - DNA, 144 bp, Zea mays
  Peptide Sequence Number=SeqID_68080
atggcgaactcgactgtgggcatcacaccggtgcgggggcaccagagtgcgcggaacatggagtgcctggaggatggcggggatgcggtgaagtctcgggtcgacgacagcggactgcggctacatgggaaaacactccggtga

SEQ ID NO: 24706 - DNA, 429 bp, Zea mays
  Peptide Sequence Number=SeqID_68081
atgcagtcggaccaggctgtgcccgaagctgaggtgccggttatgcctgaggaaattcctcttgcagaaaccaatgaggcgaagaatgaggatgatatcgctttaatagaccaaaaggtcattcctttgaagccgctttcagaaagcgaggaagaggaagagcggatagctctagtaatgagctcgttctttggtattgacgaaggggagtctgaggaaaaagatattgctggtacaattcttgcagcggagggtgttacactgcctactgtggatgcgactataccgagaggtctgaaggttgattcggcggctacaatcgtgacacctttggcaattgtggtggtcgaagagaaaattggttcttcgaagcctgcaatagcagaggacaagggtgtaaagcccaaaaatttgtatgagggaaaataa

SEQ ID NO: 24707 - DNA, 2952 bp, Zea mays
  Peptide Sequence Number=SeqID_68082
atgccgacctcttcttcttctgctgccgctacgccgccggccgacgcatcgtctgaggagacgctgagcactgtggcggcggaggagttgcgcgccggcgacacagtggatttcggcgcatcgcggatgtcctcggttcgcgtgcaagacatgcagcggctgggttattttggcggcggagtcgctcgtgtcctaggggcggaggaggtccccgagccagaaggcgagttggttgtcttcgaggcattcttcgctgctggtcttcgcctgcctgcgcatcgattcatgggagaagtcttgtgcagattcaacgtccagccatcggtcgaagtcttcgcgaagtattactgcctgcactggcagaaaaggatgatcggaaataagattgctcaatttgagtcctatacatttatgccgaagaccggcaagacttcgatggaagtcgttgagttggttccttgcgcccgtaataaatggggcaactggcatgagttttggttctacgttgcagagggtgcagtcgaagaccatccggggctccccgtggccgagatgtgctcgcattgttactcagcatacccgcagtttgaagtggcggaggaggatgcagatgaaggggccctgcggtgcgcggccggtctgagtagtgggcgcgacctggttgaggagtttgtcgcgtatggggtgtggcccttggcgcatggctgggcgctgggcgaagtatgccctcgccagatgccttcccgtggtgggatgctggtgcgaagtcccgccttcgcactggatttgcatagccgcgatcctgtcgtgttagtgcgtgaagcggaggatggggcggtgcggattgttggtcggtatgtgccgaagacggagggccagcgtagctgggatatacgcgggtccaacgatcgcatgaacagggtcttcgagttgaaccgtctgtcgtatggcggttatcccgggcaagacgatgtggatcgtcgcaggaagaagccggcgggaattgatgaggacatgcgcggcccccgggggaaggatgtcttcgcccgagctccgagagtcttcggcgcggatgctgaggtgatggacaaggatcgtcagggagctgctcagaagcgccaggcggtcgtcaggctgcctgaggccaggccgaagaggtcgcgggggactacgaaggctgctgccccgggcggaagccagccgatgctggcggcgaagtcggccgcccctgggtccagcagggtgcctgaggctgtgaagatggccgccgccggcggtaccaagtctgtcccggccggagccgcgaaggcccgagaattgcctccgccgggcaagcgcgttaccgacttcgccaccgatattagcgtggatgattatcttgttggttcaggcgaaggccaacttgttgttgtgccgcctgccgtggcgaccgcggcggctgccatggtgcctagggcgaagggtagtgctcttagtgccggtggtgagatgccggcactcactgccgtcagggacgaggcgggcgctgtgtcccgccggctgaaggaggcattaagtcaggcggctgacttcgcagaccgcgcggcgtcgggggcccttacgacaattgtgtctaccgaagtcgagagacttcgggcgcaacatgctgacgccgtccgggaaaagtcggccgccgacagcaagtgccgcaagttggcggataaggtggccgcgctagagggtgagagggatgacctccggcgccaactggcggaggagagaaaggaggctaatgaggccctcgccaaggcgcagtctgcgcaggcggaggccaatttggcgcgggcggagggtagtcttgccagacagcgcgccgaggaattggaggagcggttcaacgctctgcagacccgtgtggagagggccgaggcttcgacgtgctcggaggctgagcggacgcgcaaacagcttatggactcataccacgagctgggcgcgcggaccgctaacttcgaagtgccagaccgagagcccggacttcgctgcctcaagtggctgcaggaggagctgctggcgctccccgccattgtagaggggtttatgtcctatgcctccctggtcacctgcgaaggggcgatgaacgcgctgtcccgcgaagggtgccggcactatgaggtcttcgaccaagctgatgaggatttcgagcgcgacatttacaaggttgaggaccctgtgatgaaggaatccgcgggagccctcttcgaccggatgtggggccctcacggtcgggaggtggtcagggagcggtccgagacgacaaggggtcaggcggcgcgtaacgagaaggtggaggacttcgaggctttgaacagcgcgcagcctgattcggagtcgaacccggtggcggctgtgtccgaggtcgccccggcgccgcctccagaaaccgtcgaaggcgcccctgatgcccccgcagccactgcggctggcggtggctcgtcgccaactgttgcgccgagggctgaggatcctgtgaagaagccggtggagccggcagcggaggatcccgcgacggctgggtcttcgcaggttcaagattttgggcctgcgcacgcaaccgctactgctaattttttggcggcttcgaccgtggatgatgggaatgaatcggatgaatctgcatctaagttttctgattttggtgactctgggacttcggttgagtggactgaagagtcgtcggatgaggacttggattactttgcggccttggatgtgggagcggcggaggcttcgccgtgtgctgtggatgctgaagttgtgcctggtccaagtgctgggcgcaggcggcaaagggcggttgcgaagcgtagagtgagtgaggcggacggtggtcggcttcgtgtgggcagggttggcaggcaggagctgttgtccttgccggccgttgcgagtgcaggtgagggggagctatga

SEQ ID NO: 24708 - DNA, 468 bp, Zea mays
  Peptide Sequence Number=SeqID_68083
atgccgaagctgtcacctataacgcttcggcatagtgacatgtctcaagacgaaggagtgaaccgacctaaagatgaaatgaccaataaacccatgatagtttgtgtcatgattgtaatcgattgtgaagggcataaatcgtttgagaacaagtccccaacaataatatatgtctgtattagcaaagatgagctttttattgctgcgggtagggaagtaaatggaattgatattatctgttcgtatatgaattcgatccgtcgaagagggttgagatctgatccaaatctgagtccagaaaccttggagaggatcaacaaggacttgggacaggccgaggtgtcgaggaggagcagcaagggcgaacagaataggaaggagatcaagtccgacttggacgcgattccatctcgggttccaggaccaatctgcactaaaatagacgtccaggatgcatgcgaactctga

SEQ ID NO: 24709 - DNA, 246 bp, Zea mays
  Peptide Sequence Number=SeqID_68084
atggcggaggtcgggcacgggcgaggcaaggtgagagagcgaatgggggagttgagtgaggccagagagtgcgcagaggggaggagggcgtcaccattcctttcagtcaccatgaaggcttatccctgcaagcgcaatcaagaacacaagccagaacatgaagaacacaaccaaagttgtgttgattacgagatgtggtcccacaagccgatgacgacgacactctttgatgatagaataatctaa

SEQ ID NO: 24710 - DNA, 297 bp, Zea mays
  Peptide Sequence Number=SeqID_68085
atggctgaggggaggggcgagctcagcgacggcgtggagaaagggctagagcagaggatgggcgagctcgactggggcgctcggggaagcggtgccaaggccgacgctaggaagggcgatgcagcggcgctggccaccggcgaggacgcggccgggtggaggtccgagcaggggatggatgccgtggcaagagctggaggcgagggcttggggatccgagttgagaggatggtgtgctctgctgctgggcggagagggcggctggaagatgagcccagttatctcggcctgatttaa

SEQ ID NO: 24711 - DNA, 117 bp, Zea mays
  Peptide Sequence Number=SeqID_68086
atggggctgcctgggtgccaggttggcgctgctgatcttgcctttcttcctgctgctgttggaggagttcaggctctagcttcagcacctgaaagtcgcctagaggggggtgaatag

SEQ ID NO: 24712 - DNA, 288 bp, Zea mays
  Peptide Sequence Number=SeqID_68087
atgggcggtccggaccccatatggggggtccggatcccattccaggggttcgcatttgagaacaagtccccaacattggcacccaccttcggtgaactcaatcgaccacctttggcaagctgtgacctttgtcatgccgccgaagaaaacttcttcagggctaggggctgcactgtagccactggacgtcaaccaggacacgctatgcgaagctcgaactcaaaagaggaaggctacaagtccaacaccccaagaggaggagttggaccaggagataagggatcttga

SEQ ID NO: 24713 - DNA, 144 bp, Zea mays
  Peptide Sequence Number=SeqID_68088
atggggatcagctcagtagagagccttcgaagagctgaagcaatatttgatagacctaacgacgttaactccaccaacgccaggggctcctctgttgctgtacgtggcagcttcacattcagcagttttcaactgaaggtgtaa

SEQ ID NO: 24714 - DNA, 882 bp, Zea mays
  Peptide Sequence Number=SeqID_68089
atgcagtcggcatgcaaccgcgccaagtgggcgcaccccttcgactccaacgcgcccagcatggaggcccaggcccacacgtcatgcaaccggcgcgccggttgctacgtgcgagcaactgcaccgcccctcaggccactaccgtgcctcctcgactgcggaaccagtaccgcgactcgaggcaaccctgcgtatgacccaacagtgccagccaggcgcatcggtcacgggccagaaactccgcatcgcccgaagggctcggactcgggctcagccccggaagacgacgaactccgcttcgcccgaccccagggctcggactcgggctcagccccggaagacgacgaactccgcttcgcccgaccccagggcttggactcgggctcagccccggaagacgacgaactccgcttcgcccgaccccaaggctcggactcgggctcagccccggaagacgacgaactccgcatcgcccgaccccagggctcggactcgggcttggccccagaagacgacgaactccgcttcgcccgaccccagggctcggactcgggcttggccccagaagacgacgaactccgcttcgcccgacccaagggctcggactcgggctcagccccggaaggcgacgaactccgcatcgcccgaccccagggctcggactcagccctggcctcaaccgacggtctccgcctcgcccgacccaggggctcggactcgacctcggcctcggaagacagactcaacctcggaggagcctccacctcgcccaacccagggctcagaccatccacgtcacaggaggcaccatcattaccctaccccaagctaactcaggctacggggaacaagaccggcgtcccatctagctcgccccggtaa

SEQ ID NO: 24715 - DNA, 564 bp, Zea mays
  Peptide Sequence Number=SeqID_68090
atgacggcgcctccggtagtatctcgtcgtccgctggaagcggcaaccggcaacacctcctccatgtccggctccggcgtcgacgtccgcggcaactacgctagcggtggcgccgatgttgaattgctgatgacgacgcttccgctagtttctggttgtgctcccaacgcagcagcgcctccccagttccccacagcgcccgccgctcccagcaccgacatccccgcagctgggttgcatcgtgtcccgctgactcctgggccatggaggcggacccgaccccatcttggtccacgcgtcactgaccgtacacgtgcggacgtggatgtgaacgcggtggacgacgactggacgcattaccagcacggccgcccggcggcggcgaggagaaaaccaggaagtctccatccggccatctgtcgtccccctgctcacgcacgctcctcaccatctttagcctgggccccacctcccgtgccctcctctaggccgctcctccctgcttcctcgttccaccgaccagatccaccctactcaggccagcaatgtcggcgccgccgctga

SEQ ID NO: 24716 - DNA, 549 bp, Zea mays
  Peptide Sequence Number=SeqID_68091
atgcaggtggcgtgcaaccgcaccacggggatgcaacctttcgactttgatgcatccagcatggaggcccaggcccacacgtcatggaccgagaaaggggatatttcgaaagggatccttctccgtgaaggaagcgggccccgagccctcctactgatcaggggttcgaaggctggcccctcggaagggttcgacagcctccctagagcactcgagcttcaggctcattacttatcagaggctggcccctcagaagggttcgacagccgccccagagcacgcagagcgagggatgactctgggtacgtccgatacatggccgaggctcgggctacgctcccgagtcacttcgcccttccactgaccgacctgacaggaaaacaacgccgctcgcccctctccgactgttgtgccactcgcgaggggctcggcctcaccctcagcctcggaaggtggcctccgcctcgcccgaccccagggctcggcctcaacctcgacctcgcccgaccccagggcacctctccgacaaccacgttggcatgtacatag

SEQ ID NO: 24717 - DNA, 1083 bp, Zea mays
  Peptide Sequence Number=SeqID_68092
atgcatcgcgccttcccaccttccgagcccccggatggggagcgcccgcgttgccttcgtcttgttgttggaggagcgcaacctcacggaggttggcacccttcagccatcgctcggcttcaaggattttcatcaggcagctcggctgcattcccctaccaatggtcacccaggatggtgaccaccagttcgatggtggggagaagcaagccaggctgcggcctctgccccgccctcagcttcaaggatctccatcatccttgctatggcggggggcgagctgagctggagctctacctcccgtatgggccgacgggccacctcttccttcagcattcaggggagagggcgctcaccggcctagcggagggggcgcgtttcgacaacgcggggccggccggccgcaagcgtcgtcaactccagcatgcctggctcgctggctcagctggctctggcgctgcttccggtgccacctcccaccgctggggtggagcgtggctgttcgcccaccgtacgggcggctgttgcgccgtgcgcaccaggggaccgtccaagacgtcgcacgccgctagggcggcgttcgtgtccttggattgtcttgtccttactccggcacgacgcctccgcacggaggtggctgccgtcgtcggtgctgaggtggtggcagccggagaaggtttctccgccgacgagaccgtcagcgccacccgcggactgacctccggctctttggctttgatagcttgtactcgcccctcgagtggggacatgggcgagggccttgtagcagcagcgtctgccctgaggtcatcgctgctgctgtttagccgcccggagcggaggtgttgtcgctgctgctgcagtggtcggcggcgagccaattggagtttgtcgtcccgcaggccctccgatgtggagaatcctcggctgctctgcgatgagccggagccggaggcagcgatgtcagcgtggacagaggcggagtcagctcgagaagaggcttcgtcggcccgggggcacgtggcttccctggccgaggaggcgcagcagcggaggctggagcttggccaggtcgtccgctag

SEQ ID NO: 24718 - DNA, 309 bp, Zea mays
  Peptide Sequence Number=SeqID_68093
atgtccggtgcaccagaggactcaaacttcgaactcgtcaccttcgagaatttccggaagcgactccgctataattcaccggactatccggtgtacaccggacatgtccggtgctccaaggaagagtggcctccggaactcaccagcctcgggaatttattgaagctgctccgctataattcaccagactgtccggcgactttcaccggcaacttcgagccagcggagacggttaagtctgtccctctcaaccccagcaacgacgcctccaagcagatccggatcggctccgagctcgaccccaaatag

SEQ ID NO: 24719 - DNA, 474 bp, Zea mays
  Peptide Sequence Number=SeqID_68094
atgggcaagaacaacaagcgcaagcgtgagccgactcctccatcggaggattttggtgactcggagtactcagaggaggagttctcctctgagtctgaggggtctccggctcccatccccctgcgtgagtcgtctgacgactcagacgactcccaggggctcacggcggaggtctggacttacatccgggccgtcgagcgctccgggcttgagggctcggatgagtcggagtactcctcggatgaggaggactcgtccgagaaggacggtggcggcgacggcgaggacgaggacgacgacgacgacgacgaaggcggtggcggcggtgacggtgacggcagcggcaggggcggcagcagcggcagcaaggatggcgacggcggcagcagcaagggcggcagcggcggcgacggcagcagcaggggcagcaacaggggcggcaacggcagaggcagcaacagggccagtggctag

SEQ ID NO: 24720 - DNA, 708 bp, Zea mays
  Peptide Sequence Number=SeqID_68095
atggcgtcaagcatcgggagtcctatgcgacaagagagtgccatagaagttgaaaaggcaaacttgacatgggaagaggcaatcaaaagggacttgaacctacgccaacttgtttgggactataaggctatgttgatgatgatgatgtttcactatagacagttgaaagctatcctcagtcttatgcacaccttaatttgctctaattgtggtttaacagaatacgatgatgaacacagcagcccaagagatgaagaacgtcatgaaataagtttgcccattatgaaatcttctggtgctaatgctgactctgccaaaagtgctgataacacagatgacgctgttgatgcagacttccctaactgcattctgaaatgcaaatctgtgtttaagtgcaagctctgtcctaggatcatgtgcttaaatgtggagatggtcaagatacatctgaaatcaaagaggcatgctcgttccgagaaactactaggagaagggaggcttaagctgatgctcaacagcgatggtgaactggaggaagagcaagagacacatgctgaacgacatgctcggactatagccctttcccagcaagtacaaaagcagaagaaggattcaggtaggcagcgacagaatcggagaaagaagaagaggtctcgggttaatctggaagaggcacagaacaacaaaaaacaacgcaaagctaaatga

SEQ ID NO: 24721 - DNA, 648 bp, Zea mays
  Peptide Sequence Number=SeqID_68096
atggggaccgcgacgtctcgtgagtcgtgcgacttggtgagccttgtgctgtcctgtcctctgagtgcgcgtggcgtggtggcatcaaagccttcagctcagacagaagataccattgatcaaagcgacaatcacaaacgtaggaatttcgcagggaacacaaccattctgcaatttatcgctgtactatttattgatcaaggaacattcggcaaggtcgaactgaccgcagtcacttcgccccctttactgaccgttctgacaggaaaacagtgttgttcaccccgctccggcaactgtgccagctatcagggaagggccgacaacagcaagtcacgacctcccccgagttcggccttgggcgcaacagggagctccaccttgcccgaccccaggcctcggccccagcttcggcctcgggagaaggtctccgcctcgcccgaccctgacctcagcctcgatttcggtctcgagagaaggtctccgcctcgcccgaccctgggcctcggcctcaacctcggcctcgggagaaggtctccgcctcgcccgaccctgggcctcggcctcggaggagtcgccgcctcgcctgacctcggcctcgtatcagttacgctactagggatccatcattgccctacccttagctag

SEQ ID NO: 24722 - DNA, 690 bp, Zea mays
  Peptide Sequence Number=SeqID_68097
atggcggccaaggcggtggcttcgccgctcgcgttccgccgcgacgtgcgtggcccgctcggccgtcctgccccgggcggctgccggagcgggaccgggaccgggacagggctgccgggggtgctgtactggagcggtggcgccggcggcggcagcaggctgctcgcggcgcgggcgcgcgggaggaacaggttcggcggcggcggcggcgggcggggcgcgtccagggacgagacagcggaggaggacgaggacgaggccgccgacgtggtgatcgtcgacgccggggacgaggaggagtacgcctccgacgagctgtccggtttcaggggcctggttcttgatctctcctacaggcctgtcaacgtggtgtgctggaagcgcgccatctgcctggagttcattgggaaggcccatgtgttggagtactacgaccagaccgtctcttcgcctagcgggtccttctacatccctgcagttttgagggtgactgcctgtgcaagatgcaactccaggaaggggcagaagacactggagcaggcaaacatgaagctgcgcaagatccccagggcgcccaaggagtacgatatcatggctgtgcccttgacaaaatctgcgttcagaacgctcaagaggaaccatggcctccctgaagtgtggctgcagtaccttgccaggccatctccatga

SEQ ID NO: 24723 - DNA, 324 bp, Zea mays
  Peptide Sequence Number=SeqID_68098
atggaggagcaaaggaggccacctagctcgaagatagcgccagtgtccatgaaggcgtcctccgcaaatgcgacgcttcaaggcatgaagaacagaagccattttcgaagggacatgaaaactgcactgcaacaagacgtgtgtgtattgttctacctggtgtttagtcgtggacaagctgaggaagaagttgtggcacgagaagaacgtccactgagctctaaagcaggcgttcgcgaggccgctctgcctcgcctccctattgtctcaagtcaatgtccttctttgcttttcgatcaatttcacaagcaagaagcaacctaa

SEQ ID NO: 24724 - DNA, 868 bp, Zea mays
  Peptide Sequence Number=SeqID_68099
atggacgcatcacaggtggccaggtcccagtggccggcctcttggggcttttcactgcttcacggagtctgggactctagggcgcctcagcagcaaggccgcaagaccagcagtccaaggctcaaagcggcccaggacctaggtccaagcgaacagcctgcgggcctggcgctctgcctctccctctcgccgtgcagggcttcaggccatccgggctccggcttccggcatccatcaggcgtcctcataagatggtgtagggcagcgagcgccgagcagagcagcaaggcagagcagcgagcagccgagcagcgaggcagcgggcgtcctcagaatccgggctgccgagccgccgagcagagcagccgagagcagcgaggcagcgagaacggcccacgagaaggcccgtgcgggtgcggtcgccctgggccgaacaaccccggaccgccgtccgctgcttcctactcttcaccgcttcaccccgcgtgcgcgctttctctgttgctctgctacaactgcggcgccgccgccgccgccgccctacgccagttgccgagcccttcatcgctcttctcgccggcgacgagcacccaccacaacaaggtattcccaccccttgtattccctccatgtgaatttcggtctgccgcggcccatggaatcgacctgccaccgctgcacgcaccagccctctcgcagccttcgctgcacgtgctgctgctccggccagccgtgccccacgcccccgcgccgaccagtcagccccagccgcgcccacctcctggcagctgcgccgctgctccagctccggtcaaccacgaccgtgcccccgcgccatgcaaccgcggccccgctccagcccgcgccg

SEQ ID NO: 24725 - DNA, 387 bp, Zea mays
  Peptide Sequence Number=SeqID_68100
atggccacatttgcctcgtctcctcctcctccggtgaggagggtggcggggcaaacccgggtgttcctcttctaccacagtgggaagccgtcgtcgagttcgccgtcgctgggcgagctatcgaccgtcgttgctgtcacgctgcgaggggaggagtaccatgtcgtagctgccgtcgcgggacatgaactcgagactcctgaagcggagcaccgtcccccgctgaagaggctgttggaggctacccatctggaactcaacgggaaagtgttcgttaacatgcagcgagcccctacctggcgcgccaactgtcggtgtttcggacccgcggggaccatcaaccgaccagtgaatttattgttgcgtgtccctgcccagatgggttga

SEQ ID NO: 24726 - DNA, 310 bp, Zea mays
  Peptide Sequence Number=SeqID_68101
gtataaagcaacagttggagctatagcacaaaatggatactatgtagcctatgatggctggggaaacagggaagagttcaagctctgcaaggtgatgtctgttctgtttggccagaaaggcatcccctacctgaacacctacgacgaccgtaccatccgctaccccaaccctctcatcaaggccaacgacaccatcaagatcgatctggagaccaacaagatcatggacttcatcaagttgtatttgccctttcatggacttcaccaagttatatacttagttaggctcaatgttagcacaaacagttga

SEQ ID NO: 24727 - DNA, 1029 bp, Zea mays
  Peptide Sequence Number=SeqID_68102
atgacgaatctcaacgccaccgtcgctgctgtgctcgtgatgctcgccttcctcgccgggcagtcggttgccgggcgctactactacgacaaagtgcaggacaaggtgagaaaggaagtggagaaggccatggcgaaaaaccccagcgtcggccccgcccttgttcgcttggtgttccatgactgctgggtctatggttgtgatggctccgtgctcctagacagcacgcctactgacggcaccaacaccgagaagaaggcggcgaacaacatcggcctcgctggcttcgaggtgatcgacgccatcaagcagaaggtcggcactgacgcctcctgcgcagacatcgtcgccttcgcggcgcgcgacgcggccgacatcctcagcggcggcaagatcttctacaccatccccggcggccgcaaggacggcgtcgtctcgtccgccgcggtggcggacgccaacctcccgcaccccgacttcaacttcgacgagctcaaggataacttcaacgcgtccagccgaggcagcagcttcaccgtcgaggagctcgtcgtcctctcgggcgcgcactccatcggcgtcgctcacctctcgtcctaccaggaccgcctggggcccgactccactccaatcgattccgactaccaggaggcgctcaacaaggccacacctcctggtttgctgaagactgggcagaacccgacggtgacaaacaacgtccgcgacgagactgacgcgttccagaaggacgctgcctacaaccccgtggccatgggggtgaaccccaagaggggcgtcctcgacaacagctactaccataacaacctcgtcaacaaggtgctattcaagtctgactgggtactacgcacggatgacttcgccgccagcaagctcgatgaatacaagaacaacccagcggagtggaattccgacttcgccgccgccatggtcaagctcagcagcctgccagcccaaggaaacaagttggagatcaggaagaactgcagggtacccaacccgcagtactaa

SEQ ID NO: 24728 - DNA, 1098 bp, Zea mays
  Peptide Sequence Number=SeqID_68103
atgcaggtggcatgcaacttcaccacagggatgcaccctttcgacttcgacgcatccatcgtggaggcccaggcccacacgtcatggaccagaaaggggatatttcgaaagggatccttctcacgaaggaagcgggccccgagccctcctactgatcaggggttcgaaggctggcccctcgaaagggttcgacagccgccccagagcactcgggcttcaggctcattactgatcagaggctggcccctcgaagggttcgacagccgccccagaacacgtagagcgagggatgactctgggtacatccgatacatggccgaggctcgggctacgctcccgaggtaccctaggacatttccgagaccagcaggttcgacagccgccccagagcactcgggcttcaggctcattactgatcagaggttcgaaggctggcccctcggaagggttcgacagccacctcagagcactcgggctccgcgcccactactgatcaggggttcgaaggctggcccctcgaagggttcgacagctgccccagaacacgcagagcgagggatgactctgggtacgtctgatacatggccgaggctcgggatatgctcccgaggtcaaggctccgtccactcaagggacgtgaactcgcctcactcgagcccagcctcgggcaggaacagtagacccaggcggattcatgcctccctgagggcctcctcaagcaacgggcacaccctcgactcgctcgaggcccagctcggggctaagcccccgcctcggcctcggaaggtggtctctgcctcgcccgaccccaaggctcggcctcaacctcgacctcggaaggcggtctctgcctcgcccgaccccagggcttggactcaacctcgacctcaggaggaatcacgtccttacccgaccccggcctcggcctcaggaggagtctccgcctcgcccgaccttgggctcggaccgaccacgccgcaggggccccttatgaaagcaaggagacgtcagcaaggtcccgacagccccgacagctgtgcttctacagggctcaagcgctcctccgacggccacgacatcgcatgcacagggctctag

SEQ ID NO: 24729 - DNA, 567 bp, Zea mays
  Peptide Sequence Number=SeqID_68104
atggcgcttcctgtcgatgtggctggcctgcgccctaggttgggcgtcgtggaggctcctccgaagccggggtcgagtctgtcttccatggccgaggccgagtccgagcccctgggtcgggcgaggcggaggtcgttcggcagaggccagggcggagtccgagccctggggtcgggtgaagcggacccgagtccgagccctgggtcgggcggagcggagttcgccgtcttccgggacttagcccgagtccgagccctggggtcgggcggagcggagttcgccgtcttccgggacttagcccgagtccgagccctgggtcgggcggagcggagttcgccgtcttccggggcttaccccgagtccgagccctgggtcgggcggagcggagttcgccatcttccggggcttagcccgagtccgagcccagggtcgggcggagcggagcttcctatggcggcgctgtccttctatcagaccggtcagtggagcggcgaagtgacggcggtcacttcggctctgccggggggcgcgcgtcaggataaaggtgtcaggccacctttgcgttaa

SEQ ID NO: 24730 - DNA, 675 bp, Zea mays
  Peptide Sequence Number=SeqID_68105
atggagtacacggcaactcacacttggttaagcggttcagctagccgacaggcgagtcctggtgctcgaaatgaggaagaaacacgatattgcactcaaatacctagatgttcaggccccgacagccacaatgaacagacaccggcactcaaggtgccattacaaacggaactctggttccactcctgcgggtatgaacaacctccacatcggagggcctgcgggacgacaaactccggttggctcgccgccagccactccatcagcagcgacaacgacctccgatccgggcggctaaacaacagcagcgatgaccttagggtagacgctgctgcgacaaggccctcgcccgcgtccccactcgaggggcaaggacaagctatcaaagccaaagagccggaggtcgatccgcgggtggcgctgacggtttcgtcggcggagaaaccttctccagctgccaccacctcagcaccgatgatggcagccacctgcccaccggcagatccccactcaagtcatctcggacgggcgagcaccgacctccgcgcggaggcatcgtgccggagcgagggcaggacaacccaagaacacgaacgccgacctagcggcgtgcgacgtcttgggcggtcccccggtgagcacggcgcaacagccgcccgtacggtgggaagatag

SEQ ID NO: 24731 - DNA, 408 bp, Zea mays
  Peptide Sequence Number=SeqID_68106
atggatagggaagtggaggtcggccatggcgacggtgagctcacctgctcgagctggggggccggtccagccaggggagagcaggggcaagagaagctcgtccacgccctggacagtagagggaaacgacctgctgggggaggttcgcaggggcgcgcgccgagggaaaggatgaacgaccgtagagcacgggaacaggggcgctggcttcttgctgtccgtagagcacggggaggaagggcgccgtccctggaaaacgcatcaggggaaagggctccatgggaggccgaccagagaggaggagggcgtctgctgcttgctgcgtttgcagaagaaggtgtcgtgggaagcttctgtaggggagttcggctaggagcaagcagggagccgagggggagaagggcgtag

SEQ ID NO: 24732 - DNA, 381 bp, Zea mays
  Peptide Sequence Number=SeqID_68107
atgggcgggggcctcctggcaatagcacccgccctgaggtcagtgttgctgctgttcggccccccggagcagaagtcgtcgtcgtcgctgctgctggagcagtatctggacttttttgtcggtaacagggatgtttgtgcgagcaagagttgcttctcgcggaaggtgatgagtgaggatccacttttcgaagtagtcaaaaagcacgaaagatattctggtaaaagagatcttttttcgaggaaaatttcgacgcagagggggttccccccttttagcccccgagggagggtcgggctttgccgaggcgaggccgacccttccttgatgactaaactttgcgtgggtgcgaggtatatgaataacttgaaaacatcttaa

SEQ ID NO: 24733 - DNA, 540 bp, Zea mays
  Peptide Sequence Number=SeqID_68108
atgaggcgaaaagatggcgggtaccccccattcgggggcttggaaggtggaaagacgcgatgcataagggagggagaaaacatggtcgccttccgaaaggggagaagcgggcgacgcttcgccttcgccgtaataaccgcgccaaaaaaggctggcctccgaagggttcacagtcgcctcagacgccgagcgagggatgaccaggggtacgttcgatacataaccgaggctcgggctgcgctcccgagctcaccggagacaccatgttcggtgcccatcgagggtaacatggcgctctcccccctcctccttgcggaaaggcgacgtaggggcgtatgtaaaaaagccgagtctgtccttgatcgccctctcgccctgtgcggaggctcgggggctgctctcgcaaacccggctccggccgaaccgttgacagcgtcaacataccagcccgagaacttgggccccgaccgtgcacccgggctacggccagttcgcatgagggaacaaccagaccagccgaagcattacgcaaggcattaa

SEQ ID NO: 24734 - DNA, 768 bp, Zea mays
  Peptide Sequence Number=SeqID_68109
atggcgagagtagcgtgtaccctccgtggcaagaggctggacggtggtgtatctatgctctcggttggcgtgaacccggaccaggtaacagagtgcaaaatagaggaagtaggatcaacaaaagttgattctgtaattattcatgcatcatgtttaaaaactatactgataaattttcccccttatggagatatgccgcgtacgaggaaaatcgtgcggaagtccactggacctattagcatgcctcgtcatcatttggctccaagacatgaagggagcagctgcggcagtaacgatccaattggagacctagaagcccaagtggaacaacttcggacagagttacgtcaccaaaacagggtgtgggcagaagatggtcagcgtataaatgagttggcagttgacgtcacacgcctgcaagacgagcttgctgaacgggatctggccgtcgattgggcagtcaactcacgttcggttgcttgggatcgggaagccaaagctcgtgctcgtgtgaccgagcttagtgcggcccttgacaacttgcaggtatactgcaatactctacatgaggaagtgcatgtattgtattcacgactgcacccggacgtgcctgccgaccctgttgcaatgggagccagaccatcaggaacaacaagtgaaggaactgatggggagctagacctttttaggcctcctcctttcatgaacctggctgtcgatcggtctcccacggcaggaaatgaagaaaccaaggacgacgaagactag

SEQ ID NO: 24735 - DNA, 603 bp, Zea mays
  Peptide Sequence Number=SeqID_68110
atgcagaaaaaacttgaggacccagatatgttggaaggtagctgggtttcaagtgctatgcaaatacatgcttcccaaataaacccaaactcaaacaaggatagaggctacgacatgcattaccagtacagattcaaatgttacagccttacaggaagagttcaagatacgttcaaaatttcagattgcaccataatagaaactagcttaaagccttttaaggttgaattagagaacaatttcctcatcttcgttgtacaccacatatggcttgaattaggcaattggtgctattttctcggcaacatattttgtttgcaccttacaggtgttaaccaggatgaaacacccctactctatagtctagtttttggtgaagatgttgttaatgatgccacatctattgtgctctttaatgcaattgaaaaccttgatattgataattttgatgctattgttctgttgaatttcgtcggaaaatttctctacttgttcttcaccagcaccataattggagtagttactgggttgcttagtgcatacattattaagaagctttgttttgccaggtctgcgcacaactctcttgctctgtgggggtag

SEQ ID NO: 24736 - DNA, 546 bp, Zea mays
  Peptide Sequence Number=SeqID_68111
atgtgggtgccgtcgaacttatgggaaagaattcgacggccctcgtcgaacttaaaaacccacgttcttaaccttaagttcgatggtacccacgttcttaatgttaagttcgacggtacccacgttcttaaccttaagaacatgggggccgttgaacttacttctttaagttcgtccaaaaatcgccgtcggctatattcgtcggtaaacccacgttcttatgtttcttgtagtgtttctttacctcagatgccatcaaggactcatgcgcatgacagtgcgggtactacccgtggtcgggaagatactcctaatccaccatatgtgccaccaacgctggccgaggctatcgctgccttggtcaacgcgactacgtataatacccgctttttacgtgagatggcgggtaatcaattccagcagcatggcagaagggctcctccacagggaccgcgtgaaacttcatatctggacttctctgaaatgcgtccccactctttgttaaagctgaagaccctcttgaagctgatgagtggatcagggtaa

SEQ ID NO: 24737 - DNA, 312 bp, Zea mays
  Peptide Sequence Number=SeqID_68112
atggggcccgccagtcagcggcacagagcgggggagagggtttcgacgtggcacgcagcactgacgtgtgggaccagggcccatgcgccagtgaccgtgcgagggaaaagagaggaggggggaagtgagcttgtcgggtgggccatagctgttggagttgtcttcaaccctgagccggcgcacggtcgaccatgcccgacggcgggagggctttctttggggcgcacgacctgcggctaccatggtggggtcaccgggcgacacgaccgcgacgaatggatgaagaaaggggaagaaaggatggggtattag

SEQ ID NO: 24738 - DNA, 507 bp, Zea mays
  Peptide Sequence Number=SeqID_68113
atggaggccggtcttcttcctcgggtagttgtgcttggaccgattctctcgcttgggagctcgccaaggtcgttcccttgctccctaggggccataaatgtgcagacctggtccatcccttcgccgcgtgccgcattcctcccatgccgctccttcctgaagccgtccaggaaatccaatgccttctctcgccttgtttcatctccgtcgcatacgcgcggacgtgaatgccgcgttggagaagatccacggcgcgggactgctcgtgccgcggaggggctcgggacaagccacaccatgactgggacctatggcgtcgatatggaagccaagcagaacagggagatcgagggcgctgtctgttcggagtactgtggaatgttcaccgggtggagcacttcgtcaccaacacggatcttccatctcgacgtcgtccggaatccaggatcgggcttggggatagcgcgctatcttgaggagcgttccacggcgagaaatttggagtag

SEQ ID NO: 24739 - DNA, 414 bp, Zea mays
  Peptide Sequence Number=SeqID_68114
atggcgcttcctgccgacgtggctggcctgtgccctaggttgggcgtcgtggaggctcctccgaagccggggtcgagcctgtcttccgtggccgaggccgagtccgagcccctgggtcgggcgaggcggagggcggagtccgagccctggggtcgggtgaagtggagttcgtcgtcttctggggctgagctcgagtccgagccctggatagggcagagcggagttcgccgtcttccgggacttagcccgagtccgagccctgggtcgggcggagcggagttcgccgtcttccgggacttagcccgagtccgagccctggggtcgggcggagcggagttcgccgtcttccgggacttagcccgagtccgagccctgggttgggcagagcggagttcgccgtcttccggggcttag

SEQ ID NO: 24740 - DNA, 342 bp, Zea mays
  Peptide Sequence Number=SeqID_68115
atggtgaacttggacaaagaaataggcttccactgcataacagtatcattgtaccttgttcaaattgcccttggtactaataaggtttgtttaagtgctaggaatcatttgaagtcgagccaagagaacccaaaagaatttggaacaaaaaggaagaaaattggctggtctgggcagcaccagacgatccggtgtctatatggccgaactcaccactctcaggccgtgctggctaaaattcatcggatggtccgcgtggagcgtcggacagtccggtgtgagaaaagccaatggctaccagccacgtccgccagtggtcagatggagcatcgtacagtctag

SEQ ID NO: 24741 - DNA, 528 bp, Zea mays
  Peptide Sequence Number=SeqID_68116
atggcctatcaccgtgttgacccttctctgttcctcccgcaaagtttcgtcacgggccacattcagcaccgggagataatgcgctgcaacaaccctaggcccacgctgacgcccacggctataaagcccaccccggtcttgaccgtacacccacgcgcgctcctaaccctgctcgagcacgagttcaccggccttccccggagctcagtgaagctctctgagccgcggattggacaccacctcaccggagacgccggatcgacgtcgccggacttcaaccggtcgttgtcgcatgtagaccgagccacatggctggagcacacgccgccgacgagcccgaccgcctgcgcgcgcggccagccctattccggtcatcaccgccggctatctgcccctcaacgtgaccgccaggacctcccggacctctcccgccgctggagaacagttccgacggggcatcgtttaaatgatttagttaaaggaaaccccaggggccccggtgcaaacatgttttccttaaacccttaa

SEQ ID NO: 24742 - DNA, 447 bp, Zea mays
  Peptide Sequence Number=SeqID_68117
atggcaaacctgcactacggacgattagctgctagaaagccgacaccctacttgaagggggacatgtcagacctagtgtggcagcacagagagaaggttgtcaaaggttttaagtgctatggaccaaggcaacaaaggatagatactagtccctggactaataagggaaggaactcgaaagagattcttggtaaggcttgggcaaatgcttgtcatgtcgttggtatcccatgtcgaaaggtcgataacccatattttagggccgcaattatggagtcccaaaaacaagatataatctcattacctcaaatgaaggtgtgggggtcacattaccaactgttcgagagattgattgcaagtatcttgatgaaaatgttaaggagtttcatcaagagacttataaatggaagagagatcaaggaggtcttgaagattattgaaccatag

SEQ ID NO: 24743 - DNA, 189 bp, Zea mays
  Peptide Sequence Number=SeqID_68118
atgactacttttgcaaaactctcatgcaagggcgacgaaggcctcgagcgaagggtggcgtcttcgccttcgccccaacaagcagcacgtgcttcaaatcaggaagtcgccttagagaccggcacacccaacgctagagttttgattcctgctggtgatgttgagttgatccccaatgatgctctttag

SEQ ID NO: 24744 - DNA, 579 bp, Zea mays
  Peptide Sequence Number=SeqID_68119
atgaagaagcgtaacatcaatggcagtccttcaaaattgatgaagaagatggtgacaaagcggatgaaagcagtggaatccccgacaagcggacggccggaccggggagcaaaccatcctgaaaaggctgggcgcgctgttgggccacaacaagacgcgccatgcgcccgctctctcgccgcaacccgcgagccggcggcagcagatgctggcagtggcaggccaacgtgtacaacgcgcgccccgggccccgctcgacgaactacgccagcagcaggccgcagcggatccccgaccgcagatcccgtcggatcagggaacctcaaccgggtgacgcgcggcgagcagcagcggggccgcgccaccggatcacgtgcgctggtacagcggcagcacgcctgcgctgcgctagtctgcgtctgcgtctgcgtctgcgtctgcgtctgcgaagcgaattcgacaggggaaggcgggagcggagggagcgcgcgtgatccgggcgacctgaccgcgcagatcttcctgcgtcggtcgacgacgccgacgcggcgcgcacaccgcgcaggcagacagacgtga

SEQ ID NO: 24745 - DNA, 186 bp, Zea mays
  Peptide Sequence Number=SeqID_68120
atgcaatgcccgaagaaagcagctcaacagcagtcagtttccaacacccgagcaagacaaggtgcaccacagcaggcatcaggagatcatggccaggcctacaaccgtggaaaggtgaaccacttggaggccgaagcaaaccaggacgcaccagatgtggacgtagtgtgttcatggactatctag

SEQ ID NO: 24746 - DNA, 1506 bp, Zea mays
  Peptide Sequence Number=SeqID_68121
atggacaaggatcgccaagcggcggcgcggaaacgccaggcgaccgtgagggttcatgaagcccggccgaaaaggcagcggggagcatcgaaggctgaggcctccggcggaggcaagccgccattgccagcgaaggcgggtgcctccgcgcctggcaaggcgccggaggcgacggtgggcgccggaggccccaagctgtcgaaggtggtgccgtccgccagcggagtggcggaggctgcgaaggcggcccgatcgctaccgccgcccggcaaacgcgttgccgacttcggcactgaaattgatgtggaggattatcttggggggttggacgagggctcgctcgctctagttgtgcctggcgcggcggtcgcgacggctgcgccagcgccgaaggcgggggtagagacccttggcgctggaggcgaggtgactgccctcgcgctggtcagagacgaggcggacgcggcgacccgccggctgaaaggagcaatggaggcgctgagtcaggtggctgacttcaccagccgtactgcgtcgggggcccttacggcgacgttgtctgccgaggtcgagagacttcggacgcaacacgcggacgctgtccgtgagaagtcggcctccgacagcaagtgccgcaagctggcggagaaggtggccgcccttgagaaggagaaggcagacctccggcgccagctgatggaggagagaagggaggccaacgaagccatcgccaaggagcagtctgcgcaggcggaggccaggctggcgcgggcggagggcaatgtcgccaaggagctcgccggggagctgcagcggcggcttgctgccttcgagagccgcgcggagggggccgaggccgcggcgcgagcggaggccgaacggacgcgcacgcagctcatgacttcatatcgcgagctgggtgtgcggacgagcgacttcgaggtgccggagcgagaggccggacttcgctgtctggagtgggtgcaggaggaactgcaggagctccccactgtcttggcggggttgatgtcgttcacctccctggtcacctgcgaggcagcgatgaacgtgctctctcgcgaaggctgccggcactttgaggccatcgaccaggtggatgaagattttgggcgagatatctttgaggtcgaagaccccgtggtgaaggagtccggcggggccctctttgaccggatgtggggttcgtacggtcgagaggcggagcgcggcgagcgggtggacgattttggggcgctgaacagcgcgccgcccgagccggagaccacccctgcggaggccgccactggagtcgccccggtgaccgcggaagatgcaccaggcgcccttgtacctgctgcggccggcgaaggcctactcccaagggtggtcgaaggcgcgtctgatgcccccgcagctgctgtgccgggcgccgaagatccagcggagacaacggcggaggcggcggcggcggctcccgcagcggcagggccttcgcaggtggcgtag

SEQ ID NO: 24747 - DNA, 189 bp, Zea mays
  Peptide Sequence Number=SeqID_68122
atgaccaacaacaacgcgaggttgaagggcttgattgtaagaggcgaggtgacgaggaatcagaagcccacttttgggtcaacacttggacaacaggttatcgcaagtataaggcaagttgtccttgatcactcttctttacctaataatgttcctgttattcactgtgatatgctcaggttaacttga

SEQ ID NO: 24748 - DNA, 228 bp, Zea mays
  Peptide Sequence Number=SeqID_68123
atgggccggatcacacgcgggcctccattctggacgaggtcgcaagatgagacgatctcgtcacaggtcttcgtccggcggcgtatgagacaaaggcgagtacggcgaaggcctcgagcgaagggtggcgtcttcgccttcgccccaacagcgtgtaccctccgtggcaagaggttggacggtggtgtatctgtgctcttggttggcgtgaacccggtctggtcttga

SEQ ID NO: 24749 - DNA, 1953 bp, Zea mays
  Peptide Sequence Number=SeqID_68124
atggcgactgcggtgggcgcggccatgctgctctacttcgtgctgagccggcggctggcgggcgaggacgtctcagcccgcggcggtggagggggaggagtcgggtctggaaagcggcggagggggcgcgcgctgcggcggccggtgcagccgccggcgacgtggatcgaggcggtgggcacgctcgcggaaacgctgcgtttcacctactcggagacgctcggcaagtggcccatcggggacctcgccttcggaatcaagtacctcatgcgccgacagatacttcggttgagagaattataccttttcaatcttcaagttgtgcttgttggcaatttacatgttgccagtgtatatgctggaagtgattgcattgaattgaaaggacctcaaatcatggaagagctgattgttctacggcggttgattgacctgtgctttcttttctctaagaagccatttccagtgtttcgggaattagctggattttcacaggaggatgttcttattgaggaaccaaaggcggggattttgaagcctgcccatacaattatacgtgatgagtgcaccaaatccttccttgttttgatccgagggactcatagcatgaaagatactctgactgctgctactggggctgtagtgccatttcacctctcacttttggatgaaggcgatgtgagcaaattagtgttaggttatgcacactgtgggatggttgcagcagcccgctggattgcaagaggtgtaacaccatgcctccgtgaagcagtcagacaatgcccagagtaccaaatcaagattgttggccattcattgggtggtggtactgctgcattgctaacctacatccttagagaacacaaagagttttcttcaacaacttgtgttgcatttgcacctgcttcttgcatgacatgggaattagcagaatcaggcaagcattttgtgacaacggttgtcaatggagctgatctggttcccactgtatcaactgcatctattgatgatctccgttctgaggtaacagcttcatcatggttaaatgatctgagggatcaaatacaacagacacgcttcctaaatgtcgtttaccggtcagccactgctttaggaactcgcctgcagtctttttctggtgcgagagagagggttgcaggtgctggagcatttctacgtcctgtttcaaacaaaacccaggttgtgatgaaacaagcacagaatgtcgcacaggctgttgctagaagtcggtctgcattttcctcatggtcatgcatgggtgcacgtcgtcgaggtgtaggtgtagttactgcatgttctaaagatgatatgagagtggaaacccatgtaacatcaacagttgagtcaaagtctgtccttgtagaacattgtggcgccaagaccatagaagaactgcagtatactgcagctagtgtttctgttcatgatgcagcagaggaagaagaggctcttttgagtgaacatgaaacctccagggagaatgccgaagaagaaacaacagagggtgagttgtggtatgagtttgagaaggacttggatcgacaagctgaaatggaggcacgaacaagggaggaagaggcagctgcagccaaagaaataatggaagaggaaagtgctgtgctaaaaggtgtagatgacaggcagtccttcacaccagatagcttggagaggcagcaattctacccccctggtagaatcatgcacatggttgcaatgcctcccacagacgctgacccagatgatccggttgctgctgacgagtgctgtgttggaatatatgagacccctagagatctttacagcaagattcgactctcaaataccatgatcaatgaccactacatgccaatgtataagaaaatgatggaaacattgattgagaagttcgcgagggatgaggactgctattgtacaggttctactgcagaataa

SEQ ID NO: 24750 - DNA, 174 bp, Zea mays
  Peptide Sequence Number=SeqID_68125
atggagagtcatgatctccgggcagaatgggaatcacggcttgtgggtggttatgagattgatggttctggttatggctatggtgctggttgtcagcattgcaaccactgctcaggcgaagatgaagctgtggaaggagacttccaggagttccaagattacgacgagttctag

SEQ ID NO: 24751 - DNA, 651 bp, Zea mays
  Peptide Sequence Number=SeqID_68126
atgggaaatagaaaattgtttttctcagatatctccaccgtctccctggagatttttattctccacgcgtctgcacttccttgcgatcgtctccacgtctggtgcatggatccctcgccatcagccttatccaaatatccaggacgctacctcctcacagctctacgctcggcctccttcgtgtccgtgagctctcacttgcgtctccttcctagccatctcactggtcgcgcgcgcgagctcctctgcagccgctcgacgcccatgcttccgcccagctcgccggccatcaccttcctggccgcgcgcgctttctccctgcgcaggacgccgctgaccttgctccagcccagacgtcgtcatctccgacctccgaccctaatacctacagcacccagctcgtcccctccccagccgcatctcctaacgctcggccttcctctgcgtgagcgcgcagaactgtgcctgtcgtatgctcgtctctgccgagcaccgtctgccccagcgtcaccggcctccctgtgccggcgtcgtgttctggtggccgagcatcgtcaccagcgctccttccttaacttcggcagcgcatgctcttctccaagccgacgctccggcagtggcgtgctcggcagactcgcgccctcccggtag

SEQ ID NO: 24752 - DNA, 207 bp, Zea mays
  Peptide Sequence Number=SeqID_68127
atggcgccatgcatgggaagacgacgggtccatggcgccatgcataggaagacggcgagcgcgtgcgacgctgcctggtcaagccgccatatgagacttccgatcccattttcacgccacgaacgcgcggaaggcaggtggttctgtgtccgggcggcgcgcagcaaacacgttgaacccgtcaccgggatggtacacgcgacgtga

SEQ ID NO: 24753 - DNA, 429 bp, Zea mays
  Peptide Sequence Number=SeqID_68128
atggacccgtcgtcttcccatgcatggcgccatggaccccttccatgcatgggatctgtccattcgagggactcgatcacgcctcgcccaagcccagcctcgggccaagggcagccgaccccggaggatagccgaagtgaccgcagtcacttcgccgctccactgaccggcctgacagaaggacagtgccgcctgcgccgctccgactgctgtgccactcgacagagtgaggctgacaggcagccaggcccggcctcaggcaccataggaaactccgcttcgcccgacccagggctcagactcgggctcagccctggaagacggcgaactccgcttcgcccgacccagggctcggactcgggctcagccccggaagacggcgaactccgcaccgcccgacccagggatcggactcgggctcagccccgt

SEQ ID NO: 24754 - DNA, 111 bp, Zea mays
  Peptide Sequence Number=SeqID_68129
atgttgctgctggatcagatctgcatcaactctccgtccatccggcaggtctctggcctagccgaactctcctacgcgagaggcttcaattcccctctacccaatcgaccg

SEQ ID NO: 24755 - DNA, 423 bp, Zea mays
  Peptide Sequence Number=SeqID_68130
atggcgagcgccggcaacagcggcggtggggacgacgacgatgcgggagagaactcagagaagcttctagcggatcgctaccatgaggcccctaagccttgccgtcaacgcacttgcgccgctgcaagcgtcccacggtggtggtcgttccccgttgcgcgcgcggtccgccttgccggctcttcaacatcctctagcatcgcatccacgatggcgagctacttcggcgtctacgaatccaacgtctgctcccggttccgcctccagccgccgccaagcaatctgtattcaccaatgttatatggcaaactggatgttgggtctatgcttcggcgccgaaggtcttcaagggagaagcggcttaaaatgtgtgagcaggtatcttcggactcgtatcagaaagggaaaagctacaaaggttga

SEQ ID NO: 24756 - DNA, 327 bp, Zea mays
  Peptide Sequence Number=SeqID_68131
atgagtaaagatcatggaatgcacatgtgcttattcggtgaacttcaagtcctttggcgtaaggagaggatccagcctgagtcagcttggggtagggtaatgatggcgcctcctgttgacgtggtcggtccgtgccctaggttgggcaatgtggaggctcctccgaggtcgaggtcgagtctgtcttccgaggccgaggtcgagtccgagcccctgggtcgggcgaggcggagaccgtcggctgaggctagggctgagtccgagccctggggttgggcgaaacggagttcgtcgtcttccggggctgagcccgagtctgagccctag

SEQ ID NO: 24757 - DNA, 579 bp, Zea mays
  Peptide Sequence Number=SeqID_68132
atggccggtcgtcccccattccccacctcctctgtcgcaactccctacttcatcgactcatttccccctctccctctctcctaccgggcggccctcaccgcaccccgttccgcgcgcgcccctgcccctatccttgtcgccgctgtcgcgccggcccctcctccggtcgcgccccagccggatccggccgagccgacctctccccccgcgtcggcaccgacctcatccacctccttgtcggcccctaccctggcggctgcggccctctacccaggcttcccttccagcgccctctccctgcccgacgcggccctctttcgctctcagttgctggcaccgggtttttcccatgtcccgctcgagatgcctgttggggccctcgtgcgtgaccgtccgccaccgctgactgtctacagccagccctcggccatcacatcatccctgtgtgctccttcggatgacgccgccgccctcctcgtcgccactcgagccgtcgttacggcggctcgccaacgtgctcatgcagtgacagcgtgcacatttttactgtgggtaaaatgtgctcattgccatccctaa

SEQ ID NO: 24758 - DNA, 678 bp, Zea mays
  Peptide Sequence Number=SeqID_68133
atggcgacccggccacgcgacgcgacggccgaaccagccaggcttcgtgccactgccagggacggaccagcaggagcagtgggcgctgggcggggggcgcacgaacgcgacgagccgaactgcccgtctccgtggcgacgtctgatcggcgtggcgtctccgcggtgggggacgcagccgccgcgccgccccgccctgccgcgcgcggaaggcacgcgcggcgtggggtactggggttgctgcatctggcgggcgccgcaccgcgcgcggtctccgtgcggctcctgcgcctgcggtgccatcgtccgaccctcctcgtcgtgcgcccgcccgtgcgcgatgccccgccgaacggggctttcccgtgagccaaatggctggttgaattcgcgcagcagagcagcaaccacggtgcgcctcgtaccgtactgtgtactaggtgtctgcctggcccagctgtttgttgctcgtggtcgtggcccggccggccgcggccatcgatgcgtgtcgtggcgtcgcaggagtcggcaaatggcgcggctcgtctccgtgcgtgccaggtgctcgggcgtccgcgtcaaccggtgcacgccgctccgttggttgccagcttgccactcggccactccggtagacaacatggtaattaaggatgtccccggcacgccactccggtag

SEQ ID NO: 24759 - DNA, 249 bp, Zea mays
  Peptide Sequence Number=SeqID_68134
atggcgcaccggacagtccagtgcgccaccggtgcgccaacggtgcgccaccggtgcgccaacggatacttccaacggctagttctgacagagagccgttggactcatggcgcaccggacagtgaacagtccactgtccggtgcacaccggacagtccggggagaatccctgccgtggaccagcctggcccacctggcagagggtgcaccggacagtccggtgcacaccggacagtccggtgcccctaa

SEQ ID NO: 24760 - DNA, 141 bp, Zea mays
  Peptide Sequence Number=SeqID_68135
atggccatgatgggttcaacatcggaaaagatgtacctctgtcaggtgaggaagcaacaaacttttgttgcttttgtaccaaggtggtgtcaaatgaagaaaagcaagaatgaagctgcaggaggacctagtcctccataa

SEQ ID NO: 24761 - DNA, 978 bp, Zea mays
  Peptide Sequence Number=SeqID_68136
atggctcggccaagcacgaagcccgccgcccctgacaccggtatgcctccatctgtcgtgcttgtcgcggggcaaaggcccccctcgccactgtgcgctgctgaggcagcggtggcgggggtcagggtctccatggagctttccgtggatgactatctgactaggctggctcctgttggtgagttttttaaaggtctgcgtttctcacttgaccatggtgtaggggcggagactgggcaactggctgttgttccggtggcggagtcagctggcttggtggccgcggcgaccatggtgaagggtgacatgggggccccggaggacccatggtttatgttttgtgctagtggcaagattgcctcggctgccactgcaaaggacatggctacatcagttgcgcagcaactgaaatatggggcgctgacctcagagttttctgccgagaagcggcgacttgagggaagaatcgagcgcctccggacgcagcatacggaggctgtcagggacaagtcggcagcggagaacaagagtcgctacttgcttgagaagctgacggcggcaaagatagagaaggaagacctcagccgtgggcttgcggaggagaggaagggcacagagaaggcccgcatggaggcccatgctgcccgggctgaggcctaccttgccctcaagcgcgtcgccgatgcggagtcaaggctgaaaagcttgcgcagctacgccgagaagacggaggcctccacccgcgttgggttgagcgggcgcacacgctgttcatggatgcgtaccgcgagctcgacgtgtggacctccccttttaacaggaggagctggagtcgcttctgtctaccgcgacgggcctcatgtcctatgctttgttgttacctgcgagggggcgatgaatgccttgtcccgtgaggggtgtaggcattttgaagtcttcgaccgagcaaccaaggactttgaccgtggaatcttctag

SEQ ID NO: 24762 - DNA, 393 bp, Zea mays
  Peptide Sequence Number=SeqID_68137
atggagcttgggcggttcggcttcggacgcgggcggaacatcgtgtcgggcacggcttcggtcggggtcatcgcgggttggggcgcgagccacggcgtagggcgagcgcggcaaggcctgcaggcgtgcgtgggctcgcgcggcagggagcgcggcttgctccctggcgctcgacgtgcagcagggccggagtggcgtgctcgggcggtccacggctgggagagccagagggaggagatgagcgtggagagagaacgaccaggtgggacccgcctgcaagatacagaagaggaagggggagtggaggatggcggcggctgtgcaggagtaggagcgagcgcggcggctgggaacagcaggggcgcgctagggtttttctttaaaaagaattga

SEQ ID NO: 24763 - DNA, 480 bp, Zea mays
  Peptide Sequence Number=SeqID_68138
atggacgagagggagctcgggtatcagtcccctgagcaggtcttgaaggaccttctcattggagactccgacttcggcgacaacgaccgtctcaagaagctgtaccaaatgtacgacgggagttgggatatcgcctctcagagggacattaagtcccttcgcctggaggttctctcatcgaccctagggaccccaaatttggtgccccatcaaaggctgggcccctgtataggttcatggccattgcccactacgggtacttgggtcttgaagatgctgtcccccgctagttttctcatagtgcgatgcgaccagaccgatgtgcttgtagccatcgaaaatctacatgctctgatgatagaagtcacaggcccagatggcaagggacaggacccctcgaccgcgcgtaccaaggcacgtaccaaggtgcccaaggtgcagccatccagggcgaacgatgtcctcgtgaagaccatctag

SEQ ID NO: 24764 - DNA, 399 bp, Zea mays
  Peptide Sequence Number=SeqID_68139
atgaccagacgcggggccctattacatgggcctctcccagctccgagggggacatggccttatgatcttcgtggggtcttcgtcttggcttgcaggagcgaagggggccaaacagtcctcctggtcgacgacgtccttggcctatccggtggctcatgcgtagcggccttcgtccgagcagacgcctgcgggagcagccttcatccgtgcggacgaaaggctggtgtagttgatgcacattcgaagcttctcgttctccttagggatgatgaccaggttggacaaccacacggggtggtggacctccttgataaagctagcatgcaacagcttatggacctcttcacggatgatgttctgccgctcgatggacaactttcgaggcttctaacacactag

SEQ ID NO: 24765 - DNA, 234 bp, Zea mays
  Peptide Sequence Number=SeqID_68140
atgaaggggctactgttgggggcctgcttcgtcactgaaggtcctttaagaagaatcaccttcgaaagatcagcgtataatcaaacacagcgcgaagcatttgagaacaagtccccaacaccacacatcaaggcatgccagccacaactacatgcacccaagcgaacaaacgtgcttgttagtgctccacttgcgtacagtcaacagatgaccatgcgcctaacctgggaataa

SEQ ID NO: 24766 - DNA, 948 bp, Zea mays
  Peptide Sequence Number=SeqID_68141
atgccgtcgtctgaggcgaccttgagcaacttggcggtggttgagtttcagcccgaccacaccgtggagtttgggacctcatggattttctcgggccacatgctggagatgcaacagcttggttactttagtaacggtgtcacacgggccctaggtgcagaagaggtctccgagcctaagggcgagttgatagtttttgaggcatttttcactgccggtcttcgcctcctgacgcatcaattcgtagtggagaagaggaagataggggataaaatagccaaatttggatcgtgcaccttcacactgaggactgggaagacttcgtctgaggttgtggagatagtcccgtgtgctaggaacaagtggggcaactggtgggacttttggttttatgtggcttcgggggacgtcgaaggcttgtcgagtctgcctcctgccatcctgtcctcacattgttatgtggcgtttcctcgattcgaggtggcggatgaagacaaagacaaaggggccctccgatatgctgcccgccttagcagcgggcatgatctggtggaggagtttattgcctatggggtgtggcccttggcacatggttggccattgggcgaagtgagccactgccggatgcctaccttgggcggccagatggtgcgaagtccgaccttcgccgtggatcttcgcgattgcgatgcggccacgtttgtgcgtgaggtcgaggctgaggccgtgaaaattgttgggaagtatgtgccaaagacagagactttaagaagttgggacattcgcggttcaaacgttaggttgaatcgtgtttttgagttaaaccatttgtcgtatggtggttacccggggggactgtgcctatgttgctggctgccgagggaaacaagcaatgtcaacagccaaagaaggcccctcacaggacaaggttccgagtgcagccggtag

SEQ ID NO: 24767 - DNA, 72 bp, Zea mays
  Peptide Sequence Number=SeqID_68142
atggcggctgcgctggcggtgagcgtgccaggcgcgcacggcgagcagcgcgtcgagtgcaaaaacaactaa

SEQ ID NO: 24768 - DNA, 408 bp, Zea mays
  Peptide Sequence Number=SeqID_68143
atggcacccaaaagagctaactcgcaggcagccccatccgtcgacgaagcagcgacggcagccctgctagctgagaaaaagggcaaggccctcgctgacaacacccaccaaggagctagtgaagacgaagcacacagtaagagacaacgcaacgatcaacacactccggaaggcacccttcgcacctgcagctccgaagggcagccacaagtgccacccccaggcttcgcaccaccagagggcgagcacgcagcagaggacggcgaggtcctcggcgtctccgcagaagaacagctacaactatgggccctgtgcctcagaaactgcaaccttcagaagcagaaggaaatcctcgaggccaagcgccaacgcgtctctatgcaggccaagctgcgccaaatgatatga

SEQ ID NO: 24769 - DNA, 378 bp, Zea mays
  Peptide Sequence Number=SeqID_68144
atgggcgctcttgggatgtggcaccagactatccggtatgcaccagacagtctggcaatggtcggatccaacggtcggctgacgtggcttaggcactggactgtccggtgtgtatcggacagtctgggtatcagtcggatccaaagattgactgctatagaccccaacggtcggctgatgtggcaggcaccagatactgtctgcgtagttgtgatcatgcttgtccttgttattgctagagttggccttgccctcgaacttggggtagctagtaatgaagtgatagtggcaccaacacccaaaacacccatccttgtccacatgctgtcagttcttgtggttgttgtaaaaccattggaaatttttgatgatcaatga

SEQ ID NO: 24770 - DNA, 528 bp, Zea mays
  Peptide Sequence Number=SeqID_68145
atgccccctgcaccaccacagggcatcctggctgctggaggagaccctgacggagatgacaatgatgacaacgctggtggcagttcgagccacatcacggagctctcggaggagcaggagcctgaaggatggatcactagacccatcactcgcgccgcagctcatgggtgtcacttccacgatgctctcgacaccttgctgtgtcgggccttcgaccgacacacttggtccattgagtaccgttgtgtagtctaccagcatcatctcggcggggtagctgacggcctcaacctaaaatgctaccctcactgtttgaccgacagtgctggaggtgtgattgtcccacccgttggtgagggcaatcctaggctgaacaacacggtcaacctagtcgccgtgctcaacaccgagctggaccacgcccttgacgagttgggcaaggttcgggtggaggttgtggaattgcgtattgagtgcgcagcgcaccactatctggatggtggttctcccgcccctgtcgggatttag

SEQ ID NO: 24771 - DNA, 761 bp, Zea mays
  Peptide Sequence Number=SeqID_68146
atggggtggttcggagcctgtgtggccggaacgaactacgctgctccagcaggagttgcgctagaagctagctccgggcaacttcaccagtggcggtggccacctctaaatcaatggatcgccggcggcagcgaccacctctgcaccagcagcgacaacgacctcggctccgtgcggcttgctagcgacagtggccacctcagggcaggagaaggggtggatgtgccagacccacacacggcgcaaccgtcgcccgtgcggtggatggacatccacgccccggccagagcggcaggaggcagcgtcagaggcggcgccgaagccgtccagcccaaagggccggacacgctgcagctgatggcttgcagccggctggccctgtgtagccagggtttgtctcctctgcaaggctgcgactcgaggcaccccgcgcacgacccatcagtggcgaaggtcacgggcaggtcaaccgtgggaacgggcatgacaatcggcatggccataggcgcgccggcagtaattgcgccagcaggcccgcaagagcagcaagcagatcgccaatcaggctctggccccacctgcaggctcgcctcctcccctaagtcgggcccgggagccactgtcagtaccctcaatcaggggtaccttcttctactgcataaaggcgccgcacccatgcaacgcctcaagaccacgtggagaatggcgcccaatgggcaggtccaggagcgccgcgtggcaaggaaagggagtacatcccg

SEQ ID NO: 24772 - DNA, 1689 bp, Zea mays
  Peptide Sequence Number=SeqID_68147
atgccgactgctaagccggccgcgcccggatccagcaaggtgtcggcgagtgcgaagaccgccgcctctggcggaaccaagcctcccccgggcggatccgcgaagggacgggagctgccttcgccggggaggcgtgttggtgactttggcacggacatcagtgttaaggattattttgttgggtcaggtgaagagcagttggttgttgtcccgccttcggcggcaacggcgctgccagcattggtggctagggggaagggtgccgcgcaagacccgtgggctgctttctgcacgagcggcgagattccgtcagccgttgccgctaaggacgtggcgggctccatgtcccggtggctgagggaggcgtcgcaggagttgaagcatgcggccgacttcgccgaccgcgtggcgtcggagagcaagaaccgtaggctagcggagaaagtggctgccttggaggccgagaagacggacctctggcgccagctggcggaggagaggagggaggcgaaccaggccatcgccaaggcgcaggcagcgcaagcggaggccaaggtggcgcgggcagagagcagtctcgccggtcagcgcgccgaagagctagaggtgaggttcaacaccttgcgtggccgcgtgggcaaggccgaggcctctacgcgctcggaagttgagcggacgcacgcacagttcgtgggaacgtaccgcgagctgggtgcacggaccgctgacttcgaagtgcccgaccgggaagctggccttcgcttcctcgaatggatgcaggaggagctgctggtgctcccgaccattgtggagggtttcatgtccttcgcctcccttgtcacctgcgagggggccatgaatgcgttgtcccgcgagggctgcaggcactacgaggtcttcgaccaatcagacgagaactttgaatgcgagattttcaaggtcgacgaccctgtggtgaagcagtcaggggggcacttttcgataggatgtgggatggagcgtgctgaggacgtcgaggacttcggagctctggccagcgcgccgcccgaggctgcgaaggtcaaaccagtgctgccctcggaagaaggtggaggcccctcggcggtgcccgagcctgccgtggttgaggaagaccctgcgtcggcccctgcgccgtcggtcgaaggtgccttggagatggtggctgagccggcagtcgaagaccccatggccgcggtcgcgtcttcgcaggttcagggttttgggcctgtgcacgcaaccgctactgacaatactaattttgtggcttcgaccggggttgctggagacaattctgatgattctgtgtcaaagttttttggatctgatgattttgggagttcgattgtgtggatagaggggtcttcggatgaggactcagactattttgcagcattggatgtggctgcagtggagacttcgctgcgtgtgatgggtgaggatatccttgtgcgaatgctggacgtaggcgtcgaagggcggtggcgaagcgaagggaatgctccaggtcttcaccagattgcgttgttagcttacgagtacgaggtctccttcgttgaattcccttgggacgactgcgtggtcgcgccaggtcttcgtttgggcttgatatttgttgagggcctgcagggcgaagacgcggtctgcatcgatgagatctttggaggttag

SEQ ID NO: 24773 - DNA, 801 bp, Zea mays
  Peptide Sequence Number=SeqID_68148
atggccataggcgggccggcagtaattgcgccagcaggcccgcaagagcagcaggcagatcgccaatcaggctctggccccacctgcaggctcgcctcctcccttgaggcgggcccgggggccactgtcagtaccctcaatcaggggtaccttctgctactgcataaaggcgccgcacccgtgcaatgcctcaagaccacgtggagaatggtgcccaatgggcaggtccaggagcgccgcgtggcaaggaaagggtgtacatgccggtgttcgtcactaggaccggaccccgcaggaagacaccggacccctatatatactagtccgggaccccaagaagtgcggatcatcgagcaccacgccgaaacttcggaggattttgcgatggagcaagaagttgcatcctctgcgccacaagtacccgaccgccctgacactgggactgatgttgtacacgccgtgcagcaacacatgcctgcacaagcgtcccaaaccccgtcaagggcagcgcctacggcgttgtcggtagccagggagttgctgcgccaccccccaagctccgcggcctcgccaggggccatgaaacagtggcatgacgacgtcgaccggctactcggcatggcgcattccacttcgaccaggtctaggcctcggtcatcccgacgccagcgcgaggcaacagcgtctgtactctcgcccttcgtaaggggagcacagaccgacaacctccgggaagagctcaactataggcgtacgggagaggacgcccggatctctttggaaagggcgcgggagtgctga

SEQ ID NO: 24774 - DNA, 237 bp, Zea mays
  Peptide Sequence Number=SeqID_68149
atggtatctttgggcttagatcagaaccagcgtgaagaagcacaaggaatacaaaggttggcgcagagccgaagctatatgcaggggagaagcttcggcatgatagcagaagaggaaaccgacttaaaaaggaaaaggctattcagacctcgatgggttattgtagaaccattagcaaatgtaaaggacatgggtgtaattttacatgggctgcgtgtcgtgcctataaatagatga

SEQ ID NO: 24775 - DNA, 513 bp, Zea mays
  Peptide Sequence Number=SeqID_68150
atggcgtggccggctgcttgcagacgccctcgcacggacgcctggcgcagcccgtccgcggctgcacggtgcggtcagctcggcagcccgctcgcggctgcccgtgcgccctgccttcggcgtgcccggctcggcctgcgtgcgcagtttcctcgcgcccgcggcgtgctcgctgctcgcagcgcggcgcggtcccctgcccccggcatgcccctgctagcttgcgcgcagcacagccccacccctcgcgcggcgtggcatgcccgcccgctgccccggcacggctcgcagtgcgcagcgtggctgctcgtggcgaccctgcacgagaacgatctggttgaggaacccgagaaactcgcaggagaagcccctgagcagcagtcggtggcaacgaggttgatggttcttggtattgattctggtaatggttgtccgcattgcaactgctgctcaggagaagatgaagccgtggaaggagacttccaggagttccaagattacgacgagttctag

SEQ ID NO: 24776 - DNA, 1095 bp, Zea mays
  Peptide Sequence Number=SeqID_68151
atgtggacagccggcccgtctccgcgcctcgtgttggcggcggcggggagtggcggtggcggtgaggtcgccgccgccgctaacgaggaggaggaggagtgcgacgtgttcgacagggagtgggtctgggccggcgccggcggcgggtacccgctctaccactccagcgactgcccgttcctcgacgtcggcttccgttgcgccgagaacggccgacccgacgcgtcctacaccaagtggcgctggcagccgttgcgctgccatctcccccggttcgtttcctcgcttcaattctcccctgctaccttcctctcactctctcgcgcacggcgacaactgagccaccgccgacggtgccctatgtcagttgcccaggtcctcggcgtccccttctccaactcttcgtcggaccctttgccggcgatgagcacccaccaggggtttcatggtagcgtgacctgtgtcagcttaaaaatgtatataaagaaggcaagatgttctgccttgggtacaatttggtggtattttttcataattcagaaaaccatgaccttgaaacagttacggttaagtccgtgtaactcttctttggtgcaaatggatctggcaaatcaaatttctttcatggaaggtgctggacactcggttgtatctgcttttgttgagatagtgtttgacaattcagacaaccgtattctagagcaaatggttgcagagaaggaaagagagctagaagaaggagaagcacaaaagtcaccctctaagattgttgctgatagtctcagccagatcagccgctcatccaccttccttccaaacattggtgtccctacaatgtccaagactggtcggtccacatcgctagctgcacaagcacgcatgcaagctcagtttgaggaaaaactccaagctgaaagagacgaagctactaggaagcaggaagagttgcaaacacaactacaagctcaacaggccgcacttgaagaaaaccaaagtttgttgcgccagacccaagaggaagtgaaggggatgcataccaagtttgaagagaccaatgcactgctacgagctatcctgaaacttcagaaagattga

SEQ ID NO: 24777 - DNA, 372 bp, Zea mays
  Peptide Sequence Number=SeqID_68152
atgccgcgatggagaccccgccagcccacagccctcccgtgcgcggccaccagcgcggtggccgagcagcggagcgaggcggcgaggaggagcagcagcagcgccgcggcggcggccagccacgccagttgggcggtgtacgggatggacggatccgttcaccagtggcggtgcggcggcgtggtgggcgcgagtggcggcgctaggttaaggggagggagaggactggacttgtctgcggtggtgggcagccgagaggataagactattatatgcgagactatctgcaagatcctccttcgtcatggcacaaaggccagcttcaagcttcggaaaccccatacttccggccatatcccggcagacagataa

SEQ ID NO: 24778 - DNA, 264 bp, Zea mays
  Peptide Sequence Number=SeqID_68153
atggatggaaaggagaaggcttcaaagggtaggttcaaggtaagcaggaaggcaaggggcatagatatcacgaagggttttaaaaggttgagggtgatagcaaatagaaatacaacaagggatggaattaacacaaaacttataaggcaacaagaagtgaaaagaaatcaaaggagagagttaagacaagactcggaaagtaacgaagtggagaaaataatcaagcgcaagataggtgaggttgcaatagaatggttgaagtaa

SEQ ID NO: 24779 - DNA, 884 bp, Zea mays
  Peptide Sequence Number=SeqID_68154
ctgcagctgagcttttcagctgggctgaacttcagctgaactcaacttcagctgtgaacctctttgaccatacaccagctgaacttgcctctgggcagttgagctgggtctgccagtcagactggcaaacaggtcgccaggagctgtcaggggcggttcaaccgccccccctgggcggttcaactgatgttgatcctagggcaatagatcttgccatgagaatcgccgaaaggatgttcctcaaaatgaaggaagatgaggcaaagaacattattgaagaagaagaaaatgatcgatggagaccaaacgatgaatccacctcttcacaaggttcgtctttcaaaaccacttctcatatgtgctttgttgctaatgagagtgacagtgaaagcgaaagtgaggatgaggaggagcacgaaagtgatagtgaagatgaggatgatcttcaaaaattcttcgctcaactaagtaagaagaaccggatgagcttgctcaaacttatgaaaagagcggaagaacaaaaggaaatgcttcataagcaagaagatatcctcatcgaaaaaatcaaagacttggagaagttgaccaaagagcatgagaagctaaagtgctctcatgatgatttggtccaaagctgggctgaacttcagctgaactcaacttcagctgtgaacctctttgaccatacaccagctgaacttgcctctgggcagttgagctgggtctgccagtcagactggcaaacaggtcgccaggagctgtcaggggcggttcaactggttttggtcaactttgaccagtctgcggtcagtctgcgcgtcagtctgccagtcagactggcaaacaggctgccaggcctgccaggggaggctcaaccgccctag

SEQ ID NO: 24780 - DNA, 462 bp, Zea mays
  Peptide Sequence Number=SeqID_68155
atgtcgatggccgagcgagtagcccccgcctctggcgtctacctcccctcatcagcgctgcagcaccacctgaagccgcacgcctgtgttggtgccctaccgcatgttgttgttggccaagccatcgttgagcacccatgcgctgtggcctggctcccagccgttgtgccccagctgcggcccgccttgcgatgccatcttccctacgcggcagcggtgcggagccgagtggccgtgctccggccatggccagccctctgcgatcgtgccctagccatggcgcagcccgcgtggccgccccctcgcccagccagccagctgcggtggcacgaccatggcccctacgccccttctctagcgagtccgcttagaccagcgaggctatcttccccatccgagccccctgccatggtcgatccccccttctcccattacggctgcaccatggaagaagaaaactag

SEQ ID NO: 24781 - DNA, 348 bp, Zea mays
  Peptide Sequence Number=SeqID_68156
atgagattagaaaatctgttaaacaaatatgaagtagtgaagaattttgctaaagacttgccctacacaaaatctactcgaatagataatatgaaccaaccaacgaatttaaagcgcttaacaagaacacacaagaacacgcaatataacccgaggttcgacaaccaccacaaaggtgtcctactcctcgttgaggagcccacaaagggccaggtcttttccaaccctaatcctccacaagccgactacaaaggtcaaggcaatctcttctcaaatatgctcaaagagcgggtgatacaaacttcttggggtcgtccacaaatttggagactcccaagcaacctctaa

SEQ ID NO: 24782 - DNA, 264 bp, Zea mays
  Peptide Sequence Number=SeqID_68157
atggaattactcagcaagtcttacccgactaaagaaaagactctcaagggtatgctggttatatgggagtcaaaggtttcaaggagggtaatcaagatcaaggaaggtaatgcaggaattgttttatcaagcaactcctatcacctaatgcagcaagcaagtgagaaagattttaaaaacatcaaggaaggtggcaaatgcaccggggcttgccttcgttcacaggaaattagggttctaagaaaattagtctcatatttttag

SEQ ID NO: 24783 - DNA, 306 bp, Zea mays
  Peptide Sequence Number=SeqID_68158
atgaaaggaaggtccattactcatgcaaatgctaagagcaagagtgaaaagttccctcccctcgtgctgttggtgtctccttggatgcttcagtacccttttcctctgtactcttttaatgctcctggtgggttagcggctaacccccttaacaagagcattgatacacacttgatgaagatgttaccgactctgatcttgacttatttggaggagttggaggttgccaaaaggacatgtgtaagaggaaagaataacgagaaaaggggaaactattctaaggccatcgaaaggaaaggggaataa

SEQ ID NO: 24784 - DNA, 459 bp, Zea mays
  Peptide Sequence Number=SeqID_68159
atggatggcaagattgtgaacaatgacgtgaggattataaaccatgttgtgcagacatacgagaggcacatttgggatcagggcagcagctggccaggaggtgtgcggactcaagtggtctggagcagggcagcagctggccagcggaggcaacgacaaccttctgcacatttggggatgatgccagtattttctacttgctgtattgaaatgattactagatgggataattcaatgccttctgagggatcttctgagatacatgtctggcctgagttccagaatcttactggagatgttatatcaagaactgcgtttgggagcaactatcaagaagggaggagaattttcgagctgaagctccagatagagaaggcactggcggcactaggacctaattctcaggccatcgaagcaaacactgtccagttaactggtcatagcatttttttacaataa

SEQ ID NO: 24785 - DNA, 278 bp, Zea mays
  Peptide Sequence Number=SeqID_68160
atggagggccaccatgcagggtgggtgaagatctggttcaccggcattgtgccctcggcggttggcagggggtcttcctcgtgtctcatgggggacgcccatgacctcatcagaggttgcgcatctttacccacaagtcatgttacccatctgccaagggatcgcgacttcccatacaccctctaccgaggaggcgaggcagggaccgccatcgcagcaaaatcctcccgagggcctccctacactgaccactcccctactgcccttgcccctttcgg

SEQ ID NO: 24786 - DNA, 564 bp, Zea mays
  Peptide Sequence Number=SeqID_68161
atgccccctacaccaccacagggcatcccggctgctggaggagaccctgacggagacagagacgacgacgacatcggtggcaattcgagccacgacatggagtgttcggaggagccggagccagaggggtggttcgctagacccatcactcgtgacgccactcaggccttcttagagcactattctattactgatagggatactgtcgaggcagccatgcaagattgggtagctgacggccttgacctgaagtactaccctcgccgttcaaccgacaatgctggaggtgtgattgtctctccagttggtgagggcaatcccaggctgaacagtatggtcaacctgggcgccgtgctcaacgccgagctggaccacgcccttgacgagttgggcaaggttcgggcggaggttgcggaatcgcgtgctgagtgcacaacacaccactatctggatggtggttctcccgcccccgtcaggattcagcacccttatcgctcactgccccatggtcgcttcgactatggaaccccagactgcaggacccagatagatttagatccatag

SEQ ID NO: 24787 - DNA, 192 bp, Zea mays
  Peptide Sequence Number=SeqID_68162
atggaacagcccgccacgtctgttgccccgtctgcccggtccgcgctcaccggagttcttcctgtgcagtcggagctctgccaccgtcgccccgaggcgtccctacgcttccgccgttgtcccgatactccagcatttcctctcaaggtgaccaatctccccgcgcccctatttccctgtttattgccctaa

SEQ ID NO: 24788 - DNA, 1184 bp, Zea mays
  Peptide Sequence Number=SeqID_68163
atgtcagaaaacaggcacagaggaggaaggcgtgctcagcaggagcaagccgctcagcaggatgagacccaggcagttcaagccattggtcagactttatccgccattcagcagcagcagcaacagccaccacctcagcctcagatgcctcagatgcccagagactgcctatggctcgtcttagacacactgcacggaagtctgtcatccccttcttaccctctcgtctcgctgagcgtccgcttcaccatcccgtggccgcagaagatagagtctgtgaggagctgctcccccgtgcttcccctggaggcgccccctgcaccaccactgggcgccccagcccctggagtagctgctggaggatacccagatgacggaggtggcgacagcagctcgagccacgacaccgacctttctgctgaccaggagccggaaggatgggttgctcgacccatcactcgcgacgctgctcgcgggtgtcacttccacgatgcgctcgacaccctgctatgtcgggcacttgaccgacgtacttggtccatcgagtatcgctgtgtggtctaccagcacagtcgcggggtctacccagaccgctgggaggcgacctgcttggtgcgccgtccggagaacagtctccggggtgcagaggtctgctcagagcattattctatctctgagcgggactcagctgaggtggccatgcaagatgccacacggcgtgcgctttcgcactactgctcagttttcagcggggtagccgacggtctcaacctgaagtattacccccaccgttcatctggcagcacaggaggcgtgattgtttcacctgtcggtgaggacaatcctaggttgagcagcacagtcaacctagccgccgtgctaaacacggagctggaccatgcattagacgagctgagtagggctcgtgctgagatcgcccagttgcgggctgagtgcgcggaacgtcgtcacctggacgatggttcccccgctcccgtcgggactcaacacccgtaccgctctcctcggcatggacaccagtcttatggcaatcccgactgcgcagaggaggaaggcgtgctcagcgggagcaagccgctcagcaggatgagcacagcagcaacagccaccacctcagctcagatgcctcagatgctcagagacagcgtgctgattcatgagag

SEQ ID NO: 24789 - DNA, 456 bp, Zea mays
  Peptide Sequence Number=SeqID_68164
atgtactttaatgcttctattgattggacttgcacttcgaggcaagagagggaaagatgggctcaccacgctgacgggaagcgcaagcatcctctgagtccaccctcggaggacttcagtgactcggagtactcggaggagctttcctccgagtatgatcggtcgctcgctcaggcgtcccccatggcgtcatccgaggactcggacgactccatgggaggaagcctcctcagtggaggtgaagactccttcgactccggtgagtggagcaacagcgaaggcgacggcggtgaggacgatgacaacaacggcgatgacaacggcatggggagcagcgatgatgacggcgaaggtggcgatggcgagggtgacggcgagggtgagggcgacgacaagggcgatagtggcgatggcaagggcgacggcaaggccggtggcataatgctcctggcataa

SEQ ID NO: 24790 - DNA, 82 bp, Zea mays
  Peptide Sequence Number=SeqID_68165
atggcgcccaagaggaggaaacatagtgctgctattccaatcatcccgccaatcgatcccaacagccaactcccattcgcag

SEQ ID NO: 24791 - DNA, 411 bp, Zea mays
  Peptide Sequence Number=SeqID_68166
atggatataaatcctgattctcgagtcatcgtcggatctgagatcgatgacccaccatttcgctttagccgccagattgccgatcttcggtggataacggttgggatgaagggcgatcaccgcaaacgcggtggactcgcacggccaacccgcccacttccgcgattactggtgcggaaggtgggcaggtgggtcccatcaccccatgcgacgaacgcacaacagaagatcaacgcccgagtgatccgcagggatgttggggaggtgggcgcacccacgccagcagaattcgcggccgccaaccatccacccgcggaagaaggagctcctgacatcacgaccccgcaaatccgtgagagcgagagaagcgggcacaaaaagatagagaccgccaaggggtcccagcggtaa

SEQ ID NO: 24792 - DNA, 408 bp, Zea mays
  Peptide Sequence Number=SeqID_68167
atgcccgacgatgatgggctcgatgacttagggttggaggcaagcgcatgccagctcgatgactttgggtatattgggagcccagggcttctaatagttaccggaagccctagccacccaatggtccgtgcccaacaactaggaaattccgcctcgcccgaccttaggcctcggcctcggaaggaggtctccgcctcgccggaccccagtgctcggcctcaacctcggcctcggaaagtggtctccgcctcgcccgaccccagggctcggcctcaacctcggcctcgggaggaatcgcgtcctcgcccgacctcggcctcggcctcaggaggagtctccgcctcgcccgaccttgggctcggactgaccgcaccacaggggatacatcattaccctacccctagctag

SEQ ID NO: 24793 - DNA, 303 bp, Zea mays
  Peptide Sequence Number=SeqID_68168
atgggcaagaaacgcaagcgcgagccgactcccccatctgaagatgttgacgactcccaggggctcgcggcagaggtctggacttatatccgggccgtcgagcgctccgggctcgagggctcggatgagtcggagtactcctcggacgaggaggactcgtccgaggaggacgacagcgacggtggcgaggacgacgacgacgacgatgacgacgacggtgacgacgacggtggcagcaggggcggcaacggcagcagcaggggcggcagcagcggcaggggcggcaacaaggccaatggctaa

SEQ ID NO: 24794 - DNA, 351 bp, Zea mays
  Peptide Sequence Number=SeqID_68169
atgcagctaaagaagcgtatccgctatgcctattgcatgatcttgatgcatatcatcaccccttctcgattgcctgatcaccaagtcctttgtgtcccgcttgactttgccaactgctatcttaacttggtcaacacggaccacaattcaatcgaggatatactgtcattactgtacagctgtcggccatttgatcagcacttagggcgaccagggtcaattaaagtaaattgtgctcacagtacctatgaagctgtgcagaatggaggtactcttcggatgggtgataatcccccttgcactgttgttggcatgggcaccgtgcagatcaagatgttcgatggggattga

SEQ ID NO: 24795 - DNA, 207 bp, Zea mays
  Peptide Sequence Number=SeqID_68170
atggactacggctggggagcgggcgagagtccaatcgctgccgtcgccgtggatcgaggagttccatttggaaagactggggagcagatggggccacgaataatggaacaagtaaaggtggtgcgcgacatgtctcgtatgggcatccttgcaagggatctaacaaggattagagtgaagcttgtgtgcttatcaatatcttggtaa

SEQ ID NO: 24796 - DNA, 462 bp, Zea mays
  Peptide Sequence Number=SeqID_68171
atggcgcagtggcttacccggtctacgctcgccggcggtcgggtggaatccggcgaccgtggactggcctctccggcgaagcaaactccgattcctcgctcggggagcttcaccgaggtgtgcacagtcttctccgagggtcggatggggttgggaagggcttggttggccggtctacggtggcaggggctcgggtggccgcggacacgccgtgcacgggcaaacgccggtgcgggcgcgggccatggcgtcactggcctttggcgcgacgaggggcacgcgaggtcgggcgtgggcgtgctctggcgcgcgcagaacgcgtcgaacacgtggaggtgttcatctgcccgtgttcaaacgcctgctgagatcgcaaacgtgcgaatcttggcaaaaatccggcgcagacctcttcctggcacctatggctatctcttatatgtgagttccaagggaagataa

SEQ ID NO: 24797 - DNA, 243 bp, Zea mays
  Peptide Sequence Number=SeqID_68172
atggcgcgcacgcagtcgttgcaagctgtaaggctaacagatcgtgtaaatgtcgagatgaccgcatgcagcacggtagcatatgctatgtatctggacgaacaaaagattacattattgcttcgctataggaccaagttgcgggaagacagcaataattcccagacgccggccgtccacagtggcgctggcgggggcaccgcagaagatccttcgtcccgtgaatacaatcccccacagtga

SEQ ID NO: 24798 - DNA, 213 bp, Zea mays
  Peptide Sequence Number=SeqID_68173
atggagtctgctctccacttctcaagtgtctatctagaatcgaaggtttgtgtggatctcacatcggatctagacctttgctggggaaggtcttcagacaaggattttattggccgaaggcagcttcagatgcaacagatctggttcaaaagtgtgaaaattgtcaaaaatgtgcaagagaccagaaacaaccttcgtcgttcacccaactaa

SEQ ID NO: 24799 - DNA, 249 bp, Zea mays
  Peptide Sequence Number=SeqID_68174
atgaggaagggaagcgggtgtttacttggagagacgagggtgcgaggcggtcaggatcaggagaagcccctgcgcggaatgcagatccagagcggggccaccggcgccggaatccgccgcgattccgaaaaagaagaacaaaatagtaaatgtaggaagacgttgtctcaaaaacgtgaaaacaacgacccaatgttggaatcattggtagcagtaacaagaaaaacccccaaattcaatgaagtttga

SEQ ID NO: 24800 - DNA, 483 bp, Zea mays
  Peptide Sequence Number=SeqID_68175
atgactgctactcccaacctgaggtccaccaatcttgcgtttcttgtcctccatctcccgacgcttcctttcagtcatgattgctctatctatcagatgctggaaggttgggaaggtgtggttcatcagctgatagtggagggggtcaaccaatcctctcaagaagcggtactgtctcttggcatccgtgttgacatcctctggggcataacacaacagctgcagaaacttgtccctgtattcgctgacggacaggggtccttgcttcaaggtgagaaactcctcctttctcactatcatcagtccctcgggcacatggtagcgacagaacttgtccctgaattcttcccaactgatagcttcagggttggcatgggtggcgaggtctgcatcaagaacatctgctcaatggtcatcgggggtggcggtggcaaatgctgctgcagagctgcctcctcttggggtgcctgctgctatggctga

SEQ ID NO: 24801 - DNA, 768 bp, Zea mays
  Peptide Sequence Number=SeqID_68176
atgccccctgcatcacctcagggcatcccggctgctggaggagaccctgacggagacgacgacgacgccggtggcagttcgagccacggcacggagctttcggaggagacggatggatggatcgctagacccaacactcgtgacgccgctcgagggtgtcacttccacgacgctctcgataccctattgtgtcgggcctttgaccgacacacttggtctatcgagtaccgttgtgtagtctaccagcatcgttgtgggctatacccggatcagtgggaggctacttgcttggtgcgccgtctggacgatggtctccggggtgcaaaggccttctcggagcactattctattactgagagggatactaccgaggcagccatgcaagatgtagcacgacatgcactttctcagtattgctctttgttcagcggggtagctgatggccttgacctgaagtactaccctcgtcgttcgaccggcagtgctggaggtgtgattgtcttgccagttggtgagggcaatcataggctgaacaacatggtcaacttggtcgtcgtactcaacacagagttggaccacgcccttgatgagttgggcaaggttcgggcggaggttgcggaattgcgtgctgagtgcgctgcacgccactatcttgatggtggttctcccgcccctattgggattcagcacccttaccgctcaccgccctgtggtcgcttcgactatggtaccctagactgtaggacccggatagatttggatccctag

SEQ ID NO: 24802 - DNA, 372 bp, Zea mays
  Peptide Sequence Number=SeqID_68177
atgataacccaaaagggcgcaataagggaaattgggtacggggacggatgtctcacctcggggcagaggtcggggaggcttggcgcggactccggcgagctggatgggcaccggcggggctataagaagggagctgggcgcgtgggcgatgtcgtggccgagaaacccggcgacgtgcgcgagtgcgcatgcgccgatccacggcgacgcgcggagagggcggagctgacagggctggcccacgacatagggagagaggacaagggctttcgggcaacggctcaacgactggcaatccaggtccgcgagacagagagagaaggagagcgcgcgggcgaaggaaaactggcgccgacaggtcggccccactag

SEQ ID NO: 24803 - DNA, 111 bp, Zea mays
  Peptide Sequence Number=SeqID_68178
atggccgtgatgggttcaacatcggaaaagatatacctctgccagggccttgtcaatgtaggcttgatgatcgaggaccctttaactggtcacatgcctcatcatgggtaa

SEQ ID NO: 24804 - DNA, 465 bp, Zea mays
  Peptide Sequence Number=SeqID_68179
atggaggacggcgtgttctgcggcgtgttcgacgggcacggccgctgcggtcagctggtcagcaagctggcgagggaccacctccccttcatgatcctgagccagcggaacgcgctgctcctgggctccgacgacgacggcgatggcgacggggacgacccggccttcaacgacgcgtcgcccacggcgccgtcgtccacggacggcagccgcagcaggtggtcgtcgccgtcgttggcgccggcgccggcacagatgctggagggagctcgggtccaggccagggtggactgcaacttcagtggcaccacggccgtgtgcgccatcaagcagggggaggacctcgtcgtcgccaacctcggtgactccagggccgtgctggcgaccgtgtcggagacgggctacctgaaggtcgtgcagctcaccaccgaccagaagcccaacgtgcctcgtgagtcctcctga

SEQ ID NO: 24805 - DNA, 1470 bp, Zea mays
  Peptide Sequence Number=SeqID_68180
atggagcacgtgttcggagggaagtttaagcttgggaagaagatcgggagcggatctttcggcgagctctatctcggcgtcaacatacagagcggcgaggaggtggctatcaagttggaatctgtaaaatcaaggcatcctcagcttcattatgagtcgaaactatacatgcttctccaagggggaactggaattcctcatttgaaatggtttggggtggatggggagtacaatgtcatggtcattgatcttcttggtccaagtctggaagacgtattcaaccagtgcaacagaaagttttcccttaaaacagtacttatgctagctgatcagatgataactagggtagagtacatgcacacgagggggttccttcatcgtgatatcaagccagacaatttccttgtgggcttaggtcgtaaagcaaatcagaccattagctatttttgggcccggtctattagttacttttggggttcaatccagctcatgggtgaagttttggtttatatcattgactatggccttgcgaagaagtatcgggacctccaaactcataaacacattccatacagggagaacaaaaacctcacaggaactgcacgatatgctagtgtaaacacccatcttggagtagaacaaagcagaagagatgacttagagtctcttggttatgtgctgatgtacttcttaagaggaagccttccttggcaaggcctgaaagctggaacaaaaaaacaaaagtatgacaaaattagtgagaagaaaatgctaacctcaattgaggccctttgtaaatcttatccatcagaattcattacgtacttccattattgtcgctctttgcgttttgaagataagccagactatagctatttgaagaaaaatttccgggatttattcatccgtgaaggttaccagcttgattatgtatttgattggactgtgtcaaggcaagctgtggacaataacagattgcgactgagcgggaagacaggtggcttggtgggaccatctgtggatagggctgaacgagctgcagcaagacaagatgttccagatagattcactggtcaagctggtgcttttgctagaagaaccggctctggttctggtcaatacggagaacacacaaagcacaggactctgttggattcacttatggcatccaagatggctgttgattcagataaaagaaagcattcatcatctcggaatggaagcacatcaaggaaggctcttctgtcaagcagccgaggttctggagatcccagcgacccaaatcgcagtagccacctagtcccgaccaccagcagcagcagccgtccatcaaccaatcaaaggcttcaccagtcaactggacttgagggcaggacctcgtcattcccaaaacctggaagaatcggccaggatgatcccactatgaggagttttgaacgccttactatcagcgcagagaggaggagatga

SEQ ID NO: 24806 - DNA, 399 bp, Zea mays
  Peptide Sequence Number=SeqID_68181
atgaccgttgcttatgatccatatagaaatgatagtttgttggaagaaactcttttggacatcatctataaactaaaagggggtgaagacacaccagtgtatacgaataaaggagtgaatggagcagtgagagatgagacactcttacagctgaaggtaccaacgatgtttgttcagggaagtaaagatgccctgtgccccttagataaacttctgtctactcaaaagaagatgacctgcaagaatgaactgcatatcattgatggcggtgatcactcttttaaggtcggcaaaaagtacctagaatctaaagggttaaatcaatatgatcttgaaatggaagctgtcacaaaaatttcacagtttttccaggattccttcactgagagttgtacctag

SEQ ID NO: 24807 - DNA, 1170 bp, Zea mays
  Peptide Sequence Number=SeqID_68182
atggtgggtctcgtcggcggcagcacggcgcgggcggagcacgtcgtggccaacgccggaggagagacggagtacgtgcgccgcctgcaccgccacgcgccggccgagcaccagtgtacttccaccctcgtcaagcacatcaaggcgcccgtccacctcgtgtgggagctggtccggagcttcgaccagccgcagcggtacaagccgttcgtcagaaactgcgttgtgcgcggtgaccagctcgaggtcggtagcctgcgcgacgtcaacgtcaagaccggcctgccggcgacaacaagtaccgagcgcctcgagcagctagatgacgacctgcacatactcggcgtcaagttcgtcggcggggaccaccgcctccagaactactcatccatcataactgtccacccggagagcattgacgggaggccaggtaccctcgtgatcgagtcgtttgtggtcgatgtgcctgacggcaacacaaaggatgagacatgctacttcgttgaggctgtgatcaaatgcaacctcaagtctctcgcagagtgcggcctagcccagcccgacccagcccagcccagctcggcccgcgcgcccctggcgccccctgctccccatgttttggagacggtgatcgccggatttgggaccccaaggcgagctccccctcgcctccccctctccctctctctcttcccctcccctcccctttcttcctccatgcacaccacccctgtagccccgtcgcgcccccccctgcggccccgtcgcgcggcaccgcggccccgcgcccgctccccgccggtggcccccctcgccgtgccccccggcggctcgcccccgcgcgcctgcttccctagcggcttgtgccctcccgacatcccacgcccggccccgcgcccctacggctcgcgcccctccctggcggccgtgcgccccctcggtggctcgcccgcgccccggcggcctggtgccctgcggccccgcgcgccccctgcggctcgcccccacgcccgtgtcccgcgcatccggccgcgtgccccgacgtccgcattccgcgcgctcggcccccgcgcgccctcgtgcctcgcgtcccgacagccgtgcgccctggtggccctgtcgcgtgctccggcgtggcctcgcgtgcccccggcgcgcgcgcaactgtag

SEQ ID NO: 24808 - DNA, 828 bp, Zea mays
  Peptide Sequence Number=SeqID_68183
atggtgacctccagcttgatggtgggggaaagcgagccgggctgcggcctctgcccctccctcagcctcaaggattttcatcaccagggctggggaggggactgcaccgtgcctggctctcggacgcgagtggcttcggagccgcttgcggcgccggcgtctgccacggcagctggaagaggttcttccgccgacgagatagccagagccgcccacggaccgacctccaactctacggccttctgcccgtccttgcctcacgagtttgggcatgggcgggggcctcttggcagcagcatccgccctgaggtcagtgctgccgctgttcggccccccagagcagaagtcgtcgtcgtcgctgctgctggagcgggcgacggcgtgccgttcgtcggtcttctgttgctccgcaggccctcccccatcgagtggggttgttcgtacctgcggaggtggaaccggagttccttttgtaatggcacttcgaatgccagtgtttttgttcattgtggttgtcgaggcctgaacatgaccgacgccggagttgaccagccgaggcctcgggtcgggctgacgtccttggaggacggttggccgaggccccgaggtgaccggccgagccgcctgctcgggctgggttcccggagaagaccctggcagcgattgcccgggcgtggcgatgacgtcatccttcagagtggagatcctcggaccgcctcgccgtccgaggctaggtcggacctcaccgaaggtgtcgtcgatgccgagggtgttgctgcccccttccagcgtcaagacccgagcctgcaggatccgattgtcttgtag

SEQ ID NO: 24809 - DNA, 420 bp, Zea mays
  Peptide Sequence Number=SeqID_68184
atggctgaaaggtaccaactcccatggagttgtgttcctccaacgatgaggcggaaagacggcgggtatcccccatccgagggcttggaaggtggaaagacacgatgcataagggagcgcgaagacatgggaccgggaaagggggatacctcgaaaaggatccttccccgtgaaggaaccaggctccgagcctccctactgatcagaggttcgaaggctggccccccggaagggttcgacagccgcctcagatcgcgtgggccctacacccactactggtcagaggttcgaaggccggcccctcggaagggttccacggccgcctcaggctactcgggctccgcgcccattactgatcaggggttcgaaggctggcccccgaagggttcacagccgcctcagacgccgagcgagggatga

SEQ ID NO: 24810 - DNA, 585 bp, Zea mays
  Peptide Sequence Number=SeqID_68185
atggctgcgtaccgtcgggcggaggcgagcggtctgcttgacgtgggccagatctccgacgagcaggagcaaggagggcaggcgagcgggcgaacggtttcaaaaaggaggctagggttttgcggcgcacagaaagagaacctgacccacgccgccccacccctttttatacacaggacgcgacgcttcgggaaacccgcagtccaacagtaccacgttcgtcaacggtcacatcaaaaacccccgcggaaccacttcgagcgagggcagcgtctccaccatctagcgacgtcttcggcaccagatgacttagtcgaactggtccctcggagggcaaatgttggggcgaaggcgaagaatctacccttcgctccagccttcgtcaatctcgctgcaccaatagaggcaaaacgaccggcggggtccacccttcgtcctctatactacaagacggaggcctacgacgacgtcgccccgccccacgtcctcacccgacctggaggcccacgtgggattcggcccattgtaacaggccccgcacggagaagtgtgttacgggcccgatttgtaatggcttttctgtaa

SEQ ID NO: 24811 - DNA, 2280 bp, Zea mays
  Peptide Sequence Number=SeqID_68186
atggcaaccaaggttaagaagcagacgtcaattttacgcactttgtcacacccggatttaatggcaaattcaggcaggataaaagttgatgaccgccgagccctcgaagtgtccaagaagtacacaactgcgcaagcactccacttcaagctcccaccttcaccggggcaccatcggtggcggactggcggtggggcacacaaaccgttcctcccgtgctcgtcatctcccttgtctcttcatcgttccttccgtcagcccgcacatctcacctgcgcgcgcgccatgggacctgcgtgcaaaaccgcagcgcggccgcgcgtgctgctgctgtgcagcccgtgcatggggcacctcatccccttcgcggagctcgcgcggcgcctcgtggccgaccacggcctctccaccacgctcctcttcgcctcggctacatccccgccctcggagcagtacctcgcggtggccgccgccgtccccgacgccgtcgacctcatcgcgctgccggcaccgccgccagacgcgctgcctcccgccacggccgcgcgcgagcgcgcggagctcgccgtcgcctccaacgtgccacgcgtccgggagatcgcgcgggagctgggcgcggcggcgccgctcgtcgcgctcgtggtggacatggtcggcgcggcggcggcgcgcgacgtggcggcggagctgggcgtcccgttctacgccttcttcacgtccccgtggatgacgctttcgctgctcctccgcctccccgagatcgacgcagcccgcgccggggagcaccgggacgccgcggagccgatccggctccccggctgcgtgccgatccacgcccacgagctgccgacgtccatgctcgccgaccggagcagcagcgcgtacgccgggttcttgtccatggccaagggcgtcgcgggagtcgatggcgtccttgtgaacacgtttcgtgaactggagcccgcggtgggcggcgacggtcgtctgcagctgccggtgtacccggttgggccattggtttggaccaggccggccggcgtggacacggaccacgagtgcatgagctggctggacgggcagccacgtggctccgtggcgtatgtgtcgttcggcagtggcggcacgattacatggcagcagacggctgagctggcgctggggctggagcttagccagtggttcatggagaggactagagggatggggttggtggcccagtcttgggcgccacaaacagctatacttggccacccttccattgggtgcttcgtcacgcattgcgggtggaactcggtcctagagagtgtgatcaacggtgttcctatggttgcttggccactctacgccgagcagaacatgaatgctgcgatgatggaggtccaggttggtgtggcattgcgggctaaggtcggagctgatcgatttataaggaaggacgaagttgcgaatgcgattcgacgtgcgattgtaggggaggaagctgaaaggctgaggaagcgatcaagcgagcttagacgccaatcagcgcaagctctgagcaaggatggttgttctactcggccactctcttccctggattggctgctgtcgccgccgccggcggccagtcttagcaccagcagggacctcgtctcctgcagccgccatctgggctgctcgccatcaccatgtcatcgtcaagggtcctcccgcttcagaccatgttgcaaatattgtcggatgatgttacaaggagcaagtcacagaggtccttcgcctttaagaggtgggctcggggcaggtgttatcgttgcctcgctcacgaccaccaaatcaactcatgcaagaactccttctgttgcatccgttgtcgctgccccggtcatcgggagcggcattatcgctttcggtcttcctcttcctgtccatcgagttaactgctccgtgcaatgtgaccatcctcaacaaacgagtacttgtgctaaggacaccagtgcaaacgccacagcctttgtccttggcgagaagcccacaaggatatctggtacaaagattcatagagagacgaaccttagcactaatgaggcggtcgcagggacatttgaagcagattctcgccaaatgatgtccaccgagcagaccattgaggtgccttcggataccttcacattgcttcaggctataacctctgttgaagatgttgttttggtggaggatgcatcatatgatgaggaagctactttggttatgcaaactacttttgatggccccatctttattaccaccatcgactatggttaa

SEQ ID NO: 24812 - DNA, 312 bp, Zea mays
  Peptide Sequence Number=SeqID_68187
atggcgattgctctgttaatccagcctctcaagggcactgtacggggggatatgcagcagcttgggtattttggcagcggagtggggcgtgtcctgggggcggaggaggttcccgagcccgagggcgagttggtcgtgtttgaggcgtttttcaccactggccttcgtctgcctgcacatcgctttgtggcggaggtgaaagggaaatgtgcccttgggccatttctatgtattttggtgattgagtgccaacacatgtgcttaattgggaatttatgtacatggatgaacaaggtgaaaatcatgaagtaa

SEQ ID NO: 24813 - DNA, 1917 bp, Zea mays
  Peptide Sequence Number=SeqID_68188
atggttgtgtttatcctccaccaacatcaccaacaacatcaccaacaggcagcagcagcagcagcgtcctcctcgccggaccagcaccaccaccaccagtccccctacagctcccgctccacgtcccgcagcaacgacacctccaccggctcacgctcctctccctcctcctaccacacccacaaccaccactaccactcttcccacccccactcccactacagcagcgccagctactactacgaccccgcaggcagcggcagcggcagcgccggctactactactacgaccaccaccagccgccgccgccgccgccgtaccaagaagaatgcggcaacgaccacggcttttacatggatgaagacttctcctcctcgtcctcgtcccggtcccgccacttccagtcgtcctcgcgcgccccgccctcgtcgtctcccacgccaccgcacgcccagccccagcccccgcccgcgtccacgtcgtccggcgccggcgccggcgccctgttcgaggcggccgacttctcgttcccgcaggtggacatcgacctcgacttcagctcccccgcctcgtcctccggcgccgccgcctcgtcctcgggcggcggcggcgccgggaggtgggccgcgcagctgctgctggagtgcgcgcgcgccgtggccgcccgcgacagccagcgcgtgcagcagctcatgtggatgctcaacgagctggcgtcgccgtacggggacgtggaccagaagctggcgtcctacttcctccagggcctcttcgcgcgcctcaccacctccggcccgcgcacgctgcgcacgctcgccgccgcgtcggaccggaacacgtccttcgactccacgcgccgcaccgcgctcaggttccaggagctcagcccctgggcgtccttcggccacgtggccgccaacggggccatactcgagtcgttcctggacgcggcggcggcggcggccgcctcctcgtcctcctcctcgcagcacccgccgcggctgcacatcctggacctcagcaacaccttctgcacgcagtggccgacgctgctggaggcgctggccacgaggtcgtcggacgacacgccccacctgtccatcaccaccgtggtgcccaccgccggcgtgccgtcgtccgcggccgcgcagcgcgtgatgcgggagatcgcgcagcgcctcgagaagttcgcgcgcctcatgggcgtgcccttcagcttccgcgccgtgcaccacgcgggggacctcgcggggctcgacctcgacggcctcggcctcggcctccgcgagggcggcgccgccacggcgctcgcgatcaactgcgtcaacgcgctgcgcggggtcgcgccggggggcgcgcggcggcgcgacgcgttcgtcgcctcgctccgccgcctcgagccgcgcgtggtcaccgtcgtggaggaggacgccgacctcgtggcggcgtccgagccgtcgtcgtcgtcggccggggaagccgacgcggaggcggcgttcatgaaggtgttcaccgagggcctccgcttcttctcggcgtacatggactccctcgaggagagcttccccaaggcgagcaacgagaggctcgccctggagagggcggcggggcgtgccattgtggacctcgtggcctgcccggcgtccgaatccgtcgagaggcgggagacgggggcgtcgtgggcgcgccgcatgcggtctgccggcttctctcccgtggcattcagcgacgacgtggccgacgacatgcggtcgctgctgcgccggtaccgggagggatggaccttgcgcgagccaggcgcggacgacggcgcggcggccggggtgttcctcgcgtggaaggagcagcccgtgcgtagggcatgcattgcttcgctggatcgtgtgagtggcggcaacgacgcgcacggggatcag

SEQ ID NO: 24814 - DNA, 285 bp, Zea mays
  Peptide Sequence Number=SeqID_68189
atgtctagtcagcacgaatcggactacgactggaggaccgcacctattgatcctcaggttgtgtatgaaactggtggaaatcctcatggaaggtttgctgctcgtagctcccgtcatcgactcgagtcaggtgacggttcagaggggaggttcgtcgagacccctccagctaccatgccaatgcagcaacaagatgacggcttcgacttcgtcaatgcgctcttcgctagtggaggtagcgaacatcactcgtcgcagttccccgatgttgattggcagcagtga

SEQ ID NO: 24815 - DNA, 816 bp, Zea mays
  Peptide Sequence Number=SeqID_68190
atgcagcccggctgcacccctccgccggcggtcacccaagacggtgaccaccagctcctggatggggagaagcaagccgggccgcggtccccgcctctccctcagctccaaggatgcttaccatccttgcgagggcggagagtgaagcgagccggggctctacctccgcacgggttggctggccacctcctcttccagtttctggtggtggaaaccatcctccagctctgcggaggaggcgtcctccagccatgccggggaaggtgcgctttggagcggcctgcgttcgccggtgctgacgtggtggcggccgggggaagcttccccaccgtcgaggctgttagtggcccctacgggccggcctccggctctttggctttgatggctgaggtcgccggcgagtcgcccggaacttgtcgccccgcaggctccccggagtccctcggctcggtcggccttgctctccgaggcttctcttgcttagttaaaggaacccctcggccgctcttcgatgagtcgaagccaagggtagcggtgtcagcacggacagaggcggagttggctcgaaaagaagacttggtcggccgaagcctggccgggtcgtccgttagcgggaccgacgcaggagttgatctgccgaggcctcgggccgggctgatgtctttgggggacagctggccgaggcctcggggtgaccagtcgagctgcctgctcgagccggattcttggaggagacccaggcggcgatggcttgaggagacccagagtcgtccttcagagtggagatcctcggaccgcgttgccgtccgaggctag

SEQ ID NO: 24816 - DNA, 180 bp, Zea mays
  Peptide Sequence Number=SeqID_68191
atggcgcgcacgctgaggtggtcgccaccgctggggaggccgctcggcgcagaggtggtcgcctccgctggcgagccgctcggagcagaggtggctgccaacgctggcgaggcgtcggagcagaggtggccgcctctgctggcgaaccatcggtgcagaggtggtcgccgccgctggtaa

SEQ ID NO: 24817 - DNA, 480 bp, Zea mays
  Peptide Sequence Number=SeqID_68192
atgtcggcgaggcactcccagcgacgcacctggtcaacgtcgtcgcatggtgttgcatacatcgagcgccttaacgacgcgctcgtggaacatggcggcacgcctgtgcaacaaagatgcaaaactcctcctggcacagagcggatctcgtctctattgcttggtcgaacggggaacgagcaggccttaagagttatcgggtgcacgctcgctagacgcgtgaagtggctcgttggcgatggggatgtgcgtgtggggctgcacgacttctcgtcaggtttggcccggtggcttatgccatgggccacaagcagcgggtctccacctgagcgggaagtggagggcaaggcccgcacacatgggtccggtgtccttctatgggggttcggacttactgagatgtggtgtctctccttgccatgtggcgccctttggcccgcctcacccagtggggtcaggcgtcgtcctcagcgtggctag

SEQ ID NO: 24818 - DNA, 255 bp, Zea mays
  Peptide Sequence Number=SeqID_68193
atgaacagtaacatcatactgttcacactgaatgataatcactctcttgcgtctttaccttcgagcaagctgaagcatttgagaacaaatgaccaacattggcgcccacctccggtgaactcacttccactgattgtgacaatggcttcgtacaacgaccaagctgaaacaccttcggtcatgaagctggtgctcccaatcacaggcggttcaagctcagagccagctaacaagaagcagaagaaggaagcatag

SEQ ID NO: 24819 - DNA, 231 bp, Zea mays
  Peptide Sequence Number=SeqID_68194
atggcgcttggtggtattgggactaacagttcgatcaaagctaaaggggtcacgtccgttgagtcaaccatcgggactaaggccactgcgtatcatcctaccccatttgtagcatcacaaccagtagattcgaccacttcgccactggttggaagtcttttttgttgttatggggctagtggtgcaaggaaagcactagcatatgttgcaaaaataagggaacaatgttag

SEQ ID NO: 24820 - DNA, 822 bp, Zea mays
  Peptide Sequence Number=SeqID_68195
atggcggcctcctctgccgctgttctgtccgccgccgcccgccggatctcacgctcgacggccggctctggcggtgctctcctgtccggcacccgccggatctcgtcgtgctcggcgtcctccataattgtcacgcgggaggtgacagggcaccacaacctcaccatcagcgtctccccggtggagtggatcgcgtcgtcgcaggcgttccacgcagcgggctatagctggcgcatcaagtacgacctcaacggcaacagctggaacgagtcgaatcagtgcatctctatcatcgtcgagctcacccacgacaagggccgccaggaggttgaggaccccatccagttcaagctcagcctgctggaccgcgccgggaacccgtcgcccaagtacatttgctgcaacgacgtgagcttcttcgtcgacgggcaggcgcggttccaggacttcatccggtggaaggacttggaggagtcggggtgcttaaaggacgatagcttcatcatccgctgcgacatcaccgtcattaagaagtgggtcatccggcggagtcgtcgtcgggcgccgcgtggagatcgatggcatagatcccaaggtgttcaaggcgctgctccacttcatgatgtgctcgcggcggcgcaccggtacaagctcgagaggctcaagcttttgtgcctggaggtgttgtgccggcgcatcgacatggacacggtggccggaaccatggcggtggaggagcagcatagctgcggcgctctcgtggcaacgtgcgctgaattcctcgtgcgggtgccatcctcaaagtcagcccaattcatctag

SEQ ID NO: 24821 - DNA, 210 bp, Zea mays
  Peptide Sequence Number=SeqID_68196
atggcgatgaggctaaagctccagaaagagggaacgacatcgagtgtcgatgccacggagtaccgcagtctcatcgagagcttgaggaagttgatcaatgtcgacttcgtcggtactgagcaccagctgggcgacattctcacaaaggcgctcggtcatactcagttccaggagctccgtggcaggattggcatggaaaaacttgtataa

SEQ ID NO: 24822 - DNA, 546 bp, Zea mays
  Peptide Sequence Number=SeqID_68197
atggacgacgcaacgggctccgacgaggccgtgggtgacgatggagcgagctcgcgacgggtggggccgggacgcggacaaggacgggagccagcgcggcgaggcggtgctcggcggctgtcgcggcttgaaaaggagcgagcaggggcgctgctggccatcgcgctaggcgaggttgcgggcaaagggatggggcacggggctgaaatcgtgggagcatgcgtcgtgggaagaggttggaggtgggagacggacctgaccagtgtgcccagtggctccaggacgcaggcacgcagcgggctccaccagcgcgtgggcgctgggccaagaccatgggggcgcgcgcagagcgaagggcgtggtgggccgcgcgatgacgctgggtgggctgtgcggagaggagaggcgcgctgggctagcgctgctggtgggcttcgcggggcaggccgaggtggggaaagcgcgcgggggggggggggctggggcgcgcgctgggccacgctgctgcttgcgcacgagttgggccgcgagggcggggcgcgctaa

SEQ ID NO: 24823 - DNA, 345 bp, Zea mays
  Peptide Sequence Number=SeqID_68198
atgttggtcacttatttgaaagggaaatgtgcccttgggccatttctaagtattttggtgattgagtgtcaacacaagggcttaaatgtgaatcaatgcccatggatgaacacagtgcaaatcttcaacaaagctcttgttgcgacttgtgtgcgtgttgttgctctgattttcgagtcttgtgtgcgttgctcattcccaccttactccgtatttctttgtgaactcaattgtaagggcgagagactccaagttgtggagattcctcgcaaacgggaaaagatcaaaggaaagaaaaacaccgtggtattcaagttgatcattggatcacttgagaggagttga

SEQ ID NO: 24824 - DNA, 135 bp, Zea mays
  Peptide Sequence Number=SeqID_68199
atggggttaccggagggccgtcaatgggggctggggcgtagtgctcgctctgctaaggtggggtgcagaggtaaagaagaaggcgtcgaggtggatctccaggagttccaggacttcgacgagttcaaggattag

SEQ ID NO: 24825 - DNA, 852 bp, Zea mays
  Peptide Sequence Number=SeqID_68200
atgacgcgtgtcgtcgtctttaatctcaatagctcctccgatacgtgcctcgccgtgcttcgcctcctcgtgatcagccccatctgggtcatgtgggcgaaagatctcaaaacctgtcagatgttcgacgacaagcccgaaccagaatttatcaacattttcacaagtattgagtcacgtttgatgctgccgcacttctcttctccctcacgatttctattcttcagcaagccattcgtcatctcctccctggcgttcgtcctcggctcccatggcaggctccacttccctgcttcctttccatggagcacaagtcgccgagccgagctcctcctctatggctcgcttcccctcgcggcgccctccctccatctcctctctcgtttctccctggcgctcctccctcttctctaccgtgcgctgcggcgctctggctcattcccatggcgttcgctcggccctgcccttctccagccgcgcctgctctggctcatctgcgcgcaccgcacccagttctctacgcacgcgccgccgtcaagttccacgccagccaaggtctcgccagccacagctccgctcggcgttcctactgctcccaggttgacgcacgccccgacactactcttcactggattcgcccagcgccatctcctggccatggatgtcgtcgtcctccagtcccgtggacgcgtgcccctctaccccaacatcggtagcgtccctgggcttgtgtttgtcgacctattcactcctctcccatggtcgaccaacctcgccgatgttgctctttggttgtcgcctctaggcctaaccgatgatttccctcggcccaagccttgcccacgcgcctag

SEQ ID NO: 24826 - DNA, 432 bp, Zea mays
  Peptide Sequence Number=SeqID_68201
atgcggagttcgtcgtcttctggggctgagcccgagtccgagccctggggtcgggcgaagcggagttcatcgtcttccggggctgagcccgagtccgagccctggggtcgggcgaagcggagtttcctatggcgcctgagggcggacttggctgctgtcaacctcactctgtcgagtggcacagcagtcggagcggcgcagggcggcgctgtcctcttatcaggccagataaggtgtcaggccacctttgcattaaatgctcctgcgatacagtcggtcggcgtggcgacttggccaaggttgcttcttggtgaagactgggcctcgggcgagccaaaggttatggttgctggagtgacttggccgtccatcttgccaccgggttggacagccgagtgggaccctacctcagcaggggaggagcatgagtga

SEQ ID NO: 24827 - DNA, 261 bp, Zea mays
  Peptide Sequence Number=SeqID_68202
atggagaataggaaatcgacgatcggcgaaaccgatagccgaacaggaattgcacagatcgacgacgcgaggcccaatctggtgagcacgacacaaaggtgggcgtcgcgactccagcaccaacatgaagtacttgctgccgagcatgacagaggccgaggagctgctgacgaagaaggaagcatgtccctggttcgaccagcatccaatggcgcaggacatatattcagcggcagcgacgcgaggggccagcagaaatag

SEQ ID NO: 24828 - DNA, 660 bp, Zea mays
  Peptide Sequence Number=SeqID_68203
atggcgcctcctgtcgacgtggctggtctgcgccctaggttgggcgatgtggaagctcctccaaagccgaggttgagtctgtcttccgtggccgaggtcgagtccggagcccctgtgtcgggcgaggcggagacccgttggctgaggccagggcgtagtccgagctttggggtcgggcgaagcggacccgagtccgagccctgggttgggcggagcggagttcgccgtcttccgggacttagcccgagtccgagccctaggtcgggcggagcggagttcgccgtcttccgggacttagcccgagtccgagccctgggtcgggcgaagcggagcttcctatggtgccttcggccgggcctgactgcctgtcagcctcactctgtcaagtggcaccacagtcggagcggcgcaggcggcgctgtccttctgttagaccggtcagtggagcggcgaagtgacggcggtcacttcggctctgccggctggggggcgcgcgtcaggataaagctttatgctgatgggggttaccagctgagaattaggagccttgagggttctctagaggacatggttgctggagtgacttggccgtccatcttgccaccgggttggactgtcgagtgggaccctgcctcggctgaggaggagcatgaggagtga

SEQ ID NO: 24829 - DNA, 459 bp, Zea mays
  Peptide Sequence Number=SeqID_68204
atgcagtcggcatgcaaccgcgccaagtgggcgcaccccttcgactccaacgcgcccagcatggaggcccaggcccacacgtcatgcaaccggttgctacgtgcgagcaactgcaccgcccctcgtgccactaccgcgcctcctcgactgcggaaccagtaccgcgactcgaggcaaccctgcctggtaacccccatcagcacaaagctgcaaaggcctgatgggtgcgattatgtcaaggatcagtccactcaagggacacgatctcgcctcactcgagcccagcctcgggcaagggcagccgaccccggaggatttacgtcttgcccaaggaccccctctagcaacggacacaccttcggctcgcccgaggcccagtcttcaccaagaagcaaccttggccaagtcgccacgccgaccgaccatatcgcaggagcatttaatgcaaaggtggcttga

SEQ ID NO: 24830 - DNA, 810 bp, Zea mays
  Peptide Sequence Number=SeqID_68205
atgggtcggcgcgagacggagcgcgaaggggggaagaagacggagggagacaggcgtaaaaggggaaaccccgcggccttcgtgtttgtcccgcgcccaggtcggggtaatgatggcgcctcctatgacgttgtcggtccgagccctgggttgggcgaggtggaggctcctccgaggtcgaggtcgagtctatcttccaaggccgaggtcgagtccgagcccctgggtcgggcgaggcggagaccgtcggctgaggccagggctgagtccgagccctggggtcgggcgaagcggagttcgtcgtcttccggggctgagcccgagtccgagccctggggtcgggcgatgcggagttcgttgtcttccggggctgagcccgagtccgagccctggggtcgagcgatgcggagttcgtcgtcttccggggctgagcccgagtccgagccctggggtcgggcgaagcggagttcgtcgtcttccggggctgagcccgagtccgagccctggggtcgggcgatgcggagttcgtcgtcttctggggctgagcccgagtccgagccctggggtcgggcgaagcggagttcgtcatcttccggggctgagcccgagtccgagccctggggtcgggcaaagcggagtttcctatggcgcctgaggccggacttggctgctgtcagcctcactctgtcgagtggcacaacagtcggagcggcacaggcggcgctgtcctcttgtcaggccggtcagtggagcggcgaagtgactacggtcacttcggctctgtcgactgaagggcgcacatcaggataa

SEQ ID NO: 24831 - DNA, 327 bp, Zea mays
  Peptide Sequence Number=SeqID_68206
atgtgccacttgattgagcaataccaccgtgagtacgccggagtgcacgccgccgacgagcctgacctcctgcgcacgtggtcagaccgattccggccaacaccgtcgacgagccgcacctcgacgtcaccgctaggacctcccggacctaaccccacccttcaccggacctccctcgccgccgattgtaatctcgctgacggagagtacatcctcgttctggagcaaggagttgctcaggaggtagttcaggagccagcaccagagcctgccatcgaggatctgcctgccccagctttggaaggcaagcccaggttttatgcataa

SEQ ID NO: 24832 - DNA, 972 bp, Zea mays
  Peptide Sequence Number=SeqID_68207
atgtcttcgcgctcgcttatgcatcgtgtctttccaccttccaagcccctggatgggggatacccgccgtgtttctgccttgtcgttggaggaacgcaactccgtgggagtcggtacctttcagccatcgttcggcttcaaggattttcatcatgcagcccggctgcacccctccaccggcggtcacccaagacggtgacctccagtttgatggtgggggaaagcgagccgggctccggcctctgcccctccctcagcctcaaggattttcatcaccagggctggggaggggactgccgcgtgcctggctctcggacgcgagtggcttcggagccgctctcggcgtcgtcttctgccacggcagctggaagaggttctcccgcccgcggggcaaccagggccgcccacagaccgacctccaactctacggccttctgcccgtccttgcctcacgagtttgggcatgggcgggggcctcctggcagcagcatccgccctgaggtcatcgctgccgctgttcggccctccggagcagaagtcgtcgtcgtcgccgctactggagcgggcgacggcgcgccgttcgtcggtcttcggttgctccgcaggcccccccatcgagtggggttgttcgtacctgcggagcatgaagactcgcctgttggttgtctgaaccgcttcaccaagcgtgagtcgccccgtgcgaaggtgacgagtgaggagtccctcggctcggtcggccttgttgcccgaggcttctcttgctcagttaaaggaacccctcggccgcccttcgatgagccgaggccgggggtagcggtgtcagcgcgaacagaggcagagttggctcggaaagaagacctggtcggacggagcctggccgggtcgtccgttagcgggaccgacgctggagttgaccagccgaggccttgggtcgggctggcgtcctcggaggacagctggccgaggccctag

SEQ ID NO: 24833 - DNA, 390 bp, Zea mays
  Peptide Sequence Number=SeqID_68208
atggaggcccaggcccacgcgtcatacaactggcgcgccgagtgcttcgtgcatgcaactgcaccgccacttgcgccaccactgcgcctcctcgactgcggaaccgataccacgactcgaggcgacccagagcacgacccagcgggaccgggaaagggggataccccgaaaaggatccttccccgtgaaggaaccaggctccgagcctccctactgatcagaggttcgaaggctggcccctcggaagggttcgacagccgcctcagatcatgtgggccctacacccactactggtcagaggttcgaaggccggcccctcggaagggttcaacggccgcctcaggctactcgggctccgcgcccactactgatcaggggttcgaaggctag

SEQ ID NO: 24834 - DNA, 306 bp, Zea mays
  Peptide Sequence Number=SeqID_68209
atgcggcttcatacccttagaggtatgaaggtattgttgacgcagggaagtgttatagaacctattgtggttgttcgaggaaatgagatgactcatcaggttatggaagaagctaagaaagccgaggctgcagagctagaaaggcgcaaaacggaactttctccaccaccgaaaccatatgaccccgaagccgatccaacactaaaaggaattctcgatgaattcagggtggtgaacgtagcgatagacgaagctggtaatacattgttgaatgaagctgcagagaaagttctaaaggaggactag

SEQ ID NO: 24835 - DNA, 282 bp, Zea mays
  Peptide Sequence Number=SeqID_68210
atgccattacttgaaaaggttgtctgcgatcacgcaaaagttgtaattcaaccaaactttgcagtttcagctgatgatgtaaaggagccctctaccgaagccattgtcctaggaggaaagttttactccgaagtttggcttagtggtgaaagagagatagctgacaaagctatcagacaaagtgtaaatgaagtattatttgaggttgatattgtatctgaagatgatgtggttttatacccccagaggtgcttgttgctcatcaaggggagtgggaagtag

SEQ ID NO: 24836 - DNA, 195 bp, Zea mays
  Peptide Sequence Number=SeqID_68211
atgtactatattgagagagaagcagaactgcctaccctgccagctgctgaagctagcaaggcaaaatctgccgagataactgaagtgggtgctgcgcctccgaaggtgaaggaaaacaaaacaaccatgttgtctgaaacgcctgttgctgttatggaattgaaagcggaagaatttctgaagaaacaagaatag

SEQ ID NO: 24837 - DNA, 600 bp, Zea mays
  Peptide Sequence Number=SeqID_68212
atggcgcaccggacagtccggtgcacaccggacagtccggtgcccctgccacgtcatcactgccgttggattctgaccgttggagcttctgacttctgggccctcctggatgtccggtgcacaccggacatgtactgtttgatgtccggtgcaccggttgcgcttggtgcaacccatgctcaggcgatgaaggagttgctgatgtcgatccccaagagattcaagacttcatcgagtttgaagattaagctagtgacctcccctaatagtgaagaaaaacgtaatgtagacacaagtaaggtaggggtgatgtgttctcaatggatacaacaatgcttttatgtctttctacagacaagaagcagtcagttccacaaacaaccacaacaggatgttacagttgggagggccaaaagagatattaggcctccaaagaaattgattgaagaatgcaacattgcttttgatcttagttgtgcaaatgatgttgactgcagtacagagcctccccttataatgaagcaatggtttccaatgatcgtgagaaatgggtgtttgctatgcaagagaagatgtagtcacttgagaaaaatgtggtaa

SEQ ID NO: 24838 - DNA, 789 bp, Zea mays
  Peptide Sequence Number=SeqID_68213
atggacgccgccgccgccgcctcactgttgccccgcgccgccgcctcctcactgttgccccgacgcgttctctctcctctccatgtttcccgaagcggcctccttccccgtcaaagctccttcctcgctgctcgctgtgcccactcccgtgcccctcctccacatccgcctctgccgcgcgccgactgcgatgatgctgccgccaaggcgcacccgcgcctccgtctccgcctgcttgcggaggagttccgcgcactcccatctgacgcagatcgcgcgcgccggctcctctcactcgcggccgcgctgccgcggctcccggagcccgaccgcgcccagggcaaccgcgtcatgggctgcgtcgcgcgggtgtggctcgtcgctcgctgcaacgcgtcaacgggctggcggatgtggttctcggcggactccgactctgacctctcgcgtgggtactgcgcctgcctcgtcgccgcgctggacggggccaaacctgaggacgtcctcgccgtcgaccccgccgatcccgacctcgcgccgctcggggcggggacaacggcggcctggtcgcgggccagcacgtggcataatgtgcttgtcggcatgcagaagcgggcgcgcacggccatcgcggcgcgcgagggtaggcaccccgggaagccgtttccgtcgctcgtcatcgcgcgcgacggcgccgtcagcgcgcagggcagctatgccgaggcccagggaactttggggaacttgtgtggtgtctctacaactgtaaatgtggaaaatgaagattag

SEQ ID NO: 24839 - DNA, 288 bp, Zea mays
  Peptide Sequence Number=SeqID_68214
atgggtgtagccctgaccgcccagatagccaccgcgcagcacctcctcctcagccgcccaccaattgcccatgaggaccccccggtggcccacgaggctcctcatgcctccaagctcgacgccaacatcatcgccgccctccaagctcaggtcgtcggggtccacaacacgcggtccctcgtgtccattgtgctggacctggcatcctctcactaccctcggtggcgcactcaggtcatcctcacgcttcggcgatacgcccttgccgactacgtcctcgacccatga

SEQ ID NO: 24840 - DNA, 465 bp, Zea mays
  Peptide Sequence Number=SeqID_68215
atgcagtacaaggggtcaagcagtctcattagctgcgagaagcacacgattcgaatcgagttttatccttgcaaggcgggggagctcgtcggcggcgaggagtccagcctatccagggcgaaattgaccaatcaaacgggccagagagcttcaccagggatcaaggaaggcgggcgaccgaagtctggcgagggtgatcttcgccttccggtgaagttctgccgggtccgagggcttggaaagcttcacgggccacttgcggagctaaccgaagcgctgacgcaacttgggggtgactggagtgggctggccacgatggccgaagctctggcggcaatggcgggtggaaaagagctcgccggagctaaggaggggtggctggccagtgatgagatttggatcccggaaatctggtctgtctccctgctcaaacccgaggcaaatctagggttttgtcgtgtctag

SEQ ID NO: 24841 - DNA, 390 bp, Zea mays
  Peptide Sequence Number=SeqID_68216
atggatggtgcgacaagaatattattaagagcgaaatttgtggtaggtgtaggaagaacggagtggcctctagacgtaacaggaatgctggtgccattacctactgttattgaggagatggagggaggaaggcgttgggtaagcataccagccgaggatgtcatgtgcgtggaggcgccggagtcaacaatccagtcgccctgcagttccatgttctgcagggcagcgatgaggccggctgcatcccaggtgctggtggaggtgttggagccgttggaggaggtctggagcggagcgaaggcggtattggcctgcggggaaggccctagtatacccaggttgcgtccagcctgggcaccaggacctccaggggcacccgaactgctctaa

SEQ ID NO: 24842 - DNA, 954 bp, Zea mays
  Peptide Sequence Number=SeqID_68217
atgtcgccgcgcgttgtcaccttctgccgtccactgacgcaccaacccaacatccccaagtccccaaccctcagagccccaacgtcggtcgagcaccagcgagagacctcaagaaggccgaggcgagggttcccgcatgggggcgagaggtccaaagacgacaccctcaatagggtaggggtggcgcccgcgagcgtcaccactgtccgcccgcaagcgggcatggctttcgccagaggacctcccaccacacgccccaacgcgatgtttttatcccctgatgagtccaaggtttcaggccttgtgaatacccttaaagagaaaaaaatcgggattgttgcacacttttatatggatcctgaggtgcaaggcatactgactgctgcaaagaagcagtggccccacatccaaatatctgattccttgattatggcagatagcgctgttaaaatggctgaagcaggatgtgactatattacagttttaggtgttgacttcatgtcagaaaatgttcgggcagtacttgatcaagcaggatttaataaggttgtcgtttatagaatgtccagtgaaccgattggttgttcattagcagatgctgcttcaagttgtgaatatactcattttttgagggaagcttcgagatgttatccatctttgcatgttatttacattaatacttcgctggaaacaaaagctcatgctcatgaacttgttcctacaataacttgcacctcttctaatgttgttccaactatactacaggcattttcccaaataccaaatgttaatgtctggtatggtcctgattcatatatgggtgcaaacatagcagatttatttcagagaatggctacaatgtcagatgaagaaattgcaaaaattcatccagaccacaacagaaaatctttgagttcattactgccacgtctacactattatcaggttgtgtga

SEQ ID NO: 24843 - DNA, 477 bp, Zea mays
  Peptide Sequence Number=SeqID_68218
atggggacatgcggcgtcggttgccaggacggcgtgacgaaggtgacatgcggcgtctatggagatggggacgccggttgccaggatgacaccgcgaaattggcagcagaagccatgggatcagatcgaaacccaactgtggctgcccctactggcgtcgcccatggggacggagacgccgtcaacgaagatgatgtgatgaaatttggcgttgcccctggggatgggcacgtcggcatccaggatgtggtgacaaaattggcaggcgatgttgcccatagagatagggatgtcggttgccaggatggtgtgacgaaggtggcatgcggcgcagcccatggagatggggacgtcggttgccaggacggcgtgacgaaggtgacatgcggcgtccatggagatggggacgccgattgccaggatgacaccgcgaaattggcagcagaagccatgggatcagatcgaaacccaagttag

SEQ ID NO: 24844 - DNA, 1494 bp, Zea mays
  Peptide Sequence Number=SeqID_68219
atgaacgaaaaacactggcattcaaagtgccattacaaacggaactccggttccgcctccgcagggtgggtgctgctgcaatcttgccctcgcccacgtcggcgctcgaggggcgaggacaagtacaaagagccggaggcccgaagcgcggatggtggcggtggtcccatcggcgacggggacttctcgagccgcctccaccttggcaccgacgacaggagccgctcccggcagatccccactcagatcctcccggacgagtggggcaccgacctccgcgcggaggcgccataccgccgccttccggcaggaggggccgccgggagccaagccgacaagctcgacacactggggctgacgacgcccgccgttgaccagccccgcgttgtcgaagtccggcccgccctcagggccagcgagcgccctcaccctcgaacgccgcgggagagggtgacccacgaacccgcgcgggaggtagagctccggctcagctcggcctccaccccagcgaggatgatgaacatccttgaagctgagggtgggaccaagatcgtagcccggcttacttctccccacccaggggctgaccagcgggcgaaagggtgggcggccatgcaggtggcatgcaaccgcgccaagtgggcgcgcttctccgactcccaacacgcccagcctggaggcccaggcccacgcgtcatgcaactggcgcgccgactgcttcgtgcatgcaactgcaccgccacttgcgccaccaccgcgcctcctcgactgtggaaccaataccgcgactcgaggcgacccagcgcacgacccagcagcgccagcctggcgcgacggaggagcgggcgacgcttcgccttcgccataatgaccgcgccagtaaaggctccgagcctccctactgatcagaggttcgaaggctggccccccgaagggttcaacagccgcctcagatcgcgtgggcccaacacccactactggttagaggttcgaaggtcggcccccccgaagggttccacggccgcctcaggctactcgggctccgtgcccattactgatcagggcgggagcgatcttgtaacgcaatcccatcagagggaggcatcgagccctcggaccccgtcgccaagggaccgggtccagcagatcacccacagctcaccggagacaccatgttcggcgcccatcgagggcaacatggcgctttcccccctcctccttgcggaaaggcgacgcaggggcagtgaggctgacaggcagtcaggccccgccggaggcatcataggaagctcccttcgcccgacccagggctcgaactcgggctcagccccggaagacggcgaactccgctccgcccgacccagggctcggactcaggctaagacccggaagacggcgaactccgctccgcccgacccagggctcggactcgggataagacccggaagacggcgaactccgctccgcccgacccagggctcggactcgggctaa

SEQ ID NO: 24845 - DNA, 570 bp, Zea mays
  Peptide Sequence Number=SeqID_68220
atgaagttggtaggagtttcgcctttgcttcctcgatcagctgcttcttatgttcttcgaactcctgcttatcttcagtcgacagaatttccatacggagtcaccaaaaagtgtgttggcgtcgatctgggcaccaataccagcggcagtgctctctactgcagcgtggacggacggtccgctcgtgcatgggagggcggtgttcgccaacagcacctggatctcgctcctaggagggaccctgtcagggaggagagaacttatgagcatgcggggcgccatcattgcctatctggcggagctagccagatgggacgccggtctggttccctgtggcccgagtcagctcggggtagggtgatgatggcgcctcctgttgacgtggctggcctgcgccctaggttgggcgatgcggaggctcctccgaagccgaggtcgagtctgtcttccgtggccaaggccgagtccgagcccctgggtcgggcgaggcggaggtcgtcgactgaggccagggcggagtccgagccctggggtcgggcgaagcggagttcgtcgtcttctgggacttag

SEQ ID NO: 24846 - DNA, 108 bp, Zea mays
  Peptide Sequence Number=SeqID_68221
atggctcagcttctaaccatcctctttgatgcagtggttgtgtggattttgactagaagcagttgtgggagacagccagacaggagtacacagtacctaatgcagtga

SEQ ID NO: 24847 - DNA, 1098 bp, Zea mays
  Peptide Sequence Number=SeqID_68222
atggcaatcgctccggtgatcaacagagagcgagagcaggttatggtgatgcggtggaaagggttagacacgcggcgcaaggccaggaggcggtggttcaccggcgagctaatttgctccagccgcaaagcagcagagtgcggcgggttttccagggttccaatgggggtttttggtatctcaagggccaaagtggcgcgggcggagagcagtatcgccagccaacgcgccgaagagctggaggcgaggtacaacgccctgcgcagccacatggacaaggtcgaggcctcgacgtgctcggaagtcgagcggacgcaggcgcagtttgtggacacgtaccacgagctgtgtgcgcggactgctaacttcgaagtacccggccaagaagcaggccttcgcttcctcgaatggttgcaggaggagttgctggtgctcccgaccattgtgacgggtttcatgtccttcgcctccctcgtcacctgcgagggggcgatgaatgcactgtcccgcgaggggtgtaggcactacgaggtcttcgaccaagcagacgagaactttgaacgtgaaatctttaaggccgaagaccctgtggtgaagcagtcagcgggggcactcttcgataggatgtggggtccgcacggttgggaggcggtcagggagcggtccgatcgagcgatagagcagatggcgcatgccgaggacgtcgagaaccttggtggtctagacggcgtgtcgcccgaggctgcggagatcaatccggtgctgccctcggatgccggtgaaggctcctcggctgtgcccgtgcccactgtggccggtgaagactctgcatcagcccctgcgccgacgggtgaagatgccacgagggtggtggtcgagccggcagtcgaagatcccacagccgcggccgggccttcgcagtctgatgattctgggagttcaattgcgtggacagaggagtcttcagatgaggacttggattattttgcggcattggatgtggctgcagcggaggcttcaccgcgcgcggagggttccgaggaacttccgggcgcgagtactgggtataagcggcggagggtggtggcgaagcggaga

SEQ ID NO: 24848 - DNA, 141 bp, Zea mays
  Peptide Sequence Number=SeqID_68223
atggccatgatgggttcaacatcggaaaagatgtacctctgccaggtgaggaagcaacaaatttttgttgcttctgctctaaggtggtgccaaaagaagaacacaaggaatgaagtgcgggaggaaaggatcctccattag

SEQ ID NO: 24849 - DNA, 597 bp, Zea mays
  Peptide Sequence Number=SeqID_68224
atgaacaaggaccgtcaagacgttgcgcagaagcgccgggcggtcgtcaggatcgcggatcctatgtgcgaggcgaagagggcgtgggggagcacgaaggctgctgcctctggcagtagcaagccagtgccggctgcgaaactggctgctcccggacacaacaaggcgtcggcgaggtcaggtgaggggcaattggttgttgtcccaccttcggtggcaaccacggcgccaacggcggtggttggggcgaagggtgctgcgcgggacccgtgggccgctttctgcgggagcggcgaaattctgtcggccgctgccgccagggacgtggcaggctccatatcccagcgactgagggaaacatcgcagcagctgaagcaagcggccaacttcaccgaccgcgtcgcgttgggtgtcttgactgcggacgtggccgccgaagtcgagagtctccgggcgcagcatgcagatgctgtccgggagaagtcggctgcggaaagtaaaaaccgcaggctggcggagaaagtggctgccatggaggccgagaagacggacctccggcgccagctagaggcaaaccaggccatcactgaagcatag

SEQ ID NO: 24850 - DNA, 1017 bp, Zea mays
  Peptide Sequence Number=SeqID_68225
atgaggaagggccagcgtcttgttccaggcatgacaaccgccggagtcaccttttcttcttcttctcctcgacaggtgcagctgggtgattcactcggcgtgaacgcttccggcgggcaccttcgggtttctggatttcctcatcttcgccaaactcttgcccagtcacaattgccattggctcagtgcggcttcgggaagattctgaagtggggcaatcaaggcctcaatgtcctctggggagggccgcactctatggcctgggctaccatctcgagtaggaggattggagacaaaatcagagaaaggactattcggagggctgctaccctagaaccaagcctgcggcagaggggtataacctcgccggagaagacagctatccccatggaccgaaggtccatgacacctggtatcagagccaggttatcctcaccaccaccagccgcccatccctcaccaccaccagccgccgagccatcagccgccgcaacgccctcccacccgccctctccaactccagatgcattcactcggctcgaagagagttttggccgtctcgaagaaaagtgggatcaattcgttgtgatgttccaccgctacaaggagaagacagagaaggaactccaagcagcggtgcggcttcaggcggcagcgcgagggttcctggcacgccgccaagtacagtcccttcgtggggagaagcaccttgctgtggcctccagggccaccccatggccgtcatcacatgagcaggccgtggtgcgcctgcaagccgcagtgcgcggcttccttgttaggcgggcggtgtggaagctacacttgctgatcagctcatcgctgcaccaactcgcagcctgcgcgcccaaccaccaggtctcgtctatactttttgaaccccctgcagaagtcgagatctggctcgaggacgagctagtcctcaagggagggggagatgtcatgggcatcatagggagcgagaggcaacagccaggctgggataaggctagagaataa

SEQ ID NO: 24851 - DNA, 270 bp, Zea mays
  Peptide Sequence Number=SeqID_68226
atgggcagaggtaggagcggtagaggtttgcctcgccacgctggcggcaagcatgagtcgggggtctcctcggatgaggcggactcctctgaatcctccgaggagtggagcggcagcaatgttgatgacaagggcgatggcaatagcggcaacgatgacggaagctatgacagtaagggcgacggcggtaagggcgacagtgacggcagtgtcggaacctcccaagaacgtttcacccgtcttgcagacattacaaatcatcggagataa

SEQ ID NO: 24852 - DNA, 513 bp, Zea mays
  Peptide Sequence Number=SeqID_68227
atgaagaccaccacaaacttgtccaactcgggcatgaataccgagttcatcaaatacgtgaagtgggcaggagcatttgtcaatccgaaagacattaccaggttatttgatgattggccggttgaacggccacaaaattaccccaccaagtgctggcaggcggcaatcgcctcggccaatgtgggaggaacaggaggtggatttggggtagattcccttccacgggagttcttcaacggccaagttgagctcggctactcgagcttgagctttttgctccttgtcccatgcaagcgaacgagattgaacaacccagtcaagtgccaaatctcggtccgcgagctgatctcgcaaatggcggacatctcttctcaactcatttatgcggtcgccatctacgacccagatagctgtcctgcggcggagttctgcttggagccgacttacttcagcttcaagatcccctataggatcattgcttccgcttctactattatcatgccttggggctag

SEQ ID NO: 24853 - DNA, 741 bp, Zea mays
  Peptide Sequence Number=SeqID_68228
atggaagaaacacacctccacgtgttcgacgcttcctgcccgcgccagagcacgctcgcgcgcgcccccgcaggcccagcgccgcgcccgagccaagccagcgccatggcccacgcccgcgcctataaaaccctcccagacttcgactgcactcttccgcgcaccctcaaacctcaccggagtctagctcgccgccgtttgcccgtgcgcagcgtgtccgcggccgcccaatccctctgccaccgtagaccggcccgtagagccattcccaaccccatccagccctcggagaagactgtgcacacctccgtgaagctccccgagcaaggaatcggagtttgcttcgccggagaggccagtccacgctcgccggagctctcaaccccgccggagtacgtggaccgggtaatccgctcaaccatccttcgattccttgtgcacacggtcgctacgttacctcgtgaagctcatcgtgccctcggattgaaccagttcgccgtggtttggccggtacactcgccgccgacgaggacacccgcctgcgcgcatggaccgggcgattctggccatccccgacgtcaagccatacctcgacgtgaccgccagagcctccccgagccaaccccacccttcgccggacctccctcgccgccggaggtagccccggatccagcacccgagcctgccctagaggacctgcctgccactgctttggaaggcaagccccggttttatgcataa

SEQ ID NO: 24854 - DNA, 1820 bp, Zea mays
  Peptide Sequence Number=SeqID_68229
atggggacatgtgcggcccccgggggaaggatgtcttcgcccgagctccgggagtcttcgccgcgaatgctggaggttaccgggggtcggtggccaaagaatctttcgatcccctgggcagagggcgaagacatgtctacgtctcgtatagctcgtggattgaagattttcccttacggacggaatattgctgctgttgtgtcggcagtgatgaacaaggatcgccaggatgttgcgcagaagcgccgggcggtcattagtctccccgatcctaggcgtgaagcgaagagagcgcgggggagcacgaaggctgtcgcccccggcggtagccagccgacgctggctgcgaaaccggccgcgcccggctccagcaaggtgccggagagcacgaaggccgtcgtcgccggcggaaccaagtctaccccgggcgaggccccgaaggtccgggaactgccttcgccggggaaacgtgttgccgacttcgacacgaatattagcgtggacgactatttcgttgggtggcgctttctgcgcaaagcggtgagatttagtcggcccgctgccgtcaaggacgaggcgggcgccatgtcccgccagctgaggggaggcgtcgcagcagctgtcgcagcagctaagtcaaatgtgtctgccgaagtcgagagacttcgggcgcagcacgcggacgccgtccgggagaagtcggctgcggagagcaaaagtcgcaggctggcggagaaggtggccgctctggaggccgagaagatggacctccggcgccagctggcggaggccaaattggcgcgggtggagggaagtcttgccagccaacgcgccgaggaatggaaggtgcggttcaacgctctgcgcggctgcgtggagaaggctgaggcctctacacgctcggaagttgagcggacgcgcgcacagctcatggactcgtaccgcgagctgggtgcgcggactgctgatttcgaggtgcccgaccgagaggcgggccttcgcttcctcgagtggctgcaagaggaattgctggtactcccgaccatcgtggagggtttcatgtcctttgcctccctcgtcacctgcgaaggggccatgaacgcgctgtctcgcgagggctgcagacactacgaggtcttcgaccaagcagacgagagctttggacgcgagatctttaaggccgaagaccctgttgtgaagcagtcagcgggggcacttttttataggatgtggggggcacatggtcgggaggctgtcagggagcgatccgaccgagcgagagagcagatggagcgtgccgaggacgttgaggacttcggaagtctagccggcgcgccgcccgaggctgcggagggcaaactggtgctgccctcggatgctggtgaaggtccatcggacgcgcccgtgcctgctgctaccggcgaagaccctgtgttggccgctgtgccgacagccgaaggcgccgaggagggttctgggcctgcgcacgcaaccgctactgaaagtgctaattttgtggcggctgcgaccgtggttgcggaaaatgactcggatgattttgtgtctaagttttttgagtctgatggttctgggagttcggtggtgtggacggaggagtcttcggatgaggatttgtattatttcgcggcgttggatgtggctgaggcggaggcttctccgcgtctgatggatactgaagttattcccggtccgagtgctgggcgtgagggggagttgcgaagtctttttgagggtgaggagctgaggataatgctgtttaactatagggagatgggtatcgtcccgaaggttgaagcaat

SEQ ID NO: 24855 - DNA, 450 bp, Zea mays
  Peptide Sequence Number=SeqID_68230
atgggcaagagcaagaagggtggtagttcttcgcatcactccggcgataagcggaagcgtgagccgactcctccctcggaggacttcggcgactcggagtactcggaggagggagttatcctccgagtccgagggctcactgacgactcccaggggatcaccgcagaggtgtggacctacatccgggccgtcgagcgcaccgggctcgagggctcggatgagtcggagtactccttagacgaggagaactcctcggactcgtccaaggagagaggcggcggcgatggcggtgacggcgacggcgacggtgatggaggcgatggtgacggcggcggtgacggcggcaagggcggtgacggcagcggcaaaggtggcagcgacgacgatagcgatggcagcaagggcagcagcaggggcagcaacaagggcagtagcaaggccagtggctag

SEQ ID NO: 24856 - DNA, 807 bp, Zea mays
  Peptide Sequence Number=SeqID_68231
atgctgctcggagagctctatggtcacttagccatacttatcgtctacaactacatgacacggcgtataggcaccttcctctatgtccttgtgcactccttccgaaacataatgttccctaaatgccagtttgaactcttcctaggtgacttgatgtcccgcaggctggatggcgaaaacgagttccttcgccttgacaaagagcggtggacaggtttcgaagaactccagataggtggtgtcctgtggtccttgagagggaccccttcctccgtgctgttgaaattgatttcccgccatttcacgcagaaagcacgtgttgtcggcggtagcgttgaccaagacagcgatagcctcgacccgagtaggagatgcactacaggaattctactgattcccgtcggccagggtcgcagacgcgtgggctcattccttcttcgttcgcacaaacggtcaaacttcgcgtcgccgtccttgcccaatcgccgcccctgctcgaccgtcgccctgcccgaccgccgcccctgctcgagcgccgccctacccgaccgccgcccctgcccgagcgccgccgtcgaggccgcccccgcccccgcccgagccgccgcctacccgagcggcgccctggccgagcaccgctgccgcttgagcgccgccgccctgcccgaggccgccccgcccgagcgccgccgccgccgcccgagtgccagcacaagctcccgagctcctcgtaccccgagcgttgtcgtccccagcccgccgtcgtccaccgtccgctcgtgccccgacgcgccggtcagccactga

SEQ ID NO: 24857 - DNA, 189 bp, Zea mays
  Peptide Sequence Number=SeqID_68232
atggtctcccattccggttatggtgggtacaagtgcggtcactgcacgacggcagtcggggtcagtgaggcattgtacgccaaggcggtgagccctggtctattgacggggaatcgatggggacggttgatgtacctccttgttctggttgacggtgtgacttggccttcatccttgccaccgggatag

SEQ ID NO: 24858 - DNA, 525 bp, Zea mays
  Peptide Sequence Number=SeqID_68233
atgcccctgcactctctctctcgaccgtcggcgcaaagaggccgcacggggacccgccctcctccatcaagtgcctggggcgcggcggtgtggttgccgcggccacctgaggaggtgcccaccaccggcgagcatggcgccaccgctcgtgtcagccttaagtacccagatccccccacactcgccgacgaggacgagcgtcgcacccctcggcggccagatccacgtcccacaagtacaccgccggtggagaagctgttggcgccgctcgcccgcacctctgtcgctgtggctgtcgtgcacgcgcagcctagggacttccgcatcatcaggcaggagtggactgtcgtccgcatccagttcgccttccttgcattcctgacgctggtgtgcgaccgccgcgtgcgcaagaagctcgcagtcacgcaaaagtgcatgaacgcgctcctcagggtccaggagcgcggacgagactgttgcttcccggatctccgtggacgtctgccacttgcaggacatccttga

SEQ ID NO: 24859 - DNA, 744 bp, Zea mays
  Peptide Sequence Number=SeqID_68234
atgtgcgtcgactccaccaggatccggaaaggaatcaccgcaaggaaacctctgcgcccttgtcctcccgtcttcggcgccccacaccatgtccgtcgcgacctccgccccacccccacctccaggtcatccagcctcatcccaatcgcgacaagccagaggagagcgcgagcaaatccccaatccgcatgccaccgcttcccctctccgtctcctccaaatccaatcgtctccaaccgtcaatccgcccgccacctccaccaccgaatcccaggcaggcatggagtgcgagctagaggagctccgttgggcggcgtcggcatcgtggagggggagcagctggggcgccccgccatccgctgcaccaccgacgacgtctacttcgcggatcgtctccaaccatcgatccgcccgccacctccaccaccgaatcccaggcaggcatggagtgcgagccagaggagctccgttgggcgacgtcggcatcgtggagagggagcagctggggcgccccgccatccgctgcaccaccgacgacgtctacttcgcggatcgtctccaaccgtcgatccgcccgccacctccaccaccgaatcccaggcaggcatggagtgcgagccagaggagctccgttgggcggcgtcggcatctaccgcttgtccgcctaccacgccgccttcgtgctcctctttgcctaccacgccgtcgccatgctcgtcttcgttggcctcctcgtcgccgtag

SEQ ID NO: 24860 - DNA, 318 bp, Zea mays
  Peptide Sequence Number=SeqID_68235
atggagaggagcagggccgacggaggtacgacccaagctcgagcagagggggagctcggcctagagctatgcggcatcaatggagaagaaactcctgcgcacagcggtggtcgagcaggagagggggcactgtttgggcgctcggatgggggagtcgagggggagaaagtttcctgctgccatgccggaaggggcgcgcccagggggaagaaaatagggagcaccgacgttgagggaggaggggcacagagcactggggcagaggtccggccatgggaggagctcggcggccatggaagcttggagctcagctcctag

SEQ ID NO: 24861 - DNA, 222 bp, Zea mays
  Peptide Sequence Number=SeqID_68236
atgaagccgtggaaggagacttccaggagttccaagactatgacgagttctaggcgtgggttagcggcaactcccagtcggctgcctgtgaaggccgcgtttatctacgtttcttttccgcactttgatttattcgtcgtcctcggagcggaggagaagtggaggtgggggctgccgcgggatctccagacccatctgaagtcgctgttggaggcgctgtag

SEQ ID NO: 24862 - DNA, 351 bp, Zea mays
  Peptide Sequence Number=SeqID_68237
atgtcttatgtagatggcccgtatcaggaggtggagtctgggaggccgccttcccctacacctcagccagagatgccccctacaccaccacagggcatcccgactgctggacgagaccctgacagagacagagacgacgatgacgtcggtggtagttcgagccacgacacggagctctcggaggagccggagctggagggatggatcgctctagctgaggtgcaggggaaggctgcctcccagactccacctcctgctgaggcgagggggaagagtcctgttgctcctgttcctggcgttggcgctcctgctcctcatgcaagcgatgatgcagtctctccaggtggctag

SEQ ID NO: 24863 - DNA, 189 bp, Zea mays
  Peptide Sequence Number=SeqID_68238
atggccctgtgcctgcggccccctcgttctgggtgcgagcgcttcgaggaatcgctgatcaagcatggcgaccaattgatcgaactcttcgagttctacgagatcgagaccctgagcatctgtttggtgaaggttgcctttggtgcaatctatgatcagatccttgttgatcttgttgtctccttgtaa

SEQ ID NO: 24864 - DNA, 2625 bp, Zea mays
  Peptide Sequence Number=SeqID_68239
atgccgtcctcttcctcttctgctgccgctacgccaccggccgacgcgtcatctgaggagacgctgagccatgtggtggtggaggagttgcgcgccggcgacacagtggaattcggggtgtcgcggatgtcctcgatccgcatgcaagacatgcagcagcttggttattttggcggcggagtggcacatgtcacgggggcggaggaggtccccgagccagaaggcgagttggttgtcttcgaggctttcttcgccgctggtcttcgacggcccgcgcatcgattcgtgggagaagtcctgcgcagattcaatgtccaggcaacgacttcgtacggcgggcagccatcggtagaagtcttcgcgaagtattattgtctgcattggcagaagaggatgatcgaaaataatggggacaagaagaggaagctaggtacggtgaagggaggacttggggtctccgatagttttgctatggagttaatggggacatgcacggcccccgggggaaggatgtcttcgcccgagctccgggagtcttcggcgcggatgctgaaggttatcgggggttggtggcctaagaacgttcctatcccccgcgcggccggtgaagacttttttacatctcgcatggttcgtgatatgagagtgtttccttatggacggaatattgctgctgttgtgtcggcagtgatggacaaggatcgtcaggaggctgagcagaagcgtcgggcagtcatcaggctgcccgaggctagaacgaagagggtgcgggggactgcgaagtctgccgcccccggcggtagccagtcgacgctgacggcaaagtcggccgcccctgggtccagcaaggtgctggaggtcgtgaaggcagccggagccggtggaaccaagtccgcctcggccggatccgcgaaggctcgagaattgccttcgccggccaggcgtgttgccgactttgccaccgatattagcgtggacgattatctcgttggatcgggcgaggggcaacttgttgttgttccgcctgcggtggcgaccgcggtgtctgtcgcggtgcctgtggcgaagggtagcgctctcagcgctggtggtgagattccggcgctcactgccgtgaaggacgaggcgggcactgtgtcccgccggctgaaggaggcgtcgcagcggctaagtcaggagagtttagctagacttcggtttttaccggtttcattgggattgtggtcttatcatgctgacgtcgtacgggaaaagtcggccgccgatagcaagtgccgcaaactggcggagaaggtgggcacgctggagggcgagaggactgaactccggcgccagctggcggaggagaggagggaggcgaatcaggccctcgccaaggcgcagtctgcgcaggcagaggccaatttggtgcgggtggagggtagcctcaccaggcagcgcgccgaggaatgggaggagcggttcaacgctctgcaggcccgtatggagagggtcgaggcgtctacacgctcggaagttgagcggacgcgtaaacagcttatggactcataccacgagctgggcgcgcggaccgctgacttcgcagtgcccgaccgagagtcgggccttcgctgccttgagtggctgcaggaggagttgcaggcgctcccgaccattgtggagggttttatgtcttttgcctccctcgtcacctgcgaaagggcgatgaacgtgctgtcccgcgaagggtgccgccactatgaggtcttcgaccgatctgatgaagattttgagcgcgagatctacaaggtcgaggacccgttggtgaagaagtccacgggggccctctttgaccggatgtggggccctcacggttgggaggtggttagggagcggtccgaccgggcgaggggccaggtggcgcgtgccgagaccgtggaggactttggatctttgaacagcgcgcggcccgaagccgagacgaacccggtggcagccgaggctgaggtcgtcccggcgccgcccccagaaaccggcgaaggctccctcgctgcccctgcggctgctgcgtccagcggcggctcgtcgccaaccgctgtgccgagggctgaggatcccccgaagacggcgatggagccggcggcggaggatcccacggcggctgggccttcgcaggttcaagattttgggcttgcgcacgcaaccgctactgctaattttgtggcggcttcgaccgtggatgctgggaatgaattggatgagtctgcttctaagttttctgattttggtgactctgggagttcggttgagtggacggaagagtcgtcagatgaggacttggattactttgcggccttggatgtggctgcagcagaggcttcgtcgcgtgctgcgggtgctgaagttgtgtctggtccgagtgctgggcgtaggcggcgaagggcggttgtgaagcgtagagtgagtgaggcggacggcggtcagcttcgtgtgggcagggctggcaagcaggaattattgtccttgccggccgttgcgagtgtaggcgagggggagctgcgaagtctttttgagggtgaggagctgaggataatgctatttaactatagggagatgggaatcattccgaaggttgaaccgatgtaa

SEQ ID NO: 24865 - DNA, 339 bp, Zea mays
  Peptide Sequence Number=SeqID_68240
atggtggtggtaatgggagctggtgccaggaagcttgtgaatgacttgtcgaagcaacagaagctgcaggttgattacccacgtattctgaagcttctccagggtctgagggggtttcctggcaatgtattgagccgtaggtcctggccgaagccctttgatcatgacctcaatgacaatttcattgggcactgtgggcgcttgtgctctcagacacaagaaccttcgtacatacgcctggaggtattcttcatggtcttgcgtgtactggaacaaagcttgagcagtgaccagcttcgtctagaacccttggaaacttgtgatcagcatgtcatttag

SEQ ID NO: 24866 - DNA, 399 bp, Zea mays
  Peptide Sequence Number=SeqID_68241
atgacgaggacgtgtgagcaggcgtgctacagccgcatgcaccagctgccagaggagttggggtcacggaagaaacgatggtgtttggtggagcagagggaaatccgatctggtgagggttctgctgattggggtcgagctggaacggctgaatccgtaggagctcgacggggaagaaggggagggcgctggcttgggcggcgtgtggatcaggggcacagcgcagccactagggtgccatggctgggcggtgaggcgccactggagaagcggagggaggagcagagtgggattgggccggccagggaaatttttggcccacgcgggttatacctctgccttggcaaagattggttcccaaatgatgcgattgcaattacaagaatgcgtgaacagtaa

SEQ ID NO: 24867 - DNA, 174 bp, Zea mays
  Peptide Sequence Number=SeqID_68242
atggtgaagcatttgagaacaagtgaccaacatgaacctgatgacgactggcatgaagatatcgaggcaacatgcgatgaaatgtttgaagcttataccaaggttgaaggaacatggagaaccacccaagaaaatagtggtaccacaagggtggaatgggactcccttggctga

SEQ ID NO: 24868 - DNA, 231 bp, Zea mays
  Peptide Sequence Number=SeqID_68243
atggcgcatttctttagcggcttcatcgatcttcttctgaagcttctggcttaccggagagagattgtctcctggtttgtgtccagtggctatagtgcagcccctggcgctgttgtcttcttcggcggcatgacgaaggttgatgctttgccgaaggttgtggaagttagtacactggaggtgggcgccaatgttggtcacttgttctcaaatgctatagatcaagaataa

SEQ ID NO: 24869 - DNA, 483 bp, Zea mays
  Peptide Sequence Number=SeqID_68244
atggggaagcctggcccatcactcctcatgctcctcctctgccaagtgaccgcagttgtacccaccataaccggaatgggagaccacatctcaggtcgcgtgaggagggcaatctgcgggcaggttcactcagtaaccgtggaagtaaatagggcggcgcggcttaccggcggcgagggaggtccggtgaagggtggggttagctccgggaagtccttgcggtcacgtcgaggtacggctcatcgacgaagatgggcaaaatcggtcgggccacgtgcgcagacggtcgggctcgtcggcggcgtgtgctccagcctgctcacggcagtagggttcaatccaaaggcacaggaagcttcatggggtgctaagggatctacccgtgcaaggaatcgaagaaagactcaccgtggagctcggtctacgtacgccggcgatctggtgaagtccgtcgacgttgatctggtgtctccggcgaggtag

SEQ ID NO: 24870 - DNA, 624 bp, Zea mays
  Peptide Sequence Number=SeqID_68245
atgaccttggagcctcatcccttgcagccaggctggcgttcgttggactccgagtctctcggataccgggctgaggacactattgaggccattgctctccacagactgacgaccttttgtggctttcaccccttggagttgtccactcaacccattggtttgttccccactgaaaaggagggcgacccaatgtggaaggatcgagtggagcacaccaaggatgtgtgggctctttacccagggcagactgctcacctgacggtgcgatggatgaatgccctgtacagtctgcaagcggtgcgaggagaggcaatgtctcagctaatgggcttggtggaggctaccaagatcaccctggataacagggaggaccttgtggtagacctgtccactgagctggtggagaaagacctccaggtggagcagatggccacccagatccaagagcttgaggagctagtaggagccagggagaacaccatcgaggagattcaggacatggaggctgacgaggatgttgacatcgagggaggagtagagccggagcctgcatccagcctggacactgctggctcagggagactaccttcccccgagtcaagcgttgcctcgtttgctcattag

SEQ ID NO: 24871 - DNA, 243 bp, Zea mays
  Peptide Sequence Number=SeqID_68246
atgagcaggccggagcacacgccgccgatgagcccaatcgtctgcgcacgtggcccaactgattccggccatctccgtcgacgagtcgtacctcgacgtgaccgcaaggacttcccggagctaaccccacccttcaccggacctcccttaccgccggaggtagcccaggagccagcaccagagcctgccatcgaggatctacctgccccagctttggaaggcaagccccggttttatgcataa

SEQ ID NO: 24872 - DNA, 852 bp, Zea mays
  Peptide Sequence Number=SeqID_68247
atggaagcatccgagatacgggagattgtcccacgtaccttggtgaagcaggaaatgaacgctcggagggtctccccgggctcctgcctcactgcatggaggtctcttggtccatctggagggacccgcacatctccttctgcgtgtctgcggttgagcttcgttcgccgatctccagtcggggcagtcctcaccgagggtgtgcgctccggggcagatgcttcgtgccgacgccaggacgaacgaggcttgggccttaccgagctagagtgcgccacgccaaggaggcggtctacgtcgtcgcgccactgcctcatagcccctggcgaagccgtggggctgggcaagtggcgcaacaattctctggccgcagagtgggctcaggcgggggactcccctgacggagtccgggacgcccaccctggcgtgcgccgccgtgcagggcgcatggctgcagcaccaagcgtcggatggctagagctctgcagcatagaagatgcagcttcctcttccatgcagaaaccttcagagggacataaagaatatagggaagcttcttgtggaagagaagatgggtgcagtgctccgatcggaaccggcgcactgtccgccaacagactggtcaagcgcgccgtctactggacgaccctgacgccgtctgccagtggattgcacaaggcgcatttaatgtcgagagggcttgtcacctgtcagcgtggtggcaggcggcgcgtcccttccgcaataaatgctgaggtcgagcggctgcatgggccttacgtcaggctcgacccattggcttatgtcacgggcctcaagccaaacggcagcagcagggctacgcctgggtag

SEQ ID NO: 24873 - DNA, 855 bp, Zea mays
  Peptide Sequence Number=SeqID_68248
atggagaaccaccgcaacttcagggacttcttatcccaaggttgctcttcatcgacgtccaggggccgcactggtcatgaagctcccgaggacgacgactttggcaccttctcgcagtcgccgtttgctctgccaccacgcatcaatgtcccagcacctcgcagccgcattgaagctcttgatctgaactcccagtcccagggtaccgattttccatatctctcatcctaccaagatgttctccagtcaggtgatggtggatccgacctaggtttgcctcctcttggtcgtggtagatcagcgcgcacactatttcaatccaccagaaccatttcagctcctatttctcatgcccgaggtccaattcgaggttgccgtggagttagggggagaggcactagtagtcgtggtggaggtcgatctgctatttctgcacctattgaccctgtcctcattgaagattttggagatgaaccaaccaatgaaatggattctcgagcttctgtggggtatctagattacgtccctaaaaacacgcttaatcctaagaccaccatcaagacacgcttaatgctgaccgaggtctcctctccccaaaatcgttctgcctcagcccgtctcgggaaaggaagacaactccgaagcaggactcagccgaagtcccttggggacaggagcattcaatgcgtataccgacaccatgtagagttgcaagtgaacaagagcaacaagaccgtggtcctgtcaaacttcaccaactacgatgacgcatgcggcgactgttcccgcacgccgcctgccaactcccgatgggatgcagatacgtcaagagtgcaggctgaccctcgggcgtaa

SEQ ID NO: 24874 - DNA, 402 bp, Zea mays
  Peptide Sequence Number=SeqID_68249
atggatagcggtcggatggtgcaccagcagctcgtcacgcgagcgggccgaggcacgggctggatcgacggaggggaccgagggagtaggccgcacacgccgctagtagacgcaggcgggatcggtggttggagaggtgaggccgcgtgtggcatggatggaggcaacggggccacgtgcggcataggcaaaggcgacgtggccacacttggtgcagagggcgggaacgagaccacgcacgacgcagaagaggtcgctaggaccaagggcaggggaagagaaggcacagccaaaaacgcggaggtgcatataggaacgggcgatgccgaagagggcgaagaaaggagtgggatgactgacctccttggagggcaggcggttgagatgggtgatagtatttag

SEQ ID NO: 24875 - DNA, 123 bp, Zea mays
  Peptide Sequence Number=SeqID_68250
atgggctacacagagatcgacatccgcccctctgggagcggcaagggtgttctggacaaagaaagcttgtaccttaaaacaggaggatacaagaagctggagtggttgtctaaaggcttttga

SEQ ID NO: 24876 - DNA, 213 bp, Zea mays
  Peptide Sequence Number=SeqID_68251
atgccggtgatgatagaaaagggggaggagttcgtcttcgtcactggtgctggtcaggagacgacgctggtgacctggagtcctggagacgccagaagtggatgtggagccggcgcaggtggactggaggatccgccgatgaatacactggagactggacggccgccgctggacgatgggcaggggcacaggcaggtcttgagttatggctag

SEQ ID NO: 24877 - DNA, 564 bp, Zea mays
  Peptide Sequence Number=SeqID_68252
atgttcggcgccctccaagggcaacatggcgctttccccccttcctccttgtggaaaggcgacgaaggggctcacttcaccctttcgctgaccgacctaacaggaaaacagcgccgctcgctccgctccgactgctgtgccacccaccagggtgaggctgacaacagccaagttcagcctcaagcgcaacaggaagctccgcctcgcccgaccctaggcctcagcctcgggaggaggtctccgcctcacccgaccccagggctcagcctcaacctcggccttgagaggaatcgcgtcctcacccgaccccggtctcggcctcaggagaagctacgggggaacaagaccgggctcaagcacttctccgacggccacgttatcgcctacacagggctcaagcacttctccgacagccacgttggcatggccttcatgcggagggtcgcgcgggagaacgagctaacgaacagggccggcggaggtcaccggtgcctggatctcgctcccgagagggaccccgtcggggaggagagatcctgtaacaccatgaatttgggggtataa

SEQ ID NO: 24878 - DNA, 1341 bp, Zea mays
  Peptide Sequence Number=SeqID_68253
atggggagcacccgcgttgctttcgtcttgctgctgttggaggagcgcaacttcgcggaggttggcacccttcagccgtcgctcggcttcaaggattttcatcaggcagcccggctgcattccctcactaatgcttcaaggatcttcatcatccttgctggggaggagggcgaggcgaggcggggcctgccttcgcgtgggttggcgtcccgcttcttcctccgacatctgggggtggaaaccatcctccagctctacgaaggaggcgtcctccagccatgtgagggaaggcgaactgctgctgcccggccagggtgcagcattccgtcctctgtccgggtgactctggccggccgcaccggagggtctcacaacatgtcgtacgccacgagggcggtactcgtgttctgggatggtcccgttcttgtttccgtggcgaggacgagagtgaggacctgccggggcgctttggggcggccgacgctcgctggtgcggtgttggtgggcaggtggacgccgccgtcggtgctgaggtggtggcagccggagaaggtttctccgccgacgagatcgtcggcgtcacctgcgctccgagcctccgactctttggctttaatggctggttctcgtcccccgcgaggggacacgaacgagagccttccagcggtagcgttcgccctggggccatcgctgctactgcagaggtcgccggcgagccacccggagtttgtcgtcccgcaggccctccgatgtgggggttgttcgtacccgcgggagtggaactggagttccgtttgtaatggcaccttgagtgccgccggagccgggggcagcggtgtcagcatggacagaggcggagtaggctcgaaaaggggcttcgtcggccgaggagcaggtggcttcccaggccgaggaggcgcggtgctgacatcttccttcgaggtggagatccttccgcccgtgtcgccgtccgaggccgggccagatcccgccgaaggtggaaacaacgccgagggtgctgctgttccctctgtcgatgacttgtttttcggtagcagaatcacttatccgagcgagagttacttatcacagaaggtgatgagtgaggattctgttatcgatatagtcgagaaggcacgaaaactcgttctggcagaaaagttttcgggcattaagacttgttcggtcagcagaatcgcttatccgagcgtgagttacttatcacagaaggtgatgagtgaggatcccgctatcgaagcagttgaaaagcacgaaagatgttttggcagaaagactttttccgaggaaaattttgacgcagagggggttccccccttctag

SEQ ID NO: 24879 - DNA, 351 bp, Zea mays
  Peptide Sequence Number=SeqID_68254
atgactctgggtacatccgatacatggccgaggctcgggctacgctcccgaggtaccctaggacatttccgagaccagcaggagcgattctgtaacgaaatcccatcagaggggggcatcgagccctcggaccctatcaaatgggaccgggtccggcaaatcacctgcagggcagggctgacaacagctaagtccagcctcaggcgcaacaggaagctccgcctcgcccaaccttgggccttggtctcagaaggaggtctccgcctcgcccgacctcagggtttggcccccgcttcggcctcggaaggtggactccgcctcgcccgaccccagggctcggcctcaacctag

SEQ ID NO: 24880 - DNA, 399 bp, Zea mays
  Peptide Sequence Number=SeqID_68255
atgctgctcttccgccacggggggaagacgtcatcgattctgccgccgccgggtgggctgacggccaccattgtcgctgtcgcgcggcggaggaaggagtaccatgtcgtagctgccatagagggacatgaactcgagactcccgaaatggagcagcgtcctaggctgaagaggttactggagactacccatctggagctcgacgggaagctattcgtcaacacgcagcaggcccctacctggcgcgccaactgtcggcgttttgaccctagggggtccctggaccgacgaggggctgagaaccaccgtcgtcatgggcgcacgcagggtgccatcattacttgtttatcggggcgagccagatgggacgccggtcttgttccccgtagcctgagctag

SEQ ID NO: 24881 - DNA, 471 bp, Zea mays
  Peptide Sequence Number=SeqID_68256
atgggtaattcgcaaatctcaaattgggttgaaagaaaggggagccttttaaagggtaagttcaaggaaaacagcgccgcctaccccgctccgactgctgtgccacccgtcagggcagggctgacaacagttaagtccagcctcaggcgcaacaggaagctccgcctcgcccgaccttgggcctcggtctcagaaggaggtctctgcctcgcccgacctcagggtcggctcccgcttcggcctcgaaaggtggactccgcctcgcccgaccccagggctcgacctcaacctcgaccttggaggatggtctccgcctcgcccgaccccagggccgggcctcaacctcgacctcgggcggaatcgcgtcctcgcccgaccccggcctcggccttaggaggattctccgcctcgcccgaccttgggctcggaccgaccacaccacagggggcatcatcattaccctacccctag

SEQ ID NO: 24882 - DNA, 744 bp, Zea mays
  Peptide Sequence Number=SeqID_68257
atggctttagttgcagactgcagtgcttatgaattgcagatggaactcccagatgaaagagtacaagtagatgcactggagagacacttactagctggtttatcttcaaacgactatgatggaagttttgaggatgaggtcctctatgatgcatcatttgcagaaatggaagataattttgtcaagtatcaaattgctcagtggactttattatctctattactaatcgtagcttggggagtaggtgtgctcatgctactttacttacctattggggtatatgtatgtcgaagagactttcgctcgaggaagctgtacttgacaccgcatgctgttatttacaagtttccaaaaaaggagaaatattggatcctcccttcaatttccgatgttgttgttgagcaagattatctccaatccatttttggtgtatattcgatcaggattgagaatattagtgtcagaaagcctcctagttgtgatgtaaaaattactggggttgctcatccacatgatttcaggaaggccgttgtagtccatcttttgaacactaggaatcaaaaaacatcatcggatgaccaacagagcacaaatttgaattatgcagctagttcttcggaggcttctcttggagatttgatgctagagaagcttgatgaagttgaaatctctgtaaaggtagtgccactgattgtgaaggaaaatataaaagcttcagaaggcataataacttcagatgcataa

SEQ ID NO: 24883 - DNA, 654 bp, Zea mays
  Peptide Sequence Number=SeqID_68258
atgggggcactagggccgccagagaggggtcggcgatggaggagccgtggaggtggcgctcgacctccgccagctaggaggcaagggcatccgccgcgcagggagcacaagcacaagagtggtggggctcagcgcggtcaggagatccggccgcaagagaggcgcatccgccatgaaggaccacacagtgaagggaaagaggagcgggttgtaggtggccacggactggaggacatcggcacgctagccagggggctattggttgccggcgacacgggggctatagagggaagaggtgactgcccaagcaatggtgttgcagaggagggtgggggccacgccaccgtgggcaagggcgggaggcgcgacaatgcaagggagggtgtgtggaggggttgtgccgctgctggtgagggcagggacagtggttgcgtccacgccaccgaagggagggcaggggcggggacaacaccactggggagaacgagggcggagccgcggtggcgtgctagtgatagcgggggcagtgtccgcgcgacagctgagggcgggcgcgatgccgacgaagatggatgtcacctcctcgttcgtgagcaggggtgccgatgcaagagggaaagacgttgggggaggttggaaaagctgggaggatga

SEQ ID NO: 24884 - DNA, 211 bp, Zea mays
  Peptide Sequence Number=SeqID_68259
atgccggacttggacggaggagcaggcggccacgtcttggagccggtggaggatgacagcgcgccgccggcctgcctccgcggcctctgcacctgcttcgacgtggacgacgacaaggctaacaaccacgagcaacagccgatgatggccgccgacgacgaccacacggcaagcaccatcatcgcccaccgcaccgtggagatgagcaccg

SEQ ID NO: 24885 - DNA, 913 bp, Zea mays
  Peptide Sequence Number=SeqID_68260
gcgcgaccgcggtgttgatgctgcacggcttcccggagctgtggtacacctgcgccaccagatgcgggcgctggccgcgaccgggtacagaaccgaggcgccggacctgcgcgggtacggcggctccgacgcgccgccggcgcggggcgacgacgacgacgacgatccgaccgcgcagtacaccgcgctgcacgtggtgggggacctggtggcgctcctcgacgcgctcggcgagagccaggtgttcgtggcggcgcacgactggggcgcgctcgtggcctggagcctctgcctgttccggcccgaccgggtgcgcgcgctcgtcgcgctcagcgtcgcctacacgccccgcagcgccgcgcggaagcccgtcgacggcctccgggcgctcttcggcgacgactactacatctgccggatccaggagcccggggaaatagaagcagaatttgcacgccttggcactgagttggtgctcaagaaattctttagttatcgctcccctggagctttgttcttcccaaagagtggttggggctcaccagatgatgaagtacctttaccgagctgggtaacagaggaggaccttaaatactacaccagcatgtttgagaagaccggcttcactgggggactcaactactaccgtgccctaaataagacatgggagctcacatcaccatggactttagctaagataaatgtacctgttaagttcatcattggagatttggatttgacataccataatcctggcatacaagatttcattcacaagggtggcttcaagaagttcgttccacttctcgacgatgatattattgtcatgaaagatgttgggcattttatcaatgaagaaaaaccaaatgaagttagtgagcacataatcaacttcataaagaaatttggttga

SEQ ID NO: 24886 - DNA, 171 bp, Zea mays
  Peptide Sequence Number=SeqID_68261
atgaggaagcttaatgaagaatatagcttagatcgtaggatgaagtaccagtggggattgtcgaggagctgccaggaattctcgtggaagagggtgaacccgaagctgaagctcaggagtgtcctgatcaccgccccagttccttcaagaaatgcgagccccgacatctaa

SEQ ID NO: 24887 - DNA, 945 bp, Zea mays
  Peptide Sequence Number=SeqID_68262
atgggggcccaggcccacgcgtcatgcaaccggcgcgccgaatgcttcgtgcatgcaactgcaccgccacttgcgccactaccgcgcctcctcgactgcggaaccaataccgcgactcgaggcgacccagcgcgcgacccagcagcgccagcctggcgcgacggtcaatgcggccaaaaatgggccggcagtaatggcgatggcaggagcagcggccccgtcgtcagccaagctcacgtcccatccgggggcagcaagagaaccctctctcacggcgtgaagacaacgcgcccgtgctccgtccctcgaacggctcgcgcacgcgcaacggccgccccgccaaccactcgccccgtcgcattaactccatggcgggacaggcggcacctctggcaggagaagcgggcgacgcttcgccctcgccataatgaccgcgtcaaaaaagaagggttcgacagccgcctcagatcgcgtgggctctacacccactactggtcagaggttcgaaggccggcccctcggaagggttccacggccgcctcaggctactcgggctccgcgcccattactgatcaggggtttgaaggctggccccccgaagggtttcacagccgcctcagatgccgagcgagggatgaccatgggtacgttcgatacataaccaaggctcgggctgcgctcccgagctcaccggagacaccatgttcggcgcccatcgagggcaacatggcgctttcccccctcctccttgcggaaaggcgacgcaggggcgtatgtaaaaaagccgagtctgtccctgatcgccctctcaccctgtgcagaggctcgggggctgctctcgcaaacccggctccggccgaaccgttgacagcgtcaacataccagcccgagaacttgggacccgaccgtacactcgggctacggccagctcgcatgagggaatga

SEQ ID NO: 24888 - DNA, 651 bp, Zea mays
  Peptide Sequence Number=SeqID_68263
atgtcttcgcgcttccttatgcatcgcgtctttccaccttccaagcccccggatgggggatacccgccgtctttccgcctcatcgttggaggaacgcaactccgcgggagttggtacctttcagccatcgtttggcttcaaggattttcatcatgcaacccggctgcacccccccgccggcggtcacccaagacggtgacctccagtttgatggtgggggaaagcgagccgggctgcggcctctgcccctccctcagcctcaaggattttcatcaccagggctggggaggggacgtgcctggctctcggacccgagtggctccggggccgctcccggcgccggcttccgccacggcagctggaagaggttcttccgccgacgagatagccagggccgcccacggaccgacctccaactctacggccgtctgcccgtccttgcctcacgagtttgggcacgggcgggggcctcctggcagcggcatccgccctaaggtcatcactgccgctgttcggacccccggagcagaagtcgtcgtcgtcgccgctgccggagcgggcgacggcacgtcgttcgtcggtcttctgttgctccgcagccccccccccccatcgagtggggttgttcgtacctgcggaggtggaacctga

SEQ ID NO: 24889 - DNA, 372 bp, Zea mays
  Peptide Sequence Number=SeqID_68264
atggcgtacgacggttctagcccaaccaaagtgctccggcgagcaattgccggtagacacgcgatgcacacaccctaccgcatggtcctatcgattccaggggtaaaggggagtcaaccagaggattacttacccaaggttgggaagttggtggagctgcccgcgtcacgcagcgaccgcacggtggagagacaaccccagcaagaaattcgtcctcccaggtcgctcagccgcccggggatgtcttctgcaatgcgccccgagtgccgcgagctccgggttgttagcgtgcggggagaggaaggaagatcccacaatgttgtggcagctgaccctggcgcggagaccccacatggcagcgacatcggctga

SEQ ID NO: 24890 - DNA, 360 bp, Zea mays
  Peptide Sequence Number=SeqID_68265
atgacccagagaagagccctagttgaccaaggcctgggccaagggccaaggcacccggctgggctcgaaacaaggggagttttgtatcattgcattaagtcagcatgcaaggctgcagcagatcactgtagaaagaaggggaaaagcattacgaagctagctatgcagtacagcttaatgaacaatgaaatctcgacagttcttgttggaatgaactctttggaacaggtggaggagaatgtggcggctgcactggagttgtcaacatcaggcatcgatgaagaacttatgcgtgaagttgaagcaattctcgagcctgtgaagaatctgacatggcctagcggcatccaacaagcctga

SEQ ID NO: 24891 - DNA, 1239 bp, Zea mays
  Peptide Sequence Number=SeqID_68266
atgatccgcgagttcctggccgtggcggcacgcgcggcgctggagtgggcgctggcgtcgctgctgctcgccaacggcgccgcgttctgcctcatcgccgccgccgccgcgcgcctccgcctcggcccgccgtgcatcgtctgcgcccgcgtccaccgtctgctctgctcctcctcctcctctgctgctgccagcgccaccggcgtggcacgcgacgctctccgcctcctcctctgcgacgcccacctcgccgccgtcgctccggatcgctgcgacggggatggtggtgtctcggagacggatgctgcgatggcggacgatgatccgaacacgttttcaggcatggagactcaccgcgacgtctccatcggcagcgagatatgcgagcaggaggaagacggcatcaaacaccacgccggcgaccgcatcgcaagaaccaccagcgccggcgacggttgcggcccgctcgtatctctcttcgagctggcgccgatcgtgtcgtcgcgaccacgggaggacgacgattccatagaccagctggcgaggacgatgccacagtcgctgaccctgaccgtggacggtgacgagagcctgacactcggggagctggtcaccgcgttcagggcacagaggagggaactggacgcgctgcgcgccgagctcgccgccgagcggcggctgaaggcggaggtcgaggagtaccagcgtcagctggaggagcagggcgagctcgaccgggaggctgcgcggctggccatgcagctcgtgtacgagagcgaggcggagaagcacggcctgcagcggcggcagctcgacgcgtgcggggccagggcgcagctgcagctgcagctgcagctctgccagtccgaccccgcggccgtggaggacgccggcggaggctgcagtggcgatggcaacaactaccagtcgctcgtggacttcttgccggggtcggtgcactcctcctcgccggacctggccaacctccttagactctacactgaatctggccatgccggccgtcgtccgggtccggggcacggttacgacgtgccggccattgcggtgggtgaggaggcagaggagggggaagaggccgtcgctgtcaccgtcactgtcacagctgccactgaatccatcgggcgtgttgatgctacatctgccgccactgtttctgaatctttacaagaaagctccaatactttccacgtcgaaacgacagcaacggaagccgcttaa

SEQ ID NO: 24892 - DNA, 540 bp, Zea mays
  Peptide Sequence Number=SeqID_68267
atggctcccttggccgttgtggatgtcccgcccgtcgatgcggcgatcgctcctccaatgacaggaacgctgacctcactagtcgctcaagagatgatgggagcgactgtccctgacgtggccctcctcgagctgtcggtacctatgttcgcctcggaggaggtctcgaaggctggggtggttttggaagaggtggcgtttgtcacttcaccggggatagaggtggaggagtggcagtgcatcaagtcggcctcgtccctagccgacataagcttggagactatcgagcgcatgctcgatagcttcggggaggcagtttcaattgcccgtgtgtcgatgatgcaagattttataccctatggtcagaatgccaagaaggcgatagaagaggtgaaggcggcgatagagggtaaggcccgcgagctctcgctcgcccgtggcagcgccattgctgcgaaggttcaggcggagacctcactcttgaagcgcagcgccgagctccaggagcttcaaatggtcattggcaagggttcaaagtag

SEQ ID NO: 24893 - DNA, 91 bp, Zea mays
  Peptide Sequence Number=SeqID_68268
atgacctctcttctgccacaacgcctctcgctcggcgccaagatctgtggcgccgagctacgaggccgcgccgccgccacgtcagcgccag

SEQ ID NO: 24894 - DNA, 171 bp, Zea mays
  Peptide Sequence Number=SeqID_68269
atgccgctgcactacgcggcgaaaggtttcgcaactccgaggaccgcggggcatcggccatggcctcgccggcgagcagtgctgccatggggtgccggtgcgtctctgaggctctggccggaggagggagagaaccttgaccgtcgattcccaatggacgatagggattag

SEQ ID NO: 24895 - DNA, 660 bp, Zea mays
  Peptide Sequence Number=SeqID_68270
atgtcgtcgattccgccgccggcgggcgggttgtcggccgccattgtcgttgtcgcgcggcggtggaaggagtatcatgtcgtagctgccgtcggaggacatgaactcaaggctcccgaaacggagcaccgtcccgggtcggagaggtcgctggagactgcccatctggagcttgacgggaagctgttcgtcaacacgcagcaggcccctacctggcgcgccaactgtcggcgtttcgagaccggggggtccctaagccgacgagttgggcgacatggaggctcctccgaatccgaggtcgagtctgtcttccctggccgaggccgagtccgagcccctgggtcgggcgaggcggaggtcgttcggcagaggccagggcggagtctgagccctggggtcgggcgaagcggagttcgtcgtcttctagggctgagcccgagtccgagccctagggtcgggcggagcggagttcgtcgtcttctggggctgagcccgagtccgagccctggggtcgggcggagcggagttcgccgtcttccgggacttagcccgagtccgagccctgggtcgggcggagcggagttcgccgtcttccgggacttagcccgagtccgagccctgggtcaggcggagcggagttcgccgtcttccgggacttag

SEQ ID NO: 24896 - DNA, 432 bp, Zea mays
  Peptide Sequence Number=SeqID_68271
atgactattctggaaagtccaagcgtcggcgaaaaaaaatgttcaatatttatgcgaggcaatgaatccctccccgcttcttcgcttatggttcgccgtctcgcgcacccacttcctatgccgccgccaatcacttgctcagtttcgtgcccatcctcgaagtcgcctccgcctgcgatgtatccccaaggcccggatggggaacgagatgtctcgcattgccttgtgcctgccactctcgccggcaacgacacgcgcgaggcgaatgaggtcaccgccacggaggttcatgtggaggaagacaccgcgcggagggacgctgccctcgtcatgcagactacacccaatatggacgagtctcgcaccgagggagatccggacccaactggaagtggaagcggcatcttggggccaagcgccgccgaaagatag

SEQ ID NO: 24897 - DNA, 369 bp, Zea mays
  Peptide Sequence Number=SeqID_68272
atggatactagtatgctaggtcgagtagctgctatgctaaatcaggatctcggtagaagtcgagtgatttttctagcactcgtgcgagtcgaaactctagccaccgcacatgttgagactggatcgaaactccgtgaagaccaccgacagaagccccttggtgaagacgtcggcgaactgggaggtggtcgggacgtgaagaacacgaacagctccacaagctacccgttcgcggacgaagtggaggtcgatttcgacatgcttcgtgcgctggtgttggacggggttggtggagaggtaggcggcgctgacgttgttgcagaaaaccagggtgctcgtggtcagcggattgtggagctcttggagtag

SEQ ID NO: 24898 - DNA, 240 bp, Zea mays
  Peptide Sequence Number=SeqID_68273
atggagagggatgtcttgagccgagttgagttgatgctgagaggtgtcattgtcaatgatggtgccccttgggcttattctgcatggaatcttccccctactagacctttctctgagtttgtgtctgaccatcctcagtgtagagaatgcagtagttctagtagcagagcacgactgtgtgctgaggaggttgagataataatttccactcatcggaatttgtcggttgaggagaagtag

SEQ ID NO: 24899 - DNA, 555 bp, Zea mays
  Peptide Sequence Number=SeqID_68274
atgaatgaagattttgaagttgctaaagcaaagcaagaaataagtgaatggaaaagctcaagattgcaaaagaatgtggatgagcttcgtgaatccaaggagagatgttatgaaaaatccttggattgcgccaagaagctgaaagacagttttgcaaaggtgggtgcatactcatcgaagcaaaatttattcgaggcgatcccgaaggggtcattcaatggatcggcgaagaagctgaagcttttgaagaaatacttagcgacaatgtggatttttgtgccttcaccggacgaccgcgagatagccgacgaagcaataaagaaaaatgaaaaagaatcccatgatgcccgagtagaagctaaggaagctgaagaagctgccgaacgtgcattaattacagccggcctttcgccacctccggagccattcaatactgaggctgaccccatcataaaagaggctttggatgtgatgaaggtcgccaatacaatcatagacgaagttgttgacaagctactaaatgaagctgccaagagaatactcaaagaagactag

SEQ ID NO: 24900 - DNA, 342 bp, Zea mays
  Peptide Sequence Number=SeqID_68275
atgacgaaggttgatgctttgccgaaggttgtggaagtgagtacacaggaggccttagcgtgccttaagccccccatggccgaaatgcctcgctggagctcctccggtccacctgaggccttccctccgccgttctcccctctctgcccacggattcacgacctcttccccgccactgagtttgccatggcgtccttttcctctctgcccaacttcggcgaccccggagccaccctagctcgcgcctgcctcaactccggcgacctcaccgccgtggagaggagcagcgccaccctcagccgtttacccctccccgatctgatcccctcagtccgatcctga

SEQ ID NO: 24901 - DNA, 426 bp, Zea mays
  Peptide Sequence Number=SeqID_68276
atgaagaaagtggcgcctgaggtggagttggcccagctaaagagggaagtggcgtctgaggtggaggccacccatcgccgggaccgatgtcctgacaacgacctggacctcgaggtgaccatggtatcgatccggggagggagagccgcgccgcctgtaaaggccacgatcttcgtcgactcggccgccaccaccgggagcaccgccgtcacgtccgcgctcgtctgggctgttgcctcgcgcacccttgcccggagcatcatcaacacatctgcgcctgtctgggctgctgccgcgcgcagcccaatggggatgtgcggctgcccactatgccgccagctcttgcgctacctccctcgtcagcttgagctcatcgttggtgctgctatcaatagaagcagagctgccgacgctgatgctgcgtag

SEQ ID NO: 24902 - DNA, 1062 bp, Zea mays
  Peptide Sequence Number=SeqID_68277
atgacctcacctacccccgccagtggaggagacactcgtttcagctctgacttcctttctcacgatggttttccttccatcttgtgggaagtgcttaactccgccggttaccctacgccccctttgtacacggtgcagctgtacgaggagcatcgggtaccatgttgccaagtctggctgactctggaggctcatccccttcagccgggttggcgttctcttgactctgagacgattggattcaggacggacgacaccactgaagcggcaactatgaagaccgtgacgactttatgtggctaccatcccctagagatggtgatgcaccccttgggactcttccctgctgagaagaaggatgaccccatgtggtgcaaccgtgtgagccatgtgaaggacgtgtgggcgatgtatcctgacttggttgggagggtcactgttcagtgcatgagtgcgatgtaccaccttcaggccctgcagagcgacactatggcacatcttgctaacctcgctcaaaccaccaagctcaccctcgacagccgagaagactttgtggtcgacttgtccaccgagctagtagagaaggacctacagcaggagctcgagaaagctaatgaccacctagacatgcatcacctggagatggaggccaatgaagtcagaagcgagggagaagaggctcctgaggagttaggaccagcccctagtgccaatgtgactgcctccgagatgcccccttcacccgcatctagtgtcgcttccactactcaggctaggcagcgtcgcgggcaaaacgagcaagttcccccgccacctcctccagctcccacagtgcaggagctgatggcccagcagaacgagattctacgacagctcttgcagcgccagccccaccctcagcagtatggtggaggccagctgcagcgacctccgacagcggcaacttaccaggagttcctgactggaattcttgatcgcaagttgaatgaatttctggcactcaatcaaggatcccgcacggtattgcagtatgctcaggccttcaacgacctatgccagtga

SEQ ID NO: 24903 - DNA, 369 bp, Zea mays
  Peptide Sequence Number=SeqID_68278
atggcccgcgcccgcgcctatataacgcccagtgaccttaaccgtaccattccgcgcacgctcaacctcaccggagctcaaactcaccggcgtgtccgcggccacccgagcccctgccactgtagaccggccaaccaagcccttcccaaccccgtccgaccctcggagaagactgagcacacctcggtgaagctccccgagcgaggaatcgaagtctgcttcgccggagaggccagtccacggtcaccggactccatccgaccgccggcgagcgtagaccgggtaagccactacgccatttttcgattcaatgcacagatagcctctacatcaccccgtgaagctcatcgtgccaatggattgaactag

SEQ ID NO: 24904 - DNA, 336 bp, Zea mays
  Peptide Sequence Number=SeqID_68279
atggtctatggacttggatccagggaggatgccatgtccatgagacgggaaaagctatggtgggtacaagtgcggtcactgcacggcggcagccagggtcagtggagccttgtatgccaaggcggtacgcttcaggatatggttgatggtgtaacttggcctaccaccctgccaccgggttggacggtcgagtgggatgctgctccggcaggagaggagcaggaggagaagtgggctaggccttgccctattcctcgctttggacgatatcgattatccgctgcagtttattttgtgaactcatatcagctacttgaaaaactccgacttatttaa

SEQ ID NO: 24905 - DNA, 270 bp, Zea mays
  Peptide Sequence Number=SeqID_68280
atggcgacctggaagaaagcaggcgcggctgggaatggagggcggccagtgctgctgccaggagctgctcgcgtgagggagacgtcaaaaggggagaaggaaactatggtggagaattttgagcatggggaggatgagatcggcaccaggaatggtggcttcacgaaggggataaggcagagatggtttaggcggtggaaaggagaaaggaaattcagaattttgctcttttctccaatttttaatcaaaacaaatacgttctgacctag

SEQ ID NO: 24906 - DNA, 363 bp, Zea mays
  Peptide Sequence Number=SeqID_68281
atgtgctggagggaggtggtcgcgctagacattgtggcgttgctggctagagtgggcgcatctgcatcgagaggaggaggggcagcgacaggcagtggccaagctggcgcgaccatggagaatctgaggggctgtgggcgacgcgactgcgccagcagaagcaagcgggtccgcgccgatggtaaacaagctgggtggagcggcgacattagcggcgggggaggtgccagtggccatagccgcttaagagggactcgttatgggagggaaccgcgagagcaggggccgacagccaagtggcgacggatgggggataagaggagcaaggggttgatggctgagggtgggagggaagatatgtag

SEQ ID NO: 24907 - DNA, 1854 bp, Zea mays
  Peptide Sequence Number=SeqID_68282
atgaagtgctggccatcgtggtacactgcaagtcaagtagctatcacgcatcatcaaatcatcgtggtagtggggaacatcgcggccgtatcatcgtcgctgcacgtcggcaaggcggggccgatggtccacaccggcgcgtgcatcgctgccatcttcgggcagggaggctcccgcaagtacggcctcacctgccgctggctgcgctacttcaaaaacgaccgcgaccggcgcgacctggtgaccatcggcgccggcgcgggggtggcggcggcgttccgcgcgcctgtcggcggcgtgctgttcgcgctcgagtcgctgtcgtcgtggtggcgcagcgcgctcatctggcggtcgttctttacgacggcagtggtggcggtggtgctgcgcctcttcatcgagctgtgcgggaccgggcgctgcggcatgttcggccggggcggtctcatcatgtacgatgtcagcaccgtgttcgacgacctcatgacctaccacctcaaggacatccccaccgtcatcctcatcggcgtcaccggcgccctgctcggcggactctacaacttcctcatgataaaggttctccgactctacaacgccatcaacgagagaggtggagcgcacaagctgctgttagcggccaccgtctccatcgtgacgtcgtgctgcgtcttcggcctgccatggctggcgccgtgccggccgtgccccacgacgggtccactttcgtcgccggacgggacctgccacgcgctgaaccgtttccggcggttccactgcccaaagggccactacaacgatctcgccagcctgttcctcaacatcaacgacgacgcgatccgcaacctctactccaccggcaccaacgacgtgtaccacccggtttccatggtcatcttcttcgtggcgtcctacgcgctcggcgtgctcagttacggcgttgtggcgccgtccgggcttttcgtccccatcatcctcacgggcgccacctacggccgcctcgtggcaatgctgctcgggggccgctccggcctcgaccacggcctcgtcgccatcctcggctccgcgtcattcctcggcgggacgctccggatgacggtgtccgtgtgcgtcatcatcctcgagctcaccaacaacctgctactgctgccgctcgtcatgctcgtgctgctcatctccaagacggtcgccgactccttcaactccagcatctacgacctcatcctgcgcctcaagggcctgccccacctcgatggccacgctgagccgtacatgcggcagctggccgtcggcgacgtggtggccgggccgctgcggagcttcggcggcgtggagaaggtcggcaacgtcgtgcacacgctccgcaccacggggcaccacgcgttccccgtcgtggacgagccgcccttttcgccggcgccggtgctctacggcctgcggtgcccaaaggagtacgtggccgagaggttccaggcggaggacttcgacaagcgcgggtccgggaagcaggataccatcgccgacgtggtgctgtcgccggaggagatggagatgtacgtcgacctgcaccccttcaccaacacgtcgccgtacacggtggtcgagaccatgtcgctggccaaggcgctcgtgctcttccgggaggtcggcctgcgccacctcctcgtcgtgcccaaggcctgcgataggtcgccggtggtcggcatcttgacgaggcatgacttcatgccagagcacattctggagctgcaccctgtccttctgaggagcaggtggaagaggctccggtggcagaggggcgccatggccaagtacttccgatcgctcatcgtgtgggtcgccaacagcggctga

SEQ ID NO: 24908 - DNA, 474 bp, Zea mays
  Peptide Sequence Number=SeqID_68283
atgacaggggttgactggcccctcaaggtagtggggatacacttgggaccgtacgagggggtgtacagttgtgtggatagtgacctcccagcgtacattcggtgtgccgcacgtatgtccagacgtggcctagggatgacacatcttgtccttgctgatgcggggtctgcagtactagactgggacctccgcgctctccgagttgctcggtcaggggttggtcagccactctgcctcaccgagttgcttagtggggacctggttggccgctttgcctcgcttggttactcgacggggacttggtcggccgctacgcctcgcaagggttgcttggccaagacctggttggcaggtgggctgtttttaaagaggccatgggtgtatttcgggtacccagttcctgagtatccgacagtagcccatgagcctttgtgcaactctttggagttgcacggagactttgttgtggactga

SEQ ID NO: 24909 - DNA, 381 bp, Zea mays
  Peptide Sequence Number=SeqID_68284
atgaccattgagcaaatgttcttgatgcagacccaagcagtccaggcaattggtgagaccttagcagttatgcagcaggtgcaacagcagccaccaccgcctcagcctccaatgcaattgaaagggaaatgtgccattgggccatttctaagtattttggtgattgagtgccaacacaagtggactcatgttgatctatggataaagtgcaaatcaagtaaaaagactaatgtattgtgtctaagtgctggaaacaggagaaatcaagttggaaaagaagtggctctgttcagccaaagacagctcggtctgggtgcaccggacagtgtccggtgcgccaggccagtgactgtcaactggctgctctcgggaagcaattaa

SEQ ID NO: 24910 - DNA, 522 bp, Zea mays
  Peptide Sequence Number=SeqID_68285
atgctggtagactacacaacgatactcgatggaccaagtgtgtcggtcgaaggcccgacgcagcagggtgtcaagagcgtcgtggaagtgacacccacgagcggcgtcacgagtgatgggtctagcgatccatcccttcggctcctccgagagctccgtgccgtggctcgaactgccaccagcgtcgttgtcgtctccgtctccgtcaggggggcatctctagctgaggtgcaggggaaggtggcctctcagactccacctcccgctgaggcgagggggaggagtcctgctgctcctggcgttggcgctcctgctcctcgtgcaggcgacgatgcagtctctccaggtgactggactgacctggcaccgtgcgttagtagacgctccaccaggcgagaaggcaaaaaggggatcacagacttacgtgtagtgcacctgatacgggccatctacaaaagacatcgtaagcacaagagtaagaataggactatgagaccagaaagtaaacaagaagaaaagtga

SEQ ID NO: 24911 - DNA, 235 bp, Zea mays
  Peptide Sequence Number=SeqID_68286
gtatgtgtctgctggaacaagctggctgaatggtgcttttagcaaggtcgccaaggctggtcatgttgctggctcaagaaccagagaaaagttccagttggctgtgtcaaatctaacagccaaactgaacagcatatttgcacacatatatagtagaactggtcctgattctcgatcagtcaagaaagcattaccagggccctgttgttgttgcctgaggggggatgctggttaa

SEQ ID NO: 24912 - DNA, 357 bp, Zea mays
  Peptide Sequence Number=SeqID_68287
atggccacggaggcagcgccggagtggcttgacaagggcgacaacgcatggcagctggcggcgatgacgctggtggggctacaaagcgtgccgacgctggcggctgatggtcaaggcaaaagaaagggtccgtctgagctggaatatctatccttcatgtacgttaaccccactggttttgctggactaagaaaaagagttgaagacttgtacaaggcccatgaacaagaattggaagagattcttcaattccaggcaaatagaattttaaggcaaaagattgatgaggatcagtttctcgatcttgttagtgttgaaacagaagtgcgctcagtttacaaagagctctacaggtga

SEQ ID NO: 24913 - DNA, 678 bp, Zea mays
  Peptide Sequence Number=SeqID_68288
atggtgaacgccatcggcgccgtgggggctggcccgaccaactcctcgcaccttgcggcgcctgactcctgctcagcggtgacaacgtccacgccgggcatcaagctcagggtcgtggtggctgggggtagcggggcatcgacgacggttcgcgttgtcgtcgccgaggaagggggcgctgtggcggcagccatcgcgagtaggggccacagaatcgacgcgcggaggaggtgggggatggggagcacgagacgaggggcgaggggctccgaggcggggattagggtggggtgtagagtgcgtatgcgggcatcgtgcgtgacggcgatgctggaatcactcggggatggtagaggatggggaaggggcctcagacgtggatcgcggcgaggaggtgagggattggatcacgccgctctgcgcgccgaggaggagaagggagttgatcgcgtcgaggagtggatcgcagaccttccatggatcgcgccgaggaggagaagggagtggatcgtggaccttccgtccgcggcccctggcagaaccgtgcgccaggaaaaaaatgtggacgcctacactctcctcttaaggagtagtagagaaaagtattcaaatcttatcttccacttgctaagttgctattcacctcagtccttgattcctctcacctcaatcccatag

SEQ ID NO: 24914 - DNA, 735 bp, Zea mays
  Peptide Sequence Number=SeqID_68289
atgacacttgctcccaggtatggcttatcctacaaattcctgataccgaagtctaagggagcaacaattgtggaccaaattatgaacataacccctgctgaagattacatctacatccctgttactgaacaacaacttatggtccatgaggtgacaagtagaagttcagcttctactgcagaattggagtactcctcagaggccaatgtcagtcccaatagccgtgtctatgtgagcaaggcccatgatgtcatgacaaatgtgattgcaaagggttcagcaatgagacaagacgcagtgaacaaggctaaagcatttgatgagaagcatcaatttagggctaatgcatcagcgaggatcaattccttcgataaacgtgttggcctttcggagaagataaacaatgggatatccattgtcaatgaaagggtgaaatcagtagaccaaatattgcatgtttctgataaaacaatggctgcattgatggctgcagagcgcaagctaaatgatacaggctctgctgtgaaaaccaacaggtatgtgtctgctggaacaagctggctgaatggtgcttttagcaaggtcgccaaggctggtcatgttgctggctcaagaaccagagaaaagttccagttggctgtgtcaaatctaacagccaaactgaacagcatatttgcacacatatatagtagaactggtcctgattctcgatcagtcaagaaagcattacccagg

SEQ ID NO: 24915 - DNA, 284 bp, Zea mays
  Peptide Sequence Number=SeqID_68290
gccgagttccgagcctggattcgtcgagcgagttcgccgtcttccggtctagcccgagttcgagcctggggtcgggcggaagcggagttcgcgtcttccgggcggcgctgtccttctgtcagactggccagtggagcggtggagtgacggcggtcacttcggctctgccgggggcgcgtgtcaggatgaagctttatgctgatgggggttaccagctgagaattaggcgtcttgagggtacccctaattatggtccccgacaacaacggtcaccagattgttga

SEQ ID NO: 24916 - DNA, 819 bp, Zea mays
  Peptide Sequence Number=SeqID_68291
atgagcaggcatgatgccaaagtgctgcaaaacttggtcctcaatcttgcatcctcagtggaaagtggtgttgtgaacattaggacctttttagaagaggctttccgtcatttgggtgatgagcattaccttctgaatgctctccttgctattcgaaaggaggtagatctgatggagcaggatgcactggagagcaaagcaaggtctgacccagagaaggagaggatggaggaacaaattaaccttgccgaggctgcgaagacagtgcctagacaattcactttcacccccccttcctcaccagaattgtatgaggccagtgacaatgactcctacgactcggacaggtccactagaatggctgacaacaacacaaacacaccttttcgaccacctgctgccagcccgaattcagtggaatatgatgaaggtggttcaaaaggcaagagaccattaggacgtgactcgacgaaagcatcaaggaagaagtcaatgtccagttcatcccagtctactgactacctgtcaagaatccatgacattcaaatagcaagattgaagcaaagtgaagaaaaatccgacctgaaacaacaaaacattgagttcatgaaggaagttgaactcaagaagttggaggttcaatccaaggaaatagaagtgcaggaaaaaaaattgatgatggaagacaggaagcaaaaggacgaagagctaaacaaactttatgctatggacatgaatgctttaccagaagagttgcgagttgtatacatcgcgaggaggaaaggtttaatcgactatttcatcaacaatcctgtctga

SEQ ID NO: 24917 - DNA, 192 bp, Zea mays
  Peptide Sequence Number=SeqID_68292
atgattgtcgaggacgaaggagatggtgcagcaaatgtggacttcattgggcccacaggctccccagaagtgtgtaacaatattcctgagcacaacctgatagaacaccttttgggctcgtcgagggtccatgggttgaaggctttcatccatattatatgctacaacaatgttggtttatctctactatga

SEQ ID NO: 24918 - DNA, 972 bp, Zea mays
  Peptide Sequence Number=SeqID_68293
atggccacggaggcagcgccggagtggcttgacaagggcgacaacgcatggcagctggcggcgatgacgctggtggggctacaaagcgtgccgacgctggcggctgatggtcaaggcaaaagcaagggtccgattcttcaattccaggcaaatagaattttaaggcaaaagattgatgaggatcagtttctcgatcttgttagtgttgaaacagaagtgcgctcagtttacaaagagctctacagcgaggccggagcaggcatccccagcgtccccatacgcgtttctcgcccccaccccgacagaggccgctcacccgtggtgcagatctcgcccttcaccttctcttccttcggcatcaccgtctccatcggcgtctccgtcctcggcatggcatgggctcggactcgggctaagtcccggaagacggcgaactccgctccgcccgacccagggctcggactcgggctaagtcccggaagacggcgaactccgctccgcccgacccagggctcggactcgggcttagtcccggaagacggtgaactccgctccgacccagggctcggactcgggctcagccccagaagacgacgaactccgctccgcccgaccccagggctcggactcgggctaagtcccggaagacggcaaactccgctccgcccgacccagggctcggactcgggctcagtcccgaaagacggcgaactccgctccgacccagggctcggactcgggctcagccccagaagacgacgaactccgctccgcccgaccccagggctcggactcgagctcagccccagaagacgacgaactccgcttcgcccgaccccagggctcggactccgccctggcctctgccgaacgacctccgcctcgcccgacccaggggctcggactcggcctcggccagggaagacagactcgacctcggcttcggaggagcctccacgtcgcccaacctag

SEQ ID NO: 24919 - DNA, 1071 bp, Zea mays
  Peptide Sequence Number=SeqID_68294
atgcgcctcgtagccggcgccgagcatgcgacggtctcgactctacgcgacgacctgcccatcgccaggaaggcgtcgctgcaacggttcgcctgtggtgcctgcgatggaggggatggcgagctctccttcccgctgatgaagccggtggagatcatggaggtgctgcacaactacgtcatcgcgcccgactcccgtcttcacgccaaggacatcgtcaacccacaacacggcttcgtcgttgaggtactcgccctcttcctatctaatgtggtcaggtacgcacccatcgttccccctccccctatctgcctcgtctcacttggatctggcattatccctaggtttgctttggggcttcaagatggacatgctaaatcattgaacattaagaccgacccgccatatttgctttcggcgagcgacgcgtgcctgtccacggccacgatccggggagcaacaattgtggaccaaattatgaacataacccctgctgaagattacatctacatccctgttactgaacaacaacttatggtccatgaggtgacaagtagaagttcaacttctactgcagaattggagtactcctcagaggccaatgtcagtcccaatagccgtgtctatgtgagcaaggcccatgatgtcatgacaaatgtgattgcaaagggttcagcaatgagacaagacgcagtgaacaaggctaaagcatttgatgagaagcatcaatttagggctaatgcatcagcgaggatcaattccttcgataaacgtgttggcctttcggagaagataaacaatgggatatccattgtcaatgaaagggtgaaatcagtagaccaaatattgcatgtttctcataaaacaatggctgcattgctggctgcagagcgcaagctaaatgatacaggctctgctgtgaaaaccaacaggtatgtgtctgctggaacaagctcgctgaatggtgcttttagcaaggtcgccaaggctggtcatgttgctggctcaagaaccagagaaaagttccagttggctatgtcaaatctaacagccaaagtaagtgataactga

SEQ ID NO: 24920 - DNA, 717 bp, Zea mays
  Peptide Sequence Number=SeqID_68295
atggagtgccagggcgacgccattgaacaaggtcttgttcatggcctgaactgggtgctagtttcatgcgatgaatctgacgattcttccatgagcgaggttcagtcattcttggccgcggtgaaagcactgtcacgtaaagatgtgcattatgggtcttatgcgactgcagaacagagctcatgctcgtctttcaactcaaggttaaaggcacatctgtctgaggcaaaaagaactaggaaggaggagtggtgtgggactgagggtgccgtggggggtggtctgaggggacacctggagccgctgagggtgggcaccacgacgagagttagctttgccgaggctggggtgggtgtaacggtggaccacccatggacaggctgggccacatggagatgtagccggtccacaagttgtagagggatggccagggtgtgtcagtcttcccaccaccaccaccctgacgtcgaaagacgacatcaactgtctctagagctagatttaggactaccactaggaccggtgctgggaggaagacatggagctcccaacatcggtgtaggcgagcgcgaagaggaatattctgaagcaggtatagagaggtcatacgtggagaatgggcccagagccggagttgtcgagggccgtgatggtgttggaacggagccgagttcccttagtgagctcctcaagaaggtcattgcgaaccttgtgtaa

SEQ ID NO: 24921 - DNA, 258 bp, Zea mays
  Peptide Sequence Number=SeqID_68296
atgacgatgacgccggggctgcgaacagtggggaaagcagagggtatggccgaccagcacggaggcagggagcacgtgggaagtggagtttgggcgagcagaaatgcaggagggaactcgaccaccagggggaagcggctggggagggcgtcgagctgcagcagggagtggcgtcggccatggcaggaaggggagggagctcggctgggcaccatagcaagaggaggatggggaggccttggcgtcaggcaggaataa

SEQ ID NO: 24922 - DNA, 936 bp, Zea mays
  Peptide Sequence Number=SeqID_68297
atggcccagatgacggttacgttgccagtgctgtgcgcgaacctgggcacggatgcctcgtctagcgggacgacgttggcggctacactgttctctgcatgccaatatctagctgatgaagcatcctcattaccaagtgagcaaaaagagcccaggctttacaagcaacatgttgatagtctgcaccaattgcatggtggaaagaatttatggtggtatccgagacacatatcgaagcggaccatccaaagtgatcttcatttcaaaaaactgcttaatgttattgccaagcttgttgctgtattgggaatactgcgaggtacgacggagtccagtgatttgaaaaaaggtttggttaatgctattcaagacctatatgatgttgttcatcatgaagcgttttcagttgatatgagtatgtttactccatattactctgagattgtactctacaacatggctgaacttcagaagaaaaacgaagatggtataactacactgttttatctccagaagatttacccagttaccagtgctgatttcaaaagtcaacaatgtcatatatctaagaatggagatttctacctctggcatgactctatgccttcttgtcgtttctgtggtatttttctcaagtctttcgtcattaccttctcgtttggtatgggtgccattccatggctcatgatgtctgagttttgttttaccagtggagacacggagattggaggacagaagggcgcagcacaggactacagcgaggatgtgataaatggtgatctctgcgagcagtatccctccctcccagctgatatgcagaggaagattgctgatcagctggatagaactccgatgcctgcagcactgcttggtgaggattgccaaggaggaagactagaacaggcaagaacagcgctaatcagtgacagagcatga

SEQ ID NO: 24923 - DNA, 576 bp, Zea mays
  Peptide Sequence Number=SeqID_68298
atgtacaaccactcgagactgtatgggcagtcactcaatctgaactcgtacggtccaaaccccagggttatgttggttagggagcatcgggaggataaggagggggaatgttttgtccggtttggacatggtggtggcctgactccttccggtataaccattaagatggaaggctcctttgtcattaggacatcctactgctcggaggtggaaggattccctcatcttctacagagttgtgcgcttcgcatggggatccgcaagaagccggagtacgtctggaaagaatatcgcgaaaacggaattgagaaatgctctatggcagtctacctgggagaaagccgaaactacccaaatcgccctcccttccaagtcaccgccactgtgcaccgctttccagacacttgccagaagctgcccaaagagcactccaccagctatgccaaaactacagcagggaagtctctgagacaccccttcgttacttcccatccagcaacaaaaatacccctacctggaggaaaagactttaggccttgtcagggagagatcctaatgaggatgacctcaccatag

SEQ ID NO: 24924 - DNA, 1299 bp, Zea mays
  Peptide Sequence Number=SeqID_68299
atgccgggagacggcggccccagcgacggcttgccgccgcagtccacgcgccgtgccggggcgccgccctcgtcgtctaccccgccgctggagtgcgacatcagccgcatgccggacttccctacccggagcaccggccaccggcgtgcgcactccgagatcctgggcctacccgacgacctcgacctcagtgctcccggaggcggcgaaggaccgtcgctgtcggacgagaacgatgaggagctcttctccatgttccttgacgtcgacaagctgaactcatcgtgcggggcgtcgtcggaggccgaggctgagtcctcctcggccgcgggtggcggcggtgagggggctgagctggccgacgcgcccaggccaaggcatcagcacagccagtccatggatgggtccatgtcgatcaaggcggaacagctggtgggtgcgccggggatggaggggatgtcatctgcagaggccaagaaagcagtgtctgcggcgaaactggctgagcttgctcttgttgacccaaagagggctaaaaggtttatatttgaaactgaattgactacaatgatttggagttctctgcgttatttgttgatcattttcatatcaaatgcttgcatctgtaaatctgcctttgctagattcttagctaaagggaggatttgggctaatagacaatctgctgcaagatcaaaggaaaggaagatgcaatatattggcgaactcgagctcaaggtgcaaaccctgcaaacagaagccacaacattgtcagctcagctagcattgctgcagcgaccagacagaaatgaagcctccaaatacatggccctcggctttgaactggctattgtggttcttctcgagatcatccagagagacaccactgggctaacaaccgagaatagtgagctgaagattcgcctgcagaccatggaacaacaagtccacttacaagatgctttgaatgacaccctgaaaacagaggtccagcggctgaaggtggcaacaggacaggtgggcaatggtggtggagggatgatgctgaactttggggccatgccacgcctggtcggaggcaaccagcagatgttccacagcagccaagcgatgcaatccgtgctggcgacgcaccagctgcagcagctccagctccactcccagcctcagcagcagcaactgcactcgctgcagctccagcaggtggcgagagacctcaagatgaaagggcatctgggcggccaaggccagtggggcgatgggaagtctgggagtgggagcaggagcagcggcagctga

SEQ ID NO: 24925 - DNA, 486 bp, Zea mays
  Peptide Sequence Number=SeqID_68300
atggccctcgttagccccagcttcaagtttgtcctgcagataaccaatcaaatgtgtgccaggggtacagaaaaccttatgcagtcgccagtatctttcagtgacttctctgtttcagtgtgtgctcaagaggatggtctgataaagctacaggtaaatgtatctggcacaatgacagattctatctttgagaaagttttcacaaagaatgttgccgccgctcaaccccttcccggctttcgacgaatgaaaggagggaaaactccagacataccgaaagaagttgctctacacttaatcgggccatcaaaagtgaagaaagaaacaatcaagaaaattataagtagcacggttgctgagtatgttcaaaaggagggcctgactgtatcgaagaatatgaaagttcagcagagctatgaagagcttgaggcagcatttgaaccagggaaagaattttgctttgacgcaacagttcatttacaataa

SEQ ID NO: 24926 - DNA, 2076 bp, Zea mays
  Peptide Sequence Number=SeqID_68301
atgtccgccaggttgctccggcgagtcctccaggagcgtgaggccaccccgcaggacaccgacgtcgccgacgacgaccagtcggtggaggaggaggcttctcctccgcggtcctccgcgcggaacctcttcgatctcctcgacgacggaaacggcgacggcggcgaagaagatgaaaaggtgcgtacctcccgaccattagctacttttgggcccagtctattagttacttttggggttcaatccagctcatgggtgaagttttgcctcattggagctgcttcttgtctaccttttagcatcgagcaggttgctggatggaatctgaggttatggcgtgtattttcttgtcattgtgatcttaaaagtgaagatgaaacagaaataattcaagctgtgagctatacagaacagagacattctgtgcaaaagaaagcgaacgctgttcccgaaacaaacaaaaaatccaagaaaaagaaaaaaaagagcaaggcggagccgtcatcaacaaaggcaaaggatgcacagtcgttggagtcaattctggaagacttatgtattgaaaagaatccaatacaacaaagagctcatcagagtgacagggcagctggaaaggaatttgagacaaatgaagctactcatgtggcatcctctgttcttgcaatagacccaaaacatctaaagggtgaaaatgagatgaggcgcatttttggatcaaaggtagtggattcatttgaaaatcaacggagtatgccaagcagttcaaggcaagtacgtggtgctaggcgtgttgcccataatccaagaaaaactcttcttgtgtctccacctagctactggccaccatgggataagtcaataacaatggatcttcttgagatgaagaatggtttgaattacttcaggtacacatatgacccttcagtcagccatgtgcaggaattatttgaagccgccaaagcagcaaatgatctcaatgctattgcagctatattagggaaatatccatatcatccagaatcactgttgacatttgctgagcttttcaaatattctggagagcatcaatcatcagcagatgcagtggagaaatgcctatttgcattggagtgtgcttggcatcctttatttagcccacttcagggcaactatcagttgaaattcaaccatgacacaaataagccactgtttacagcactctttagtcacatgaaaaatctggataggcgtggctgccatcggtctgctttagaggtctgcaagtttctgttgtcactggacttcgatgatccaaagggttctctattttgcattgattactttgctctaagatcacaacagtacaaatggctggagcaatttgcagaagagtaccagtgtgataactccttgtggttatttccgaatttctcattttctcttgctactgcacggttttaccttgagtgtgatgcagcgtcagagggttctgatgatgctgacaaatcaacatctcttgatctcatgaagcaagctctgatgcttcatcctatggtgcttcgcaagatagttgacaaggctcctctgaaagactcatcatggacccaaatactcagaaatgtattctttggatcagcaaaaccgggaagcccttcacttgagcatatgatcaatatatatgtggaacgccattatatcatgtggagattcccagaactgcagaacttgctgaaagaggctgctcttttggtgattgaatcactaaagcaggataacagagaagccctggactgggcttgtgttagaaaagaagcattctcgtcagacaagaatgagtactctcatctgcttgtttcagacttcactgacacaacgccgtcgctcccaccagaagaactgcgaccatttatggtcggtccaggaatgttgcatgagatgccacctgttgaacaagaagctggacccgagagactccgtgctcctcgtgaagtcgctgggcgtaatcctgcagtagtcttccttgaatcactgctcccatgggtcgactatggtgacaatcatcaaggtgcaaatgacgacgacaacgacgacgaatga

SEQ ID NO: 24927 - DNA, 732 bp, Zea mays
  Peptide Sequence Number=SeqID_68302
atgcagtcggcatgcaaccgcgccaagtgggcgcaccccttcgactccaacgcgcccagcatggaggcccaggcccacacgtcacgcaaccggcgcaccagttgcgtggtacgagcagccgcgccgccccttgcgccactaccgcgcctcctcgactgcggaaccagtaccgcgactcgaggcaaccctgtgtatgacccaacagtgccagccaggcgcatcgatcatgggccagtcagccgcgggagaaggcgcgacggtcgatgcggccaaaaatgggccgacagtaatggcggtggcaggcgggcagaagcagcggtcacgtcgtcagccaagctcacagaccgggaaaggggggataccccgaaagggatccttctccgtgaaggaaacaggccccgagcctccctactgatcagaggttcaaaggctggcccctcggaggggtttaacagccgccttagagcgcttgggctccgcgcccactactggtcagaggttcgaaggcaggcccctcggaagggttcaacggccgcctcaggccactcgggctccgtgcccactactgatcagagaggctcgggggctgctctcgcaaacccggctccggccaaactgttgacagcgtcaacataccagcccgagaacttgggacccgaccgtacacccgggctacggccagctcgcatgagggaacaaccagaccagccgaagtgttgcgaaacgcactaa

SEQ ID NO: 24928 - DNA, 801 bp, Zea mays
  Peptide Sequence Number=SeqID_68303
atggaagaaacacacctccacgtgttcgacgcttcctgcccgcgccagagcacgctcgcgcgcgcccccgcacgcccagcgccacgcccgagccaagccagcgccatgacccgcgcccgcgcctataaaaccctcccagacttcgattgtacccttccgcgcaccctcaaacctcaccggagtctagctcgccgtcgtttgcccgtgcgcagcgtgtacgcggccgcccaatccctctgccaccgtagaccggccagtggagccattcccaactccgtccagctctcggagaagactgtgcacacctccgtgaagctcaccgagcaaggaatcgaagtttgcttcgccggagatgccagtccacgctcgccggagctctcaaccccgccggagtacgtggaccgggtaaaccactccaccatccttcgattccttgtgcacacggtcgctacgttaccccgtgaagctcaccatgccctcggattgaaccagttcgccgtggtttggccggtatactcgccgccgacgaggacacccgcctgcacgcgtggaccgggcgattccggccatccccgacgtcaagccgtacctcgacgtgaccgccagagtctccccgagccaaccccacccttcgccggacctccctcgccgccgacggccagtcggggtcagtggggcattgtacgccaaggcggttctctggaggaaatggttgctggagtgacttggccgtccatcttgccaccgggttggactgtcgagtgggaccctgcctcggctgaggaggagcatgaggagtga

SEQ ID NO: 24929 - DNA, 198 bp, Zea mays
  Peptide Sequence Number=SeqID_68304
atgacccagacacggccaaccggcttaaggacatccaaatggccggcggacacgcccgagaaagaggagtacgagcccaaaggacgaagaggttctctggaggacatggttgctggagcgacttggtcgtccatcttgccaccgggttggacagtcgagtgggaccctacctcggcaaaggaggagcatgaggagtga

SEQ ID NO: 24930 - DNA, 162 bp, Zea mays
  Peptide Sequence Number=SeqID_68305
atggtgggtacaagtgcggtcactgcacggcggcagtcgtggtcagtggagcattgtacgcttcaggatagggttgatggtgtgacttggcctactaccctgccaccgggttggacggtcgagtgggatgctgctccggcaggagaggagcacgaggagtag

SEQ ID NO: 24931 - DNA, 273 bp, Zea mays
  Peptide Sequence Number=SeqID_68306
atggaagaaagggcggaggggcttatcggttgcgagcggccgaagtccggcgaggacgatcttggttctctagtgaagttctgccgggtccgagagcttgggaagcttcacaagctattggcgaagataaccgagcagctagcatggcttggaagtgaccggagtgggctggccatggtggctgaggcacgggtggcaatggcgggcggaaaagagctcgccggagctaaggaggggcgtctggccggtgaaggtgagcacggggtgaggtga

SEQ ID NO: 24932 - DNA, 705 bp, Zea mays
  Peptide Sequence Number=SeqID_68307
atggcgctggcagcctctagccctctacacgccgtccctcctgctcctgctctccacacgccgccggagaaacgcggcggaacgcccagcacgggctgcacggcaggttctagcctctgccgtgctcactgcctctgcctctgccgttctgctgtgcaggtcacctccgcgcgttctcccaggctcactgcctctgccgtgcaggtgaagcatgtaagttatctatctttgttcgaaataattgcaagcataaatttgaaggatattaagaaattaatgggagggaaaatcctttttggaggatctgccattgaatcagaaggaaactttgtgcaaccaacaattgtggaaattacacgttctgcaccagttgtgaaagaagaactctttggtcctgtcctttatgttatgaaatttcagaccttgaaggaagcaattgaaatcaataactctgttcctcaaggattgagcagttttatatttacaaagtggccagatattatttttaagtggctcgggccccatggtagtgattgtggtatagtgaatgtgaacatacctactaatggtgctgaaattggtggagcatttggtggagaaaaagcagctggtggtggacgagaagcagggagtgattcctggaagcagtacatgaggagggcgacttggagggaggtcctagaggtaaaattctctaaatcctga

SEQ ID NO: 24933 - DNA, 177 bp, Zea mays
  Peptide Sequence Number=SeqID_68308
atggcgctcggcagcaggaaagaggcacctaatgggctccttcgccctggttgccacagtccatgtggccaccgcgatgctctagctcgatgccgaggtaggactgcttcattcacccatgacggcaatgttattacaaagctaatgcgacttaaacggattaaatcgaagttataa

SEQ ID NO: 24934 - DNA, 162 bp, Zea mays
  Peptide Sequence Number=SeqID_68309
atggccaaccagatccaggagcttgaggagctagtgggagccagggagaacaccattgaggttttcgaggatcagctgataaacactcaacaacaactcgaggaggctaaccagcacttggatatgcaccatcaggagattcaggacatgttgcagggatag

SEQ ID NO: 24935 - DNA, 531 bp, Zea mays
  Peptide Sequence Number=SeqID_68310
atgaccctcaggacctcccctacaccctcgaccacctcaccggagcagtctcaccgccgtcactttgccgctccactgaccgacctgacaggaatacagcgccgcctgcccgactccgactgtcgtgccactcgccagaccttggctccggaagacgacgaactccgcctcgcccgaccccagggctcggactcagccttggctccgaaagacgacgaactccgcctcgcccgaccccagggctcggactcagcctcaacctcgaaagacggtctccgcctcgcccgacccagggctcggactcaacctcgacctcggacgacggactccgcctcgcccgacccccagggctcagactcagccttgacctcggacgatgaactccgcctcgcccgaccccagggctcggactcagcctcggcctcggaagacagactcgacctcggcctcggaggagcctccgcctcgcccgacctagggctcggaccgaccacgtcacaggggggccatcattaccctacccctagctag

SEQ ID NO: 24936 - DNA, 276 bp, Zea mays
  Peptide Sequence Number=SeqID_68311
atggcgatgctctccaggaccacgcgcgtcctccgcaagggctcactcctgcgccctctccccgggctggacctcccgccgtgcctccctgacaacctgagccgcagccccacccggatcaccacgctccctaacggcctcagagtcgccaccgaggacgtcccgggtccttctacgtgcatcggtttcttcgtcgactccggctccatctacgagtccggggagaccaccggcgtatcgcacctgctggagaggatggccttcaaggacacctag

SEQ ID NO: 24937 - DNA, 243 bp, Zea mays
  Peptide Sequence Number=SeqID_68312
atgggcgagggcctcatggcagcagcatccgccctgaggtcatcgttgctgctgttcggccccccggagcagaagtcgtcgtcgtcgctgctgctggagcggaaccgcttcaccaagcgtgagtcgccccgtgcaaaggtgacgagtgagccgtccgaggcctcggggtggccggccgagccgtctgctcgagccggattgctggagaagaccctggcgacgatggcccgggcgtggtgctga

SEQ ID NO: 24938 - DNA, 276 bp, Zea mays
  Peptide Sequence Number=SeqID_68313
atggcggtgggtgcgctgcaaaaaggggggtgggcggcggtagtgcgctgcaaaggtggcgtgggcggcggtagtgcgctgcaaagggggtgtgggggcggtggtagtgcgcatggaggcggggcacgggtgagtggtggggtcgatgaccctgatgttcgtggtctctggttacaagaatctttgcctctctgtatgcttattccaggcttcaaaggtaagcttctcggtatcttcttgggtaaggcacttttctcttcagatgggttaagatga

SEQ ID NO: 24939 - DNA, 504 bp, Zea mays
  Peptide Sequence Number=SeqID_68314
atggccattctggagtcagttggctgtgaggttgacaatgaaaagatggagctcctgctatcccaactgagcagtaaggacattaccgagctcattcctgcgggcagggagaagtttgctttagtcccatgcggcggtggcggaatgactatgatctcgcccgacttgttcagtaataatttggttgccagcaaaactcacgccttcttcttttccataggaatatggagaatacaggtggctcttttctgcatgtgcatgggaggaatcatgtattttctggagtacgagccagacacaatggctccattcctcagagggctcatcaggcgcttcctggcaagcaagatcagcaatccaagccccctgcctcccaatcggaatgcctcctactcgtaccttcagacgctgaatgctctagagcaatcaagaacccaaccaggggtggataacggactgacgacatcggagaaatacaacctcgaatcaattcctagactttag

SEQ ID NO: 24940 - DNA, 2142 bp, Zea mays
  Peptide Sequence Number=SeqID_68315
atgtccgtgccggcgatagccgtgtacaccagcccgcccggcgccgtctacgcgccgccggagctcgagtccagctcgcgcggctcggcgccgtgcgcggccgcggcgtccccgtcagcgccgagctcccaccgccacgcggccgtcgcgggcggcttgtcctgcctattttcgtccccgtccgcggccccgcgggcaacggcgcacgaggagctcggcgcgctctggcacgacagatccgatgagccgccctccgtcgccgggggcttcggcggcgggggctactcgtacccccagtcgtcgccgtcgccgctcaagctgcgggaccacctccaccgcagcccggtgtctctgttccacacccctgcctcctccccggcgtccaggagcccctcggtttcctggctcgctggccgtgagcgcgagcgcctcttctctagcttcgtgcgcaacgcgcttggctcctgcattgactacgcaccggtcaccagcttcccgctgggtgtgcgccccgcggccactggtgtcgacgccgcggagctggccttcgagcttgacgaaaacctctctgaggcggagccgtcctgcgaacctgatgctcatgaactcctcgccggcgcccaggctcgccaccacatcttccgcgacgagcttgtcgtcaaggccttcaaggaggccgagcgggcacaccgtggccagaagcgggctagtggtgatccatacttgcagcattgtgtggagactgcggttcatctggccaatattggtgcaaacgcaaccgttgtgtctgctggccttctccatgacacaattgatgattcgttcatggactatgatcatatcttcaggatgtttggtgctggtgtggccgatcttgttgaaggggtttcgaagttaagccatttgagcaaacttgctcgggacaacaatactgcaagtaggactgttgaagctgatcgcctgcatacaatgtttcttgcaatggctgatgcacgagctgttcttataaagttagcagatcgtctgcacaacatgaatacgatagaagctttgcctttggttaaacaacaaaggtttgctaaagagactatggaaatatttgtgccattggccaaccgattaggaattgctagctggaaagaccacttggagaatatttgcttcaaacacttgaacccagaggagcacaaggagctttcctctaaacttctgatgtcttttgatgaagcacttcttacatctacgcttcataacttggataaaagccttagagatgaaggcatttcatatcacagtctttctggaaggcacaagagtttgtacagtatatactccaagatgataaagaagaacttaacaatggacgatgtccatgacatccatggtctacggcttgtggttgaaacagaggaagattgttatcgagcacttgacatagtgcacaagctgtggccccgagttaccggaagatttaaagactatatttgtcatccgaagttgaatgggtatcggtcgctgcacactgtcatcatgtgtgagggtgtccatccatttgaaatccagatccgaacaaaggaaatgcacctacaggctgaatatggattcgcagcgcactggaggtacaaagaaggtggctgcaggcattcctttgtgctccaaatggtggaatgggcgaggtgggtgctcacatggcaatgcgagacattgagcaaagagcgtccctcgtctttgagcagttctgttggcataaggccaccatgcccttttcccctgcattcggaagattgctcctactcttacagccgacagtgcaactatgaaggccctatatttgtcatcatgcttgaacatgacaagatgtctgtccaagagctcccagccaactcgactgtagttgatctaatggagcgagtcggggccaacagtccgagatggagcccttgcagcttcccactgaaagaggagctgcgaccgagggttaaccacaagcccataagcgacccaaataggaagctcagcatgggcgacgtggtggagctgacgcctgcgctccctgacaagtcgctgtccgagtaccgggaggagatccagcgcatgtatgagcggggagggtttgcgctcgccaccacccctagaagctga

SEQ ID NO: 24941 - DNA, 1185 bp, Zea mays
  Peptide Sequence Number=SeqID_68316
atggccgttggaaggctgctgtcgcatggcgcaccggacagtccggtgcgccaccggacactgtccgaagagaatgatgaaaaagttgccgccatcgtcggggacttctcttcaccaccaccatcgccatcatcgacttctcacctatgcctcatggttagaggtgaacggaaggtacaaaatgatattgatattattgatgatagtgatagtgatagtgatgaggaatttgcttcaccttcatatgatgagctagctgacttgcttaaagaatatactcaaatcattagaaagtcaaaagctaaatgtgataggttgaaaaatgaaaatgaatctttaaatgccaaatatgacatagttatgaaagctagtgatgaaatgaaagaagaaaataaaactatgtcatcaactgtgaatgagctcacaacctccctaaaagatgctaaggataaatgtgacaagttaaatgaagctaatagggagttgcaagatagactagtaaaaatcaaggaagactatactcagattaaatttgatcatgataatcttcttgttgaaaatgaacttttatcttgcaaaacacatgaggctattaaccctgttgttaagattgatgtagcaacctcatgtgatgatttgagtcaaggagagcaaactagcctacatgctgaattgactgaaaaagttgaagtcttgactttagacaaccaaaaattgaagagatgcctgactgatgcaactactagaggaaaggttgctattgagaacaatgatttcaacaatgagttggcagtggataatgaaaggcttaaaaatgaggtcaagaaacttaagagtgaaaatgaacatcttgcaacaagtgtgcaaaagttcaacaaaggccaatacctccaaaataagttgcttatgaacactgtcatgaaaaacaacaagagtggtattggatacaatgcttttgtgcaaaagaaagccactacccaatacaagccaaagcagactcacaagcctatcaaatgctttgagtgtggaaatgaaggtcattttgcccacaactgcaaagccaaaccaccaactcccttgcctaagcactcaagaccatttgctttcaatgctcattatgttctaagaaaggttgcaaatagaaaggtcaaagttactgaaagtcgcctagaggggggggggtga

SEQ ID NO: 24942 - DNA, 1374 bp, Zea mays
  Peptide Sequence Number=SeqID_68317
atggtgtctccggtgagctgcaagcgggtaatccgagtggaagtccgtgccccgttcgttgggggtcggctaggggcccagaggcacgcccaaaagtacatgcggcaactggcgcgctggttgtgcgacgcgtgggcctgggcctccaagccggcgcgtcagaagtcggagaagcgcgtccacctggcgcggttgcatgccgcctgcatggctgcccgcccctcccgcccgttggtctgggcgaagcccggtcgcgcccctccaccggcggtcacccaggatggtgacctccggcttgatggtgggggaaagcgagccgggctgcggcctctgcccctccctcagcctcaaggattttcatcaccgaggctggggaggggagagtgccgagttggggtcagcccctgcgcgggcggtggtccgctccttcactcagtgatggggggaagagcggttgttgtccgcggcgctggcagctgcagcgtgcccggtcttcagacgcgagtggcttcggagccgctcgcggcgccggcgtccgccacggcagctggaagaggttcttccgccggcgtgacagcccgggccggccacggactgacctccaactctacggccttctgcccgtccttgcctcacgagttttggcgtgggcgagggccttctggcagcagcacccgccccgaggtcagtgctgccgctgttcgaccccccggagcagaagtcgtcgtcgtcgccgctgctggagcaggtaacggcgcgccgttcgtcggccttccgttgctccgcaggccttccccctcggagtggggttcctcgcctgttgattatctgaaccgcttcaccaagcgtgagtcgccccgtgtcaaggtgacgaggacccctcggccgctcttcgatgagccgaggccaggggtagcgatatcagtacgaacagaggcggagttggctcgaaaatgggaacctggttggccggagcctagccgggttgcccatcagcggggcttgacgtcggagtcgacgacccgaggcctcgggtcgggctggcgcccttggaagatgcttggccgaggccccaggggtaaccggccgagccgcctgctcgggccagattcccggagaagtccccggaccgcgtcgccgtccgaggctgggtcgggccttgctgaaggcgtcgtcgatgccgagggtgcatctggaccttccgtcggtaacagggatgtttgtgtgggcgagagttgcttctcgcggaaggtgatgagtgagaaggtgatgagtgaggtatccgtatcccggaggcgtaggagtccctcggctcggtcggccttggctgcttacgtgtactccgtcgtttccaggatccgcttttcgaagtag

SEQ ID NO: 24943 - DNA, 198 bp, Zea mays
  Peptide Sequence Number=SeqID_68318
atggcgggctggattgagctcgccggagctaaggagaggtggctggccggtgaagattgtaatctcgctgacggagagtacgtcctcattctggagcaaggagttgctcaggaggtagtcccggagccagcaccagagcctgctactgaggacctgcctgctccaactgttaaaggcaagccccagttttatgcataa

SEQ ID NO: 24944 - DNA, 504 bp, Zea mays
  Peptide Sequence Number=SeqID_68319
atgtggctcaaactaccaccggcgtcgtcgtcgtctccgtcagggtctcgtcttcgtcagggtctcctccagcagccgggatgccctgtggtggtgcagggggcatctctggctgaggtgcaggggaaggctgcctcccagactccacctcctgctaaggtgaagggaaagagtcatgctgctcctgctcctggcgtcggtgttcctgctcctcgtggaggttggggaggattcagcgagcactatggtgggatcgggatagcaggaaaggggggactcacgaacagcgtccggggcatagcgaggacacgggttaacggcaacggagctgcgacagtgaaccggtgcggaccaggcaaaccagagggggagggggcgaaccgaggggtgtccaaggttgtgggtgacaaggcggagcttaatgatgcaacggacatggcgagggctcgacggcgaccgcagaacaggcgagagaccatggcgagcggcggcggggctccctag

SEQ ID NO: 24945 - DNA, 528 bp, Zea mays
  Peptide Sequence Number=SeqID_68320
atggtagcgaggctcgatggcgtcggggttttacgacaagacaaagtcgagcacacaggacgacacgaagatgttgagaaggagacgacggccacgggcagcaaacaacgacgacggcgagctgacaccaagcgaactactgcagatgaccgagcacgagcatcaagcaatcagctgatggtcagagcccacgccgggttgacaaaagggagacgcacaacgcgcgacgccgcagacaggagctggacacagagagcgcacccggcgcgtgaggatggcggcaatcagagtgcacacaaggaagcagcgccaaccggccatggcgcgatggggaaagaagctgggtgtcgagcacgattgatggcgactggcgagggagctccggcagggagagagtcgaggggaggacgaggagctagagcggccagtcccgtcgcgcgcgcctctgcggcctgctgcgcggcgaccgccatgccatcccggacgttgccgcctagccccatggcgcatgccggagagcgtgcttga

SEQ ID NO: 24946 - DNA, 648 bp, Zea mays
  Peptide Sequence Number=SeqID_68321
atgacgacggcggctctcagccctcttacggaagcaaggagacgtcagcaaggactcgacagccccgacagctgtccttccgccaggctccagcgctcctccgacggccacgacatcacacgaacagggtgccaaaacctctccggctgccacgacggcatggccctcttacagaaggttggccgcgcggggaaggacgggacgacgcgcataagcctctcgctctctcccacgcggacgcttggacccccggggtcgaaacgccgacaagttgccaccaccttgttcgtcattctacttcttttctctctcccctcatgccttcacctccgcgccaccccattctcggcagagggcgtaggagcatgcgccttctccccgtattcgtccgacatcagccctgacaccgactcgcgtagtggctattgcacgtccacgaggacggttcacatcatgcgcgcaccatcgttttcgtcgtcgtcgaacatcccgttcatcttcccggcctttgccctgttctcctccccaacttgttgtccccgcccatggtcgcggtcgcgagtcggtcatgctcctggtctttctccgtgcgtcccgtcgaggaggacatgggtggtgcctgccatgcttgggttatctcggcgatga

SEQ ID NO: 24947 - DNA, 576 bp, Zea mays
  Peptide Sequence Number=SeqID_68322
atggtctcaccctcgggaaggaactctgcctcacccgtagtcggcctcaaccttggagaaaactctgcctcgcccgagctcggcttcggccaacttcccggcaacaactccccgcgaatcccgcaggaggccactctgacaactgaactaagccctccctgtacgactgcgtgcctcgaggcaggctcgaccaaggcctcgggaggaacctccgtctcgcccgagcctagcctcgacctagataacatcgaccaaaggacaccaccaactcctccgcgaaggctgttgacaatgggattgctgcaggaccaatgtcaagtctgtttaacaccatactgggtggattaccatgtgcttttcaccatacttatcactgtttcaacaactacgaccaagacaacacctccatcaggaaggatcgatgctttggatttgaagcggagctcctctcattccaatgaagggtccttccgaagggtggttccgctgctcgttcatggttcccactatcctatctcatccatgtttgcgtgtcttcgagaggaagcggaagagattcctgtggtcgccttttga

SEQ ID NO: 24948 - DNA, 414 bp, Zea mays
  Peptide Sequence Number=SeqID_68323
atgatggtcctcgcttcagttgtgtcggggaccataattaggggtacccccaagactcctaatctcagctgcgccgcccgcgtcgcttcgactgctgtgccactcgacagagtaaggctgacagtggccaagcccggcctaaggcgccataagaaactccgcctcgcccgacccagggctcggactcgggctcggccccggaagacgacgaactccgcctcgcccgacccagggctcggactcggcctcggccccggaagacgacgaactccgcctcgcccgacccagggctcggactcgacctcgacctcggaagatagactcgacctcgacctcggaggagcctccgcctcgcccaacccagggctcggaccgaccacgtcacaggaggggccgtcattaccctacccctag

SEQ ID NO: 24949 - DNA, 738 bp, Zea mays
  Peptide Sequence Number=SeqID_68324
atggagttaatgcgacgagacgagtggttcgcggggcagccgttgcgcgtgcgcgagccgttcgaggaacaaaacacgggcgcgccgtcttcacgccgtgggagagggttctctcgctgtcccaggaggggacgcagcctggccgcatcccctcaccggtggtcacccaagacggtgaccaccagcccctgggtggggagaagcaagccgggctgcggcctctgcccctcccttagcttcaaggatgttcatcatcagtgctggggaggggagtgcgccgagttggggtcggtctctgcgcgggcagcggcccgctccttccctcagcgatcggggggaagggcgttcgccgttcgtggcgctggcagctgccgcgtgcccggctctccggcccaagcggcttcggcgccgcttccagtgccaccttccgccacgacagccagaagaggtttctccgccgacgagatagccggtgccgcccacggactaacctccaactctacgaccttctgctcgtcctcgcccctcgagtggggatgtgggcgagggccttatggcagcagcatccgccctgaggtcatcgctgctgctgtttggccgctcggagcagaagtcgtcgtcgctgttgttgaagcgggcggcggcgagccgtccgtcggccttctgttgctccgcaggccctccaatcgtggggggttgttcgtacctgcggaggtggaaccggagttccgtttgtaa

SEQ ID NO: 24950 - DNA, 849 bp, Zea mays
  Peptide Sequence Number=SeqID_68325
atggccccggccatagtaagaccgcgccccgaagcctccgaagggtgtccaacagtggctccatctgggcctaaggctcccgaggggagtcccaccgccgcaaaaacaacgcgctgtggtggcagggatgtacagctgcccccggtccgagcgctgcaggagcgtgcagccaccagccggaccgcgtggcgcaccttcttcacgttggaggagagggtgagcgcctctgcgtggaagaggtggagctacaggtcccaatggggctcaattccaaggtacccttcacagacgacgacgaagatggtcgcctgcgtgacggagttggggttgaagttatggagctccaccccggtagtagtgtgggagcgcccgcatgaagcgactcgccggcaccccgaacccctgctcatggaaaccggtgaagctcaccacataactgatgaggacatcactcccatacaaccaatgcacggattgacaacacgagcacgtgcacgacatctaaatctccatgttcattctaacctagtcaattatgttttagagcttacgctaggtgctatggatgttttaatgattaggaaccttggagaggaccaacaaggacttgagaaaggccaagatatcaaggaggagaatctaggacattcacaacaagagaaagccaagtccgactcaacctcgtctccacctcaaagttcaggatcagtctgcactaaaacgaacgcccaggaggtcgagccctcagcaaggctcaggagactactccagaacatatgggctccaggcccgttactgatcaggggttcaaagtttggcccctcagaagggtatcacaaccgcccctaa

SEQ ID NO: 24951 - DNA, 882 bp, Zea mays
  Peptide Sequence Number=SeqID_68326
atgagcataccatcccgccccattgtcgtggcgagtggcaacctcgtccgtgccggcccggacctctcgacgtggggagggccgaccctgacgtggacggacaccaagggcaacccctacttcgtccttgacgatgcagagggagaagcaaatttggtcggagggcttatggcaaagtctgtggccaagtcgattttcctccgtcatgagcgcgacagtgctgaggcggcagacctgtcatcgctatgcgtggagttaaaggatgaggccgcggccgcaagcgggagggtggtgcttctagagggggaggcgcaatcgctgagggagaaagtggctccactggaggaggaagtgtggcaactgaaggagaaccttcgggtgctggccgatgagcgagacgagtctcggcgtcaagccaccgaggcctctctttgcgccgactcccttgcgagggatctggaggacgagcgagctccagaaggatttggacacctccatccagacctctctgatgctttctcaggtcgtggaccaaaagatggccgagctgaaggagttgtccggcacggtggcagagttcaaccgagacctccgtgctgtggatgtcccctcggcggggcgcttgccatagtcgcctcccactacgagatcaatctcgagcatgtgtgcgagggctatgttctccttgatgagcgcaaccttgtcgaggctgagatgcagaggctcaccgacgctgtcgaggagctgggctcggcgttggcgtgtcacttcgaggatgcggtggttccgtcggtgtcgtcccctcctgccgggtcttactctatcataggtgctcccatgactcagctatcctttctaattgtgatgtctctcgttccttag

SEQ ID NO: 24952 - DNA, 441 bp, Zea mays
  Peptide Sequence Number=SeqID_68327
atgactgaccagtacacacggatgtggtggtcaacacagaaactcaggaacttcttccctgtgaactgtgtgtcgttgtccgtgatgatggagttggggaccccgaagcaatggatgatgtccgtgaagaatgctaccgcatgctcagatttgatgctggcatggggtctgacctcaatccacttggagaatttatcgatggcgaccaaactggcatcctcggcaggatcgcaggatcttggtggcatcggcaaccgtagttggccagtaaaacccctgcctgaaggcgtttccaatgagggttcggggcaccgtgtggtgcccctaagccccattgggtttcacctaacagttcttgtccatgaccgatgggtatgcaccactggaaaaatcccgaggggatgtgtcggtacaactccttgccatctccaagtagcatga

SEQ ID NO: 24953 - DNA, 513 bp, Zea mays
  Peptide Sequence Number=SeqID_68328
atggtcttgggatccactttgctgaccaaatcgtgggggcttctccttggtgggctcggggtgtaccgaggcctcgctctcgaagcgagagggtcctgcctggaggccccaaatctcaccgtggattcgacgtccctcggtggtagacggctccggcatggagcgaagcaagattgcggcgacaacgaggttttggctggccctataaaagtttatggtgaaaatttcagatgtagcctattcacccccaatttaggatactttcacccagaggagccttgctccataggcctaaaattgacaaacaagagaaaaacaaaatggtcgccgatggacccaaatgaagccactaaatggagacactctccccctagtgactcagggagaaactgtcaaggatcaaatccccaggcacccaggggtccacaagtcagtatgaagatgacgataagcccgcctaagatcgcctcgctgttggatgacccctgcgcactaagccaggggtcaagctag

SEQ ID NO: 24954 - DNA, 459 bp, Zea mays
  Peptide Sequence Number=SeqID_68329
atggaaatcagatgtcagagcagcgattcagaggggcaccggactgtccggtgtgacatcggactctccggtgccacaagaggacaaagcctccaacagtcgaccagctccaaccctaatggacaggatgtcgtggcggcgcaccggacactgtccggtggcgcaccggactgtccgtgctgcaggtgggaaggtgaatcgccaagttgcccacacccgctaaatagtcgcccgcacccgctgcatgtgagtgatattgtctgcttgttcttattatctttcatattccctatatttcacttttcattatcttataaccgtgatgatgaagaaatacgaaacgtagatgctaagcctacacaggcagctgactgggggtttgccactaagaaagaactagaactcgtcatattcctggaactcctcgaagtcatccatgttgccagcatcacctcctga

SEQ ID NO: 24955 - DNA, 369 bp, Zea mays
  Peptide Sequence Number=SeqID_68330
atgggcgacgacagctcacccgctcgaactagggggtcggtccggccacaggagagcaagggcgaggggagggggagctgctgctcggccacaccatgggagagcttcagcgcgccaagacagaaggggcagagagcacgcagggaggtggaggcgccatggggaggaggcgagcagagctgcttgctgcagccgtgggaagaaaatctccctgctgccaagcgccgtggagaaggggactcggctgaagcaggcctgcgcaagggaggagcagggaggaagggcgctgcaatgagatgtgagcggctgctcgagcttcgccggcgccatgggaggagcacggctccctggtggctgttgctgccgtga

SEQ ID NO: 24956 - DNA, 651 bp, Zea mays
  Peptide Sequence Number=SeqID_68331
atggttggcgaaacggtggaagggattgcccgttatccaattaatctgcgttatccgcaaagctggcgcgatagtccgcaggcactgcgccagctgccgatcctgacgccgatgaagcagcaaatcaccctggcagacgtggccgacattaaagtctctaccggaccgtcgatgctgaaaaccgagaatgcgcgcccgacgagctggatttatatcgatgcccgcgatcgtgacatggtgtcggtggttcacgatttgcaaaaagcgatagctgaaaaagtgcagttaaaaccgggcaccagcgtggcattctccgggcagttcgagctactggagcgcgccaaccataagcttaaactcatggtgccgatgacgttgatgattatcttcgtgctgttgtatctggcgttccgtcgggtgggcgaagcgttgctgattatcagcagcgtaccgtttgcgctggtgggcggcatctggttgctgtggtggatgggctttcatctttccgtggcgacgggcactggctttatcgccctcgccggggtcgccgccgaatttggcgtggtgatgctgatgtatttacgtcacgccatagaggccgtgccgtcgttgaataatccacaaacattcagcgagcagaagctgggatga

SEQ ID NO: 24957 - DNA, 319 bp, Zea mays
  Peptide Sequence Number=SeqID_68332
atgcaggcggttattgcccgccgtgatgcgtttggcgaagcgcaactggcgcatcgcatctgcgactatctgcctgaacaggggcaattgtttgttggtaacagcctggtggtacgtctgattgatgcgctttcgcaacttccggcaggttacccggtgtacagcaaccgtggggccagcggtatcgacgggctgctttcgaccgccgccggcgttcagcgggcaagcggcaaaccgacgctggcgattgtgggcgatctctccgcactttacgatctcaacgcgctggcgttattgcgtctggttttctgcgccgctg

SEQ ID NO: 24958 - DNA, 189 bp, Zea mays
  Peptide Sequence Number=SeqID_68333
atggcggcagtgggtgcgctgcaaaggggaagtggggcggtggtggtgcacatgggggcgggcacgcgtgcgaggggcacggcttattgcagcttcaagggtaagcttcccggtatcttcttgggtaagggctctggccaaagtgaagaaaaacttcactacccaatgcacgcagaggactgggtataa

SEQ ID NO: 24959 - DNA, 931 bp, Zea mays
  Peptide Sequence Number=SeqID_68334
aggattggggacgcttcaggtggtatcagagctgttaggttggccgcaggacatggaggttcgctgccaaaccagcttttgccagaatgaagatggtttccccaagttgttgagagcatgcacagtccgcctcgaaatcaggagccagccagagtatgatggtcgtgaattcgtcgagcatggcacggagaagtgtgtcgtgattgaggagcagctgcttgaggacgaccccacagtcatgtacctcactacatacctgctcacccttgatacacagtatgatttcttggctcggcaccaccgtcagatgattgcccgagaagaagatgctgagaagcgcaaccgtaagctccatgtggatctcaccacagctcaagcccatgtagctgccttggaaagtcgtgaagtcattgctgttgaagccctgaagcaagccaaggatgagcttgtccagaagttgatgggggcctacttggtaacccataaccaacgtagagccctgcggatccaagagcccgctccatccaaccctgttcaacccatcaaagctaaagacccccagattcttgaaggtcacccggtctctaccagaggagaaaagaaggcttgggaactaccagaaggagccatagtcttggaaggaattccagtctttcctcaggctatggataagcaagagcaccctgaagcctcccaagatcccccgccagagttgtttgagcccctcaccatgaagaagattccagcaccatcccttgaagtcaaggaagaagctgcaagcaccccgccagcaccgccgccctctgaggagctacaagagccagtccagcttgaagaagagttcaaccccgtgttgccatctcagtcgccgccagaagaagtcatcaacatcagctccctgttgacccatccaggagatatctcagattga

SEQ ID NO: 24960 - DNA, 1005 bp, Zea mays
  Peptide Sequence Number=SeqID_68335
atgtgcgcaggaaggccgaggctcggcctttctcagctggcacactggactgattacatagagagggtgtatttcggatacttcggcgaagggcaacttagatcgagccgttggtgcaccggactgtctaacatttccaatggtcgttgtcggcatttcgaccccggggggtccctggaccgacgagtaaattgtcgccgcgtgtcccagcccagatgggtcggcgcgagacggagcacgaaggggggagaggagactggcaaaaagagggggaacccgcggccttcgtgttgtcctgcgcccaggtcgggtgcgcttgcagtagggggttacaagcgtccgcgtgggagagagcgagggacttgcgcgtcggcccattctcccgtgcgaccaaccttctcgtacgagagccctggaccttccttttataagcataaggagaggacccagccctgggtcgggcgaggcggaggctcctccaaggtcgaggtcgagtctgtcttccgaggtcgaggtcgagtccgagccccgggtcgggcgaggcggagtttgtcgtcttccggagccgaggctgagtccgagccctggggtcgggcgaggcggagttcgtcgtctttcggagccgaggctgagtccgagccctggggtcgggcgaggcagagttcgtcatcttccggagccgaggctgagtccgagccctggggtcgggcgaggcggagttcgtcgtcttccggagccgaggctgagtccgagccctggggtcgggtgaggcggagttcgtcgtcttccggagccgagactgagtccgagccctggggtcaggcgaggcggagcttcctatggcgcccgaggccggacttggctgctgtcagcctcactctgtcgagtggcacagcagacggagcgatgcaggcgacactgtcttcttgtcaggtcggtcagtggagcggcgaagtgactgcggtcacttcggcaatgtcgactgaggagcgctcgtctggataa

SEQ ID NO: 24961 - DNA, 1152 bp, Zea mays
  Peptide Sequence Number=SeqID_68336
atggacggcccggccaggctccggccgacgaagtcttcttttcgagccaactctgcctctgtccacactgataccgctgcctccggctccgactcatcgaagagcggccgaggccacaatgaacaaacactggcactcaaggtgcccttacaagcggaactccggttccacctccgcagcgacaacgacttccgctccgggcggccaaacagcagcagcgatgacctcagggtagacgctgctgcgacaaggccctcgcccgcgtccccgcccaaggagcgaggacatgcagaaggccgtggagttggagccggcgcaaaccgagtcttctccaacacggtccaaggtcctccccctacgacccgggggctaggtcccacgcgtcatgcaagctggcccagggcagaagaagccaaaccgccgcgcgcggtgcgcgtaactgcccagcggttacaagcgctcctccactttcgcccagaccagcgggtgaaagagcggaccgccatgcaggcggcatgcaaccgcaccaagggggcgcaccctttcaacttcgacgcgtccagcatggaggcccaggcccacacgtcatgtaaccggcgcgccggttactacgtgcgagaaactgcaccgccattcgcaccactaccgcgccttctcgactgcggaaccagtgccgcgactcgaggcgaccctgcgcatgacccgacagtgccaaccgagcacatcggtcacggtgaggaaaccttctcccacggcgtgaagacgacgcgcctgtgttccgttcctcaaacggctcgcgcgcgcacaacggctgccccgcgaaccactcgtcccgtcgcattaactctgcggcagggcaggcggcacctttggcaggcgaagcaggcgacgcttcacccccgccatgatgaccgcgtcaaaaaagggaccgggaaaggggatactccgaaagggatccttctccgcgaaggaagcgggccccgagcccccctactgatcagaggttcgaaggctggcccctcagaagggttcaacagccgcctcagagcactcgggctccgcgcccactactggtcagaggttcgaaggcttggcccctcagaagggttcaacggccgcctcaggccacttgggctccgcgcccactactga

SEQ ID NO: 24962 - DNA, 333 bp, Zea mays
  Peptide Sequence Number=SeqID_68337
atgagccgggctgatgtcctcgggggacagctggctgaggcttcggggcggccggccgagccgtctgctcgggccagtttcgtggaggagacctggcggcgatggcccgggcgtggtgctgacgtcgtccttcggagcggggatcctccgaccgtgttaccgtccgaggctcggtcggactttgccgaaggtggagttgacgccgagggtgctgctgctccccctccgtcaaggatcccacttttcgaagtagtcaaaaagcacgagagacgttctggcagaaagactttttccgaggaaaattttgacgcagagggggtgccccccttctag

SEQ ID NO: 24963 - DNA, 444 bp, Zea mays
  Peptide Sequence Number=SeqID_68338
atgggtcggcgcgagacggagcacggaggggaagaggagacaggcaaaaagaggggcaacacgcggccttcgtgttgtcctgcgcccaggtcgggtgcgcttgcagtagggggttacaagcgtccgcgtgggagagagcgagggacttgcgcgttggcccgttctcccgcgcggccaaccttctcatacgagagccctggaccttccttttataagcataaggagaaggcccaggtgtacaatggggatgtagcactttgtgctgatcggggttaccagctgagattaggagtcttgggggtacccctaattatggtccccgacagtcgtctaccttccaacggctatgatgatgtggcagggtctgaaggtcatcggaccttcactgttcatggttcgatgccccttcaggacagaacgatcacctgctccaagtcagaatag

SEQ ID NO: 24964 - DNA, 603 bp, Zea mays
  Peptide Sequence Number=SeqID_68339
atgcccagttttagtaacagtaacaccaggggtgttacagtgacaccggaggcgcgtccagctccaacccccgcctgcaccagaggagttgggttggtgttcaggcgacggctctggtcaggtgccgaggaagaagctacgccaatccccctcccctgtatgctgtcctgcgcccaccaggagtacaagaaggacctccagaaggtgtatgccagggagctggaggtgcaccggagggagaagaaggtgaccaggatggaggaggctgtgtctcagcaggagggcctcacaacagagttccgggccaagctaagtgccctggaccagaccctggaagagcagcgggtccagcagaataaggatgtggagaggctgcaaaagttacagcaagagctcgagggcaaggccagcgacgccgccctcgccgaggagaaacttaaagcgaaggagcagtccttggacaagcaggagacggacctcgccaggcgggagacggacctcaacttccgggaagaaatgctgactcggcgaggcgagatgctggccgagcatgagctcgaggcggagaagaaagaaaaggagctgaaggagtggattcggtag

SEQ ID NO: 24965 - DNA, 522 bp, Zea mays
  Peptide Sequence Number=SeqID_68340
atgaagactctgacgactttctgtgtctaccatcccctggagatggtgatgcaccccttgggactcttccctgctgagaagaaggatgatcccatgtggtgtaaccgcgtgagccatgtgaaggatgtgtgggcgatgtatcctaacttggttgggaggatcactgttcagtgcatgagtgcgctgtaccgccttcaggcccttcagagcgatgctatggcactccttgctaacaccgctcaaactgcaaagctcactctcgacagtcgggaagattttgtggtggagatccgagacaacactattgatgtcttggagaaccagcttcacgatgtgcagagggaactcgaagaagcaaacgaccacttggacatgcaccacctggagatggaggccaatgaggcaggaagcgagggagaagaggctcccgaggagctcggaccagcccctggcgccaatgggactacctctgcgatgcctccttcacccgtatccagtgtcgcttccaccgctcagggttaa

SEQ ID NO: 24966 - DNA, 360 bp, Zea mays
  Peptide Sequence Number=SeqID_68341
atggtggtcgaagctctggcggcaatggcgggcggaattgagctcgccggagctaaggagaggtggctggccggtgaagcgtcgagcacgaggcagcgcagagagaggtcaagttcaaacgcggattgggcccaaatctttgagattaaggccacgatcccgttgagagatctcttcctctcagggatcaaggtgaacatccctgatctttggctcaaggagatccaaccggacttcgcgaagcttgcggccatggcgctggcaggtgctctgacccagcgggcccaccatttggtgaccaaaggcgcacgtgagtggttggccatgtggctcaagacgtggtcctacccagtggtgtaa

SEQ ID NO: 24967 - DNA, 609 bp, Zea mays
  Peptide Sequence Number=SeqID_68342
atggccatgatgggttcaacatcggacaagatgtacctctgtcaggaccgtaccgatgtgggcctgttgactaaggaccctttaactggtcacatgcctcatcatgggcacaaaggaagtagtagtggcactaatgacccaattggagacttggaagccagggtggaacaacttcggtcagagttacgtcacaggaataaggcacaggagcaggacagccaccgtatagctgaattgtcagctgaagtcagccgcttgcagtatgagatctcagaacgagatacgaccattgtttgggtcgtcaactcgcgttcgttcccttgggattgcgaagcaaaagctctaactcgtgtggcagagcttagtgcatccctcgaaagcctgcaagtgtactgtaatactttacatgaggaagtacatgtgttgtatgctcgactaaacccggacgtgccttcagacattgctgtaatgggagccggaccatcgggtacaacaaatgaaggacctgatggggagctggacctttttaggccccctccttccatgaaccttgctaacgaacagtctcctgtagcaggaaatggagcaacaaaggatgaagaagactag

SEQ ID NO: 24968 - DNA, 162 bp, Zea mays
  Peptide Sequence Number=SeqID_68343
atggtgggtacaagtgcggtcactgcacggcggcaaccggggtcagtggagcattgtaccattcaggaaatggttgatggtgtgacttggcctgccaccctgccaccgggttggacggtcgagtgggatgttgctctggcaggagaaaagtacgaggagtag

SEQ ID NO: 24969 - DNA, 288 bp, Zea mays
  Peptide Sequence Number=SeqID_68344
atggtcgtgatgggttcaacatcggaaaagatgtacctctgccaggtccgatggataaggacaactgtaggtgggcctaatgactttggaggttctgtcatagtcacccccaacgttgggagtgggcgcgatgtcggagaaggcatggatccccacctgggatctcctctgtcgctgcgacaccgcctgatgctggcgccgctgtcgccggacccctggctagggcatgagaagccgctggcgctgtctaggcagcggctggaggcggaccgccggcatcactcctag

SEQ ID NO: 24970 - DNA, 204 bp, Zea mays
  Peptide Sequence Number=SeqID_68345
atggccagcccactccagccacccccgagtcgagccagtgcttccgctagctccgccaattgtaatcttgccgacggagagtacgtgctcatccccgagcaaggacctgtccaagaggaggaccaggagcaggcttcagaggctgctattgaggatctccccgcagccccagcaattgaaggcaagccccggttttatgaataa

SEQ ID NO: 24971 - DNA, 117 bp, Zea mays
  Peptide Sequence Number=SeqID_68346
atgtggaagcagaagctgatcctggtgaacccgaaaaccatgatgaggtgccaggtgagggtgaagaagttgctgaagaaggcagtgaacaacaggattagagagtactatttataa

SEQ ID NO: 24972 - DNA, 273 bp, Zea mays
  Peptide Sequence Number=SeqID_68347
atggccatgatgggttcaacatcggacaagatgtacctctataaggtatgtccttctcgacctttgtctgatgagtattatatccatgaggagataatacttcggaagacgaagcatttgagaacaagtgacaaacaacgtccgccatcaccgtctctcgggcaccacaacacctcagatgcgttactggttcggatcggtgaatgtgggccgtcagatttggatctggtgatccaaggtagatcgcgtccacttaaaaagcataaccattga

SEQ ID NO: 24973 - DNA, 189 bp, Zea mays
  Peptide Sequence Number=SeqID_68348
atgccaacggtatacagcgagtcgctctttgtggaggttacggccaagttcggtaagagtgagagttttacagtcaagggattcatcagggcaaagctcctcctcagggaccgcgtgatactgatggaacaaaagtttggattgattcgatgcacggagacacaaaagccgatgtttgccgcacaatag

SEQ ID NO: 24974 - DNA, 495 bp, Zea mays
  Peptide Sequence Number=SeqID_68349
atgttggaacttgctttcagcagcaaggaggccaacaggggtgaacagtggcgacaacagggttacgtgctcgggggcaatagctctgttgatctagcctctcacgggcactatgcgggggtatttatagggttacaggctgtaattacaagcatgcctttacagaacaggcccgtaacacaaaggcggccacgcagggcccgttacaatgggccagatcacacgtgggcctcagagccgaacgaggccgcgctgcgggatggcgccgccgcaggccttcgtctggtgccgaatggagcgaagggtgtccctgcccgttttgtctctgtcagaccagcgacctcagcgaaggcctcgagtgaagggtggcgtttttgccttcgccccaacaagcctctttttgccttgagccccaaaggccattgtcatggcatcatcttcagccttcgagtaggctccaagcaattcatcactggttgcttcaatggcatctag

SEQ ID NO: 24975 - DNA, 699 bp, Zea mays
  Peptide Sequence Number=SeqID_68350
atgactgtccagaggtcgaatagaatttcagattgcgaactgtacttaaatcaaatacttcactattggtctctagagaggaagctctgccaaccattactaataactgagaagcccaaccaatgtgcctctaagcatattcccaacaggttgaagaagggtcacgagcaaagagggcatttactatccttttcaatcttcaccgttggaagacgctcctttctattggtctactacagcacgaatgtgctactgacaataacccattctaaaaagaacttgagctatgcgcttgcttttggacttagcagacccggttgctccactgttattttggggagattttcaattatactaaatgatgatgcaagtgcctcctactcaaactggtgttctgaaggcttcagaatgactgatggctgtttgaaaaggttcttcgtcaaacactcactgcatctgaatcacattaatgagaaaattggagcatttgttcgatcctcattggaactcaagctcgggggcatcatttcttctagcttctggaagccaaacaagcacaagttcatttgggggggtcaagacagcaagcgtgaggagaaaattgatgagaattcaggcagtaatcctatcgaggtccaaacacacagtctggagagcaaacgtgaagagaaaaatgatgagaatcgacgaatctcctag

SEQ ID NO: 24976 - DNA, 399 bp, Zea mays
  Peptide Sequence Number=SeqID_68351
atggagcgaggtagaaaaaaggtgatgatcaagaaaggtagaaagtggattatagagttaggcaaaggcaagataagcattactttttgcttttcaatggcgaagactgacaacaagtcacgatcaaccaccgagttcggcctcgggcgcaacaggaagcttcgcctcgcccgacctcaggctccggcctcgggaggaagctccgccttgcccgaccttaggctctggcctcgggaggaggtctccgcctcgcccgacccccagactcgacctcggtctcgggaggaatcacgtcctcgcccgaccccggcctcggcctcaagagaagtctccgcctcgcccgaccttgggctcggaccgaccgcgccaacaggggatacatcattaccctatccctag

SEQ ID NO: 24977 - DNA, 147 bp, Zea mays
  Peptide Sequence Number=SeqID_68352
atggcatctcatctctggcacacggcggcggtgcttgtggatcaggtctcctcagacttcaacggtaaccctgaaagggaaagaagaaaaacaaacgaggagaggaagaagcgatttggttccaaaggttcatcaatggcacagtga

SEQ ID NO: 24978 - DNA, 761 bp, Zea mays
  Peptide Sequence Number=SeqID_68353
atggcgccccacatactctgtgacgacggcggctctcagccctcttacggaagcaagaggacacgccgcttggacgcggtccagagcgtctgcactgcgttgtccatcgtcaagcaggaggacctcatggtcgttgtcaacgtcggcgactctcgggttgttgtgggcaccgcatccaacgacgaggagtatcgcatcttgtggtgcaacggccaggtgtactaccttgctgatgagcccgatgtgcacttggtctggcagtccagccaaaagtcatcggtactcgtcatatcgtgcacgttcgacgactactatatcattgactgtgacgtcatctcggcgccgaagccggccgcccgcccgcccgcgttcggcggcgcgcatgcagcatacaccgccccaggcccgatcgatggaggggaggggagcgcccgcgagaaccctaaaaagcctccgctcaacctctatgctggatgggatcagctggacggaggcctggagcgtccagcactccagcctgccacacgcctgggctggggcccacctccccgctataaagcggagccgccgaggctgcttgacgggtcgggctccggctcggatgtccagcgagtgctcggagacatccctcggtatgccgggcatgtccgagggaatccacgcgaatatgtccgcgttcgcacgaagaaagtcgacgagcactgcttcctattggggatcggcccgtggccgacccagatctgcttggaggcgtccccgat

SEQ ID NO: 24979 - DNA, 801 bp, Zea mays
  Peptide Sequence Number=SeqID_68354
atgcatcgcgcccttccacctttcgagcccccggatggggtgcaccagcgtcgctttgctcttgctgtcgttggaggtgcgcggcctcacggagatcggcgctcttcagccatcgctcggcttcaaggattttcgtcgtgcagcccggctgcattccctcaccaatggtcagtttggtggggagaagcaagccgggctgcggcctccgccccgccctcagcttcaaggatcttcatcatccttgctgaggcggaggagcgcaccgagtggggggttgcctccgcgtgggtcggtgatccttttcttcccccaatgtttgcggaagaaaggcatcctccagccctgcggaggcgtcctccagtcatgcgggggaaggcgaactgctgctccctggatagggtgcagctttccgtccttcatccgggcggcggccgtgccgcgcgcgggctagccacgtccagaggtcgctggcgagccgcttggagttcgttatcccgcgggccccctggtgtggaggttgttcatacccgcgggagtggaaccggagtcccgtttaaccctcagctgctctgcgatgagccgaagctggaggcagcggtgttggcgtggacagaggtggagtcggctcgaaaagagacttcgtcggcccgggagcttggccaagacatccgctggcgcggtgctggcgtccttccttgggtggaggtcctttcacccgggtcgccgttcgaggccgggccaggttccgccgagggtggaaacaacgccgagggtgctgctgctccccctatcgatgcctga

SEQ ID NO: 24980 - DNA, 444 bp, Zea mays
  Peptide Sequence Number=SeqID_68355
atggctggctccggcctcaggaggaagctccgcctcgctcgacctcaggctccggcctcgggaggaggtctccgcctcgcccgacccccggactcggcctcgacctcggtctcgggaggaatcgcgtcctcgcccgaccccagcctcggcctcaagagaagtctccgcctcgcccgaccttgggctcggaccgaccgcaccaacaggggatacatcattaccctatccctagccagctcaggctacaaggaacaagatcggcgtcccatctggcttaccccggcgacgggactcaggcgctcctccgacggccacgctatcacgtgtacagggctcaagctctcccccgacagccacgttggcatctcgacaaatggacaccgagatggtcacctcaccaaaaacaaggaagatgatgatgatgaggtggtggatagggattag

SEQ ID NO: 24981 - DNA, 687 bp, Zea mays
  Peptide Sequence Number=SeqID_68356
aaaaaggagatcggaagtcagatggaggttcgttgccaaaccagcttttgccagaatgaagatggtttccccaagttgctgagagcatgcacagttcgcctcggaatcaggagccagccagagtatgatggtcgtgaattcatcgagcatggcacagagaagtgtgtcgtggctgtatacattggatccagtccgcaccatgtggaatggagtgtcactgctgctgggcacagatttaaagacacctgccaagtcgtcgctcgcaaggcattgagggccctgtgtcagatttatgaagaagaagtggccgacaccccgctcagattctttccgccctttcagagaaaccgtcccgcttggatggccatgatgtgtgcattggaagaagatgcagagaagctcaaccgtaagctccatgtggatctcaccacagctcaagcccgtgtagctgccttggaaagtcgtgaagtcattgctgttgaagccctgaagcaagccaaggatgagcatgtccagaagttgatggaggcctacttggtaacccataaccaacatagagccctacggatccaagagcccgctccatccaacccagttcaaccaaggagaactgaagacccccaaattcttgaaggtcacccggtctctaccagaggagaaaagaaggcttgggggaaggagccatag

SEQ ID NO: 24982 - DNA, 522 bp, Zea mays
  Peptide Sequence Number=SeqID_68357
atggcactcggcaaagaaggaaacctgggaaccggcaaagatgtctttgccgagtgccactgccaaggcactcggcaaagggactggcaaaggggcccactggagggttctttgccgagtgccagtccacctgacactcggcaaataaacctcctttgccgagtgtcgccgtgggcactcggcgaaggatctgtcaccgtcacttggcgccgtgacggtgacttttctttgccgagtgccaaatggcactcggcaaagtctttgccgagtgcccgacaaaaagtactcggcaaagatgttgttgccgatgtacagttcgccgagcgttctttgccgagtgttacactcggcaaagcatttgccgagtgtaaaatagcctttgccgtgtgtctcagacacacggcaaagaagctgattccgaccgatcgaaagcgatgcgagaagggttttgaatgcgtggagatgttgcgcttaatgtttggaaggttgggaggggtcttctgtattcaatgtgctggttag

SEQ ID NO: 24983 - DNA, 210 bp, Zea mays
  Peptide Sequence Number=SeqID_68358
atggaccacgcttggctattgccaccacctgcacgccccgcttgtgacgcaagaaaggtggatcacctattcaggccgagagccatcctcgccccaaaatcctcactgcagtcgacgaccacctcccatctacaccaggaccaagaggctcatgctgcagagtcaatttgccgatacaagaagagccaagaagagcagttggatgagtag

SEQ ID NO: 24984 - DNA, 690 bp, Zea mays
  Peptide Sequence Number=SeqID_68359
atggcagctatatattccatagcattcagatataaatatttatggatgtttagtatttgcaccaactcgtgttggtgtctcaccgggggatttaccagaccggaagatggtgaaaacatgaaccatgttggcaaaggaaacgtggatagatggctccatatgctcatggataaccaacaagaagatcatgttgcgtaccattcttcagacgaacacgataatgacgaggagaatgcttcggatgagcagcgaacgcagagccgggttgacgaagagagctgcaggaatgggataactgaatattttgatgagatcgtcgaggtcgaggacgagattgtttctgaccagggagcagaaagagggaggaacagctttggaattaaagacagagaggaaaagaagatttggttccataggactgacagcacctggggtttccggtcactgccatcatcaccctccatgatcctgggaatgagaaaagcaattcaagtggcgttcagcatcaactgctggcagtacgacgcttgtctcctcccccagcgccccgcggaggcgcgagcacagccacgagaaggtgaggcccgagtccctgaggtccagcgccaccgcgctgaagccagcgccgccatgagggagaggagctatgagaagagtaccagcgaccgcgacgacacgaagaaccagtag

SEQ ID NO: 24985 - DNA, 126 bp, Zea mays
  Peptide Sequence Number=SeqID_68360
atggccggctcggccgcccccgcaccctgccccgtgcccgcccggctcggccgcccccgtgcccgcccggcctcggccgcccctggccggttcaaccgccaccctggccggttgtttaaggtgtaa

SEQ ID NO: 24986 - DNA, 435 bp, Zea mays
  Peptide Sequence Number=SeqID_68361
ccgtcgtgccgtcaatggggctcggtgtatgcggctcgctctgccaaggttgatttgtcccttggggaggagtgcggtggttatgagattgatggttttggttatgactatggtgctgccccgggattggtctcgctcatcggcgacctggtcgaactccgaccgctgtcgttgcacctctgcgcgtgccgctgccgcctctgctctcagatcggcgtagagcaaccgaaggtccgccacttcggcgccctgctgggagaggcgcgcagtagccccggcaagcaaggtcctcagggatcgcaacgagccccagatatcgacctcgtggcggatgaacaacgacttggcggcgctcagatccgtcaaatcctgggggaaggaagcggggcgtcaccagagacgacttggtcacaaaaagaagacctccagcgatga

SEQ ID NO: 24987 - DNA, 309 bp, Zea mays
  Peptide Sequence Number=SeqID_68362
atggcgcagagccgaagctatgcgcagaggagcttcggcgtgataacagaaaaggaaaccgacttaaaggggaaaaggctatttagacctcgatggattacaatagagttattagcaaatgtaaagggcatgtttgtccttcataaccttcgtccaagactcattatttcccgagggaggggtaccctcaagtctcctaattctcagcaggtaacccccatcagcataaagctgcaaaggcctgatgggtgcgatttagtcagggatcggtccattcgagggactcgatcacgcctcgcccgagcctag

SEQ ID NO: 24988 - DNA, 1005 bp, Zea mays
  Peptide Sequence Number=SeqID_68363
atgcacatggtggcgtttcacgagcggcaaatggtcgagcgagtcgtcaaccgtctaggtgttgataggtcgatgctcacaacatattttgaggcgaataggctacacgaggaggttcgtggcatcctataccgtgacttccctgagtggtacacttggcagagtgataagggcaaagtatggcaacggagggaacgagatacaggtggacaagtcggtagaatagtctctgctcatctggccaagggggagcgctactatctttgtgttctcctaaaccacgtgactggagcttcctcctatgtggatctaaggatagttgatggtgtcacccaaccgacttttcgtgaggcagtagagagaaggggactgcttgagtcgaacaacacactggatgagtgtctcactaaacgtgctcttttccatatgccattggcgctgcgacggctatttgccacaatactggtgcactttgagccaagcgatgtggctgtactctggcagaaacacaaagattctatgtccaaggactatcaacataggagtcagaacaaaactcatgttgagcagatgagggtcgcctatgataagattatgtctgtcgttgacaccgatcagggcagattgttctttgtggatggacctagtggcaccgtgaaggcttatctatacagagtgctgctcgcgacgctacgcaaccagggcaagattgtagtggcaacagctacatctagcgttgtggcttccataatgcctggaggaagaaccgcccattcacacttcaagataccactcactattgacgatggcgctgtatgtagcttcacgaagcagagtggaacatcagagatgctatggaaagcatctctcattatctgggacgaggcttctatgactaagagacaagccgtggaggcactggacaatagcatgcgcgagataatgggtcaccccggactaccatttggtggtaaaaccattgtctttggtggagatttcagatag

SEQ ID NO: 24989 - DNA, 375 bp, Zea mays
  Peptide Sequence Number=SeqID_68364
atggggaagcctgtcccatcactcctcatgctcctcctcagccgaggcaggatcccactcgactgtccaacccggtggcaagatggacggccaagtcactccagcaaccatgtcgtccaaagaacctgtaaaaatttatgccacaatacaatggatcaagcagtctcattagctgcgagaagcagacgattcaaatcgagtttttatcctttcaaggttatgcataaaccggggcttgccttccaaagctggggcaggcaggtcctctggtgcaggctctggtactggatccggggctacctcctgagcaacaccttgctctggcatgaggacgtactctccgtcagcgaggttgcaatctatcgaatgcaatga

SEQ ID NO: 24990 - DNA, 573 bp, Zea mays
  Peptide Sequence Number=SeqID_68365
atggagttgcagctgcatcacaggtggagatatctaactaagctcaaagtcgtatatcctccacaaggcttctggaggagtcacccaccttgcatctctatactgcttgatctcatcaacatcgtcatctgccttgctcgtaactctcataacaacaaacacacgatcatggcctttgtatatgtacttgaacgggtatttaacagccgtgatgctcccacatgcctcgacattgatgtgacagttgaagagacgaaggaggtatgggttataagggacaacccatctattgtccaggtcgcaccctcagaccttttctttacagtcatcgtcacgacgtctgtaaataggcttcgcatgaaagacacgcactacaagatccagaagatctcacggtgtttgcccagggagaagctccctacttatctcatcctagttagggttacatgtcatgctctcaatctttatgtacgtgtcgaccgcgaactgctggaaaagccattttccatgaagtattggattgaataccccgtgtggcggaactgcccgaattattccaacttaagtgcctaa

SEQ ID NO: 24991 - DNA, 144 bp, Zea mays
  Peptide Sequence Number=SeqID_68366
atggggaagcctgtcccatcactcctcatgctcctcctcagccgagtgcccgcacttgtacccaccataaccggaatgggagaccacgtctcaggtcgcgtgaggggatatgtccactatcaggttcacccagggggttactag

SEQ ID NO: 24992 - DNA, 336 bp, Zea mays
  Peptide Sequence Number=SeqID_68367
atggaggccaacgaggatgtcgacatcgagggaggagaggagcctgcctccagcttggacactgctggctcagggagaccaccttcccccgagtcgaggagagcgcgtcgtggtcagaatgagcgcgttcctccaccaccaccaccacctcctactctgcaggagttgatggctcagcagaacgagatcttgagacagctagctcaacgtcagccaccacctcagcactatggtggtggtgatcatcagcgtcacccccgcggcagccactttatcagggagttcctcagtacccagcccaccatttgtttcaccagggcagaggacccactttga

SEQ ID NO: 24993 - DNA, 1413 bp, Zea mays
  Peptide Sequence Number=SeqID_68368
atgggcgccctcactgacagccggaagcgtctctcggcggaccgctgcctctcggccgaccatcgcctcccctatccctcgttccccccaccgccccttacccctccctccaagcggaccaagctcgccacattccctgaactcgatccctccacctccgccgtcccgcctatccgtccttctccccaaatcatccactccgccgccgcggcatccgcctccttcacgccgggcccttcctcctcttccaccatcgcttccaccccgcttccgcacaggcgccgactcccgccgccgccgccattgccgcgcccgatccacggcccacagcggatcctccgcgtcttccggcttggtggggctgcacggacccacgctgccggccgctcgttgttctccccgtcatcacccctgccttgttctctcggattccagcagtacgtagagctcgtcaacagcgtctcccacccggcgccatccactcccgccgccacaaccgatgctacgaggcaggcggtgcccctcgaggtggtggccatcgaggaggaggaggagggggaggaggaggaggaggacgaggacgagaggaagcagcaggacgaggaggaggtgaggggcagcgtggtagtgagaagggtgccacagtacaaggagctgtacgagaagtcacggaagcgggatgccaagctcaagacgctcgagtttgaggtgcggctcgcccaggtgggccgtcttagccttgagcggcttgctgaggccctcccgcgaattacgccaaagaaggaggaggtgcctgaaccttttgttcctcttactgatgaggatgaagaaatggttcgtcgggctcttcatggcaagaacagtcgtgagaggttagcagtacatgaaccttcaaatattgtgataacaagggagatcttgcaatgcttgaataaccaggaatggctaaatgatgaggttatcaatttgtatcttgatctgcttaaagagagggaactaagagaacctcgcaagttcttaaaatgccatttcttcaacacctttttctacaagaagctggtaaaccccatcagcacaaagctgcgaaggcctgatgggcgtgattcaggccaaggctccgctcaaaggacacgatcccacctcgcccgagcccgacctcgggcaaagacagccgaccctggaagattcacgcctcgcccgaggatcccctcaagcaacggacgcaccgtcgactcgcccgaggcacagctcggcgccgcctgccctgctccgactgccgtgccactcgctagagtgaggtcgacagcggctaagtctagcctcgggcgacataggaagctccgcctcgcccgaccccagggttcgacccccgtctcggcctcggaagatggacttcgcctcgcccgaccctag

SEQ ID NO: 24994 - DNA, 447 bp, Zea mays
  Peptide Sequence Number=SeqID_68369
atgacgcctccccagtacacaatacatcagttcgagaagcaccgagtgccccgctgtagggtgaggatgaccctggagcctcatcccctacagtcaggctggtgttcgctggactctgagtcttttggttacagggctgaggacactatggaggcaattgctcttcacggactgaccaccttctgtggattccaccccttggagctatccactcaccccattggcttgttccccgtggagaaggaggacgacccaaatgtggaaggaccgagtggagcatgccaaggatatctaggctatctacccagagaggaacttgtggttgacttgtccactaagatggtggaaaaggacttacaagtggagcaattgtccaatgagctccaagagcttgaggagttagtgggaaccagggagaacacatcgaggttctcgaggatcagctga

SEQ ID NO: 24995 - DNA, 534 bp, Zea mays
  Peptide Sequence Number=SeqID_68370
atgggcgcgattccggccaaggctccgctcaaaggacacgatcccgcctcgcccgagcctaacctcgggcaaagacagccgaccccggaagattcacgcctcgcccgaggatcccctcaagcaacggacgcaccgtcgactcgcctgaggcaaaactcggcgctgcctgccctgctccgactgccgtgccactcgccagagttaggtcgacagcggctaagtccagcctcgtgcgacataggaagctccgccttgcccgaccccagggttcacctcctgtctcggcctcggaagatggacttcgcctcgcccgaccccagggctcggactcaaccacgacttacaagacgacgaacttcgcctcgcccgaccccagggctcggacttagcctcggctccggaagacaatggacttcgcctcgcccgaccccagggctcggactcaacctcgacctcggaggaatcgccacctcgcccaaactcgggtccagaccgaccacgtcgccaggggggccatcattaccctgcccctag

SEQ ID NO: 24996 - DNA, 150 bp, Zea mays
  Peptide Sequence Number=SeqID_68371
atggcagtcggggccagtgaggcattgtacgccaaggcaataggttctctggaggacatggttgcgggagtgacttggccgtccatcttgccatcgggttggacaatcgagtgggatcctgcctcggctgaggaggagcatgaggagtga

SEQ ID NO: 24997 - DNA, 108 bp, Zea mays
  Peptide Sequence Number=SeqID_68372
atggcggcggcagccgatgacgttgccaacaatgctaggccaagggcgctgttgcagcaccactttgtgcccacgccaggggagtaccaacgacctataggtgtttga

SEQ ID NO: 24998 - DNA, 750 bp, Zea mays
  Peptide Sequence Number=SeqID_68373
atggcctcctggtgcttgttgtggcgctccttgtcttgctggggcattgactgttggcgactgctgagctgctttctttggacagttcttcgcccagtggttttgttctccttaatagaagcatgcacgacctcctacttgcgctggaactgcttggctattctggttgattgctggggcaggaaggcgagctgcctggttattttgacgctggtactgatttcctccctgttggttgctctgacggtactgctgctgctgaggaaactgcctctggtactggtgttgatgctgacgctgatgctggtgaccttgcttgaattgctgggacaggggaccttgcttcagggcgagaaacttctccttcctcactatcatcagtccctcgggcacatggtagcgatagaagttgtccctgaattcttcccaggtgatggcttcagggttggcatgagtggcgaggctaaggtgggggtggctgctgctgcacctgctacattgctgctagggtctgaccaattgcttggactgcttgggtctgcatcaggaacatctgctcaatggtcatcgggggtggcggtggcaactgctgctgagatgcatcttcctggggtgcctactgctcctactgagcacgccttgcacatctgcgcatgttttcagacatctatagaaagcacacacatatcagatctgactctgcagtctttcaacataagaaaagatatacggaaatctccacagcactga

SEQ ID NO: 24999 - DNA, 483 bp, Zea mays
  Peptide Sequence Number=SeqID_68374
atgaccattgagcagatgttcctgatgcagacccaagcagtccaagcaattggtcagaccctagcagcaatggacaacttctatcgctaccatgtgcccgagggactgatgatagtgaggaaggagaagtttctcgccctgaagcaaggtcccctgtctgtcagtgagtacaggaacaagtttatgcagttgtcacgttacgccccagaagatgtcaacacggatgctaagagtagggatgaaaacggggcgggtacccggaacgggtaccggatacgggcaactcaccccagcaattcaagcaaggtcaccagcatcagcgtcagcatcaacaccagtaccagaggcagtttcctcagcagcagcagtaccgtcagagcaaccaacagggaggaaatcagtaccagcgtcaaaataaccaggcagctcgccttcctgccccagcaatcaaccagaatagccaagcagttccagcgcaagtag

SEQ ID NO: 25000 - DNA, 684 bp, Zea mays
  Peptide Sequence Number=SeqID_68375
atgccctttgcaccaccacagggcatccttgcttctggaggagaccctgacggatacggagatgacgacgacaccagtggtagttcgagccacggcacggagctctcagaggagctggagccgaaggggtggatcgctagacccatcactcatgacgctactcgcgggtgtcacttccacgacgctctcgacaccctgctgcgtcaggccttcgaccgacacacttggtccatcgagtaccgttgtgtagtctaccagcatcatcgcgagttatacccggaccagtgggaggctacttgcttggtgcgccgtccggacgatgatctccgaggtgcagaggccttctcagagcactattctattactgagaggcatgctgctgaggcagccatgcaagatgcagcacgacgtgcacttcttagtattgctcgttgttcagcggggctgaacagcatggtcaacctggccgtcgtgctcaacaccgagctggaccacacccttgacgagttgggcaaggttcgggtggaggttgcggaattgcgtgctgagtgcacatcacgccactatctggatggtggttctcccgcccctgtcgggattcagcacccttaccgctcaccgtcccgtggtcgcttcgactatggtaccccagactgtaggacccggatagatttggatccatag

SEQ ID NO: 25001 - DNA, 105 bp, Zea mays
  Peptide Sequence Number=SeqID_68376
atggcggcactggtgccggagtgggctaccaaggagccctgcctcatggggatcgatgaggctggccgtggccctgtcctcgttggccaaagtgaaatgagatga

SEQ ID NO: 25002 - DNA, 426 bp, Zea mays
  Peptide Sequence Number=SeqID_68377
atgccgccgccgccgcaggcgaacggggggaaggtgaccccgaacctggcgatggacgccgaggccacgcgcatgctcaacctcacagtcctccagcgcctcgaccccgccgtcgaggacatcctcatcaccgccgcgcacgtcactctctacgacttcaacatcgacctcaaccagtgggtgagccagcggttctcccctcttctgccccgctctgtgatcccatccgacctcgatctaatgcggggtttgtttttctctctgcttgcgctgtgcagagccgcaaggacgtggaaagggtcgctgttcgtcgtcaagaggaactcccagccgaggttccaattcattgtcatgaacaggcgcaacactggatccatcgcgagtgcactggggacctttgggctatggagtatagatcacgattaa

SEQ ID NO: 25003 - DNA, 609 bp, Zea mays
  Peptide Sequence Number=SeqID_68378
atgcaggcggcatgcaaccgcaccaagggggcgcaccccttcgacttcgacgcgtcccgcatggaggcccaggcccacacgtcatgctggccctcgaaagggatcgacagccgcctcagacgcagagcgagggatgaccctgggtacgttcgatacataaccaaggctcgagctacgctcccgagctcactggagacaccatgttcgacgccctccaagggcaacatggcgcttttccccccttctccttgcggaaaggagacgcaggggccctcggccccggaagacgacgaactccgcctcgcccgaccccagggctcggactcggcctcggccccagaagacgacgaactccgcctcgcccgaccccagggctcggactcggcctcggccccggaagacgacgaactccgcctcgcccgaccccagggctcggactcggcctcggcctcagccgacggtctccgtcttacccgacccaagggctcggactcgacctcgacctcggaagacagactcaacctcgacctcggaggagcctctgccccaccctacccagggctcggaccgaccacgtcacaggaggggccatcattaccctacccctag

SEQ ID NO: 25004 - DNA, 441 bp, Zea mays
  Peptide Sequence Number=SeqID_68379
atggacaagcaaaccaacacatctgacatgctagatttggctgtcgactacatcaaggatctccagatgcaggttaagaactcgaaagcatcttcacttgggatagaaaaaaaatgggaatggaacaatggcatcgtcctcaagcattcaaatgatagggagaaggggttcaaagtagtagatctgagaagggcacttctcaaaatccacacaccaaaaaaatataaacaaatcttccacgcaatggtgagagaacgaagaacacaaacaaccacaatgagcaataacacaagagacacaagatttatcccgaggttcggtcacaccaccaaggtgccctacttcctcgttgaggcgcccacaaagagccgggtctctttcaaccctaatcctccttttgccgaccacaaaggtcaagcccacacaataatctttgcttaa

SEQ ID NO: 25005 - DNA, 489 bp, Zea mays
  Peptide Sequence Number=SeqID_68380
atggttggccggccacctcttctctcctccgacgagctcttcccccttctccctctctactacagggctacgctggccacgccccctacacccgcgcgcggcgcgaccccggggctggccctcatggccggagaccccacgccgccgccgaactcagccgggtctagtcccgccggcgccctgcccgcgtcgcccgtgcctcccccactcgtgccgctgttgagtctggtcgccccggccacgctggcgctcgtcccgcgcccccctacgccaccggcaccaacctcgcccgtgccgccgccaggtccggtcagcgctggcctcgccgacgtccgccccacgctggtctcccttcctctagacgcgtcccagacagtcgtgctcagccccgacgacgccctgccgctgccccggttttcccagtggcgccattggacgacgtctacagaatcctcctgcaacgcctgccgtggccgtccgccacggtag

SEQ ID NO: 25006 - DNA, 570 bp, Zea mays
  Peptide Sequence Number=SeqID_68381
atgaccgatgagagcctcgtgctcaacctcctacgtggtctgagtcctcgcttcgatcgcgtggcgcccatcctcacccgcatgaagccgtttcccacctttgcggaggccaagaacgacttgcttctcgaggagtttcgcctctccaccactgcaaccaccgctcccgccacggcgctctacggcgcacctcgggctaccccctccgactccgggaggttcctcttcacagcactccagccccaccgccctctggagctctgcgacaggcttctggctttgggggggctcgcggccacgatcacaagggcgaacgcagtggcggtggactgtcgggcagccgtggtggcttttcagcctcaacaaggtcttctaccgctctcggggtctccgacccagcccatgtgggggccctggactaatgggtgggacactcagtccctcaccagctccttctccatgatgacgttggccccacccacctcggtctctaactgggtggcggattctggcgcctccaaccacaccaacccggacgcagccaccccgggcgtgattgagagcacctag

SEQ ID NO: 25007 - DNA, 129 bp, Zea mays
  Peptide Sequence Number=SeqID_68382
atgggggcgcatggttacgaagcagcatatctcgtgaagatgaaggatgaaaaagcatccaaggctacccattattctgtaccagagtccaaagagatgaggatgagctggaccaatttttcagattaa

SEQ ID NO: 25008 - DNA, 561 bp, Zea mays
  Peptide Sequence Number=SeqID_68383
atgccgccatccccgagcccaatgtcgtcgtccccgagcccaatgtcgtcgtccccgagcccaacgcttcttcgtggggtgcacggcgcacgagctatgagcgcccgccacgccatcgctgagcccaagcccaagcgccgcagtctccgagctgggcgcccgccacgccgccgtccccgagcccaacgccgccgcgcaccgccaccacctcctcctccagagatggaaaaagagccacttgacatggttgagagctcagttcgagtcatcgagacacatgtcgacatcattcgcagtctagtgactgatggggttgtggatactagtgaaccggaatcagtgtacacacttaagacaactttgttccaaattggagatgtatgcgacatgcttgagaagtgtgctctatccatcaaaaagtatgctgactccaagagggctaaaattattcaagatgaagccctgcaatatgctgaagatgatgaagctgcagatgatttggaggaactcccaagcccagatctccttactcaagccgacatattggaaaaaatattttag

SEQ ID NO: 25009 - DNA, 378 bp, Zea mays
  Peptide Sequence Number=SeqID_68384
atgccaaatcagcgtgaacagtacggggatactgttcacctatttataggcatgggtcacagcccacattgtaatctcgctgacggagagtacatcctcgttccggagcaaggagttgctcaggaggtagtccaggagccagcaccagagcctgccatcgaggatctgcctgccccagctttggaaggcaagccccgttatggtgggtacaagtgcggtcactacaagacagcattcggggtcagtgaggcattgtacgccaaggcgctaggttctctggaggatatggttgctagagtgacttggctgtccatcttgctactgggttggatagtcgagtgggaccctacctcagcaggggaggagcatgaggagtga

SEQ ID NO: 25010 - DNA, 393 bp, Zea mays
  Peptide Sequence Number=SeqID_68385
atgcgcaatctctgctataatcgcgccgccggcgaggactatttccgcacgggattgaccccaaggtgcagcagcgatctccgccatccacgcgtcggcctggagcaaaaccgtggtgcagtcaatggttctggaacatggacccacgcagcggcgcagtcacttgtccgagctggggaagaaggcgcggcaagaatctcgcgatttgtttggcgcccgtggaaccatagcagactacgggaggaagaagaagaccccatggtgccaggcccacctggcggcgggagtaatccaaacgctggagtgcctagccacaacgccgaccagtgggtcacccgagtcagtctcgcaagcaagggcctggatacggcgcaaccacagaggagtggctga

SEQ ID NO: 25011 - DNA, 234 bp, Zea mays
  Peptide Sequence Number=SeqID_68386
atgggcgcgctgcacgtggagctctgcctgtgcctgggcgttgggcactggctgctggttgctggtcgcctgggcactggctgctggccgcctggcgctgtgcctgggtgctggcagctgctggaggctggagcctggatgctggagggtggcagcgctgtgcggatggacggatggaaatatggaatgatggatgacctagccttcactgcattattgggcctaattaactaa

SEQ ID NO: 25012 - DNA, 561 bp, Zea mays
  Peptide Sequence Number=SeqID_68387
atgccccaaataaacataattgacagctggcacctagctggatcaaacatcaaagaacgggtgaaagaaattaagaaactcggcggcggacgctgctacctgctggtgcctggacgcctggtgcttggtggagtggtggacggctgtcctgtcctgtccccgctgcccgttggccgctcgactagaccgccagagtgcggcgtactgcccagccgctcagcccaggtgtggagcataaggacgatggtccacgtcaaatgtgaaggtcatgcagttctaacgggaataagagacagcacatggtgtcatcgcaaaggatacgtcgaggcggagcaacttcgtgtggagcgtgtggccccaattgtgaacaagatgcacacaaacatggtgcaactaccctatcttgatcatgagagagtgcacaagctacttcatgctctagatcaaagggattgggaggtgaaagtcttaatgataatcgagttgtccaactatgagactctgatcgtgcatgagctgttcagcaagctcaagtccaatgatattaaccaccatacctag

SEQ ID NO: 25013 - DNA, 480 bp, Zea mays
  Peptide Sequence Number=SeqID_68388
atggccataatctcaaagatttggagccaatccgtgcttgaacacgacatctctctacgctgcctcgtgctcgacgctgtgccagacgccagagcgcgcattggtgctcgcccgcgcactccccgagcacttgttagagcctcccctcggtcgtgcttgcccgcgcatttaaaaccacccccttggcgcgcctcacctcaccccgtgctcaccctcgctggccagacgcccctccttagctccggcgagctttcctctgcccgccatcaccgcccgagcctcggccactgtggccagctcactccagccgcgtccaagccgcgcctgcccctcgattgcaatctcgctgatggagagtacatgctcatccctgagcaaggagctgtctacgaggaagaccaggagcaagctcccgagactgccatcgaggatctccccgcagccccagctattgaaggcaagccccggttttatgcataa

SEQ ID NO: 25014 - DNA, 240 bp, Zea mays
  Peptide Sequence Number=SeqID_68389
atggccggaaggagggatggccgcgtggcagccggagctagtgccctccaccgcggcggtcttatccggagcaaagaggtcttcgcggggagatgcttgccgcccgatcacctcgaccccggcgcaaatcgcggcacggataggtcgtcggcgtcatctgacagccaggatttagggcagatttactccggattttcaatggcaaccagtggatcagctaatgacaaagttgttgtctga
